United States Patent Application Publication US 2018/0126003 A1 - sequence listing, part 160

SEQ ID NO: 280648 - DNA, 5475 bp, Artificial Sequence
  derived and/or modified sequence
atgagcgcgggtgggcgggatgaagagagacggaaactggctgacatcatccaccattggaatgcaaatagactagatctgtttgagattagtcagccaactgaggacctggagtttcacggggtgatgagattctatttccaggataaggcagctggaaactttgcaaccaaatgcattagggtgtcgtcaaccgcaaccacacaggatgtgatcgagacactggccgaaaaattcagacctgatatgagaatgctttcatcacctaagtattccctatacgaagtgcacgtgagcggagagcggcggctggatatagatgaaaagcctttggtagtgcagctgaactggaacaaagacgaccgcgagggacgcttcgtgctgaaaaacgaaaacgatgccatccccccgaaaaaggctcagtccaatggaccagagaagcaagagaaagaaggagtgatccagaattttaagaggaccctgtccaagaaagagaagaaggaaaaaaagaagcgcgagaaggaggccctccgacaagcatcggacaaagatgatcgaccattccagggcgaagatgttgagaacagtcgcctagccgctgaggtatataaggacatgccggagacctcttttacacgaacgatcagcaacccagaggtcgtgatgaagagacgtcggcagcagaagctggaaaagcggatgcaagagtttagatcatcggatggcaggcctgactcagggggaaccctgcgtatttatgcagattcactgaagccaaacatcccatacaagacaatcttattgagcactacagaccccgccgactttgcggtggccgaagctctcgaaaaatatggcctggagaaggaaaacccgaaggattactgcattgctcgagttatgctgccacccggcgcacagcacagcgacgaaaagggggcgaaggaaattattctagatgatgacgaatgtccgctgcaaatcttcagggagtggcctagcgataaagggatacttgtttttcagctgaaaagacggcctcctgatcacattccaaagaagacaaaaaaacatctggagggaaagacccccaaagggaaggaacgggccgatggttctggctacgggtctactctcccccctgagaagctcccgtacctggtcgaactgtctccaggccgtcgaaatcactttgcatactacaactatcacacttatgaagatgggtccgacagtcgcgataagcccaagttatacaggcttcagctctccgtgacggaagtcggaacggagaagctggacgacaattcgattcaacttttcggcccaggcatccagcctcatcactgcgatctgactaatatggatggagtggttacagttacgccaagatctatggatgctgagacctacgttgagggccaacggatttccgagactacaatgctgcagagcggcatgaaagtccaattcggggctagccacgtattcaagttcgtggatcccagccaggaccatgcacttgccaagcggagtgtagacggaggacttatggtgaaggggccaagacacaagcccggaatcgtccaggagaccacttttgatcttggaggcgacatacacagcggcacggccttgcctacaagcaaatcaaccacccggctggatagcgacagagtgtcatctgctagctctacagcggagagaggaatggtgaagccaatgatccgcgtggagcagcagcccgactaccgacgtcaagagagcaggactcaggatgcttcgggacctgagctaatactccctgcctcaatcgaatttagggagtccagcgaagactcattcctatccgcgatcatcaactataccaactcgtctacagtgcactttaagctgtctcctacatacgtgctctacatggcctgtcgctatgtgcttagtaatcagtaccgacccgacatctctcctaccgaacgtacccacaaggtgatagcagtggtgaacaagatggtttcgatgatggaaggagtaatccagaagcagaagaatattgctggcgccctagccttttggatggccaacgcttctgagttactcaacttcatcaaacaggaccgagatctgagccggatcactctggatgcccaggacgtgcttgctcatctcgtacagatggctttcaagtacttggtgcattgtctgcagtcagagctcaacaattatatgccagcctttcttgatgatccagaagagaattcccttcaacggcccaagatagatgacgtccttcacacactgaccggggcaatgtctctgttgcggcggtgcagggtgaacgcagccctgactatccagcttttttcccaactgtttcattttattaacatgtggctgtttaatagactcgtgaccgacccagattccgggctttgctcccattactggggcgccattatccgccagcagctcgggcatattgaggcctgggccgagaaacagggacttgagttagccgccgactgccaccttagccggatagtgcaggctacaacactgctaacgatggacaagtatgcacctgacgatattcccaacatcaatagcacctgttttaagctcaatagccttcaactgcaggcgcttctccagaattaccactgtgcccctgacgaaccctttattcccaccgacctgattgaaaacgtggtgactgtggccgaaaacacggctgacgaactggcacgctcagacggtagggaagtacaacttgaggaggatccagatctgcagctcccgtttctcctgcctgaagatggttattcatgtgatgtggtgcgaaatatccctaatgggctccaggagtttctagatcctctgtgccagagaggtttttgtaggttgattccgcacaccagatcccctggcacgtggacaatctattttgagggggcagactacgagtctcacttattaagggagaacactgagctggcaattcccctgcgtaaagagccggagataataacggtgaccctgaaaaaacagaatggcatggggttgtctattgtggccgctaagggggccgggcaggacaagctaggaatctacgtcaaaagcgtcgtgaaaggtggagctgctgacgtggacggcagattagcggccggggatcagttactctctgtggacgggaggtccctcgtcgggttaagtcaggagagggccgcggaactcatgacacggactagcagcgtggtaacgctggaagtggcaaaacaaggtgctatctaccatggtctggcaacgttgctcaaccagccaagtcccatgatgcagcggatctccgatagacgtggctctggcaagccccgtcccaagtcagaggggttcgagctatataataattccacacagaatggctctcccgaatctcctcagttgccatgggccgagtactcggaaccgaagaagttgccaggtgacgatcgtctgatgaaaaatcgggcagatcatcgctcaagccctaacgtcgctaatcagcctccgagccctggagggaaaagcgcctatgcatccggcacgacagcaaaaattacctcagtgtccaccgggaatctttgcaccgaagagcagacccccccgccccgcccagaggcgtatcctatcccgacccagacgtatacccgtgaatattttacatttcctgcgagcaagtcacaagatcgcatggcccctccacagaaccagtggcccaattatgaggagaagccgcatatgcatacagattcaaaccactctagtatagccattcagcgcgtcacccgctcccaggaggagctgcgcgaagataaagcatatcagctggaacggcataggatcgaggctgcgatggaccggaagtctgacagtgatatgtggattaatcagtcaagttctttagactctagtacgagctctcaggagcatctaaatcatagcagtaagtctgtgacccctgcttcgacccttactaaatcgggtcccggccggtggaaaactcctgctgccattcctgcaacccccgtagccgtctctcaaccgatccgaacagatctgcctcctccgcctcccccccctccagtgcactatgccggcgacttcgacggtatgtccatggacctgccgttaccaccaccgccatccgctaaccaaattggacttccctccgctcaagtcgcagccgccgaacgccgcaaaagagaggagcaccagagatggtacgagaaggagaaagcgaggctggaggaggagagggagagaaagagacgagaacaggaacggaagttgggccaaatgcgtactcagagccttaatccagcccctttctctcccctcaccgcacagcaaatgaaacctgaaaagcccagcacgctgcagagacctcaggagacagtgatacgtgagcttcagcctcagcagcagccccgtacaattgagcgccgggacctgcaatacattaccgtgtctaaggaggagttgagtagcggagattccctgagcccggacccctggaaacgggacgccaaagagaagctggagaaacagcagcagatgcacattgtggacatgctgagcaaagagatccaggaactacagagcaagcctgaccggagtgcagaggaatcagatcgccttcgtaaactcatgctggagtggcaattccaaaagcgattgcaagaatctaagcaaaaagacgaagatgatgaggaagaagaggatgacgatgtcgacactatgctcatcatgcagaggctggaggccgagcgcagggctcgcttgcaggatgaagaacggaggcgccagcagcagttagaggaaatgagaaagcgggaggctgaagatcgtgcccggcaggaagaggagcgtagaaggcaagaagaggagcgcaccaaaagggatgctgaggaaaagcgacggcaggaagaaggctactacagccgtcttgaggcagagcggaggcggcagcacgacgaggcggccaggaggctcctcgaacccgaggcaccaggcttgtgtagacccccattgccaagagactatgaacctccttctccctcgcctgcccccggcgcacctcctcctcctcctcagcggaacgcttcttatctgaaaacgcaggttctcagtcctgattctctatttacagccaagttcgtggcctataatgaggaggaagaggaggaggactgtagcctagccggcccaaattcgtaccccgggtcaaccggcgcggcagtgggtgctcacgacgcatgcagagatgcaaaagagaaacgtagcaaatcacaagacgcagacagtcccggctcaagtggggctcctgagaatctaactttcaaggagcggcagcgcctgttctctcaggggcaggatgtctccaataaagttaaggcatcccgtaaactgacggagttggagaacgagctgaatactaagtag

SEQ ID NO: 280649 - DNA, 5475 bp, Artificial Sequence
  derived and/or modified sequence
atgtccgcaggcggcagagacgaggaacggagaaagctggctgacatcatacaccattggaatgcgaataggctggatttattcgagatcagtcagcccacagaagatcttgaattccatggcgtcatgagattttactttcaagacaaggccgctgggaacttcgctaccaagtgcatccgtgtttctagcaccgctaccacacaagatgtcatcgagacactggctgagaagttcagaccagatatgagaatgctgtcctcccccaaatacagtctgtacgaagtgcacgtcagcggagagagaagactcgatattgacgaaaagccattggttgtgcagttgaactggaataaagatgaccgggaggggcgcttcgtgctcaagaacgaaaacgacgcaatacctcctaaaaaggctcagtccaacggccccgaaaagcaagaaaaggaaggcgtgatccagaattttaagcggacattgtccaaaaaggaaaaaaaagagaagaaaaagagggaaaaggaggctctgaggcaggctagtgacaaagacgataggccctttcaaggcgaggacgtcgaaaacagtcgcttggcagctgaggtgtataaagatatgcccgagacctcattcactcgcaccatcagtaacccagaggtcgtgatgaaacgccgtcgtcagcaaaagctagagaagcgcatgcaggaatttcgttcctcggatggcaggcctgactccggaggaacactgaggatttacgccgactccctaaagcccaacattccctataaaactatcctgctgagcaccactgatccggccgattttgcggtcgctgaagctctggaaaaatatggtctcgagaaggaaaaccccaaggactactgcatcgctcgagtgatgctgccacctggggcccagcactctgatgaaaagggcgccaaggaaataattttagatgatgacgagtgtcccttacaaatatttagggagtggccatccgacaaaggcattctagttttccaactcaaaaggcgacctccggaccacatcccaaagaaaacaaaaaagcacctggaagggaagacacctaaaggaaaggaaagagccgatggctctggctatggcagcacactgccccccgaaaagttgccatacctcgtggagctgtcaccgggtaggagaaaccatttcgcatactataactaccacacatacgaggacgggagcgattcgagagataaacctaaactgtataggctccagctaagtgttacagaagtcggtaccgagaagcttgacgataattctatacagctttttggacccggcatccaacctcaccactgcgatttaacgaatatggacggcgtagtcaccgttacccctcgctctatggatgccgagacatacgtcgagggccagaggatctcagagacaacaatgctccagagcgggatgaaggtccagttcggagcaagtcatgtttttaaattcgttgacccttcacaggaccatgctttggcgaagaggtccgtggatggcgggttgatggtgaaaggtcccagacacaaacctggtattgtacaggaaactactttcgacttaggaggcgatattcatagcggtactgcactgcccacttccaaaagcacaaccagattagatagcgaccgggtgtcatccgcatcgtcaaccgctgaaagggggatggtgaagccgatgatcagagtcgagcagcaaccagattacaggcgacaggagtctaggacgcaggatgccagtgggcctgagctaatccttccagcctccatcgagttccgagaatcctctgaggacagcttcttgtctgccatcatcaactatacaaattcctccactgttcacttcaagttgagtccgacctatgtcctgtatatggcttgcaggtatgtgctgagtaatcagtatcggccggatatctctccaactgaacggacacataaagttattgcggtggttaataaaatggtgtctatgatggagggggtaatccaaaagcaaaagaatatcgctggtgcactggctttttggatggccaacgcctccgagctactcaatttcattaaacaggatagggatctgagccgcatcacactcgatgctcaggatgtactggcccatctcgttcagatggctttcaagtaccttgtgcattgcttacaatccgaacttaacaattacatgccggccttcctcgacgacccggaggaaaatagtctccaaaggcctaagattgacgacgtactgcacacacttacaggcgccatgtcacttctaagaaggtgtagagtcaacgctgcgctgacgatccagctattttcccagttgttccatttcataaacatgtggttatttaacagactggtgacagaccccgatagcgggctgtgcagtcactactggggtgcaattattagacagcagctgggacacatagaggcctgggctgaaaaacaaggcctcgagcttgccgcagactgtcacttaagccgaattgtacaagccacaacactgcttacaatggataaatatgcccctgacgatatccctaatataaacagcacctgcttcaaacttaattctcttcaactccaagcactgctccaaaattatcattgtgccccagacgagcccttcattcccacagatttaattgaaaacgtggtgaccgttgcagaaaacactgccgatgagttagcacgaagtgatggacgggaagtgcagcttgaggaagatcctgatttacagctcccttttctgctgccagaggatggatattcatgcgacgtggtgcgcaatattcctaacggattgcaagaatttcttgatccactatgccagagaggattctgtcgactgatcccacacaccaggtcacctggaacctggaccatttacttcgagggcgccgactatgagtcacatctcttacgtgaaaatactgaactcgcccaacccctgcggaaagagcccgagattatcactgtgactctgaaaaagcagaatggtatgggattgagcatcgttgctgccaagggcgccggacaggacaaactgggtatctacgtgaaatccgtagttaaggggggagccgcagacgttgacggaaggctcgccgcaggcgatcagctgctatctgtggatggcaggagcctggtcggcctgtcacaggagcgcgccgcggagctaatgactagaacatcttccgtcgttactctcgaagtggcaaagcagggcgccatctaccatggtctcgccacattgctgaatcagcctagcccgatgatgcaaagaattagcgataggagaggctctggaaagccaagaccgaaatcagaggggttcgagctttacaacaacagtacccaaaatggttcacccgagtcccctcagctcccatgggcggagtactcggaaccaaagaagcttcctggcgacgaccgtttgatgaaaaacagggccgatcacaggagtagccccaatgttgccaaccagccacccagccccgggggaaaatccgcctacgcaagcggtacaacagcaaaaatcacctccgtgtctaccgggaacctctgtacagaggagcagactccacctccacgtccagaggcatatcccatacccactcagacttacactagggagtactttacgtttcctgcgagtaagagccaggacaggatggcccctccgcagaatcagtggccgaactacgaggagaaacctcacatgcataccgattcaaaccactcctctatcgctatccagcgggttaccaggtctcaggaggagctgcgcgaggataaggcctatcagctggaacgtcaccgcatcgaagcagccatggaccgcaaatcggacagcgacatgtggatcaatcagtcctcgtcccttgattcttctacaagttctcaggagcacctgaaccactctagcaaaagtgtgacccctgcttcaactctgacaaaaagtggccctggccggtggaagacccccgctgctattcccgccactcccgttgctgtgtcccagcccatcagaactgatctcccaccccctccgccaccaccacctgtccactatgccggtgatttcgacggcatgtctatggatcttcctctgcctcctccaccctccgctaaccaaatcggactgccctctgctcaggttgcggcagctgaaagaagaaagagagaagaacaccagcgatggtacgagaaagaaaaggctaggttagaggaagagcgggagcgtaagaggcgagaacaggagcggaaactggggcagatgcggacccagagcttaaatccagctcctttctcaccgctgaccgcacaacagatgaagccggaaaaaccttctacgcttcagagaccccaggaaacagtgatccgggaactgcagccccagcaacagcctagaacaatagaaaggcgggacctgcagtacattactgtctccaaggaggaactgtcttccggtgattctttgtctcctgatccttggaagagagacgcaaaagagaaattggagaaacaacagcagatgcacatcgtggacatgttgagtaaagagatccaggagttgcaatcaaagccagaccgcagtgctgaggaaagtgacagactgcgcaaactcatgctggaatggcagtttcagaagcgcctccaggagtcgaagcagaaagacgaggacgatgaggaagaggaagacgacgacgtggacaccatgttgattatgcagagattggaagctgaacgcagagctagactgcaagacgaagagaggaggaggcagcagcaactcgaagagatgcgaaaaagagaagcagaagaccgcgcgagacaggaagaggagaggaggcgacaagaggaagaacggacaaaacgcgatgccgaagaaaagagacgccaagaagaaggctattattctaggctcgaggcagagcggcggaggcagcacgacgaagccgcgcggaggctgcttgagcccgaggcacccggcctttgtcgacctccgctgcccagggattacgaacccccctcgccttctcctgctccaggcgcgcctcctcctccaccgcagagaaacgcctcttacctgaaaacacaggtattatcacctgacagcttgtttacggccaagtttgtggcgtataacgaggaagaagaagaagaggattgctccctggccggaccaaactcctatcctgggtccacaggcgctgctgtaggggcccatgatgcctgccgagatgctaaagagaaaaggagtaaatcgcaggacgccgattccccaggatcgtcgggcgcacctgaaaatcttacgttcaaggagaggcagcggctcttttcacagggccaggatgtctccaataaagtgaaggccagccgcaaacttaccgagctcgaaaatgaattgaatactaagtag

SEQ ID NO: 280650 - DNA, 5475 bp, Artificial Sequence
  derived and/or modified sequence
atgtctgctgggggcagagatgaggagaggaggaagctggccgacatcatccaccactggaatgccaaccggctggacctgtttgagatcagccagcccacagaggacctggagttccacggcgtgatgaggttctacttccaggacaaggccgccggcaactttgccaccaagtgcatccgggtgagcagcacagccaccacccaggacgtcatcgagaccctggccgagaagttccggccagacatgaggatgctgagcagccccaagtacagcctgtatgaggtgcacgtgtctggagagcggcggctggacattgatgagaagcccctggtggtgcagctgaactggaacaaggatgaccgggagggccgctttgtgctgaagaatgaaaatgatgccatcccccccaagaaggcccagagcaatggacctgagaagcaggagaaggagggcgtcatccagaacttcaagaggaccctgagcaagaaggagaagaaggagaagaagaagcgggagaaggaggccctgcggcaggccagtgacaaggatgaccggcccttccagggagaagatgtggagaacagccggctggccgctgaggtgtacaaggacatgcctgagaccagcttcaccaggaccatcagcaaccctgaggtggtgatgaagagaagacggcagcagaagctggagaagaggatgcaggagttccgcagcagtgatggccgcccagacagcggcggcaccctgcgcatctatgctgacagcctgaagcccaacatcccctacaagaccatcctgctgagcaccacagatcctgctgactttgctgtggccgaggccctggagaagtatggcctggagaaggagaaccccaaggactactgcatcgcccgggtgatgctgcccccaggggcccagcacagtgatgagaagggggccaaggagatcatcctggatgatgatgaatgtcccctgcagatcttccgggagtggcccagcgacaagggcatcctggtgttccagctgaagagaagacctccagaccacatccccaagaagaccaagaagcacctggagggcaagacccccaagggcaaggagcgggcagatggcagcggctacggcagcaccctgcccccagagaagctgccctacctggtggagctgagccctggaagaagaaaccactttgcctactacaactaccacacctatgaagatggcagtgacagccgggacaagcccaagctgtaccgcctgcagctgtctgtgacagaggtgggcacagagaagctggatgacaacagcatccagctgtttggacctggcatccagccccaccactgtgacctgaccaacatggatggagtggtgacagtgacccccaggtccatggatgctgagacctacgtggagggccagaggatcagcgagaccaccatgctgcagagcggcatgaaggtgcagtttggagccagccacgtgttcaagtttgtggaccccagccaggaccacgccctggccaagaggtctgtggatggcggcctgatggtgaagggccccaggcacaagccaggcatcgtgcaggagaccacctttgacctgggcggggacatccacagcggcacagccctgcccaccagcaagagcaccacccggctggacagcgacagagtgagcagcgccagcagcacagctgagcggggcatggtgaagcccatgatccgggtggagcagcagcctgactaccgccggcaggagagcaggacccaggatgccagcggccctgagctgatcctgcctgccagcattgagttccgggagagcagcgaggacagcttcctgagcgccatcatcaactacaccaacagcagcacagtgcacttcaagctgagccccacctacgtgctgtacatggcctgccgctacgtgctgagcaaccagtacagaccagacatcagccccacagagaggacccacaaggtgattgctgtggtgaacaagatggtgtccatgatggagggcgtcatccagaagcagaagaacattgctggggccctggccttctggatggccaatgccagcgagctgctgaacttcatcaagcaggaccgggacctgagccgcatcaccctggatgcccaggatgtgctggcccacctggtgcagatggccttcaagtacctggtgcactgcctgcagagcgagctgaacaactacatgcctgccttcctggatgatcctgaggagaacagcctgcagaggcccaagattgatgatgtgctgcacaccctgactggagccatgagcctgctgcggcgctgccgggtgaatgctgccctgaccatccagctgttcagccagctgttccacttcatcaacatgtggctgttcaaccggctggtgacagatcctgacagcggcctgtgcagccactactggggcgccatcatccggcagcagctgggccacatcgaggcctgggccgagaagcagggcctggagctggccgctgactgccacctgagccgcatcgtgcaggccaccaccctgctgaccatggacaagtatgccccagatgacatccccaacatcaacagcacctgcttcaagctgaacagcctgcagctgcaggccctgctgcagaactaccactgtgccccagatgagcccttcatccccacagacctgattgaaaatgtggtgacagtggctgaaaatacagcagatgagctggcccggagtgatggccgggaggtgcagctggaggaggaccctgacctgcagctgcccttcctgctgcctgaagatggctacagctgtgatgtggtgaggaacatccccaacggcctgcaggagttcctggaccccctgtgccagaggggcttctgccgcctcatcccccacaccaggagccctggcacctggaccatctactttgaaggagctgactatgagagccacctgctgagagaaaatacagagctggccatccccctgaggaaggagcctgagatcatcaccgtgaccctgaagaagcagaatggcatgggcctgagcatcgtggccgccaagggggccggccaggacaagctgggcatctacgtgaagtctgtggtgaagggcggcgctgctgatgtggatggccgcctggccgccggggaccagctgctgtctgtggatggccgcagcctggtgggcctgagccaggagagagctgctgagctgatgaccaggaccagctctgtggtgaccctggaggtggccaagcagggcgccatctaccacggcctggccaccctgctgaaccagcccagccccatgatgcagaggatcagtgaccggcggggcagcggcaagccccggcccaagtctgagggctttgagctgtacaacaacagcacccagaatggcagccctgagagcccccagctgccctgggccgagtacagcgagcccaagaagctgcctggagatgaccggctgatgaagaacagagctgaccacaggagcagccccaacgtggccaaccagccccccagccctgggggcaagagcgcctatgccagcggcaccacagccaagatcacctctgtgtccacaggcaacctgtgcacagaggagcagaccccaccacccaggcctgaggcctaccccatccccacccagacctacacccgggagtacttcaccttccctgccagcaagagccaggacaggatggccccaccccagaaccagtggcccaactatgaggagaagccccacatgcacacagacagcaaccacagcagcatcgccatccagagggtgaccaggagccaggaggagctgcgggaggacaaggcctaccagctggagcggcaccgcatcgaggccgccatggacaggaagagtgacagcgacatgtggatcaaccagagcagcagcctggacagcagcaccagcagccaggagcacctgaaccacagcagcaagtctgtgaccccagccagcaccctgaccaagagcggccctggccgctggaagaccccagctgccatcccagccacccctgtggccgtgtcccagcccatcagaacagacctgcccccacctcctcctcctcctcctgtgcactacgccggggactttgatggcatgtccatggacctgcccctgcccccacctccttctgccaaccagatcggcctgcccagcgcccaggtggccgctgctgagaggaggaagcgggaggagcaccagcgctggtatgagaaggagaaggcccggctggaggaggagcgggagaggaagaggcgggagcaggagaggaagctgggccagatgaggacccagagcctgaacccagcccccttcagccccctgacagcccagcagatgaagccagagaagcccagcaccctgcagaggccccaggagaccgtcatccgggagctgcagccccagcagcagcccaggaccatcgagcggcgggacctgcagtacatcaccgtgtccaaggaggagctgagcagcggggacagcctgagcccagacccctggaagagagatgccaaggagaagctggagaagcagcagcagatgcacatcgtggacatgctgagcaaggagatccaggagctgcagagcaagccagacagatctgctgaggagagtgaccggctgaggaagctgatgctggagtggcagttccagaagaggctgcaggagagcaagcagaaggatgaagatgatgaggaggaggaggatgatgatgtggacaccatgctgatcatgcagaggctggaggccgagcggcgggcccggctgcaggatgaggagcggcggcggcagcagcagctggaggagatgaggaagcgggaggctgaagatcgggcccggcaggaggaggagcggcggcggcaggaggaggagaggaccaagagagatgctgaggagaagaggcggcaggaggagggctactacagccggctggaggccgagcggcggcggcagcatgatgaagctgcccggcggctgctggagcctgaggcccctggcctgtgccggccccccctgccccgggactatgagccccccagccccagccctgcccctggggcccctcctcctccaccccagagaaatgccagctacctgaagacccaggtgctgagcccagacagcctcttcaccgccaagtttgtggcctacaatgaggaggaggaggaggaggactgcagcctggccggccccaacagctacccaggcagcactggagctgctgtgggcgcccatgatgcctgcagagatgccaaggagaagaggagcaagagccaggatgctgacagccctggcagcagcggggcccctgagaacctgaccttcaaggagcggcagaggctcttcagccagggccaggatgtgagcaacaaggtgaaggccagcaggaagctgacagagctggagaatgagctgaacaccaagtag

SEQ ID NO: 280651 - DNA, 5475 bp, Artificial Sequence
  derived and/or modified sequence
atgtctgctgggggcagagatgaggagaggaggaagctggccgacatcatccaccactggaatgccaaccggctggacctgtttgagatcagccagcccacagaggacctggagttccacggcgtgatgaggttctacttccaggacaaggccgccggcaactttgccaccaagtgcatccgggtgagcagcacagccaccacccaggacgtcatcgagaccctggccgagaagttccggccagacatgaggatgctgagcagccccaagtacagcctgtatgaggtgcacgtgtctggagagcggcggctggacattgatgagaagcccctggtggtgcagctgaactggaacaaggatgaccgggagggccgctttgtgctgaagaatgaaaatgatgccatcccccccaagaaggcccagagcaatggacctgagaagcaggagaaggagggcgtcatccagaacttcaagaggaccctgagcaagaaggagaagaaggagaagaagaagcgggagaaggaggccctgcggcaggccagtgacaaggatgaccggcccttccagggagaagatgtggagaacagccggctggccgctgaggtgtacaaggacatgcctgagaccagcttcaccaggaccatcagcaaccctgaggtggtgatgaagagaagacggcagcagaagctggagaagaggatgcaggagttccgcagcagtgatggccgcccagacagcggcggcaccctgcgcatctatgctgacagcctgaagcccaacatcccctacaagaccatcctgctgagcaccacagatcctgctgactttgctgtggccgaggccctggagaagtatggcctggagaaggagaaccccaaggactactgcatcgcccgggtgatgctgcccccaggggcccagcacagtgatgagaagggggccaaggagatcatcctggatgatgatgaatgtcccctgcagatcttccgggagtggcccagcgacaagggcatcctggtgttccagctgaagagaagacctccagaccacatccccaagaagaccaagaagcacctggagggcaagacccccaagggcaaggagcgggcagatggcagcggctacggcagcaccctgcccccagagaagctgccctacctggtggagctgagccctggaagaagaaaccactttgcctactacaactaccacacctatgaagatggcagtgacagccgggacaagcccaagctgtaccgcctgcagctgtctgtgacagaggtgggcacagagaagctggatgacaacagcatccagctgtttggacctggcatccagccccaccactgtgacctgaccaacatggatggagtggtgacagtgacccccaggtccatggatgctgagacctacgtggagggccagaggatcagcgagaccaccatgctgcagagcggcatgaaggtgcagtttggagccagccacgtgttcaagtttgtggaccccagccaggaccacgccctggccaagaggtctgtggatggcggcctgatggtgaagggccccaggcacaagccaggcatcgtgcaggagaccacctttgacctgggcggggacatccacagcggcacagccctgcccaccagcaagagcaccacccggctggacagcgacagagtgagcagcgccagcagcacagctgagcggggcatggtgaagcccatgatccgggtggagcagcagcctgactaccgccggcaggagagcaggacccaggatgccagcggccctgagctgatcctgcctgccagcattgagttccgggagagcagcgaggacagcttcctgagcgccatcatcaactacaccaacagcagcacagtgcacttcaagctgagccccacctacgtgctgtacatggcctgccgctacgtgctgagcaaccagtacagaccagacatcagccccacagagaggacccacaaggtgattgctgtggtgaacaagatggtgtccatgatggagggcgtcatccagaagcagaagaacattgctggggccctggccttctggatggccaatgccagcgagctgctgaacttcatcaagcaggaccgggacctgagccgcatcaccctggatgcccaggatgtgctggcccacctggtgcagatggccttcaagtacctggtgcactgcctgcagagcgagctgaacaactacatgcctgccttcctggatgatcctgaggagaacagcctgcagaggcccaagattgatgatgtgctgcacaccctgactggagccatgagcctgctgcggcgctgccgggtgaatgctgccctgaccatccagctgttcagccagctgttccacttcatcaacatgtggctgttcaaccggctggtgacagatcctgacagcggcctgtgcagccactactggggcgccatcatccggcagcagctgggccacatcgaggcctgggccgagaagcagggcctggagctggccgctgactgccacctgagccgcatcgtgcaggccaccaccctgctgaccatggacaagtatgccccagatgacatccccaacatcaacagcacctgcttcaagctgaacagcctgcagctgcaggccctgctgcagaactaccactgtgccccagatgagcccttcatccccacagacctgattgaaaatgtggtgacagtggctgaaaatacagcagatgagctggcccggagtgatggccgggaggtgcagctggaggaggaccctgacctgcagctgcccttcctgctgcctgaagatggctacagctgtgatgtggtgaggaacatccccaacggcctgcaggagttcctggaccccctgtgccagaggggcttctgccgcctcatcccccacaccaggagccctggcacctggaccatctactttgaaggagctgactatgagagccacctgctgagagaaaatacagagctggcccagcccctgaggaaggagcctgagatcatcaccgtgaccctgaagaagcagaatggcatgggcctgagcatcgtggccgccaagggggccggccaggacaagctgggcatctacgtgaagtctgtggtgaagggcggcgctgctgatgtggatggccgcctggccgccggggaccagctgctgtctgtggatggccgcagcctggtgggcctgagccaggagagagctgctgagctgatgaccaggaccagctctgtggtgaccctggaggtggccaagcagggcgccatctaccacggcctggccaccctgctgaaccagcccagccccatgatgcagaggatcagtgaccggcggggcagcggcaagccccggcccaagtctgagggctttgagctgtacaacaacagcacccagaatggcagccctgagagcccccagctgccctgggccgagtacagcgagcccaagaagctgcctggagatgaccggctgatgaagaacagagctgaccacaggagcagccccaacgtggccaaccagccccccagccctgggggcaagagcgcctatgccagcggcaccacagccaagatcacctctgtgtccacaggcaacctgtgcacagaggagcagaccccaccacccaggcctgaggcctaccccatccccacccagacctacacccgggagtacttcaccttccctgccagcaagagccaggacaggatggccccaccccagaaccagtggcccaactatgaggagaagccccacatgcacacagacagcaaccacagcagcatcgccatccagagggtgaccaggagccaggaggagctgcgggaggacaaggcctaccagctggagcggcaccgcatcgaggccgccatggacaggaagagtgacagcgacatgtggatcaaccagagcagcagcctggacagcagcaccagcagccaggagcacctgaaccacagcagcaagtctgtgaccccagccagcaccctgaccaagagcggccctggccgctggaagaccccagctgccatcccagccacccctgtggccgtgtcccagcccatcagaacagacctgcccccacctcctcctcctcctcctgtgcactacgccggggactttgatggcatgtccatggacctgcccctgcccccacctccttctgccaaccagatcggcctgcccagcgcccaggtggccgctgctgagaggaggaagcgggaggagcaccagcgctggtatgagaaggagaaggcccggctggaggaggagcgggagaggaagaggcgggagcaggagaggaagctgggccagatgaggacccagagcctgaacccagcccccttcagccccctgacagcccagcagatgaagccagagaagcccagcaccctgcagaggccccaggagaccgtcatccgggagctgcagccccagcagcagcccaggaccatcgagcggcgggacctgcagtacatcaccgtgtccaaggaggagctgagcagcggggacagcctgagcccagacccctggaagagagatgccaaggagaagctggagaagcagcagcagatgcacatcgtggacatgctgagcaaggagatccaggagctgcagagcaagccagacagatctgctgaggagagtgaccggctgaggaagctgatgctggagtggcagttccagaagaggctgcaggagagcaagcagaaggatgaagatgatgaggaggaggaggatgatgatgtggacaccatgctgatcatgcagaggctggaggccgagcggcgggcccggctgcaggatgaggagcggcggcggcagcagcagctggaggagatgaggaagcgggaggctgaagatcgggcccggcaggaggaggagcggcggcggcaggaggaggagaggaccaagagagatgctgaggagaagaggcggcaggaggagggctactacagccggctggaggccgagcggcggcggcagcatgatgaagctgcccggcggctgctggagcctgaggcccctggcctgtgccggccccccctgccccgggactatgagccccccagccccagccctgcccctggggcccctcctcctccaccccagagaaatgccagctacctgaagacccaggtgctgagcccagacagcctcttcaccgccaagtttgtggcctacaatgaggaggaggaggaggaggactgcagcctggccggccccaacagctacccaggcagcactggagctgctgtgggcgcccatgatgcctgcagagatgccaaggagaagaggagcaagagccaggatgctgacagccctggcagcagcggggcccctgagaacctgaccttcaaggagcggcagaggctcttcagccagggccaggatgtgagcaacaaggtgaaggccagcaggaagctgacagagctggagaatgagctgaacaccaagtag

SEQ ID NO: 280652 - DNA, 7740 bp, Artificial Sequence
  derived and/or modified sequence
gcggccgcggaggcggaggcagccgcggaggcggaggcggccggcggggggtggcgaggggcgccgggcccccgcggacctgtcgtcctcggcccgtcctccggccccggccccgcgcggctgaggaggcgcggccaggaccatgtcggcgggcggccgtgacgaggagcggcggaagctggccgacatcatccaccactggaacgccaaccggctggacctgttcgagatcagccagccgaccgaggatttggagttccatggagtgatgagattttattttcaagataaagctgctggaaactttgcaacaaaatgtattcgggtctctagtactgccaccactcaagatgtaatcgaaacgctcgcggagaaatttcgacctgatatgcgaatgctgtcctctcccaagtattcactctatgaagtgcatgtcagcggagaaagaagattggatatagatgagaaacctctagttgtacaactgaattggaacaaagatgatcgggaaggcagatttgttcttaagaatgagaatgacgccattcctcctaagaaggctcaaagtaatggacctgaaaagcaggaaaaagaaggggttatccagaacttcaagagaactctctcaaagaaagaaaagaaggaaaaaaagaagagagaaaaagaggcattgcgacaggcatctgataaagatgatagacctttccaaggggaggatgttgaaaattctcgactggctgctgaggtttacaaagacatgccggaaaccagctttactcgaaccatttctaatcctgaggtggttatgaaacgacggaggcagcaaaaattggaaaagagaatgcaggaatttcggagctcagatgggcggcctgattcaggtggaacattgagaatttatgcagatagtttaaaaccaaatattccctacaagacaatcctgctgtctactacagatcctgcagactttgctgtggctgaagctttagagaagtatggtctggaaaaagaaaaccctaaggattactgcatcgcccgggttatgcttcctcctggagcccagcattctgatgaaaagggtgctaaagaaattattcttgatgatgatgagtgtcctttacaaatcttcagggaatggccaagtgacaaagggattttagtctttcagttgaagaggaggccaccagaccacatcccaaagaaaaccaagaaacacttggaaggcaagacacccaagggaaaggagagagctgacgggtctggctatggctccacccttcctccggagaagctgccctatttagtagagttaagcccagggagaaggaatcactttgcctactacaactatcacacttacgaagatggttctgactctagagataagccaaagctttaccgccttcagttaagtgttactgaagttgggacagaaaagttggatgacaactctatccagttgtttggcccaggaattcagccccatcactgtgaccttaccaacatggatggagtggtcactgtgacgcccagaagtatggacgcagaaacctacgtggaaggccagcgcatctcagaaaccaccatgctgcagagtggcatgaaagtgcagtttggggcgtcccatgtatttaagtttgtggaccccagtcaggatcatgctcttgcaaaaagatctgtggatggaggcctgatggttaagggcccaagacataaacctggaattgttcaggagacaacttttgatttgggaggagatattcatagtgggacagcattaccgacaagcaagagcaccactaggctggacagcgacagagtgtcgtctgcctctagcacagccgagcggggaatggtgaagccgatgatcagagtagaacagcagccagattatcgcaggcaagaaagcagaacacaggatgcttctgggcctgagctgatactacctgcaagcattgaattcagggaaagttctgaagattcatttttgtctgccattataaattatactaatagctctacagtccactttaagttgtcccctacatatgtattatatatggcatgccggtatgtattgtccaaccagtacagacctgacatcagccctacagagcgcacacataaagtcattgcagtcgtcaacaagatggtgagcatgatggagggtgtcatccagaaacagaagaatattgcaggggcacttgccttctggatggcaaatgcatctgaacttctcaacttcattaagcaagaccgagaccttagtcggatcacactggatgctcaagatgttttagcacatttggttcaaatggcatttaaatacttggttcactgtcttcaatcagaacttaataattacatgccagcctttctagatgaccctgaagagaacagtctgcaacgaccaaaaatagatgatgtgctgcacacgctcacaggagccatgtccttgctacgacgctgcagagtcaatgccgccctgaccatccagctcttctctcagctcttccacttcatcaatatgtggctgttcaatagattggtgaccgacccagattcggggctgtgctcccattactggggtgcgattatccgtcagcagttgggccatattgaagcctgggctgagaagcaggggctggaactggctgcggactgtcatctgagcaggatcgtgcaggcaacgactttgcttaccatggataagtatgcacctgatgacattccaaatataaacagcacctgctttaagttaaattcattacaacttcaagccttattacagaactatcactgtgcacctgatgagccttttatcccaacggatcttatagaaaatgtagtgactgtggctgaaaacactgccgatgagctggcccgcagtgatggaagggaagtgcagttggaggaggatcctgatctgcagctgccgtttcttttgccagaagatggttattcttgtgatgttgtcagaaacattccaaatggtttacaagaatttttagaccctctgtgccagagaggattttgcaggttaattcctcacacacgttcaccaggtacttggacaatatattttgaaggtgcagattatgaaagtcaccttctgcgtgagaacacagagctggcaattcctctgaggaaagaacctgaaataatcactgtgaccctaaaaaagcagaatggaatgggccttagcattgttgcagcaaagggtgctggtcaagataaactaggaatctatgtgaagtcggttgtgaaaggaggtgctgcagatgtggatggacgtctagctgcaggtgatcagctcctcagtgtggatggacgaagtctggttggactctctcaggaaagggcggcagaactcatgacaagaacaagctctgtggtgacactggaagtagcaaagcagggtgccatctaccacggtctggccacccttctcaatcagccatcccccatgatgcagagaatttcagatcgtcgtggctcaggtaaaccccgaccaaagagtgaaggctttgagctctataataattcaactcaaaatgggtctcctgagagtcctcagctgccttgggcagaatatagtgaaccaaagaaattgcctggtgatgacagactgatgaaaaatagagctgatcaccgttccagccccaacgtagcaaatcagcctcctagtcctggagggaaaagtgcatatgcctctggaacaacagcgaagataacatctgtctctactggaaacctctgcactgaggagcagacgcctccgcctagacctgaagcctaccccatccccactcagacgtacaccagagagtattttaccttcccagcttccaaatcccaggatcggatggctcctcctcagaaccagtggccaaattatgaggaaaagccacatatgcacacagatagtaatcattccagtattgcaattcagcgtgttacacgttcccaagaagaacttcgagaagataaagcttaccaacttgagcggcatcgaatagaggcagctatggaccgaaagtctgatagtgatatgtggataaatcagagctcctcactggactccagtacctctagccaggagcatctgaaccattcctctaagtcggtcacccctgcttccacactgaccaaaagtggccctggccgttggaaaacaccagcagccataccggccacccctgtggccgtctcccagccaatccgaacagacctgcctccgccacccccgccacctccagtccactatgccggtgatttcgatggaatgtccatggatttgcctctcccaccacccccttccgccaaccagatagggctgccgtctgcgcaggtggctgctgctgaacggagaaagagagaagaacatcagcgttggtatgagaaggagaaggcccgcctggaggaggagcgggagaggaagcggagagagcaggagaggaagttgggccagatgcgcactcagtccttaaaccctgctccgttttctcccctgactgcacagcagatgaagcccgaaaagccttccacactccagcggccacaggaaacagtcattcgggagctgcagcctcagcagcagccccgcacgatcgagcgcagagacttgcagtacattacagtcagcaaagaggagctttcctcgggggacagtctgtcccccgacccgtggaagcgggacgccaaggagaagctggagaagcagcagcagatgcacatcgtggacatgctgagcaaggagatccaggagctccagagcaaaccggaccgcagcgccgaggagagcgaccggctgcgcaagctcatgctggagtggcagttccagaagagactccaggagtcgaagcagaaggacgaagatgacgaggaggaggaggacgatgatgtggacaccatgctgatcatgcagcgcctggaggctgaacgaagagcgaggcagactgctatgccagcaatctctgttctagatttgttgcaggacgaggagcggaggcggcagcagcagttagaagagatgcgcaagcgggaagcggaagaccgagcgaggcaagaggaagagcgccggcggcaggaggaggagcgaacaaaacgagacgctgaagaaaagaggcgacaggaagaagggtattacagccgcctggaagccgagaggcgcagacagcacgacgaggcggcgcgcaggttgctggagcccgaggcgcccggtctgtgccgccctccgcttccccgggactacgagcccccgtccccgtcccccgcgcccggcgcccctcctcccccgcctcagcgaaacgcctcctacctcaaaacacaggtcctctcccccgactcgctgttcactgccaagtttgttgcatacaatgaggaggaggaggaggaggactgcagcctagcaggaccaaactcttacccaggatctactggagcagctgttggagcccatgacgcctgtcgggatgcaaaagagaagcgctctaaaagccaagatgcagattcacctggaagttctggggcccctgaaaacttgacattcaaggaacgccagcgtcttttttcacaaggtcaagatgtatccaataaagtgaaagcttctcgtaaattaacagaactggagaatgaactgaacacaaagtgaaagaaaatgaggagaacactttgtatttaccccaaaatcttttcagttgtgggtttgtaggtgcgagtttgaagaggaaaagaggaagggggttatatttctaagtgatttacaatttctgtttctaaaattgttgggatttagaaatgtttcaattccaagaaattttattttactttaccatgagattgccatttatgtaatttaaacactgtctagtttcttaattatctaactcacacgagggtaagttttttgttggtttcttttttggagtcctgagttcaaaggggacagaactaagggcaggagaagagaatggatgtgtcttctctcccatcttcccctcatcatcgaccgaggagcacaaagaagttctgtttctgtttttttcagaaactttattttagctgtcaagcagagaatagcttgaactattcagactattgttggcactgtttagtagtgaccacacgctcttctacccgggaaggaacatatgacgacatgctcctcccatgtcccctgatggtgtctgttcccacaatatccttctagtctgcatcgtgaagtggcttaggccaaagcttcctgtgtgatgacgcacgtccgagactgttccatctcattcctcgcaaatttgagctcttctgatcaattctaaatatttgattaattttaattctgaaagaaaattttgaggatttaagcttaggggattttatttttataaataccagattattgttagacttaataaatcactgttaaatttaaagatgacagttaccttggaaagttcactaatacttcgctccaaggcgtctgtaaaagaagatatctttattggagcaatgttcatgtgactgggaatgacagaagaatgggagatgagtagggacccctcaagcacagctgtcactcagaaattttaaatttgaaaaagaaatcgattttcatctgtatgccgtcaaggaaggaattcagttacagggcatctgtaacttaaatattgtaagaataactcatatggaagttcaagctatttttatactataatagagttatttaattttaatttgttgaattattagttaccactgtcatttcttcagctatggatatgtggctgatgttggggagacggacctcagtgtgttttatattgtctggtgttaagatgataaattactttgtgattacaagcaaattttctatttgacaaagcccttggtggagtccaaatgatttttctgtaccatattgttctcttacacatacgtatgttaggaaaataggcacactttcaaagagaatgttctcttacacatacgtatgttaggaaaatagacacattttcaaagagaatgttctcttacatatgttaggaaaataggcacactttcaaagagaggtataggggctttttactgccttcgaaatcacttttaataaaagttgtatgataaatcattaaaaatgcgagtgtaaatatttttttttacctctatcagggtttttatttgaaagtgtgctcttaccatttccttgtttgagtaagagagtgaatggttctgagtgtttaggaaggatttgcttgcttgcagcagaagttctaggaaaagcaggcacctcccaaatatcttgaggacactggcagccttatggtgactaaatccacactttctttaaagagatgcagatgaattacttttctgttaatatatagaaaaatacacaggagaacatgcagatacatgtaaatatctacatacagggatatttgtatgtgtggttgtgaaacccatacacaagtggatttggccatctttgggcagtgaggtcaaatgtgaatatgtgtaaaagtgcttttcagaactgcattactatgagaaaacatcaaaactgctgtagttttccatttctactgtatttcagttgcaacctatttttaataaactttgtatgtatttaagtgtatttgctattgttttgaaagtgctgacaaagtttatatttgtaacatcagccttcctcgcccatctctttccatctgtctcttcttcattaaacacttactgagtatg

SEQ ID NO: 280653 - DNA, 7704 bp, Artificial Sequence
  derived and/or modified sequence
gcggccgcggaggcggaggcagccgcggaggcggaggcggccggcggggggtggcgaggggcgccgggcccccgcggacctgtcgtcctcggcccgtcctccggccccggccccgcgcggctgaggaggcgcggccaggaccatgtcggcgggcggccgtgacgaggagcggcggaagctggccgacatcatccaccactggaacgccaaccggctggacctgttcgagatcagccagccgaccgaggatttggagttccatggagtgatgagattttattttcaagataaagctgctggaaactttgcaacaaaatgtattcgggtctctagtactgccaccactcaagatgtaatcgaaacgctcgcggagaaatttcgacctgatatgcgaatgctgtcctctcccaagtattcactctatgaagtgcatgtcagcggagaaagaagattggatatagatgagaaacctctagttgtacaactgaattggaacaaagatgatcgggaaggcagatttgttcttaagaatgagaatgacgccattcctcctaagaaggctcaaagtaatggacctgaaaagcaggaaaaagaaggggttatccagaacttcaagagaactctctcaaagaaagaaaagaaggaaaaaaagaagagagaaaaagaggcattgcgacaggcatctgataaagatgatagacctttccaaggggaggatgttgaaaattctcgactggctgctgaggtttacaaagacatgccggaaaccagctttactcgaaccatttctaatcctgaggtggttatgaaacgacggaggcagcaaaaattggaaaagagaatgcaggaatttcggagctcagatgggcggcctgattcaggtggaacattgagaatttatgcagatagtttaaaaccaaatattccctacaagacaatcctgctgtctactacagatcctgcagactttgctgtggctgaagctttagagaagtatggtctggaaaaagaaaaccctaaggattactgcatcgcccgggttatgcttcctcctggagcccagcattctgatgaaaagggtgctaaagaaattattcttgatgatgatgagtgtcctttacaaatcttcagggaatggccaagtgacaaagggattttagtctttcagttgaagaggaggccaccagaccacatcccaaagaaaaccaagaaacacttggaaggcaagacacccaagggaaaggagagagctgacgggtctggctatggctccacccttcctccggagaagctgccctatttagtagagttaagcccagggagaaggaatcactttgcctactacaactatcacacttacgaagatggttctgactctagagataagccaaagctttaccgccttcagttaagtgttactgaagttgggacagaaaagttggatgacaactctatccagttgtttggcccaggaattcagccccatcactgtgaccttaccaacatggatggagtggtcactgtgacgcccagaagtatggacgcagaaacctacgtggaaggccagcgcatctcagaaaccaccatgctgcagagtggcatgaaagtgcagtttggggcgtcccatgtatttaagtttgtggaccccagtcaggatcatgctcttgcaaaaagatctgtggatggaggcctgatggttaagggcccaagacataaacctggaattgttcaggagacaacttttgatttgggaggagatattcatagtgggacagcattaccgacaagcaagagcaccactaggctggacagcgacagagtgtcgtctgcctctagcacagccgagcggggaatggtgaagccgatgatcagagtagaacagcagccagattatcgcaggcaagaaagcagaacacaggatgcttctgggcctgagctgatactacctgcaagcattgaattcagggaaagttctgaagattcatttttgtctgccattataaattatactaatagctctacagtccactttaagttgtcccctacatatgtattatatatggcatgccggtatgtattgtccaaccagtacagacctgacatcagccctacagagcgcacacataaagtcattgcagtcgtcaacaagatggtgagcatgatggagggtgtcatccagaaacagaagaatattgcaggggcacttgccttctggatggcaaatgcatctgaacttctcaacttcattaagcaagaccgagaccttagtcggatcacactggatgctcaagatgttttagcacatttggttcaaatggcatttaaatacttggttcactgtcttcaatcagaacttaataattacatgccagcctttctagatgaccctgaagagaacagtctgcaacgaccaaaaatagatgatgtgctgcacacgctcacaggagccatgtccttgctacgacgctgcagagtcaatgccgccctgaccatccagctcttctctcagctcttccacttcatcaatatgtggctgttcaatagattggtgaccgacccagattcggggctgtgctcccattactggggtgcgattatccgtcagcagttgggccatattgaagcctgggctgagaagcaggggctggaactggctgcggactgtcatctgagcaggatcgtgcaggcaacgactttgcttaccatggataagtatgcacctgatgacattccaaatataaacagcacctgctttaagttaaattcattacaacttcaagccttattacagaactatcactgtgcacctgatgagccttttatcccaacggatcttatagaaaatgtagtgactgtggctgaaaacactgccgatgagctggcccgcagtgatggaagggaagtgcagttggaggaggatcctgatctgcagctgccgtttcttttgccagaagatggttattcttgtgatgttgtcagaaacattccaaatggtttacaagaatttttagaccctctgtgccagagaggattttgcaggttaattcctcacacacgttcaccaggtacttggacaatatattttgaaggtgcagattatgaaagtcaccttctgcgtgagaacacagagctggcaattcctctgaggaaagaacctgaaataatcactgtgaccctaaaaaagcagaatggaatgggccttagcattgttgcagcaaagggtgctggtcaagataaactaggaatctatgtgaagtcggttgtgaaaggaggtgctgcagatgtggatggacgtctagctgcaggtgatcagctcctcagtgtggatggacgaagtctggttggactctctcaggaaagggcggcagaactcatgacaagaacaagctctgtggtgacactggaagtagcaaagcagggtgccatctaccacggtctggccacccttctcaatcagccatcccccatgatgcagagaatttcagatcgtcgtggctcaggtaaaccccgaccaaagagtgaaggctttgagctctataataattcaactcaaaatgggtctcctgagagtcctcagctgccttgggcagaatatagtgaaccaaagaaattgcctggtgatgacagactgatgaaaaatagagctgatcaccgttccagccccaacgtagcaaatcagcctcctagtcctggagggaaaagtgcatatgcctctggaacaacagcgaagataacatctgtctctactggaaacctctgcactgaggagcagacgcctccgcctagacctgaagcctaccccatccccactcagacgtacaccagagagtattttaccttcccagcttccaaatcccaggatcggatggctcctcctcagaaccagtggccaaattatgaggaaaagccacatatgcacacagatagtaatcattccagtattgcaattcagcgtgttacacgttcccaagaagaacttcgagaagataaagcttaccaacttgagcggcatcgaatagaggcagctatggaccgaaagtctgatagtgatatgtggataaatcagagctcctcactggactccagtacctctagccaggagcatctgaaccattcctctaagtcggtcacccctgcttccacactgaccaaaagtggccctggccgttggaaaacaccagcagccataccggccacccctgtggccgtctcccagccaatccgaacagacctgcctccgccacccccgccacctccagtccactatgccggtgatttcgatggaatgtccatggatttgcctctcccaccacccccttccgccaaccagatagggctgccgtctgcgcaggtggctgctgctgaacggagaaagagagaagaacatcagcgttggtatgagaaggagaaggcccgcctggaggaggagcgggagaggaagcggagagagcaggagaggaagttgggccagatgcgcactcagtccttaaaccctgctccgttttctcccctgactgcacagcagatgaagcccgaaaagccttccacactccagcggccacaggaaacagtcattcgggagctgcagcctcagcagcagccccgcacgatcgagcgcagagacttgcagtacattacagtcagcaaagaggagctttcctcgggggacagtctgtcccccgacccgtggaagcgggacgccaaggagaagctggagaagcagcagcagatgcacatcgtggacatgctgagcaaggagatccaggagctccagagcaaaccggaccgcagcgccgaggagagcgaccggctgcgcaagctcatgctggagtggcagttccagaagagactccaggagtcgaagcagaaggacgaagatgacgaggaggaggaggacgatgatgtggacaccatgctgatcatgcagcgcctggaggctgaacgaagagcgaggttgcaggacgaggagcggaggcggcagcagcagttagaagagatgcgcaagcgggaagcggaagaccgagcgaggcaagaggaagagcgccggcggcaggaggaggagcgaacaaaacgagacgctgaagaaaagaggcgacaggaagaagggtattacagccgcctggaagccgagaggcgcagacagcacgacgaggcggcgcgcaggttgctggagcccgaggcgcccggtctgtgccgccctccgcttccccgggactacgagcccccgtccccgtcccccgcgcccggcgcccctcctcccccgcctcagcgaaacgcctcctacctcaaaacacaggtcctctcccccgactcgctgttcactgccaagtttgttgcatacaatgaggaggaggaggaggaggactgcagcctagcaggaccaaactcttacccaggatctactggagcagctgttggagcccatgacgcctgtcgggatgcaaaagagaagcgctctaaaagccaagatgcagattcacctggaagttctggggcccctgaaaacttgacattcaaggaacgccagcgtcttttttcacaaggtcaagatgtatccaataaagtgaaagcttctcgtaaattaacagaactggagaatgaactgaacacaaagtgaaagaaaatgaggagaacactttgtatttaccccaaaatcttttcagttgtgggtttgtaggtgcgagtttgaagaggaaaagaggaagggggttatatttctaagtgatttacaatttctgtttctaaaattgttgggatttagaaatgtttcaattccaagaaattttattttactttaccatgagattgccatttatgtaatttaaacactgtctagtttcttaattatctaactcacacgagggtaagttttttgttggtttcttttttggagtcctgagttcaaaggggacagaactaagggcaggagaagagaatggatgtgtcttctctcccatcttcccctcatcatcgaccgaggagcacaaagaagttctgtttctgtttttttcagaaactttattttagctgtcaagcagagaatagcttgaactattcagactattgttggcactgtttagtagtgaccacacgctcttctacccgggaaggaacatatgacgacatgctcctcccatgtcccctgatggtgtctgttcccacaatatccttctagtctgcatcgtgaagtggcttaggccaaagcttcctgtgtgatgacgcacgtccgagactgttccatctcattcctcgcaaatttgagctcttctgatcaattctaaatatttgattaattttaattctgaaagaaaattttgaggatttaagcttaggggattttatttttataaataccagattattgttagacttaataaatcactgttaaatttaaagatgacagttaccttggaaagttcactaatacttcgctccaaggcgtctgtaaaagaagatatctttattggagcaatgttcatgtgactgggaatgacagaagaatgggagatgagtagggacccctcaagcacagctgtcactcagaaattttaaatttgaaaaagaaatcgattttcatctgtatgccgtcaaggaaggaattcagttacagggcatctgtaacttaaatattgtaagaataactcatatggaagttcaagctatttttatactataatagagttatttaattttaatttgttgaattattagttaccactgtcatttcttcagctatggatatgtggctgatgttggggagacggacctcagtgtgttttatattgtctggtgttaagatgataaattactttgtgattacaagcaaattttctatttgacaaagcccttggtggagtccaaatgatttttctgtaccatattgttctcttacacatacgtatgttaggaaaataggcacactttcaaagagaatgttctcttacacatacgtatgttaggaaaatagacacattttcaaagagaatgttctcttacatatgttaggaaaataggcacactttcaaagagaggtataggggctttttactgccttcgaaatcacttttaataaaagttgtatgataaatcattaaaaatgcgagtgtaaatatttttttttacctctatcagggtttttatttgaaagtgtgctcttaccatttccttgtttgagtaagagagtgaatggttctgagtgtttaggaaggatttgcttgcttgcagcagaagttctaggaaaagcaggcacctcccaaatatcttgaggacactggcagccttatggtgactaaatccacactttctttaaagagatgcagatgaattacttttctgttaatatatagaaaaatacacaggagaacatgcagatacatgtaaatatctacatacagggatatttgtatgtgtggttgtgaaacccatacacaagtggatttggccatctttgggcagtgaggtcaaatgtgaatatgtgtaaaagtgcttttcagaactgcattactatgagaaaacatcaaaactgctgtagttttccatttctactgtatttcagttgcaacctatttttaataaactttgtatgtatttaagtgtatttgctattgttttgaaagtgctgacaaagtttatatttgtaacatcagccttcctcgcccatctctttccatctgtctcttcttcattaaacacttactgagtatg

SEQ ID NO: 280654 - DNA, 5475 bp, Artificial Sequence
  derived and/or modified sequence
atgtcggcgggcggccgtgacgaggagcggcggaagctggccgacatcatccaccactggaacgccaaccggctggacctgttcgagatcagccagccgaccgaggatttggagttccatggagtgatgagattttattttcaagataaagctgctggaaactttgcaacaaaatgtattcgggtctctagtactgccaccactcaagatgtaatcgaaacgctcgcggagaaatttcgacctgatatgcgaatgctgtcctctcccaagtattcactctatgaagtgcatgtcagcggagaaagaagattggatatagatgagaaacctctagttgtacaactgaattggaacaaagatgatcgggaaggcagatttgttcttaagaatgagaatgacgccattcctcctaagaaggctcaaagtaatggacctgaaaagcaggaaaaagaaggggttatccagaacttcaagagaactctctcaaagaaagaaaagaaggaaaaaaagaagagagaaaaagaggcattgcgacaggcatctgataaagatgatagacctttccaaggggaggatgttgaaaattctcgactggctgctgaggtttacaaagacatgccggaaaccagctttactcgaaccatttctaatcctgaggtggttatgaaacgacggaggcagcaaaaattggaaaagagaatgcaggaatttcggagctcagatgggcggcctgattcaggtggaacattgagaatttatgcagatagtttaaaaccaaatattccctacaagacaatcctgctgtctactacagatcctgcagactttgctgtggctgaagctttagagaagtatggtctggaaaaagaaaaccctaaggattactgcatcgcccgggttatgcttcctcctggagcccagcattctgatgaaaagggtgctaaagaaattattcttgatgatgatgagtgtcctttacaaatcttcagggaatggccaagtgacaaagggattttagtctttcagttgaagaggaggccaccagaccacatcccaaagaaaaccaagaaacacttggaaggcaagacacccaagggaaaggagagagctgacgggtctggctatggctccacccttcctccggagaagctgccctatttagtagagttaagcccagggagaaggaatcactttgcctactacaactatcacacttacgaagatggttctgactctagagataagccaaagctttaccgccttcagttaagtgttactgaagttgggacagaaaagttggatgacaactctatccagttgtttggcccaggaattcagccccatcactgtgaccttaccaacatggatggagtggtcactgtgacgcccagaagtatggacgcagaaacctacgtggaaggccagcgcatctcagaaaccaccatgctgcagagtggcatgaaagtgcagtttggggcgtcccatgtatttaagtttgtggaccccagtcaggatcatgctcttgcaaaaagatctgtggatggaggcctgatggttaagggcccaagacataaacctggaattgttcaggagacaacttttgatttgggaggagatattcatagtgggacagcattaccgacaagcaagagcaccactaggctggacagcgacagagtgtcgtctgcctctagcacagccgagcggggaatggtgaagccgatgatcagagtagaacagcagccagattatcgcaggcaagaaagcagaacacaggatgcttctgggcctgagctgatactacctgcaagcattgaattcagggaaagttctgaagattcatttttgtctgccattataaattatactaatagctctacagtccactttaagttgtcccctacatatgtattatatatggcatgccggtatgtattgtccaaccagtacagacctgacatcagccctacagagcgcacacataaagtcattgcagtcgtcaacaagatggtgagcatgatggagggtgtcatccagaaacagaagaatattgcaggggcacttgccttctggatggcaaatgcatctgaacttctcaacttcattaagcaagaccgagaccttagtcggatcacactggatgctcaagatgttttagcacatttggttcaaatggcatttaaatacttggttcactgtcttcaatcagaacttaataattacatgccagcctttctagatgaccctgaagagaacagtctgcaacgaccaaaaatagatgatgtgctgcacacgctcacaggagccatgtccttgctacgacgctgcagagtcaatgccgccctgaccatccagctcttctctcagctcttccacttcatcaatatgtggctgttcaatagattggtgaccgacccagattcggggctgtgctcccattactggggtgcgattatccgtcagcagttgggccatattgaagcctgggctgagaagcaggggctggaactggctgcggactgtcatctgagcaggatcgtgcaggcaacgactttgcttaccatggataagtatgcacctgatgacattccaaatataaacagcacctgctttaagttaaattcattacaacttcaagccttattacagaactatcactgtgcacctgatgagccttttatcccaacggatcttatagaaaatgtagtgactgtggctgaaaacactgccgatgagctggcccgcagtgatggaagggaagtgcagttggaggaggatcctgatctgcagctgccgtttcttttgccagaagatggttattcttgtgatgttgtcagaaacattccaaatggtttacaagaatttttagaccctctgtgccagagaggattttgcaggttaattcctcacacacgttcaccaggtacttggacaatatattttgaaggtgcagattatgaaagtcaccttctgcgtgagaacacagagctggctcagcctctgaggaaagaacctgaaataatcactgtgaccctaaaaaagcagaatggaatgggccttagcattgttgcagcaaagggtgctggtcaagataaactaggaatctatgtgaagtcggttgtgaaaggaggtgctgcagatgtggatggacgtctagctgcaggtgatcagctcctcagtgtggatggacgaagtctggttggactctctcaggaaagggcggcagaactcatgacaagaacaagctctgtggtgacactggaagtagcaaagcagggtgccatctaccacggtctggccacccttctcaatcagccatcccccatgatgcagagaatttcagatcgtcgtggctcaggtaaaccccgaccaaagagtgaaggctttgagctctataataattcaactcaaaatgggtctcctgagagtcctcagctgccttgggcagaatatagtgaaccaaagaaattgcctggtgatgacagactgatgaaaaatagagctgatcaccgttccagccccaacgtagcaaatcagcctcctagtcctggagggaaaagtgcatatgcctctggaacaacagcgaagataacatctgtctctactggaaacctctgcactgaggagcagacgcctccgcctagacctgaagcctaccccatccccactcagacgtacaccagagagtattttaccttcccagcttccaaatcccaggatcggatggctcctcctcagaaccagtggccaaattatgaggaaaagccacatatgcacacagatagtaatcattccagtattgcaattcagcgtgttacacgttcccaagaagaacttcgagaagataaagcttaccaacttgagcggcatcgaatagaggcagctatggaccgaaagtctgatagtgatatgtggataaatcagagctcctcactggactccagtacctctagccaggagcatctgaaccattcctctaagtcggtcacccctgcttccacactgaccaaaagtggccctggccgttggaaaacaccagcagccataccggccacccctgtggccgtctcccagccaatccgaacagacctgcctccgccacccccgccacctccagtccactatgccggtgatttcgatggaatgtccatggatttgcctctcccaccacccccttccgccaaccagatagggctgccgtctgcgcaggtggctgctgctgaacggagaaagagagaagaacatcagcgttggtatgagaaggagaaggcccgcctggaggaggagcgggagaggaagcggagagagcaggagaggaagttgggccagatgcgcactcagtccttaaaccctgctccgttttctcccctgactgcacagcagatgaagcccgaaaagccttccacactccagcggccacaggaaacagtcattcgggagctgcagcctcagcagcagccccgcacgatcgagcgcagagacttgcagtacattacagtcagcaaagaggagctttcctcgggggacagtctgtcccccgacccgtggaagcgggacgccaaggagaagctggagaagcagcagcagatgcacatcgtggacatgctgagcaaggagatccaggagctccagagcaaaccggaccgcagcgccgaggagagcgaccggctgcgcaagctcatgctggagtggcagttccagaagagactccaggagtcgaagcagaaggacgaagatgacgaggaggaggaggacgatgatgtggacaccatgctgatcatgcagcgcctggaggctgaacgaagagcgaggttgcaggacgaggagcggaggcggcagcagcagttagaagagatgcgcaagcgggaagcggaagaccgagcgaggcaagaggaagagcgccggcggcaggaggaggagcgaacaaaacgagacgctgaagaaaagaggcgacaggaagaagggtattacagccgcctggaagccgagaggcgcagacagcacgacgaggcggcgcgcaggttgctggagcccgaggcgcccggtctgtgccgccctccgcttccccgggactacgagcccccgtccccgtcccccgcgcccggcgcccctcctcccccgcctcagcgaaacgcctcctacctcaaaacacaggtcctctcccccgactcgctgttcactgccaagtttgttgcatacaatgaggaggaggaggaggaggactgcagcctagcaggaccaaactcttacccaggatctactggagcagctgttggagcccatgacgcctgtcgggatgcaaaagagaagcgctctaaaagccaagatgcagattcacctggaagttctggggcccctgaaaacttgacattcaaggaacgccagcgtcttttttcacaaggtcaagatgtatccaataaagtgaaagcttctcgtaaattaacagaactggagaatgaactgaacacaaagtga

SEQ ID NO: 280655 - DNA, 5475 bp, Artificial Sequence
  derived and/or modified sequence
atgagcgccggcggccgggacgaggagcggcggaagctggccgacattatccatcactggaacgcaaaccgcctggacctcttcgagatcagccagcctaccgaagatctggaatttcacggagtgatgaggttctacttccaggacaaggctgccgggaactttgcgactaaatgtatcagagtgtcctctaccgccaccacacaagacgtaatcgagacactggcggaaaaattccggccggacatgcgaatgttgagcagcccaaagtactcactttacgaggtccacgtatctggcgaacgtaggctggatatcgatgagaaacctctggtcgtgcagctcaattggaacaaggatgatcgggaaggacgcttcgtgctcaagaacgagaacgatgccattccacccaagaaagcccaatccaatggacctgaaaaacaagagaaggagggagttattcaaaacttcaagaggaccctgtcaaaaaaggagaaaaaggagaagaagaaaagagagaaggaggccctgcgccaggccagcgataaggacgatcgcccctttcaaggcgaggacgtggagaacagtagacttgcagcggaagtgtacaaagacatgcccgagacgtccttcacaaggaccatcagtaatcccgaagttgtgatgaaaagaaggagacagcaaaagcttgagaagagaatgcaggaatttcggagctcggacggtcgccctgattctggagggacgcttcgaatttacgccgactctttgaagcctaacattccatataagacgattcttctctctacaaccgaccccgcagactttgcggtggctgaggcgctggagaaatatggattggaaaaggagaatccaaaggactactgtatcgccagggtaatgcttccgcctggcgctcagcactcagacgagaaaggcgccaaagagatcatcttggacgatgacgagtgtccactccagatttttcgcgagtggccttcagacaagggcattctcgtgtttcaactgaaaaggcgaccacccgaccatattcctaagaaaactaagaaacacctagagggaaagacccccaaggggaaggagcgggccgatggatctggctatgggtccactctgcccccggaaaagctcccctatctggtagaactaagtcccggccgacgcaaccacttcgcctattataattatcatacctacgaggacggtagcgactcccgagacaaaccaaaattatatagactccaactgtcagttactgaagtggggacagaaaagcttgacgacaacagtattcagctgttcggcccgggtattcagccccaccactgtgacttaacaaacatggacggagtggtcacggtgacgccgaggtcaatggacgcagagacttacgtagaaggccagcggattagcgagacaacgatgctccagtctgggatgaaagtccagtttggggcctcccatgtgttcaagtttgtcgacccaagccaggatcatgccctcgccaagaggtccgtcgatggcggacttatggtgaagggcccaaggcataaacctggcatcgtccaggagacaaccttcgacttggggggggacattcacagtggaaccgcactccctacctcaaagagcacaactaggctggatagtgaccgtgtgagtagtgctagtagcacggccgaacgcggaatggtcaaacccatgatcagggtagagcagcagcccgattaccgccggcaggagtccaggacccaagacgcatctggcccagaactgattttaccggccagcatcgaattcagagaatcttccgaggacagctttctaagtgcgatcatcaactatactaacagttcaactgtgcatttcaagctgagccccacctatgtcctgtatatggcctgcaggtatgtgctcagcaatcagtacaggcccgatatctcccctaccgaacgtactcataaggttatcgccgtggtcaacaagatggtcagcatgatggaaggagtcattcagaagcagaagaatattgccggagcactcgctttctggatggctaacgcatctgaactacttaacttcattaaacaagaccgcgatctatcccgaataacgttggatgcccaggacgtgctggcacatctagtacagatggccttcaaatatttagtacactgcctgcagtctgagttaaacaactacatgcccgcattcctcgacgatcccgaagaaaattctctccagaggcccaaaatcgatgatgtgctgcacaccctgaccggtgccatgtcactcctgcggcgctgtagagtaaacgccgctctcactattcaactatttagccagttatttcacttcattaacatgtggctctttaacaggttggtcacagatcccgattcaggcctctgctcccactattggggagccatcatcaggcagcagctggggcacattgaggcatgggccgaaaagcaggggctagaactcgctgcggattgtcacctgtctcggattgtccaagccacaaccctcctcaccatggacaaatatgccccagacgacattcctaacattaattcaacgtgttttaaactcaatagcctccagcttcaggcccttctgcagaactaccactgcgcgcccgacgagcctttcatacctactgacctgattgaaaacgtggtgaccgtggccgaaaatactgctgacgagctagccagaagcgacgggagagaggtgcagctcgaggaggatcctgatctgcaactgcctttccttctccccgaagatgggtatagctgtgacgtggttcgtaatatacccaacgggctccaggaattcctggatcctctgtgccagcggggattctgcagacttatccctcatacacggagccccgggacatggaccatatattttgagggtgccgattatgagtcgcacctgctgcgggagaacaccgagctcgcaatacctcttaggaaggaacccgagattatcaccgttactcttaaaaagcagaacggaatgggcttgtcaattgtagccgccaagggcgctggtcaagacaagcttggaatctatgttaaatctgtggtcaaaggtggcgccgctgacgtggatggacggctggcggcaggtgatcagctgctttcggtcgatgggagaagcctggtcgggctttcacaagaaagggccgcagagctgatgactagaacgtcttctgtggtgaccctggaggttgctaagcagggcgctatttaccacggtttggcgactctgcttaaccagccgagtccaatgatgcaacgaattagcgaccgtaggggatccggcaagcctagacctaagagtgaaggtttcgaactgtataacaacagcacacagaacggttcccccgaaagccctcagcttccttgggcagaatacagtgagccaaagaagttgccaggggatgatcgcttgatgaagaatcgcgcagatcaccgctctagccccaatgttgcaaatcagccgccttcccccggcgggaagtccgcttacgctagtggaaccactgctaagataacgtctgtttccacaggcaacctctgtacagaggagcagacccctccacctcgccccgaggcttacccaatccccacccagacctacaccagagagtatttcacttttccggcaagcaaatcacaagatcggatggccccaccacagaaccagtggccaaactatgaagagaagccccacatgcatacggattccaaccacagttctattgctattcaacgagtgacaagatcgcaggaggagcttagagaggataaggcctatcaactcgagagacaccggattgaggcagctatggatagaaagtcagactcagacatgtggattaatcagtcgtcctcactcgattcctctacaagctctcaggaacatctgaatcatagtagtaagtctgtgactccagcatccacactgacaaaaagcggacctgggcgatggaagacccctgccgctattcctgccacgcctgtggctgtgtcacagccaataagaaccgatctccctccacccccaccacctccacccgtccattacgccggcgatttcgatggcatgtcaatggatctcccgctcccgccacccccatcagccaaccaaatcgggctgccctccgcacaggtggccgcagcagaaaggcggaagagagaagagcaccagcggtggtacgagaaggaaaaagctcgattggaagaagaacgagagagaaaacgtcgagaacaggaacgcaaattgggccagatgagaactcagtcattgaacccagcgccgtttagtcccctcacagcccagcagatgaaacctgagaaacccagtactttacagaggccacaggaaacagtgattcgagagctgcagccgcagcaacaacccaggaccatcgaaagacgggatctgcagtatatcaccgtcagcaaggaagaattgtcatccggtgactccctgtcacctgatccctggaagcgtgacgcaaaagaaaagttggagaaacagcaacagatgcacatcgtcgatatgttgtccaaggagatacaagaactccagtcaaagcctgaccgatctgccgaagagtccgaccgcttaagaaagcttatgctcgagtggcagttccagaaacgcctgcaggagtctaagcagaaggacgaagacgatgaggaggaagaggacgacgatgtcgacaccatgctcatcatgcagcgcctcgaagccgaaaggcgggccagacttcaagatgaagagcgccgacggcagcagcagctcgaggaaatgcgcaagagggaggcagaggaccgtgcacgacaggaagaagagagaagaaggcaagaagaagagcgcactaaacgggatgcagaggagaagcgccgccaggaggaggggtattacagcaggcttgaggccgagagacgccgtcagcacgacgaagctgctagaaggcttctggagccagaggcccccggcttgtgtcgcccgcctctgccaagggattacgagccaccctcgccttcccccgctcctggggcacctccccctccaccacagagaaacgcctcctatttgaagacccaggtcctgagcccagactctctgttcaccgcgaagtttgtggcatataatgaagaagaagaggaggaggattgttctttggctggcccaaactcctatcccggaagcaccggagctgcagtgggcgcacatgacgcctgcagggacgctaaagagaagagatctaagagccaggatgcagactcccctgggtcctcaggtgctcccgagaatcttacttttaaggagcggcagcgcctgttctcccaggggcaggacgtgagtaataaggtgaaggccagtaggaagctcacagaactggagaatgagctaaacaccaagtag

SEQ ID NO: 280656 - DNA, 5475 bp, Artificial Sequence
  derived and/or modified sequence
atgagcgccggcggccgggacgaggagcggcggaagctggccgacattatccaccactggaacgcaaacagattggacctattcgaaatttcccagccaactgaggacctggaattccatggagtcatgcggttctacttccaggacaaggcagcaggaaactttgcaaccaaatgtatacgagtttcaagcactgcaacgactcaagacgtcatcgaaactctggcagagaaattccggcctgacatgcggatgctctcgagcccgaaatactcgttgtacgaggttcacgtgtcaggcgagagacgattagatatagatgaaaagcctcttgtcgtgcagctcaattggaataaggacgaccgcgaagggcggtttgttctgaaaaacgaaaatgacgccatacccccaaaaaaggcccagagtaacgggccagaaaagcaggagaaggaaggcgtgattcagaacttcaaacggaccctgtcgaagaaagagaaaaaagagaagaagaagcgcgagaaggaggccctgaggcaagcatcagacaaagatgaccggccgtttcagggagaggatgttgaaaatagtagacttgcggcagaagtgtacaaagacatgcctgagacttctttcacacgaaccattagcaatcccgaagtcgtgatgaaacgtcgtaggcaacagaaactggaaaaacggatgcaggaattccggtcctccgatgggcggccagacagcggcggtacgctacggatatatgcagactctctcaagcccaacatcccctataagactatcttgctctcaaccacggatcccgccgacttcgctgtcgccgaagccctggagaagtacggactggaaaaggaaaatcctaaagactactgtattgccagagttatgcttcctccaggagctcagcattccgatgagaaaggtgctaaagagataatacttgacgatgatgagtgcccccttcaaatattccgcgaatggcccagcgataaaggaatcctggtattccaacttaaacgccggcctcccgaccatataccaaagaaaacaaaaaagcaccttgaaggcaaaactccaaagggaaaagaaagggcagacggaagcggctatggatctactttgcctccagagaagctgccttacctcgtagagttgtcccccggcaggaggaatcatttcgcctactacaattaccacacgtacgaggacggatccgattcccgcgacaagccaaaactttatcgcttgcagctgtccgttaccgaggttggtacggagaagttggatgacaattctattcagctgttcgggcccggaattcagccacaccactgtgatctgacgaatatggacggagtagttacggtcacaccacggagcatggacgccgagacctatgttgaagggcagaggatcagtgagaccactatgctgcagtccggtatgaaagtacagtttggcgcttcacatgtctttaaattcgtggaccccagccaggaccatgcattagccaagcggagtgtggacggggggcttatggtgaagggcccacggcacaaaccgggcatcgtgcaggagacaaccttcgatctggggggtgatatccactcaggtacagctctccctacatccaaaagcacgacacgtcttgacagcgacagggtttcatccgccagcagcacggctgaacgcggaatggtgaagcccatgatacgggtagaacagcagcctgattaccgtcggcaggagagcaggacacaggatgcatccggtccagagctcatactgccagcttctatcgaatttcgcgaaagtagcgaggatagttttctgagcgccatcattaattatactaactcttccacggtgcacttcaaactgagccccacctatgtgctctacatggcctgtcggtacgtcctatcgaaccaatatcgacccgacattagccccaccgagcggacccacaaggttatagctgtggtgaacaaaatggtcagcatgatggagggagtcatccaaaagcaaaagaacattgccggggccctggccttctggatggccaatgcgagcgagttgcttaacttcataaagcaggatagggatctctcccggattaccctcgacgcccaagacgtcctcgctcacttggtgcagatggccttcaagtatttggttcactgtctgcagagcgagctgaataactacatgccagcttttctggacgacccggaagaaaatagtctacaaagacccaagattgacgacgtcctgcacacattgaccggggccatgagtctcctgcgaaggtgtcgcgtcaacgccgctctgaccattcagctatttagccagctatttcatttcatcaatatgtggctgtttaaccggctggtcactgatccagacagcggactttgcagccactattggggcgcaattatccgacagcagctgggccacatcgaggcttgggccgagaagcagggtctcgagctcgctgctgattgtcatctgtcaagaatcgtgcaggccaccacgctcctcactatggataagtacgccccggatgatatccccaatattaactccacttgctttaagcttaacagtctgcaactgcaggctttactccagaattatcattgcgctcctgacgagccttttatccccaccgacctcattgagaacgtggtcaccgttgccgaaaataccgccgacgaactcgctagaagtgacggccgtgaggttcaactggaggaagaccctgacttgcagctgccattcctcctacctgaggatggttactcctgtgacgtggttcgcaacattcccaacggactccaagaattcctggatccactgtgtcagaggggattctgtcggttgatcccccatacaaggtcccccggaacatggaccatttacttcgaaggcgccgattacgaatcccacctcctgagggagaacaccgaactggcccagcctctgcgcaaggaacccgagattatcactgtcactctcaaaaaacagaatggaatgggactcagcatagtggccgccaaaggcgcggggcaggacaagttggggatatacgtcaagagtgttgtgaaggggggcgccgcagacgtagatggccgcctggcagctggggaccaactcctaagcgtagacggcagatctttagttggactatcacaggagagagccgctgagctgatgacaaggacaagctccgtcgtaactctggaggtagctaagcagggggctatttatcatgggctagcaacccttctgaaccaaccatccccgatgatgcagcgcatttcagataggcgaggctccggaaagcctcggccaaagagtgaaggtttcgagttatacaataatagcacgcagaatggctcgccagaatccccccagctgccctgggccgagtacagtgagccaaaaaaacttccaggcgacgatagattaatgaagaacagggccgaccatcgcagttcaccgaacgtagctaaccagcccccatcccccggtggcaagagcgcctacgccagtgggacaactgccaagatcacctcggtaagcacgggaaacctttgcaccgaggagcagactcctccgccacggcccgaggcatatccaatcccaacgcaaacctatactcgcgagtacttcacgttcccagcctccaaaagccaggaccgcatggctcctccacagaaccagtggcccaattatgaggaaaagccccacatgcacacggactcgaaccactcttctatagctatccagagggtcacaaggtcccaggaagaattgcgcgaagacaaggcgtatcagttagagcggcacagaattgaagccgcaatggacagaaaatccgacagcgacatgtggattaatcagtctagttccctcgattccagcacatcatctcaggagcacctgaaccacagcagcaagtcagttacaccagcctcaactttaacaaagagcgggcctgggagatggaaaacaccagcagccatacctgccaccccagttgccgtttctcaacccattcgcacagatcttccacctcccccccctccgccccctgtccactacgctggggacttcgatggcatgtctatggacctgcccctcccgccaccaccttcggccaaccagatcgggctccctagcgcccaggtcgcggctgcggagagacgaaaaagggaagagcaccaaaggtggtacgaaaaagaaaaagccagattagaggaagaacgcgagcggaagcggcgagagcaggagagaaagctggggcagatgcggactcaaagcctgaatccagctccattttcccccttgactgcacaacagatgaaacccgagaagcccagcactctccaacgcccccaagaaaccgtaatccgggagctgcagccacagcagcagccaagaactatagagaggcgcgacctccagtacatcacggtgtcgaaggaggagctgtcatccggcgactccttgtcccccgacccttggaaaagagacgcaaaagagaagctcgagaagcagcagcagatgcatatcgtcgatatgctgtctaaggagatccaagaattgcagagcaaaccagacagaagtgccgaggaatctgacaggctacggaaactcatgctcgaatggcagttccaaaagaggctgcaggaatctaagcagaaagatgaggatgatgaagaggaggaggacgacgatgtcgacacaatgctgataatgcagagactggaagccgaacggcgggcccggctccaagatgaggagagaaggagacagcaacagttagaggaaatgcgaaagagagaggccgaggacagagcgcgacaggaagaggagcgtcgacgccaggaggaagagcggactaaacgggacgccgaagaaaagagacgccaggaggagggctattactccaggttggaggcagagcgccggcggcagcacgacgaggccgcacggcgactactcgagcctgaggccccggggttatgccgccctcccctccctagagactatgaaccgccctcccccagtcccgcccccggcgccccgcctcctccccctcaaaggaatgccagctatctcaagactcaggtgctaagtcccgatagcttatttactgccaaattcgtggcctataatgaagaggaggaggaagaggattgttcactggcaggtccaaatagctatcccggtagcaccggcgccgctgtgggagcccacgatgcctgtcgtgatgctaaggaaaaacgttctaagtcccaggacgcagattccccaggcagcagtggtgcccctgaaaatcttacctttaaggagcgtcaacgccttttttcacagggccaggacgtgagcaacaaggtgaaagctagcaggaaactgactgagctggagaatgagctgaacactaagtag

SEQ ID NO: 280657 - DNA, 5474 bp, Artificial Sequence
  derived and/or modified sequence
atgtccgcagggggtcgggacgaggagagacgcaaactggcagacatcattcaccactggaacgcgaaccggctggacctcttcgagatttcgcaacctacggaagatctcgagtttcatggggttatgagattctacttccaggataaggccgctggaaactttgctacgaaatgtatccgggtctcaagcactgccacgacccaggacgtcatcgagaccctggccgagaagttcagacccgacatgcgcatgttgtcctctccaaaatactctttgtacgaagtgcatgtaagcggagagagaagactggacattgacgaaaaacctctagtggtccagcttaactggaacaaagacgaccgggagggacgctttgtgttgaagaacgaaaacgatgcaatcccgccaaagaaggcccagagcaatggacctgaaaagcaagagaaggagggggtgatacagaattttaagcgcacactgagcaaaaaagagaaaaaggagaaaaagaaacgtgagaaggaggcgttaagacaggccagtgacaaggacgataggccatttcagggtgaggacgtggaaaactctcgcctcgctgccgaggtatataaggacatgcctgagacatcgttcactcggactatctccaatcctgaagtcgtgatgaagaggcggcgacagcagaagctggagaaacgcatgcaggagttccgttcgtcggacggacgacctgactccggcggtaccctgagaatctatgccgattcacttaaacccaatattccttataagaccattctgctgtccactactgaccctgcagatttcgccgtcgcagaggcccttgagaagtatggcctcgagaaggaaaaccctaaggactattgcatagccagagtcatgctgccccctggcgctcagcactccgacgagaagggcgcaaaagagatcatccttgatgacgatgaatgtcccctccaaattttcagagagtggccctcagataagggcatcctggtgtttcagctgaagagacgtccacccgatcacatacccaagaagaccaagaaacacctggaagggaaaaccccaaaagggaaggagcgcgctgacggatcaggttacggatccacgctcccaccggaaaaactaccttacttggtcgaattgtcaccgggtcgacgcaaccatttcgcctactataattaccacacctacgaggacgggtccgattcacgtgacaagcctaagctctataggctccagctaagcgtgacagaagttgggactgagaagcttgacgataatagcatacagctgtttgggccaggcattcagccgcatcattgtgacctcaccaatatggacggggtcgtcactgtgacccctcgatccatggacgctgagacttacgtagagggccagcgcatcagcgaaactaccatgctacagtccggcatgaaagtgcagtttggtgcatcacacgtgttcaagttcgttgatccctcccaggatcacgcgcttgcaaagaggtcagtggacggcggactcatggtcaaaggaccacggcacaagcccggaattgtccaggagacaaccttcgatttagggggtgatatccactccggcacagccctccctacctcaaagtctaccactcggctcgattccgaccgagtcagtagcgcttcctccacagcagagcggggaatggttaaaccaatgatccgagtcgagcagcagcccgattaccggaggcaagagtctaggacccaggacgcgagcggacccgagctcattctgcccgcaagcattgaatttagagagagctcagaagattcgttcctctccgccattattaattacacaaacagcagtaccgtacactttaagttatcccctacatacgttctgtacatggcttgtagatatgtcctgagcaatcaatacagacccgatatatcacccaccgaacgaacacataaagttatcgccgtggtcaataagatggtctctatgatggagggtgttattcagaaacagaaaaatatcgccggtgcgttagccttctggatggccaacgcctcggagctgctgaatttcatcaagcaagaccgtgatctctctagaattacactggatgcccaagatgtgctcgctcaccttgttcagatggcctttaaataccttgtacattgcctccagagcgaattgaataactatatgcccgcatttctcgatgaccctgaggagaactccttgcagagacctaaaatcgatgacgtgttgcatacgctgaccggggctatgtccttactaagacggtgtcgagtcaatgccgctctcacaatacagctttttagtcagctttttcatttcataaatatgtggctgttcaatagactcgtaacagatcccgattccggtctgtgtagccactattggggcgctataatccgccagcagctggggcacatcgaagcctgggctgaaaagcaaggtctggaactggctgccgattgccatttgtcgcggatcgtgcaggccaccaccttgctcactatggacaaatacgcccctgatgatatacctaatatcaacagtacctgttttaagctgaacagtcttcagctccaggcacttttgcagaattaccactgcgcccctgatgaaccatttattcctaccgatctgatcgagaacgtggtgactgttgccgaaaacaccgctgacgagttggctcggtcagacggaagggaggttcagcttgaggaggaccctgatcttcagctcccctttctgctgccggaagacggatactcgtgtgatgtcgtgcggaatatacccaacggtctacaagagttcttggatccgctttgccagcgaggattctgccgcctgattccccacactagatcccccggtacctggacaatttactttgagggcgctgactacgaatctcacttgcttagagagaataccgaactcgccatccccctccggaaagagcccgagataattaccgttacattgaaaaaacagaatggcatggggctcagtatcgtcgctgccaagggtgccggtcaggacaaactcggaatatacgtaaaatccgttgtaaaagggggagccgctgatgttgatggtaggcttgccgcaggggaccagctcctgtctgtggatgggagatcactggtcggtctgtcgcaagaaagagcagccgaacttatgacacggactagttctgtggtgaccctcgaagttgccaagcaaggcgctatctaccacggcctggcaacactcttgaaccagccctctcccatgatgcagcgtatcagtgacaggaggggcagcggtaagccaagacccaaatccgagggctttgagctctataataactcaacccaaaacggaagtcccgagagtccacagctcccctgggcggagtacagcgagcctaaaaaacttcctggcgacgacagattgatgaagaaccgtgctgaccaccgatcctcccctaatgtggcgaaccagccgccttcccccggtgggaaatccgcatacgcgagcggaaccaccgccaagatcacttccgtgtctactggaaatctctgcaccgaagaacagacaccaccgccacgcccagaggcttaccctatcccaacccagacatatacacgagagtactttacttttccagctagcaaatcacaggatcggatggcgcctcctcagaatcaatggcctaattacgaggagaagcctcatatgcatacagactcaaaccactcttcaattgcaatccaacgagtcacccggtcacaggaagaactgcgagaggataaagcctaccagctagagagacataggatagaggccgctatggatcgcaaatccgacagcgacatgtggatcaatcagtcaagttccctggacagctctacaagctctcaggagcacttaaaccactcatccaagtccgttacaccagccagcaccctcaccaagtccggccctgggagatggaagacaccagccgcaatacccgctactccagtcgcggtaagtcaaccgatacgtacagacctccctccaccccctcctcctccaccagtgcactacgcgggtgattttgatggtatgtccatggacttacctctcccacccccaccctccgccaatcagataggtctgccctccgcccaggtggctgccgctgaaagacgaaagagagaggaacatcagcggtggtacgaaaaagagaaggctcgtctggaggaagaacgagagcgaaaaaggcgggagcaggagaggaaacttggtcaaatgcggactcagtctctgaaccccgcacccttcagtcccttaacagcgcagcagatgaagccagaaaagccctcaacactgcaaagaccccaggaaactgtcatccgggagctgcaaccccaacaacagcctagaactattgagcggagagatctgcaatacatcacagtctctaaagaggaactctcttccggagactcactctcaccagacccatggaagcgggacgctaaagagaagctagaaaagcagcagcagatgcacatcgtggacatgctatctaaagaaattcaagaattgcagagcaaaccagacaggagcgcagaagagtcggaccgactccgtaaactgatgctagagtggcaattccagaagcgtctgcaggaatctaaacagaaggacgaagacgatgaagaggaggaggacgatgatgtggacactatgctcatcatgcagcggttggaagctgagcggagagctaggctgcaagatgaggagagaaggaggcagcagcagctcgaagaaatgcgaaagcgggaggccgaagaccgggctcgacaggaagaagagagaaggcgccaggaagaagaaagaactaagagggatgctgaggaaaagcggcgacaggaagaaggatactatagccggctagaggcagagaggcgcagacagcatgacgaagcagccaggcgattgttggaacctgaagctccaggactgtgccgcccaccactgcccagggattacgagccaccttctccctcccctgccccaggggcaccgccaccccctccacagcggaatgcaagctaccttaaaacgcaagtgctttctcccgattccctgttcaccgccaagtttgttgcttacaacgaggaagaagaagaagaagactgtagtctggctgggcctaattcataccctggttctaccggggctgccgtcggggcacacgacgcctgcagagatgcgaaggaaaagcgctccaaaagccaggacgccgacagtcccggaagtagtggagctcctgagaacctcacttttaaagagagacagaggcttttttcacagggtcaggacgtgtctaacaaggtgaaagcctctcggaaactgaccgagctggaaaatgaactgaacacaaagta

SEQ ID NO: 280658 - DNA, 5474 bp, Artificial Sequence
  derived and/or modified sequence
atgagcgccggaggaagagacgaagagcgaagaaaactggcagacattattcaccattggaacgccaatagactcgacctgttcgagatttctcagcctacggaggacctggagttccacggagtgatgagattttactttcaagacaaagcagctggaaactttgcaactaagtgcattagggtctcatctactgcaaccacccaggacgtgatcgagaccctcgcagagaagttccgcccagacatgcggatgttgtcttcacctaagtactccctttatgaagttcacgtgagcggtgagcgtagactggacatcgacgaaaagccgcttgtcgtgcagctgaattggaataaggacgaccgggagggcagatttgtgctgaagaatgagaacgacgctatccccccaaaaaaggcccagagcaatgggccagagaagcaggagaaggaaggcgtgatccaaaacttcaagcgtaccctgtccaagaaggaaaagaaagagaagaagaagagggagaaggaggcccttcgccaggcctctgataaggacgacagacccttccaaggagaggacgtcgagaatagcaggctggccgcagaggtgtataaagatatgccggagacgtcctttacgcgaactatcagcaatccggaagtggtaatgaaaagacgacgccagcagaaactggaaaagcggatgcaggagttccgatcatctgacggcagacccgattctggagggactctcagaatttatgcagacagcctcaagccaaatattccttataaaacaatcctgctcagtacaacggaccccgcagacttcgccgtcgctgaggccctcgaaaagtacggactagaaaaagagaaccccaaagattattgtatcgccagggtcatgctccctccaggcgcacagcacagtgacgagaagggagccaaagaaatcatactggatgatgacgaatgtccacttcagatattccgtgagtggccttccgacaaaggaattctggtgttccagttgaaacgcagaccccctgaccatattcctaagaagaccaagaagcatctggaggggaagacgcctaagggcaaggaaagggctgatggctctgggtatggttctacactgccacccgaaaagctgccatatctcgtggagctgtcacctggcagaagaaatcacttcgcctattacaactaccatacctacgaggatggcagtgacagtcgagataaaccaaagctgtaccgactgcagctgtcagtaaccgaggtagggactgagaaactagacgacaattctattcagctattcggtcctgggatccagccacatcattgcgacctgacgaacatggatggcgtcgtgactgtaactccgagatcaatggatgcagagacttatgtggagggacagcggatatccgagacaaccatgctgcaaagcggtatgaaagttcaattcggcgcttcccacgttttcaagtttgtcgatccctcgcaagaccatgcactggctaagcgcagcgtggacggtggcttaatggttaaggggcctagacacaagccaggcatcgtgcaggagaccacctttgacctgggcggtgatattcatagtggtacagctttgccaacctccaaatctactacgcgactagatagtgatagggtgagttcagccagttccacagctgagcggggtatggtgaagccaatgatccgcgtggaacagcagcctgactacagaagacaagagtcacggacccaggacgccagcggccctgagctcatcctccccgcatctatcgagttccgtgaatcttccgaagattcattcttgtccgcaataattaattacaccaacagttctaccgtacattttaaactgagcccaacttacgtgctgtatatggcttgcaggtacgtgctgagcaatcagtaccgcccagacattagcccaacggaacggacccataaggtcattgcagttgttaataagatggtatccatgatggaaggagtgatccagaaacagaagaatatcgccggagccctggcattttggatggctaatgcttcagagttgctgaatttcattaaacaggatcgggatctcagcaggataacactcgatgctcaggacgtgctcgctcacctggtacagatggctttcaagtatctcgtgcactgcctacagagcgaactcaataactacatgccagcttttctcgacgaccctgaggagaacagccttcagcggcctaagatagacgacgtactacataccctcaccggcgcaatgtctctgctgcgcagatgtcgggtcaatgctgcgctgaccatacagctgttttctcagctgttccacttcattaatatgtggttattcaaccggctcgtgacagatcccgacagcggcctttgttcccactattggggtgctatcatcagacagcagctgggacacatcgaagcctgggctgagaagcaaggtttggagctggcagccgactgtcacctatccagaattgttcaggcaactacacttctgacaatggataagtatgcgcctgacgacattcccaatattaactctacgtgctttaagctgaatagcctccagctgcaggccctactacaaaattatcactgtgcacccgacgagccattcattcctactgatctgattgaaaatgtggtcactgtagccgagaatacagccgacgaactggccaggtccgatgggagggaagtgcagcttgaagaagatcctgacctccagcttccctttctgttaccagaagacggatatagttgtgatgtagtgagaaacatccccaacggtctgcaggagtttttggatcccttgtgccagaggggcttttgccgcttgattccacacactcgctcacccggaacctggaccatttatttcgagggcgctgactacgagtcccacttattgagggagaacacagagttggcacagcccttgaggaaggagccggaaattatcacggtgaccctgaagaagcagaacggcatgggcctctctattgtcgcagctaagggcgctgggcaggacaagctgggaatctatgtaaaatcggtggttaagggtggagccgctgacgttgacggtcgcctggctgccggtgatcagctcctgagtgttgacggaagaagcctggttggcttaagccaggagagagccgcagagctgatgacacgaacatcttcagtggtgaccctcgaggtcgccaaacagggagcaatctaccatggtctggctacgctgcttaaccagccctcccccatgatgcagaggatttcggacagaagggggtctggcaaacccaggccaaagtcggaggggtttgaactgtacaacaactcaacccagaatggctcaccggagtctccccagctcccttgggctgagtactccgagcctaagaagctaccgggagatgacaggttgatgaaaaatcgcgcagaccatcgctcctcgcccaacgttgccaaccagcccccatcacctggcggaaagagtgcctatgcttccggaaccaccgcaaagataacatccgtctccactgggaacttgtgcaccgaagagcagacgccacctccaagacccgaggcctatccaatccccacccaaacgtacacgcgcgaatatttcacttttccagcttcaaaatctcaggaccgcatggctcctcctcaaaatcagtggcccaactacgaagagaagccccacatgcacaccgactccaatcactccagcatagcaattcagcgcgtgactcggagccaggaggagctgagagaagacaaggcctaccaattagaacggcaccgtatagaggctgctatggaccggaaatctgactcggatatgtggattaatcagtcaagcagccttgattccagcacatcatctcaggagcacctgaaccacagcagcaaaagcgtcacaccagcatctacgctaactaaaagcgggccagggagatggaagaccccagctgccatccccgcaacaccggtcgcagtgtcgcaaccaattcgcacggatttgcccccaccacctcccccacctcccgtacactatgctggagactttgacggcatgtcaatggacctgccactacccccacctccaagtgctaaccagatcgggctgccttccgcccaggtggctgccgcagaacggagaaaaagggaagagcatcaaagatggtacgaaaaagagaaagctcggctagaggaggagagagagaggaagcggcgtgagcaggaaaggaaactcgggcagatgcggacacaaagcttaaatccagcgccttttagccctctgacagcacagcagatgaaacccgaaaaaccctctacactgcaacgacctcaggaaactgtcatccgggaactgcaaccccagcaacaaccacgcaccatcgagcggagagatctgcagtacatcaccgtgtcaaaggaagaactcagctccggggacagcctctcccctgatccgtggaaacgggacgccaaggaaaagctagaaaagcagcagcagatgcacatcgtagacatgctctccaaagagattcaggagctgcagtccaagccagatagatctgctgaggagtcagatagattgcgaaagctgatgcttgagtggcagtttcagaaacggctgcaggaatccaaacagaaggatgaggatgacgaggaggaggaagatgacgacgtggatactatgctgattatgcagcggcttgaagcggagaggagagccaggctgcaggatgaagagcggaggcgccagcaacagttggaagaaatgagaaagcgcgaggctgaggaccgggcacgccaggaagaggaaagaaggcggcaggaagaagagcgcactaaaagggacgctgaagagaagagacgacaggaagaggggtattattctagactcgaagcagaacgaaggaggcagcacgatgaagcagcccgtcggctgctcgaacccgaggctccaggattgtgccgaccgcctctgcctcgagactacgaacccccttctccatcgccagccccaggagccccaccaccgccaccccagagaaacgcttcgtatctcaagacgcaggttctgagccccgattcactgtttactgcaaaattcgtggcttataatgaggaggaagaggaggaggactgtagtctcgccggaccaaattcgtatccagggagtacaggcgctgcagtgggagcgcatgacgcctgcagggacgctaaggagaagcggtcaaagagccaggatgcagactcccctggctcctcgggggctcctgagaacttgacctttaaagagaggcagagactgttcagtcagggccaagatgtttccaacaaagtgaaggcaagtaggaaactgacggagttagagaatgagctgaatacaaaata

SEQ ID NO: 280659 - DNA, 5475 bp, Artificial Sequence
  derived and/or modified sequence
atgagcgccggcggcagagacgaggagagaagaaagctggccgacatcatccaccactggaacgccaacagactggacctgttcgagatcagccagcccaccgaggacctggagttccacggcgtgatgagattctacttccaggacaaggccgccggcaacttcgccaccaagtgcatcagagtgagcagcaccgccaccacccaggacgtgatcgagaccctggccgagaagttcagacccgacatgagaatgctgagcagccccaagtacagcctgtacgaggtgcacgtgagcggcgagagaagactggacatcgacgagaagcccctggtggtgcagctgaactggaacaaggacgacagagagggcagattcgtgctgaagaacgagaacgacgccatcccccccaagaaggcccagagcaacggccccgagaagcaggagaaggagggcgtgatccagaacttcaagagaaccctgagcaagaaggagaagaaggagaagaagaagagagagaaggaggccctgagacaggccagcgacaaggacgacagacccttccagggcgaggacgtggagaacagcagactggccgccgaggtgtacaaggacatgcccgagaccagcttcaccagaaccatcagcaaccccgaggtggtgatgaagagaagaagacagcagaagctggagaagagaatgcaggagttcagaagcagcgacggcagacccgacagcggcggcaccctgagaatctacgccgacagcctgaagcccaacatcccctacaagaccatcctgctgagcaccaccgaccccgccgacttcgccgtggccgaggccctggagaagtacggcctggagaaggagaaccccaaggactactgcatcgccagagtgatgctgccccccggcgcccagcacagcgacgagaagggcgccaaggagatcatcctggacgacgacgagtgccccctgcagatcttcagagagtggcccagcgacaagggcatcctggtgttccagctgaagagaagaccccccgaccacatccccaagaagaccaagaagcacctggagggcaagacccccaagggcaaggagagagccgacggcagcggctacggcagcaccctgccccccgagaagctgccctacctggtggagctgagccccggcagaagaaaccacttcgcctactacaactaccacacctacgaggacggcagcgacagcagagacaagcccaagctgtacagactgcagctgagcgtgaccgaggtgggcaccgagaagctggacgacaacagcatccagctgttcggccccggcatccagccccaccactgcgacctgaccaacatggacggcgtggtgaccgtgacccccagaagcatggacgccgagacctacgtggagggccagagaatcagcgagaccaccatgctgcagagcggcatgaaggtgcagttcggcgccagccacgtgttcaagttcgtggaccccagccaggaccacgccctggccaagagaagcgtggacggcggcctgatggtgaagggccccagacacaagcccggcatcgtgcaggagaccaccttcgacctgggcggcgacatccacagcggcaccgccctgcccaccagcaagagcaccaccagactggacagcgacagagtgagcagcgccagcagcaccgccgagagaggcatggtgaagcccatgatcagagtggagcagcagcccgactacagaagacaggagagcagaacccaggacgccagcggccccgagctgatcctgcccgccagcatcgagttcagagagagcagcgaggacagcttcctgagcgccatcatcaactacaccaacagcagcaccgtgcacttcaagctgagccccacctacgtgctgtacatggcctgcagatacgtgctgagcaaccagtacagacccgacatcagccccaccgagagaacccacaaggtgatcgccgtggtgaacaagatggtgagcatgatggagggcgtgatccagaagcagaagaacatcgccggcgccctggccttctggatggccaacgccagcgagctgctgaacttcatcaagcaggacagagacctgagcagaatcaccctggacgcccaggacgtgctggcccacctggtgcagatggccttcaagtacctggtgcactgcctgcagagcgagctgaacaactacatgcccgccttcctggacgaccccgaggagaacagcctgcagagacccaagatcgacgacgtgctgcacaccctgaccggcgccatgagcctgctgagaagatgcagagtgaacgccgccctgaccatccagctgttcagccagctgttccacttcatcaacatgtggctgttcaacagactggtgaccgaccccgacagcggcctgtgcagccactactggggcgccatcatcagacagcagctgggccacatcgaggcctgggccgagaagcagggcctggagctggccgccgactgccacctgagcagaatcgtgcaggccaccaccctgctgaccatggacaagtacgcccccgacgacatccccaacatcaacagcacctgcttcaagctgaacagcctgcagctgcaggccctgctgcagaactaccactgcgcccccgacgagcccttcatccccaccgacctgatcgagaacgtggtgaccgtggccgagaacaccgccgacgagctggccagaagcgacggcagagaggtgcagctggaggaggaccccgacctgcagctgcccttcctgctgcccgaggacggctacagctgcgacgtggtgagaaacatccccaacggcctgcaggagttcctggaccccctgtgccagagaggcttctgcagactgatcccccacaccagaagccccggcacctggaccatctacttcgagggcgccgactacgagagccacctgctgagagagaacaccgagctggccatccccctgagaaaggagcccgagatcatcaccgtgaccctgaagaagcagaacggcatgggcctgagcatcgtggccgccaagggcgccggccaggacaagctgggcatctacgtgaagagcgtggtgaagggcggcgccgccgacgtggacggcagactggccgccggcgaccagctgctgagcgtggacggcagaagcctggtgggcctgagccaggagagagccgccgagctgatgaccagaaccagcagcgtggtgaccctggaggtggccaagcagggcgccatctaccacggcctggccaccctgctgaaccagcccagccccatgatgcagagaatcagcgacagaagaggcagcggcaagcccagacccaagagcgagggcttcgagctgtacaacaacagcacccagaacggcagccccgagagcccccagctgccctgggccgagtacagcgagcccaagaagctgcccggcgacgacagactgatgaagaacagagccgaccacagaagcagccccaacgtggccaaccagccccccagccccggcggcaagagcgcctacgccagcggcaccaccgccaagatcaccagcgtgagcaccggcaacctgtgcaccgaggagcagacccccccccccagacccgaggcctaccccatccccacccagacctacaccagagagtacttcaccttccccgccagcaagagccaggacagaatggcccccccccagaaccagtggcccaactacgaggagaagccccacatgcacaccgacagcaaccacagcagcatcgccatccagagagtgaccagaagccaggaggagctgagagaggacaaggcctaccagctggagagacacagaatcgaggccgccatggacagaaagagcgacagcgacatgtggatcaaccagagcagcagcctggacagcagcaccagcagccaggagcacctgaaccacagcagcaagagcgtgacccccgccagcaccctgaccaagagcggccccggcagatggaagacccccgccgccatccccgccacccccgtggccgtgagccagcccatcagaaccgacctgccccccccccccccccccccccccgtgcactacgccggcgacttcgacggcatgagcatggacctgcccctgccccccccccccagcgccaaccagatcggcctgcccagcgcccaggtggccgccgccgagagaagaaagagagaggagcaccagagatggtacgagaaggagaaggccagactggaggaggagagagagagaaagagaagagagcaggagagaaagctgggccagatgagaacccagagcctgaaccccgcccccttcagccccctgaccgcccagcagatgaagcccgagaagcccagcaccctgcagagaccccaggagaccgtgatcagagagctgcagccccagcagcagcccagaaccatcgagagaagagacctgcagtacatcaccgtgagcaaggaggagctgagcagcggcgacagcctgagccccgacccctggaagagagacgccaaggagaagctggagaagcagcagcagatgcacatcgtggacatgctgagcaaggagatccaggagctgcagagcaagcccgacagaagcgccgaggagagcgacagactgagaaagctgatgctggagtggcagttccagaagagactgcaggagagcaagcagaaggacgaggacgacgaggaggaggaggacgacgacgtggacaccatgctgatcatgcagagactggaggccgagagaagagccagactgcaggacgaggagagaagaagacagcagcagctggaggagatgagaaagagagaggccgaggacagagccagacaggaggaggagagaagaagacaggaggaggagagaaccaagagagacgccgaggagaagagaagacaggaggagggctactacagcagactggaggccgagagaagaagacagcacgacgaggccgccagaagactgctggagcccgaggcccccggcctgtgcagaccccccctgcccagagactacgagccccccagccccagccccgcccccggcgccccccccccccccccccagagaaacgccagctacctgaagacccaggtgctgagccccgacagcctgttcaccgccaagttcgtggcctacaacgaggaggaggaggaggaggactgcagcctggccggccccaacagctaccccggcagcaccggcgccgccgtgggcgcccacgacgcctgcagagacgccaaggagaagagaagcaagagccaggacgccgacagccccggcagcagcggcgcccccgagaacctgaccttcaaggagagacagagactgttcagccagggccaggacgtgagcaacaaggtgaaggccagcagaaagctgaccgagctggagaacgagctgaacaccaagtag

SEQ ID NO: 280660 - DNA, 5475 bp, Artificial Sequence
  derived and/or modified sequence
atgagcgccggcggcagagacgaggagagaagaaagctggccgacatcatccaccactggaacgccaacagactggacctgttcgagatcagccagcccaccgaggacctggagttccacggcgtgatgagattctacttccaggacaaggccgccggcaacttcgccaccaagtgcatcagagtgagcagcaccgccaccacccaggacgtgatcgagaccctggccgagaagttcagacccgacatgagaatgctgagcagccccaagtacagcctgtacgaggtgcacgtgagcggcgagagaagactggacatcgacgagaagcccctggtggtgcagctgaactggaacaaggacgacagagagggcagattcgtgctgaagaacgagaacgacgccatcccccccaagaaggcccagagcaacggccccgagaagcaggagaaggagggcgtgatccagaacttcaagagaaccctgagcaagaaggagaagaaggagaagaagaagagagagaaggaggccctgagacaggccagcgacaaggacgacagacccttccagggcgaggacgtggagaacagcagactggccgccgaggtgtacaaggacatgcccgagaccagcttcaccagaaccatcagcaaccccgaggtggtgatgaagagaagaagacagcagaagctggagaagagaatgcaggagttcagaagcagcgacggcagacccgacagcggcggcaccctgagaatctacgccgacagcctgaagcccaacatcccctacaagaccatcctgctgagcaccaccgaccccgccgacttcgccgtggccgaggccctggagaagtacggcctggagaaggagaaccccaaggactactgcatcgccagagtgatgctgccccccggcgcccagcacagcgacgagaagggcgccaaggagatcatcctggacgacgacgagtgccccctgcagatcttcagagagtggcccagcgacaagggcatcctggtgttccagctgaagagaagaccccccgaccacatccccaagaagaccaagaagcacctggagggcaagacccccaagggcaaggagagagccgacggcagcggctacggcagcaccctgccccccgagaagctgccctacctggtggagctgagccccggcagaagaaaccacttcgcctactacaactaccacacctacgaggacggcagcgacagcagagacaagcccaagctgtacagactgcagctgagcgtgaccgaggtgggcaccgagaagctggacgacaacagcatccagctgttcggccccggcatccagccccaccactgcgacctgaccaacatggacggcgtggtgaccgtgacccccagaagcatggacgccgagacctacgtggagggccagagaatcagcgagaccaccatgctgcagagcggcatgaaggtgcagttcggcgccagccacgtgttcaagttcgtggaccccagccaggaccacgccctggccaagagaagcgtggacggcggcctgatggtgaagggccccagacacaagcccggcatcgtgcaggagaccaccttcgacctgggcggcgacatccacagcggcaccgccctgcccaccagcaagagcaccaccagactggacagcgacagagtgagcagcgccagcagcaccgccgagagaggcatggtgaagcccatgatcagagtggagcagcagcccgactacagaagacaggagagcagaacccaggacgccagcggccccgagctgatcctgcccgccagcatcgagttcagagagagcagcgaggacagcttcctgagcgccatcatcaactacaccaacagcagcaccgtgcacttcaagctgagccccacctacgtgctgtacatggcctgcagatacgtgctgagcaaccagtacagacccgacatcagccccaccgagagaacccacaaggtgatcgccgtggtgaacaagatggtgagcatgatggagggcgtgatccagaagcagaagaacatcgccggcgccctggccttctggatggccaacgccagcgagctgctgaacttcatcaagcaggacagagacctgagcagaatcaccctggacgcccaggacgtgctggcccacctggtgcagatggccttcaagtacctggtgcactgcctgcagagcgagctgaacaactacatgcccgccttcctggacgaccccgaggagaacagcctgcagagacccaagatcgacgacgtgctgcacaccctgaccggcgccatgagcctgctgagaagatgcagagtgaacgccgccctgaccatccagctgttcagccagctgttccacttcatcaacatgtggctgttcaacagactggtgaccgaccccgacagcggcctgtgcagccactactggggcgccatcatcagacagcagctgggccacatcgaggcctgggccgagaagcagggcctggagctggccgccgactgccacctgagcagaatcgtgcaggccaccaccctgctgaccatggacaagtacgcccccgacgacatccccaacatcaacagcacctgcttcaagctgaacagcctgcagctgcaggccctgctgcagaactaccactgcgcccccgacgagcccttcatccccaccgacctgatcgagaacgtggtgaccgtggccgagaacaccgccgacgagctggccagaagcgacggcagagaggtgcagctggaggaggaccccgacctgcagctgcccttcctgctgcccgaggacggctacagctgcgacgtggtgagaaacatccccaacggcctgcaggagttcctggaccccctgtgccagagaggcttctgcagactgatcccccacaccagaagccccggcacctggaccatctacttcgagggcgccgactacgagagccacctgctgagagagaacaccgagctggcccagcccctgagaaaggagcccgagatcatcaccgtgaccctgaagaagcagaacggcatgggcctgagcatcgtggccgccaagggcgccggccaggacaagctgggcatctacgtgaagagcgtggtgaagggcggcgccgccgacgtggacggcagactggccgccggcgaccagctgctgagcgtggacggcagaagcctggtgggcctgagccaggagagagccgccgagctgatgaccagaaccagcagcgtggtgaccctggaggtggccaagcagggcgccatctaccacggcctggccaccctgctgaaccagcccagccccatgatgcagagaatcagcgacagaagaggcagcggcaagcccagacccaagagcgagggcttcgagctgtacaacaacagcacccagaacggcagccccgagagcccccagctgccctgggccgagtacagcgagcccaagaagctgcccggcgacgacagactgatgaagaacagagccgaccacagaagcagccccaacgtggccaaccagccccccagccccggcggcaagagcgcctacgccagcggcaccaccgccaagatcaccagcgtgagcaccggcaacctgtgcaccgaggagcagacccccccccccagacccgaggcctaccccatccccacccagacctacaccagagagtacttcaccttccccgccagcaagagccaggacagaatggcccccccccagaaccagtggcccaactacgaggagaagccccacatgcacaccgacagcaaccacagcagcatcgccatccagagagtgaccagaagccaggaggagctgagagaggacaaggcctaccagctggagagacacagaatcgaggccgccatggacagaaagagcgacagcgacatgtggatcaaccagagcagcagcctggacagcagcaccagcagccaggagcacctgaaccacagcagcaagagcgtgacccccgccagcaccctgaccaagagcggccccggcagatggaagacccccgccgccatccccgccacccccgtggccgtgagccagcccatcagaaccgacctgccccccccccccccccccccccccgtgcactacgccggcgacttcgacggcatgagcatggacctgcccctgccccccccccccagcgccaaccagatcggcctgcccagcgcccaggtggccgccgccgagagaagaaagagagaggagcaccagagatggtacgagaaggagaaggccagactggaggaggagagagagagaaagagaagagagcaggagagaaagctgggccagatgagaacccagagcctgaaccccgcccccttcagccccctgaccgcccagcagatgaagcccgagaagcccagcaccctgcagagaccccaggagaccgtgatcagagagctgcagccccagcagcagcccagaaccatcgagagaagagacctgcagtacatcaccgtgagcaaggaggagctgagcagcggcgacagcctgagccccgacccctggaagagagacgccaaggagaagctggagaagcagcagcagatgcacatcgtggacatgctgagcaaggagatccaggagctgcagagcaagcccgacagaagcgccgaggagagcgacagactgagaaagctgatgctggagtggcagttccagaagagactgcaggagagcaagcagaaggacgaggacgacgaggaggaggaggacgacgacgtggacaccatgctgatcatgcagagactggaggccgagagaagagccagactgcaggacgaggagagaagaagacagcagcagctggaggagatgagaaagagagaggccgaggacagagccagacaggaggaggagagaagaagacaggaggaggagagaaccaagagagacgccgaggagaagagaagacaggaggagggctactacagcagactggaggccgagagaagaagacagcacgacgaggccgccagaagactgctggagcccgaggcccccggcctgtgcagaccccccctgcccagagactacgagccccccagccccagccccgcccccggcgccccccccccccccccccagagaaacgccagctacctgaagacccaggtgctgagccccgacagcctgttcaccgccaagttcgtggcctacaacgaggaggaggaggaggaggactgcagcctggccggccccaacagctaccccggcagcaccggcgccgccgtgggcgcccacgacgcctgcagagacgccaaggagaagagaagcaagagccaggacgccgacagccccggcagcagcggcgcccccgagaacctgaccttcaaggagagacagagactgttcagccagggccaggacgtgagcaacaaggtgaaggccagcagaaagctgaccgagctggagaacgagctgaacaccaagtag

SEQ ID NO: 280661 - protein, 245 aa, Artificial Sequence
  derived and/or modified sequence
MALVPCQVLRMAILLSYCSILCNYKAIEMPSHQTYGGSWKFLTFIDLVIQAVFFGICVLTDLSSLLTRGSGNQEQERQLKKLISLRDWMLAVLAFPVGVFVVAVFWIIYAYDREMIYPKLLDNFIPGWLNHGMHTTVLPFILIEMRTSHHQYPSRSSGLTAICTFSVGYILWVCWVHHVTGMWVYPFLEHIGPGARIIFFGSTTILMNFLYLLGEVLNNYIWDTQKKPPSWQDMKIKFMYLGPSS

SEQ ID NO: 280662 - DNA, 738 bp, Artificial Sequence
  derived and/or modified sequence
atggccctggtgccctgccaggtgctgagaatggccatcctgctgagctactgcagcatcctgtgcaactacaaggccatcgagatgcccagccaccagacctacggcggcagctggaagttcctgaccttcatcgacctggtgatccaggccgtgttcttcggcatctgcgtgctgaccgacctgagcagcctgctgaccagaggcagcggcaaccaggagcaggagagacagctgaagaagctgatcagcctgagagactggatgctggccgtgctggccttccccgtgggcgtgttcgtggtggccgtgttctggatcatctacgcctacgacagagagatgatctaccccaagctgctggacaacttcatccccggctggctgaaccacggcatgcacaccaccgtgctgcccttcatcctgatcgagatgagaaccagccaccaccagtaccccagcagaagcagcggcctgaccgccatctgcaccttcagcgtgggctacatcctgtgggtgtgctgggtgcaccacgtgaccggcatgtgggtgtaccccttcctggagcacatcggccccggcgccagaatcatcttcttcggcagcaccaccatcctgatgaacttcctgtacctgctgggcgaggtgctgaacaactacatctgggacacccagaagaagccccccagctggcaggacatgaagatcaagttcatgtacctgggccccagcagctag

SEQ ID NO: 280663 - DNA, 738 bp, Artificial Sequence
  derived and/or modified sequence
atggcgcttgtgccctgccaggttttgaggatggccatcttactgtcttattgctccattttgtgcaactacaaggctatcgaaatgccaagtcaccagacttacggagggtcctggaagttcctcacctttatcgacttggtcatacaagcagttttttttggcatctgtgtgctcactgatttgtcttccctcctgaccagagggagcgggaatcaagagcaggagcggcaactcaagaaactgatttccttgcgggactggatgctcgctgtgctggcctttccagtgggagtcttcgtggtggccgtgttttggattatatacgcctatgaccgcgagatgatctaccctaagctgctcgacaacttcataccggggtggctgaatcatggaatgcatacaactgttctgccctttatcctgatcgaaatgcggaccagccaccatcagtacccgtcacggagctcaggccttacagccatctgcactttcagcgtgggatatatcctgtgggtgtgttgggtccatcacgtgaccggcatgtgggtgtacccatttctggagcatattggaccaggggcccgtattatctttttcgggagcaccacaatcttaatgaacttcttgtacctccttggggaggttctgaacaactatatctgggatacacaaaagaagcccccttcatggcaagatatgaagatcaagttcatgtacctcggaccatcatcctag

SEQ ID NO: 280664 - DNA, 738 bp, Artificial Sequence
  derived and/or modified sequence
atggccctggtgccctgccaggtgctgaggatggccatcctgctgagctactgcagcatcctgtgcaactacaaggccatcgagatgcccagccaccagacctatggaggctcctggaagttcctgaccttcatcgacctggtgatccaggccgtgttcttcggcatctgtgtgctgacagacctgagcagcctgctgacccggggcagcggcaaccaggagcaggagcggcagctgaagaagctgatcagcctgcgggactggatgctggccgtgctggccttccctgtgggcgtgtttgtggtggccgtgttctggatcatctatgcctatgaccgggagatgatctaccccaagctgctggacaacttcatccctggctggctgaaccacggcatgcacaccaccgtgctgcccttcatcctgattgagatgaggaccagccaccaccagtaccccagccgcagcagcggcctgacagccatctgcaccttctctgtgggctacatcctgtgggtgtgctgggtgcaccacgtgacaggcatgtgggtgtaccccttcctggagcacatcggccctggggcccgcatcatcttcttcggcagcaccaccatcctgatgaacttcctgtacctgctgggggaggtgctgaacaactacatctgggacacccagaagaagccacccagctggcaggacatgaagatcaagttcatgtacctgggccccagcagctag

SEQ ID NO: 280665 - DNA, 1202 bp, Artificial Sequence
  derived and/or modified sequence
cagccggtccaggcctctggcgaacatggcgcttgtcccctgccaggtgctgcggatggcaatcctgctgtcttactgctctatcctgtgtaactacaaggccatcgaaatgccctcacaccagacctacggagggagctggaaattcctgacgttcattgatctggttatccaggctgtcttttttggcatctgtgtgctgactgatctttccagtcttctgactcgaggaagtgggaaccaggagcaagagaggcagctcaagaagctcatctctctccgggactggatgttagctgtgttggcctttcctgttggggtttttgttgtagcagtgttctggatcatttatgcctatgacagagagatgatatacccgaagctgctggataattttatcccagggtggctgaatcacggaatgcacacgacggttctgccctttatattaatcgagatgaggacatcgcaccatcagtatcccagcaggagcagcggacttaccgccatatgtaccttctctgttggctatatattatgggtgtgctgggtgcatcatgtaactggcatgtgggtgtaccctttcctggaacacattggcccaggagccagaatcatcttctttgggtctacaaccatcttaatgaacttcctgtacctgctgggagaagttctgaacaactatatctgggatacacagaaaaagcctccatcttggcaagatatgaaaattaagtttatgtacctaggaccatctagttagttccacaaagacagatgttttgtgccaagtaagtatcatcctcatttacaagaggggtcacaaactgctggcctcccccaacttctacctatcaagttctgttaggcctacatcgtggaatttttgtttttgaatcagtattttaaaattgggtgattttggctgggcgcagtggctcatgcctgtaatcccggcactttgggagactgaggcaggtggatcacgaggtcaagagatggagaccatcctggccaacatggtgaaatcccatctctactaaaaatacaaaaattagccaggcatggtggcgtgtgcctgtagtcccaggtactcgggaggctgaggcaggagaactgcttgaacccaggaggcagaggttgcagtgagctgagatcatgccactgcaccccagcctggcaacagaacaagactccatctc

SEQ ID NO: 280666 - DNA, 738 bp, Artificial Sequence
  derived and/or modified sequence
atggccctggtgccctgccaggtgctgcggatggccatcctgctgagttattgttcaatcctctgtaattataaggccattgagatgccgagccatcagacttacggcggatcgtggaagttccttacattcatcgatctcgtgattcaggcagtgtttttcgggatatgtgtcctcacagacctgagttcactactcactcggggttccgggaaccaggaacaggagagacagttgaagaagctgatttcactgcgtgactggatgcttgccgtacttgccttccccgtcggcgttttcgttgtggcggtgttctggataatttacgcctatgatagagaaatgatctaccctaaacttctggataacttcatcccagggtggctaaaccatggtatgcacactactgtgcttcccttcatactgatcgagatgaggacaagtcaccaccagtacccctcgcgcagtagcggactcactgctatttgtacgttctctgtgggatacatcctttgggtttgctgggtgcatcacgtgaccgggatgtgggtatatccatttttagagcacataggaccaggcgcccgcattattttctttggatcaacaaccatattgatgaacttcctctatctgctgggagaggtactcaataactacatctgggatactcaaaaaaagccaccatcctggcaggacatgaagataaagtttatgtacctgggaccaagtagctag

SEQ ID NO: 280667 - DNA, 738 bp, Artificial Sequence
  derived and/or modified sequence
atggctctagtgccgtgtcaagtgctgagaatggccatacttttaagctattgctcaatcctgtgcaactacaaagcaatcgaaatgcctagccaccagacatatggcggatcctggaagttcctgaccttcattgaccttgtaatacaggcggtgttcttcggtatatgcgttttgaccgatttgagcagcctattgacaagaggtagtggcaaccaagaacaagaacggcagctcaaaaagcttatcagtctgcgggattggatgcttgccgtgctagcatttccggtgggcgtgttcgtcgtggctgttttctggataatctacgcctatgaccgggaaatgatctatcccaaacttctggacaacttcattccgggatggctgaatcacggcatgcacaccaccgtcttgccattcatccttattgaaatgaggacttcacaccaccaatacccctcccgctcctctggcttgaccgccatctgcacgttcagcgtgggatacatactctgggtgtgctgggtacaccatgtcacaggcatgtgggtgtatccattcctggaacacatcggaccaggcgctagaattatctttttcggatcaactactatcttgatgaactttctttatctgctaggggaggtgctgaacaattacatttgggacacacagaaaaaacccccatcctggcaagacatgaagattaagttcatgtaccttggcccatcatcctag

SEQ ID NO: 280668 - DNA, 3562 bp, Artificial Sequence
  derived and/or modified sequence
tggctatttctgttttttcctctggagtttgtttctctggctgtatgacttgcatgatacttaatccattctttctgtgctgcttatagttatttttagggtttcattaatactgtatcatgatgccaaacaacagactttagaaaatataatgcattgaagataacccattgctacacagttggggctttttgcatgtaatgtttgtgagtgagtggcatgctagagttttctggagaatttggtcctgccatgaatgtgctggttttagttaaaaactttgacctgctttttcactcttgttcactgggcaccttttttattttaaggtggatattttggctcagattggttgtgtcgaaagtctcagccagtcaccaccttcttctccttctccttctccttcttccatatataaggttggcagtggcaatgacccctggtcagcctggagtgcctccaaatctgggaactgggaaagctcagaaggctggggggcccagccagagggggctggagcccaaagaaacacaaacactcccaacaactgggacactgccttcggccacccccaggcctaccaaggaccagcaactggtgatgatgatgactgggatgaagactgggatgggcccaaatcctcttcctactttaaggattcagagtcagctgatgcaggcggcgctcagcgaggaaacagtcgtgctagttcctcatccatgaaaattccccttaacaaatttcctggatttgcgaaacctggcacggaacagtatttgttggccaaacaactagcaaaacccaaagagaaaattcccatcattgttggagattatggcccaatgtgggtttatcctacctctacttttgactgtgtggtagcagatcccaggaaaggctccaaaatgtatggtctaaagagctacatcgaatatcagctaacacctactaacactaatcgatctgtaaaccacaggtataagcactttgactggttatatgagcgtctcctggttaagtttgggtcagccattccaatcccttctcttccagacaaacaagtcacaggccgctttgaagaggaatttatcaaaatgcgcatggagagacttcaggcctggatgaccaggatgtgtcgccatccagtaatctcagaaagtgaagttttccagcagttcctaaatttccgagatgagaaggaatggaaaactggaaagaggaaggccgagagagatgagctggcgggagtcatgatattttccaccatggaaccagaggcacctgacttggacttagtagaaatagagcagaagtgcgaggctgtggggaagttcaccaaggccatggatgacggcgtgaaggagctgctgacggtggggcaggagcactggaagcgctgcacgggcccattacccaaggaatatcagaagataggaaaggccttgcagagtttggccacagtgttcagttccagtggctatcaaggtgaaacagatctcaatgatgcaataacagaagcaggaaagacttatgaagaaattgccagtctcgtggcagaacagccaaagaaagatctccatttcctgatggaatgtaatcacgagtataaaggttttcttggctgcttccctgacatcattggcactcacaagggagcaatagaaaaagtgaaagaaagtgacaaactagttgcaacaagtaaaatcaccctacaagacaaacagaacatggtgaagagagtcagcatcatgtcttacgcgttgcaagctgagatgaatcactttcacagtaaccggatctatgattacaacagtgtcatccgcctgtacctggagcagcaagtgcaattttacgaaacgattgcagaaaagctgaggcaggccctcagccgctttccagtgatgtaggacagaacgggccttgaagagaatgccgcgtgctttctcctgacttggggcaatgcaattcaaaactttttttcccctattattcagaaaaaaaaggaaacaaaaccaaaaagaaagagttgcaaaaaactgcatttattttattagccaccctaaatgcgtcagttatttagggatggtcttttgttcatttccgcatccattatttaaaccagtggaaattgtctctatttttggaaagtacttaaaagttaccagaattttcaatggaaaatgaggggtttctccccactgatattttacatagagtcataatttatatgtcttataaattataagtcttatataatttataagtctcccacaatcttccagttcttacccagtgtcagataattaattactaattactttcttaaaaacatgaactatgccagaataaaaaatatctatgtttgtatatttttataactcctttcagtcctctggggctcctgtcattgagggaagtcgttacgcctttcactgccacagttacagctcaagtgcttacacttcaagagggaggacgctgggggcccctggggctgctagtgccatcgtggtgtgtggcaggtgggccatcccatgtccctccagggggaccccacagcctggcagatgagcagatacccctggccacccatgtcctcagcgacatttctgatgtgctgctcttatgtgaggaccagtgctttctctctttgcacttccttcctaatcttggttaaggcatgttttatgccatgaagaatacattagaagaattgagggactttgtagagaattttgtggctttggtccaacgggtgagtggctgtgcggaggcctgtgttcgggagggcctgggagaaggagggcacccagcaccccggcgtctctggccctttcttattctttggctcctcatccaccgtgatgagaagcgctgctgtggccacggcacactgcttggcttgggtggcgggttcatggccagttggtgtcatcagcaaagagaaaaagcacaggttagctccccattagatggaaaagtgtagggactgagaagggctgcagcctcagcagtgtacagagtccccggcgctctgaggttggagagaaagaacagaccagcgcccttcccgactacatccgaaacttcacacagggtgtttctgagcaccagcacttccagcgcttcacttaacggcataaagcaaaacaggaccttggcacaccgtcagctcgaactcaacactggcagccaccgtctcacccctgcggaggagcgctcccgtctcccacaggtgccttaccgcgttccctcccgctgctttcatttttctgacctaataattacgggaaatggaaagtctgggccagcatcaataaaatgacaccaaaaataagtagatgaaatcaaatgaatatgagaacatcttgttcttcaatatcacgggtttttgttaatgtttcataagtaattctccccacttgatttttcttctataaaatcccatagaacaatgtttatgctatagccatttaatatatgtacaaattgtaaagaatatgtataaatgttttacacgaatgtaagagcatgtagaagccaacatataaataaattgttt

SEQ ID NO: 280669 - protein, 141 aa, Artificial Sequence
  derived and/or modified sequence
MKILDVGCGGGLLTEPGGSLFITTINKTQLSYALGIVFSEQIASIVPKGTHTWEKFVSPETLESILESNGLSVQTVVGMLYNPFSGYWHWSENTSLNYAAYAVKSRVQEHPASAEFVLKGETEELQANACTNPAVHEKLKK

SEQ ID NO: 280670 - DNA, 426 bp, Artificial Sequence
  derived and/or modified sequence
atgaagatcctggacgtgggctgcggcggcggcctgctgaccgagcccggcggcagcctgttcatcaccaccatcaacaagacccagctgagctacgccctgggcatcgtgttcagcgagcagatcgccagcatcgtgcccaagggcacccacacctgggagaagttcgtgagccccgagaccctggagagcatcctggagagcaacggcctgagcgtgcagaccgtggtgggcatgctgtacaaccccttcagcggctactggcactggagcgagaacaccagcctgaactacgccgcctacgccgtgaagagcagagtgcaggagcaccccgccagcgccgagttcgtgctgaagggcgagaccgaggagctgcaggccaacgcctgcaccaaccccgccgtgcacgagaagctgaagaagtag

SEQ ID NO: 280671 - DNA, 426 bp, Artificial Sequence
  derived and/or modified sequence
atgaagattctcgacgtgggatgtgggggtggcttgcttactgagcccggaggtagcttgttcatcactacgattaataaaacacagctctcctacgcactggggatcgtgttttctgagcagattgcaagcatcgtgccaaagggcacccacacctgggaaaaatttgtctctccagagacgcttgagtcgattcttgagtctaacggactgagcgtccagactgtggtgggaatgttgtataatcccttctctggctattggcattggtctgagaacacctcactgaattatgcagcctacgctgtaaagtcccgggtacaggagcaccccgcctcagccgaattcgtgctgaagggcgaaacagaagagttgcaagccaatgcttgtactaacccagcagttcacgagaaattaaagaagtag

SEQ ID NO: 280672 - DNA, 426 bp, Artificial Sequence
  derived and/or modified sequence
atgaaaatactggatgttgggtgcggaggtggcttacttacagagcccggcggatcactgttcatcactactattaacaagacacagctgagctacgcactaggaatcgtgttttccgaacagatcgcaagtatcgtgcccaaaggtactcacacttgggagaagtttgtgtcaccagagaccctcgagtcgatccttgagtccaatggattgtccgttcaaaccgtggtcggtatgctgtacaaccctttttccggctactggcattggtctgaaaatacaagcttgaactatgcggcttatgccgtcaagagcagggtccaggaacaccctgcatcagctgaatttgtgttaaaaggcgagactgaggagttgcaagccaacgcttgcaccaatccagcggtgcatgagaaattgaagaaatag

SEQ ID NO: 280673 - DNA, 646 bp, Artificial Sequence
  derived and/or modified sequence
cagccaggaaaacctttgttggggatgaagattcttgacgttggctgtggtggtgggctgttaactgaacccggtggttctttattcattactacaatcaacaaaacacaactttcctatgccttgggaattgttttttcagagcaaattgcaagtattgtaccaaaaggtactcatacatgggagaagtttgtttcacctgaaacactagagagcattctggaatcaaatggtctgtcagttcaaacagtggtaggaatgctctataaccccttctcaggttactggcattggagtgaaaataccagccttaactatgcagcttatgctgtgaaatccagggtccaggaacacccagcctctgctgagtttgttttaaagggagaaacagaagagctccaagctaatgcctgcaccaatccagctgtgcatgaaaagctgaagaaatgaattgtttctgagaactatagtaatatggcttggatatctgatgttttcaaatacaaaaatgtacaatttatcctttgagagagaatcatgaagaaaagaaggtcaataaaaagggctaaaaccttggacaaaagtttttgttatttcgtctaatagctactttcaagggattctgtgaataaaaagttttgtcaag

SEQ ID NO: 280674 - DNA, 1092 bp, Artificial Sequence
  derived and/or modified sequence
aaaagaggtgggatcgtttgtcgcgatgtggagtggccgtaagctgggctcctccgggggttggtttttaagagtgctggggcctggaggctgtaatacaaaagctgcgcgtcccttaatttcctcggcggtttatgtgaagaaccagctcagtgggactctacagattaaaccaggggttttcaatgaatacagaaccatatggttcaaatcctacaggacgatcttttcctgtttgaacagaataaagagtttcaggtacccttgggcgagactgtacagtacttcccaaaccactgtcgacagcggtgaggtaaaaaccttcttggccctggctcacaaatggtgggatgaacaaggagtatatgcacctcttcattccatgaatgacctgagggtgccatttattagggacaatcttctgaaaacaattcctaatcaccagccaggaaaacctttgttggggatgaagattcttgacgttggctgtggtggtgggctgttaactgaacccggtggttctttattcattactacaatcaacaaaacacaactttcctatgccttgggaattgttttttcagagcaaattgcaagtattgtaccaaaaggtactcatacatgggagaagtttgtttcacctgaaacactagagagcattctggaatcaaatggtctgtcagttcaaacagtggtaggaatgctctataaccccttctcaggttactggcattggagtgaaaataccagccttaactatgcagcttatgctgtgaaatccagggtccaggaacacccagcctctgctgagtttgttttaaagggagaaacagaagagctccaagctaatgcctgcaccaatccagctgtgcatgaaaagctgaagaaatgaattgtttctgagaactatagtaatatggcttggatatctgatgttttcaaatacaaaaatgtacaatttatcctttgagagagaatcatgaagaaaagaaggtcaataaaaagggctaaaaccttggacaaaagtttttgttatttcgtctaatagctactttcaagggattctgtgaataaaaagttttgtcaagatat

SEQ ID NO: 280675 - DNA, 426 bp, Artificial Sequence
  derived and/or modified sequence
atgaagatcctggatgtgggctgcggcggcggcctgctgacagagcccggcggcagcctcttcatcaccaccatcaacaagacccagctgtcctatgccctgggcatcgtgttttctgagcagatcgccagcatcgtgcccaagggcacccacacctgggagaagtttgtgtccccagagaccctggagagcatcctggagagcaatggcctgtctgtgcagacagtggtgggcatgctgtacaaccccttcagcggctactggcactggagcgagaacaccagcctgaactatgctgcctatgctgtgaagagccgggtgcaggagcacccagccagcgctgagtttgtgctgaagggggagacagaggagctgcaggccaatgcctgcaccaacccagctgtgcatgagaagctgaagaagtag

SEQ ID NO: 280676 - DNA, 426 bp, Artificial Sequence
  derived and/or modified sequence
atgaagatcctggacgtgggctgcggcggcggcctgctgaccgagcccggaggtagcctgtttattacaacaataaataagacccagctctcatatgctctgggaatcgtcttctcagagcaaattgccagtatagtcccaaagggtacacacacttgggagaaatttgtaagcccggaaacgttggaaagtatcctcgaatcaaacgggctgtctgtccagacagtggtggggatgctatataaccccttctccggttactggcattggagcgaaaacaccagtctgaactacgcggcctacgctgtgaagagccgcgtgcaggaacatcctgcttccgcagagtttgttctgaagggcgaaaccgaggagttgcaggccaatgcctgcacaaatccagcagtgcatgagaaactgaaaaagtag

SEQ ID NO: 280677 - DNA, 426 bp, Artificial Sequence
  derived and/or modified sequence
atgaagatcctggacgtgggctgcggcggcggcctgctgaccgagcctggaggttcactgtttataaccacaatcaataagacccaactttcctacgctctcggaatagtgtttagcgagcaaatcgcgtccatcgtgccaaaaggtacccatacatgggagaaattcgtgagccccgaaacactggaatcaatcctcgaaagtaacggtctaagcgtccagacggtggttggtatgctgtataacccgttttccggctactggcactggtccgagaacactagcctgaactacgcagcatatgcggttaagagtcgggtgcaagagcacccagcctctgcagaatttgttctgaagggagagactgaggagctgcaggctaatgcatgcaccaaccccgctgttcatgagaagctcaaaaagtag

SEQ ID NO: 280678 - DNA, 426 bp, Artificial Sequence
  derived and/or modified sequence
atgaagatcctggacgtgggttgcggaggaggcctgctgacagagcccggaggatctctcttcatcactaccatcaacaaaacccagcttagctacgcattgggaatcgttttttcagaacagattgcttccatcgtgccgaagggcacccacacttgggagaaatttgtgtccccggagactctggagtctatcttggaatctaacggcctttccgtgcagaccgtcgttgggatgttgtacaatcccttttccggatattggcattggtctgaaaacacctcacttaactatgccgcatacgcggtcaagagtagagttcaggaacaccctgctagcgccgagtttgtgcttaaaggggaaacagaggagctccaggctaacgcctgcacgaatccagctgtccacgagaagttgaagaagtag

SEQ ID NO: 280679 - DNA, 426 bp, Artificial Sequence
  derived and/or modified sequence
atgaaaatcctcgacgttgggtgtggaggcggactgctgactgaacctggaggaagcctatttattacgaccatcaacaagacacagctgagttatgcactgggcatcgtttttagcgaacagattgcttctatcgtgcccaaaggaacgcacacatgggaaaaattcgtgtccccagagactctggagtccattctggagtctaatggcttatccgttcagactgtagtcggcatgctctacaatcctttctctggctactggcattggagcgaaaatacttctctcaactacgccgcatatgccgtgaagagtagagtccaggaacatcctgccagcgccgaattcgtcctgaagggggaaactgaagagctgcaagcaaacgcttgtacaaatccagccgtccatgaaaagttaaagaaatag

SEQ ID NO: 280680 - DNA, 717 bp, Artificial Sequence
  derived and/or modified sequence
atgggcgtggagaacagcgccaaggagggcgaccccggcaccatcttcttcttcagagagggcgccgccgtgttctggaacgtgaaggacaagaccatgaagcacgtgatgaaggtgctggagaagcacgagatccagccctacgagatcgccctggtgcactgggagaacgaggagctgaactacatcaagatcgagggccagagcaagctgcacagaggcgagatcaagctgaacagcgagctggacctggacgacgccatcctggagaagttcgccttcagcaacgccctgtgcctgagcgtgaagctggccatctgggaggccagcctggacaagttcatcgagagcatccagagcatccccgaggccctgaaggccggcaagaaggtgaagctgagccacgaggaggtgatgcagaagatcggcgagctgttcgccctgagacacagaatcaacctgagcagcgacttcctgatcacccccgacttctactgggacagagagaacctggagggcctgtacgacaagacctgccagttcctgagcatcggcagaagagtgaaggtgatgaacgagaagctgcagcactgcatggagctgaccgacctgatgagaaaccacctgaacgagaagagagccctgagactggagtggatgatcgtgatcctgatcaccatcgaggtgatgttcgagctgggcagagtgttcttctag

SEQ ID NO: 280681 - DNA, 423 bp, Artificial Sequence
  derived and/or modified sequence
atgcccttctgcaagaccggcaacctgggcagcatcctggacaagttcatcgagagcatccagagcatccccgaggccctgaaggccggcaagaaggtgaagctgagccacgaggaggtgatgcagaagatcggcgagctgttcgccctgagacacagaatcaacctgagcagcgacttcctgatcacccccgacttctactgggacagagagaacctggagggcctgtacgacaagacctgccagttcctgagcatcggcagaagagtgaaggtgatgaacgagaagctgcagcactgcatggagctgaccgacctgatgagaaaccacctgaacgagaagagagccctgagactggagtggatgatcgtgatcctgatcaccatcgaggtgatgttcgagctgggcagagtgttcttctag

SEQ ID NO: 280682 - DNA, 717 bp, Artificial Sequence
  derived and/or modified sequence
atgggcgttgagaacagcgccaaagaaggcgatcctggcacaattttcttctttagagagggagccgcagtgttttggaatgtcaaagacaaaacaatgaagcacgttatgaaagtcctggagaaacatgaaatacagccatatgagatcgctctggtccactgggagaacgaggagctaaattatataaaaatcgaggggcagagtaagctccaccggggagagatcaagctcaatagcgagcttgacctggatgatgccatcctggaaaaattcgcttttagcaatgctttatgcctttctgtcaaactcgcgatttgggaggctagtctcgacaaattcattgagtccatccagagcatccccgaggccttaaaagccggtaagaaggtcaagctgtctcacgaggaggtaatgcagaaaattggagagctctttgctctgcgtcacagaatcaacctgagcagcgattttctcataactcctgatttttactgggacagggaaaatctggaaggcctatatgacaaaacatgtcagtttctgagtatcgggcgccgggtgaaagtgatgaacgagaaactccagcactgtatggagctgacagatctgatgagaaaccatctcaacgaaaagcgtgctctgaggctggagtggatgatagtaatcctcataacaattgaagtaatgttcgagctagggcgagtatttttttag

SEQ ID NO: 280683 - DNA, 423 bp, Artificial Sequence
  derived and/or modified sequence
atgcctttctgcaagaccggcaacctgggatctatcctagacaaattcatcgagtctatccagtcaatcccggaggccctgaaggccggaaagaaggtcaagctctcccacgaagaagtgatgcaaaaaattggcgaattgttcgccctgaggcaccgcatcaacctgtcatctgactttctcatcacaccagatttttattgggatagggaaaatttagagggactctacgataagacatgccagttcctctccattgggcggcgtgttaaagtaatgaacgaaaagttacagcactgtatggaactgaccgatttgatgagaaaccatctcaacgagaaacgtgccttaagactggagtggatgattgtcattctgattaccatcgaggtcatgttcgagctggggcgagtctttttttag

SEQ ID NO: 280684 - DNA, 717 bp, Artificial Sequence
  derived and/or modified sequence
atgggcgtggagaacagcgccaaggagggggaccccggcaccatcttcttcttccgggagggcgctgctgtgttctggaatgtgaaggacaagaccatgaagcacgtgatgaaggtgctggagaagcatgagatccagccctatgagatcgccctggtgcactgggagaatgaggagctgaactacatcaagattgagggccagagcaagctgcacagaggagagatcaagctgaacagcgagctggacctggatgatgccatcctggagaagtttgccttcagcaatgccctgtgcctgtctgtgaagctggccatctgggaggccagcctggacaagttcatcgagagcatccagagcatccctgaggccctgaaggccggcaagaaggtgaagctgagccatgaggaggtgatgcagaagatcggggagctgtttgccctgcggcaccgcatcaacctgagcagtgacttcctgatcaccccagacttctactgggaccgggagaacctggagggcctgtatgacaagacctgccagttcctgagcatcggccggcgggtgaaggtgatgaatgagaagctgcagcactgcatggagctgacagacctgatgaggaaccacctgaatgagaagagggccctgcggctggagtggatgatcgtcatcctgatcaccatcgaggtgatgtttgagctgggccgggtcttcttctag

SEQ ID NO: 280685 - DNA, 423 bp, Artificial Sequence
  derived and/or modified sequence
atgcccttctgcaagacaggcaacctgggcagcatcctggacaagttcatcgagagcatccagagcatccctgaggccctgaaggccggcaagaaggtgaagctgagccatgaggaggtgatgcagaagatcggggagctgtttgccctgcggcaccgcatcaacctgagcagtgacttcctgatcaccccagacttctactgggaccgggagaacctggagggcctgtatgacaagacctgccagttcctgagcatcggccggcgggtgaaggtgatgaatgagaagctgcagcactgcatggagctgacagacctgatgaggaaccacctgaatgagaagagggccctgcggctggagtggatgatcgtcatcctgatcaccatcgaggtgatgtttgagctgggccgggtcttcttctag

SEQ ID NO: 280686 - DNA, 717 bp, Artificial Sequence
  derived and/or modified sequence
atgggcgtggagaacagcgccaaggagggcgaccccggcaccatcttctttttccgagagggagccgctgttttttggaatgtgaaggataaaacgatgaaacacgtaatgaaagtgctagaaaagcacgagatccaaccgtatgaaatcgccctcgtccattgggaaaacgaggagctcaactatatcaagatagaggggcagtcgaaattgcacagaggggaaatcaagctgaacagtgaactggacttagatgatgccattctggagaagttcgcatttagcaacgctttgtgtttatctgtgaagttggccatctgggaggctagtttggataagttcattgaaagcattcagagtattccagaagccttgaaggccggcaagaaagtgaaactgtcccacgaggaggttatgcagaagattggggaactttttgcgctgcgccaccgcattaacctctcctccgacttcctgataacacctgatttttattgggaccgggaaaaccttgaggggttgtatgataagacatgtcagttcctctctattggtagaagagtgaaggtgatgaatgagaaactgcaacattgtatggaattaactgatctgatgagaaatcatctgaacgaaaagagagcgctaagactggagtggatgattgtgatccttattaccatagaagttatgttcgaacttggaagagtgttcttctag

SEQ ID NO: 280687 - DNA, 423 bp, Artificial Sequence
  derived and/or modified sequence
atgcccttctgcaagaccggcaacctgggcagcatcctggacaagttcatcgagtctatacagtccatcccggaagccctgaaggccggaaagaaagtgaaactctctcacgaagaggtaatgcaaaagattggggaactgttcgccttacgccacagaataaacctctcatcagattttcttatcacccccgacttctattgggaccgggagaatttggagggactctatgacaaaacttgtcagtttcttagtatcggccgcagggtgaaagttatgaacgaaaagcttcaacattgtatggaactgacagaccttatgcgaaatcacctcaatgaaaaacgagccctgcgcctcgagtggatgattgtaatccttataactatagaagtgatgttcgagcttggcagggtctttttctag

SEQ ID NO: 280688 - DNA, 717 bp, Artificial Sequence
  derived and/or modified sequence
atgggtgtggagaactccgcgaaagaaggagaccccggtacaatcttcttctttagggagggagcagcagtgttttggaatgttaaggacaaaaccatgaaacacgttatgaaagtgcttgaaaaacacgagattcaaccttacgagatcgccctggtccattgggaaaacgaagagctaaactatatcaagattgaaggccagtctaaactccacagaggtgaaatcaagcttaactcggagctcgatctagacgacgccatcctggagaagtttgctttctccaatgccctgtgtctctccgtgaagctagccatttgggaagcctccctggataagtttatcgaatccattcagagcatcccggaggcccttaaggctggcaaaaaggtgaaactcagccacgaggaagttatgcagaagatcggggagctgtttgcactccgccaccggattaatctctcctcggatttccttattactccagatttttactgggaccgagaaaatcttgaaggtttatacgacaaaacttgccagttcctgagcataggccgaagagtaaaggtgatgaacgaaaaactgcagcactgcatggaactgacagatctgatgagaaaccacctaaacgagaagcgggctcttcgcttggaatggatgatagtgatcctcattactatcgaagtgatgttcgagctcggaagggtttttttctag

SEQ ID NO: 280689 - DNA, 423 bp, Artificial Sequence
  derived and/or modified sequence
atgcctttctgcaagacaggaaacctgggaagcatcctggataaatttatcgaatctatccagtcaatcccggaggcgcttaaagcgggaaagaaggtcaagctatcacacgaagaagtgatgcagaagattggagaactgtttgccctgcgacacaggatcaatttgtcctccgattttctaatcacacccgatttttactgggatagagaaaatctcgaaggactgtatgacaaaacttgtcagtttctgagcatcggacgcagagtgaaggtgatgaatgagaagctgcaacactgtatggaactgactgatctgatgaggaatcatctcaatgaaaaacgggctctgcgactcgaatggatgatcgttatcttgattacgatcgaggttatgtttgaactgggtagagtctttttctag

SEQ ID NO: 280690 - DNA, 1411 bp, Artificial Sequence
  derived and/or modified sequence
atcaactttaaagatattttaaacttgatgaagacttctgaatctatcagaaaacaggttagaatgtctgtcttcaagtcttgattctgaaaagtagcccctgagcctgtttcattttggctgtgtttttattactgtgcagctgacaccccttggaaaggacctaatgcactgcacagcatttgcaacggcagatgagtatcatctgggaaatctgtctcaagatctggcctcccacggatatgttgaagtaacaagcttgcctagaggtacttcttcttgaacctggggccaaatgcagcaaatattttggtgatgggtgtggaaaattctgcaaaagaaggtgatcctggaacaatattcttcttcagggaaggagctgctgtgttttggaatgtgaaagacaaaactatgaagcatgtgatgaaagttctagaaaaacatgaaattcagccctatgaaatcgcactggtacactgggaaaatgaagaacttaactacataaaaatagagggacagtcaaaacttcacaggggggaaatcaagttaaattcagagctggatttagatgatgccattctagagaagtttgctttctccaatgctctatgcctttctgtaaaactggcaatttgggaagcatcctggataaatttattgaatctattcagtcaattcctgaggctttaaaagctgggaagaaagtgaaactatctcatgaagaagttatgcagaaaatcggtgaactctttgctctaaggcaccgtataaacttgagttcagacttcctgattactcctgatttctactgggacagagaaaacctggaaggactttacgataaaacgtgtcaattccttagcattggccgaagagttaaggtcatgaatgaaaaacttcagcactgcatggaactaacagatctaatgcggaatcacctgaatgagaagagggcactccgcttggagtggatgattgtcatcctcattaccatagaggtaatgtttgagctgggacgagtatttttctgatcaagtgataaccaaagtgtcactgcaagagatattcaagttctacaatcaaaaattaaatgttcggcccggcgcggtgcctcatgcctgtaatcccagcactttcggaggccaagaagggtggcttgagatgagatcaggagctcaagacaagcctggccaacatggtgaaaccccatctctactaaaaataccaaaattagccaggtgtgttggcacacgcccgtcatctcagctactcaggaggctgaggcaggagaatctcttgaacttgggaggcggaggttgcagtgagctaagatcacaccactgcactccagccagggcaacagtgagactcagtctcaaaaataaacaataaaataaataaataaatgttc

SEQ ID NO: 280691 - protein, 45 aa, Artificial Sequence
  derived and/or modified sequence
  misc_feature (1)..(1): Xaa can be any naturally occurring amino acid
XIIYHCDLTKEELEPRVFREVTVKGIDASDYQTVQLPKGTESSRN

SEQ ID NO: 280692 - protein, 44 aa, Artificial Sequence
  derived and/or modified sequence
IIYHCDLTKEELEPRVFREVTVKGIDASDYQTVQLPKGTESSRN

SEQ ID NO: 280693 - DNA, 138 bp, Artificial Sequence
  derived and/or modified sequence
taaatcatctaccactgcgatcttactaaagaggagttagaacctcgagtctttagagaggtgaccgtcaagggtattgacgccagcgactaccagacagtccaactgcccaaagggacggagtcttcacgtaactag

SEQ ID NO: 280694 - DNA, 135 bp, Artificial Sequence
  derived and/or modified sequence
atcatctaccattgtgacttgaccaaagaggagcttgaacccagagtgtttagggaggtgacagtaaaagggattgacgcctcagactaccaaactgtccagctccccaagggcacagaatcatccagaaactag

SEQ ID NO: 280695 - DNA, 138 bp, Artificial Sequence
  derived and/or modified sequence
tgaatcatctaccactgtgacctgaccaaggaggagctggagcccagggtcttccgggaggtgacagtgaagggcattgatgccagtgactaccagacagtgcagctgcccaagggcacagagagcagcaggaactag

SEQ ID NO: 280696 - DNA, 135 bp, Artificial Sequence
  derived and/or modified sequence
atcatctaccactgtgacctgaccaaggaggagctggagcccagggtcttccgggaggtgacagtgaagggcattgatgccagtgactaccagacagtgcagctgcccaagggcacagagagcagcagaaattag

SEQ ID NO: 280697 - DNA, 138 bp, Artificial Sequence
  derived and/or modified sequence
tgaatcatctaccactgcgacctgaccaaggaggagctggagccccgagtgtttagggaagtcactgtgaagggcattgacgcatcagactatcagaccgttcaattacctaagggcaccgaaagttcgcgcaattag

SEQ ID NO: 280698 - DNA, 135 bp, Artificial Sequence
  derived and/or modified sequence
atcatctaccactgcgacctgaccaaggaggagctggagccccgggttttccgggaggtgaccgtgaagggcattgatgcgagcgactatcagactgtgcagctacccaagggtacggaatcttccagaaattag

SEQ ID NO: 280699 - DNA, 138 bp, Artificial Sequence
  derived and/or modified sequence
taaatcatctaccactgcgacctcacaaaggaagagttggaacctagagtgtttagggaggttacagttaaggggattgatgcttctgactatcaaacggttcagctccccaaaggaaccgagtcatctcggaattag

SEQ ID NO: 280700 - DNA, 135 bp, Artificial Sequence
  derived and/or modified sequence
atcatttaccattgtgacctgactaaggaggagctagaaccaagagtgttcagagaggtgacagtcaaagggattgacgcctccgactatcaaacggtgcagctgcccaaaggcaccgagagctccagaaactag

SEQ ID NO: 280701 - DNA, 961 bp, Artificial Sequence
  derived and/or modified sequence
gtatcatttatcactgtgatcttaccaaagaggagctggagccaagagttttccgagaggtgaccgtaaaaggaattgatgcttctgattaccagacagtccagctccccaagggtactgagtcttccagaaactgaatcactggttgattgatgatgacgaagaatgtctctgttcctttgcaatgagaggtcaccaatagggcaccaggtgtttatcaaggcccctcccacctggagggctggaccacacaggccacagattaggaatcagaacattgtttgtgaaggaagatgagaataaagagcgctggatgttccccacaatgtttctgtgaaactagggcattattatagcttggtgaattacccttcaattgtctagaaatggtctagatgataggctacatctagatcatgaataaagctttgtttactaaaacaggtggtgggctggatttggtgtagagctatgatttatcagcccctgttctacatcagcagttggcaaactggcctcctgttttattggagaacacatgcccatttgtttacatattgcctgtggttgctttggcacttagagtggttgcaacagaaactctatgtcccagaaggcctgaaatatttaatatatggcctttaagaaaaagtttgcagaatcttcatctatgtaaatagcatttaaaagtacaacattcttgatagacatacagggccgagaagacatacagggtcaagaagctctgtcagacaggcctgaaatccacgtggggcaagtcatttaacctttctgccacagttttttcaactgtaaagtagagattgatagtatctgttttttaggattcctgtgggattattaagagataaggtatattcaagatctggcaatagaatataatctatttttttcaatcaacgttagaaataaatgtaacagacttttagtttcctattta

SEQ ID NO: 280702 - DNA, 332 bp, Artificial Sequence
  derived and/or modified sequence
ggatagcttgtgtcaggtccaacttcttggtcttatgctacctccatgacgtcaagaacattctgcagctccatgacctgactactggtgctctccttaagaccttcccgctcgatgtcggcagcattgtagggtacagcggtcagaagaaggacactgaaatcttctatcagtttacttcctttttatctccaggtatcatttatcactgtgatcttaccaaagaggagctggagccaagagttttccgagaggtgaccgtaaaaggaattgatgcttctgattaccagacagtccagctccccaagggtactgagtcttccagaaactga

SEQ ID NO: 280703 - DNA, 138 bp, Artificial Sequence
  derived and/or modified sequence
tgaatcatctaccactgcgacctgaccaaggaggagctggagcccagagtgttcagagaggtgaccgtgaagggcatcgacgccagcgactaccagaccgtgcagctgcccaagggcaccgagagcagcagaaactag

SEQ ID NO: 280704 - DNA, 135 bp, Artificial Sequence
  derived and/or modified sequence
atcatctaccactgcgacctgaccaaggaggagctggagcccagagtgttcagagaggtgaccgtgaagggcatcgacgccagcgactaccagaccgtgcagctgcccaagggcaccgagagcagcagaaactag

SEQ ID NO: 280705 - protein, 213 aa, Artificial Sequence
  derived and/or modified sequence
MNAFSGVMMLQLLEKVIELENWTEGKGLIVRGAKNTFSSGSDLNAVKSLGTPEESCRWNTEFLYTLHPVSPFINILYSYGWNGRMHVHAKHLNKIYEVKKQRGKILLGLSRLPLISVALVQGWALGGGAEFTTACDFRLMTPESKIRFVHKEMGIIPSWGGTTRLVEIIGSRQALKVLSGALKLDSKNALNIGMVEEVLQSSDETKSLEEAQE

SEQ ID NO: 280706 - DNA, 855 bp, Artificial Sequence
  derived and/or modified sequence
atggccaagagtctactgaagaccgcaagcctatctgggaggacaaaactgctccatcagaccggtctgtcactgtactccacttcccacggattctacgaggaggaggtcaaaaagactctgcagcaatttcccgggggcagcatcgacttgcagaaggaggataatggtattggaattcttactctcaacaatccctcccgtatgaacgccttttctggtgtgatgatgctgcagttgttagagaaggtcatagaattggagaattggacggaaggaaaggggctgattgtcagaggcgccaagaataccttcagtagcggaagtgatttaaacgccgtcaagtcactgggattacagcgacgacttcctttaatatctgtggctttggtccagggatgggccctgggaggtggagccgaatttacaaccgcttgcgattttcggctgatgacccctgagtcaaagatcagatttgtccacaaggaaatggggatcattccgtcttgggggggcacaacccgactggtggagatcataggatccaggcaggcactgaaagtgctatcaggagccctcaaactggacagtaagaatgcactgaacatcggcatggttgaagaggttctacagagctctgatgaaaccaaatctctggaggaggcccaggagtggttgaagcaatttatccaggggccccccgaagtgattcgcgcactgaagaaaagcgtgtgcagcggaagagaactgtatctcgaggaggccttgcaaaatgagcgggacctgttggggacagtgtggggcgggccggccaacttggaagctatcgctaagaagggcaaatttaataagtag

SEQ ID NO: 280707 - DNA, 642 bp, Artificial Sequence
  derived and/or modified sequence
atgaacgctttttctggcgtgatgatgcttcagctactggagaaggtgatcgagctcgaaaactggacagagggcaagggattaatcgttagaggcgcgaagaatacattttcctcaggatccgatctcaacgcagtgaaaagcctcggaacacctgaggaaagttgcagatggaataccgagttcctgtacactctccatccagtgtctcctttcattaacattctctacagttacgggtggaacggaaggatgcatgttcatgccaagcacctgaataagatctacgaagtcaagaagcaacggggcaaaatattgcttggtctgtcacggctgccgctcatcagtgttgctcttgtgcagggatgggccctgggagggggggctgaatttaccacagcatgcgactttaggctgatgactccagaaagcaaaataagatttgtccataaggagatgggaataatacctagttggggcggaacgacccggttggtggagattataggaagccgtcaggctttaaaagtattaagcggcgcccttaagctagattccaagaatgccttaaatatcggtatggtggaggaagtgctgcagtcttccgacgagaccaagagcttggaggaagcacaggaatag

SEQ ID NO: 280708 - DNA, 906 bp, Artificial Sequence
  derived and/or modified sequence
atggccaagagccttctcaagaccgccagtttaagcgggcgtaccaaacttctccatcaaacagggctgtctctatactcgacctctcatgggttctacgaggaggaggtgaaaaagacgcttcagcagttccccggagggagcatcgacttgcaaaaggaggacaatggaatcgggattctgaccctcaacaacccctctcgaatgaacgccttttctggagtaatgatgctgcaacttctggaaaaggtaattgagctggagaactggaccgaaggaaaaggcctcatcgtgcggggggcgaagaacacattttcaagtgggagcgaccttaatgcagtcaagagtttaggtacaccagaggacggtatggcagtctgcatgtttatgcaaaacactctcacccggttcatgaggctcccactgataagtgtagctcttgtccaaggctgggccctcggaggcggggccgagttcactaccgcctgcgacttccggctgatgacgcctgagtcaaagattcgattcgtgcataaagaaatgggtattatcccctcatggggcggcacgactcgactggttgaaataatagggagccggcaggccctcaaagttctcagcggcgcactcaaactggattccaaaaacgccctgaacattggcatggtggaagaagtgctgcagtcttccgacgagactaagagtctagaagaagctcaggagtggctcaagcaattcatacaaggaccgcctgaagtaatcagagccttgaaaaagagcgtttgcagtgggcgtgagctttacttggaagaagcactgcaaaacgagagagacctacttggcaccgtgtggggaggcccggcgaatttagaggctatagcaaagaagggaaagttcaacaaatag

SEQ ID NO: 280709 - DNA, 906 bp, Artificial Sequence
  derived and/or modified sequence
atggctaagagcttgctcaagaccgcgtccttgtcgggccgaaccaagctgcttcatcagaccggactgtccctctactcaacttctcatggtttctacgaggaggaggttaagaagactctccagcagtttcctggcggttctattgacctgcaaaaggaggacaatggcatcgggatcttaacgctcaacaacccaagccgtatgaatgcattctcaggtgtgatgatgcttcaactgctcgagaaggtaatcgaactcgagaattggaccgaaggcaaagggctaatagtgaggggagcaaagaacaccttttcatcggggtcagatctgaacgccgtgaagagtctgggcaccccagaagacggaatggcggtttgtatgtttatgcagaacacattgactcgctttatgagactgcctctaatttccgtggccctggtgcagggctgggcactgggcgggggggctgagttcacaacggcctgtgatttcagattaatgacccctgaatccaaaattcgctttgtccataaggagatgggaatcatcccatcctggggcgggaccactcgcctcgtcgaaatcattggcagtagacaggccctcaaggtgctgtcaggggccttaaagctcgattccaagaatgcccttaatatcggcatggttgaagaagtgcttcaaagttcggatgagaccaaaagcctcgaggaggcccaggaatggctgaagcaattcattcagggccccccagaagtaataagggcactgaaaaagtcagtttgcagcggccgcgagctgtacttagaagaggccttacagaatgaacgcgatctgttggggactgtttgggggggccctgccaacttagaagcgatcgccaagaaaggaaaatttaacaaatag

SEQ ID NO: 280710 - DNA, 906 bp, Artificial Sequence
  derived and/or modified sequence
atggccaagagtttgctgaagactgcctctctatccggccggacgaaactattgcatcagacaggactttccctgtattctaccagtcatggcttctacgaggaagaagtgaaaaagacactgcagcagttccccggcggctctatcgatctacagaaagaagacaatggcatcggtatcctgactctgaacaatccttcaaggatgaacgcgttctccggggtgatgatgctgcagctgctggagaaggtgattgagcttgagaattggaccgagggcaagggtctgattgtacgcggcgcgaaaaacacattttccagtggttctgacctcaatgctgtaaaatcactcggaacaccagaagacggcatggctgtctgcatgtttatgcagaatacccttacgagattcatgagactgcccctgatctccgtggccctggtgcagggatgggcattaggcggcggagccgaatttaccactgcctgtgacttccggcttatgacacccgagagcaagatccgatttgtgcacaaagaaatgggaataattcccagctggggcggtaccactagattggtggaaatcattggatccagacaggcactgaaagtgctttccggggccctcaaattggactcaaagaatgccctcaatattggcatggtggaagaggttctgcaatcaagtgatgaaaccaagagccttgaggaggcccaggagtggttaaagcaatttattcagggcccccccgaggtgatcagggctctgaagaagagcgtttgtagcggccgcgaactttatctggaagaagccctgcagaatgaaagagacctcctgggtacagtgtggggcgggcccgccaatctcgaagctatagctaagaaaggaaaatttaacaaatag

SEQ ID NO: 280711 - DNA, 456 bp, Artificial Sequence
  derived and/or modified sequence
atggccaagtcactcctcaaaaccgcttctctgtcaggaaggacgaaactgctccaccagactgggctgtccttgtactccacttctcatggattttacgaggaggaagttaaaaagactctacagcagttcccaggaggttcgattgaccttcaaaaggaagacaacggaatagggatcctgacactgaataatccgagccggatgaatgcattctctggcgttatgatgctccagctgctggaaaaggtcattgagcttgagaactggacagaggggaaggggctcatagtgagaggtgcaaagaatactttctcctctgggtcagatctcaatgctgtaaaaagtctgggaacccccgaagatgggatggcagtttgtatgtttatgcaaaatacactgacaagattcatgcggctgccactcatctccgtagccctggttcagggctggtag

SEQ ID NO: 280712 - DNA, 855 bp, Artificial Sequence
  derived and/or modified sequence
atggccaagagcctgctgaagacagccagcctgagcggccgcaccaagctgctgcaccagacaggcctgagcctgtacagcaccagccacggcttctatgaggaggaggtgaagaagaccctgcagcagtttcctgggggcagcattgacctgcagaaggaggacaatggcatcggcatcctgaccctgaacaaccccagcaggatgaatgccttctctggagtgatgatgctgcagctgctggagaaggtgattgagctggagaactggacagagggcaagggcctgattgtgcggggggccaagaacaccttcagcagcggcagtgacctgaatgctgtgaagagcctgggcctgcagaggcggctgcccctcatctctgtggccctggtgcagggctgggccctgggcggcggcgctgagttcaccacagcctgtgacttccggctgatgaccccagagagcaagatccgctttgtgcacaaggagatgggcatcatccccagctggggcggcaccacccggctggtggagatcatcggcagccggcaggccctgaaggtgctgagcggggccctgaagctggacagcaagaatgccctgaacatcggcatggtggaggaggtgctgcagagcagtgatgagaccaagagcctggaggaggcccaggagtggctgaagcagttcatccagggccccccagaggtgatccgggccctgaagaagtctgtgtgcagcggccgggagctgtacctggaggaggccctgcagaatgaaagagacctgctgggcaccgtgtggggcggccctgccaacctggaggccatcgccaagaagggcaagttcaacaagtag

SEQ ID NO: 280713 - DNA, 642 bp, Artificial Sequence
  derived and/or modified sequence
atgaatgccttctctggagtgatgatgctgcagctgctggagaaggtgattgagctggagaactggacagagggcaagggcctgattgtgcggggggccaagaacaccttcagcagcggcagtgacctgaatgctgtgaagagcctgggcaccccagaggagagctgccgctggaacacagagttcctgtacaccctgcaccctgtgagccccttcatcaacatcctgtacagctatggctggaatggccgcatgcacgtgcacgccaagcacctgaacaagatctatgaggtgaagaagcagaggggcaagatcctgctgggcctgagccggctgcccctcatctctgtggccctggtgcagggctgggccctgggcggcggcgctgagttcaccacagcctgtgacttccggctgatgaccccagagagcaagatccgctttgtgcacaaggagatgggcatcatccccagctggggcggcaccacccggctggtggagatcatcggcagccggcaggccctgaaggtgctgagcggggccctgaagctggacagcaagaatgccctgaacatcggcatggtggaggaggtgctgcagagcagtgatgagaccaagagcctggaggaggcccaggagtag

SEQ ID NO: 280714 - DNA, 906 bp, Artificial Sequence
  derived and/or modified sequence
atggccaagagcctgctgaagacagccagcctgagcggccgcaccaagctgctgcaccagacaggcctgagcctgtacagcaccagccacggcttctatgaggaggaggtgaagaagaccctgcagcagtttcctgggggcagcattgacctgcagaaggaggacaatggcatcggcatcctgaccctgaacaaccccagcaggatgaatgccttctctggagtgatgatgctgcagctgctggagaaggtgattgagctggagaactggacagagggcaagggcctgattgtgcggggggccaagaacaccttcagcagcggcagtgacctgaatgctgtgaagagcctgggcaccccagaagatggcatggctgtgtgcatgttcatgcagaacaccctgacccgcttcatgaggctgcccctcatctctgtggccctggtgcagggctgggccctgggcggcggcgctgagttcaccacagcctgtgacttccggctgatgaccccagagagcaagatccgctttgtgcacaaggagatgggcatcatccccagctggggcggcaccacccggctggtggagatcatcggcagccggcaggccctgaaggtgctgagcggggccctgaagctggacagcaagaatgccctgaacatcggcatggtggaggaggtgctgcagagcagtgatgagaccaagagcctggaggaggcccaggagtggctgaagcagttcatccagggccccccagaggtgatccgggccctgaagaagtctgtgtgcagcggccgggagctgtacctggaggaggccctgcagaatgaaagagacctgctgggcaccgtgtggggcggccctgccaacctggaggccatcgccaagaagggcaagttcaacaagtag

SEQ ID NO: 280715 - DNA, 456 bp, Artificial Sequence
  derived and/or modified sequence
atggccaagagcctgctgaagacagccagcctgagcggccgcaccaagctgctgcaccagacaggcctgagcctgtacagcaccagccacggcttctatgaggaggaggtgaagaagaccctgcagcagtttcctgggggcagcattgacctgcagaaggaggacaatggcatcggcatcctgaccctgaacaaccccagcaggatgaatgccttctctggagtgatgatgctgcagctgctggagaaggtgattgagctggagaactggacagagggcaagggcctgattgtgcggggggccaagaacaccttcagcagcggcagtgacctgaatgctgtgaagagcctgggcaccccagaagatggcatggctgtgtgcatgttcatgcagaacaccctgacccgcttcatgaggctgcccctcatctctgtggccctggtgcagggctggtag

SEQ ID NO: 280716 - DNA, 855 bp, Artificial Sequence
  derived and/or modified sequence
atggccaagagcctgctgaagaccgccagcctgagcggccggaccaagcttctgcatcagactggcctgagcttgtattccacaagccacgggttttatgaggaagaggtgaaaaagacactgcaacagttccctggtgggtcgattgatctgcagaaagaagacaacgggattggtattcttactttaaacaacccgtcacggatgaatgctttttctggtgtgatgatgctacagctgctcgagaaagtcatcgaactggagaattggaccgagggtaaggggttaatcgtgcggggagcaaagaacaccttctcttctggctcggatctcaatgccgttaagtctctgggactgcagagacgactcccgctgatctctgttgctctggtgcaaggctgggccttgggagggggggccgagtttacgactgcctgtgacttccggttaatgactccagagtcgaaaattcgtttcgtgcacaaagagatggggattatcccctcatggggtggaaccacacgccttgtcgagattataggttcccgccaggcgctcaaggtcctgtcaggagcgttaaaacttgacagcaagaacgccttaaatattggaatggttgaagaggtgcttcagagctctgacgaaaccaagtctctggaagaagcacaggaatggttgaaacagttcatccagggcccccctgaggtgatccgcgcccttaaaaaaagtgtgtgcagcggcagggagttgtacctggaagaggccctacagaacgagcgcgacctacttggcacggtgtggggcggccctgccaatttggaggccatagcaaaaaaaggcaaatttaataaatag

SEQ ID NO: 280717 - DNA, 642 bp, Artificial Sequence
  derived and/or modified sequence
atgaacgccttcagcggcgtgatgatgctgcagctgctggagaaggtgattgaacttgaaaattggaccgagggaaaaggtctcatcgtgcgtggcgccaaaaacacgttttcctccggcagcgatctgaacgccgtgaagagcctcgggaccccagaagagtcctgcagatggaacacagagtttctgtacacccttcacccagtgagtccatttatcaatatcctgtacagctatggatggaacggtcgcatgcacgtccatgcaaaacacttaaataagatctacgaggtaaagaagcagcgaggtaaaatcctgctggggctgtcccgtctgcccctcatatcagtggcacttgtgcagggatgggccctgggaggcggagcagagtttacaacagcttgcgatttcagactcatgactcccgagagtaaaatcaggtttgtacacaaggaaatgggaatcatcccgtcctggggaggcactacccgccttgttgagatcattggctctcgtcaggccttaaaagtcctctccggcgctcttaaactcgattctaaaaacgcgctgaacattgggatggttgaggaggtgcttcagagctctgacgaaacaaaatcccttgaagaggcccaggagtag

SEQ ID NO: 280718 - DNA, 906 bp, Artificial Sequence
  derived and/or modified sequence
atggccaagagcctgctgaagaccgccagcctgagcggccggaccaagctgctgcaccaaaccggcctatctttatactctacttcccacgggttttatgaagaggaagtgaaaaagacccttcagcagtttcccggtggctctattgacctgcaaaaagaggacaacggcattgggatcctaaccctgaacaatccttcccgcatgaacgcattctctggcgtgatgatgctgcagctgttggaaaaagtcatcgagctcgaaaactggactgagggaaaaggattaatagtcaggggcgccaagaataccttctccagcggcagcgacctcaacgcggtgaaaagccttggaactcccgaggacgggatggcagtctgtatgttcatgcagaacactctgacacgcttcatgaggctgccactaatctcagtggccttagttcagggatgggcgttgggcggaggagccgagtttactactgcatgtgacttcagactaatgactcctgagtcaaagatcagattcgttcacaaggaaatggggattattccgtcctggggaggcaccacccgactggtggagatcattggatcacgtcaagccttaaaggttctgtccggagcgttaaagttagacagcaagaacgctcttaatatcgggatggtggaggaggtgctgcaaagttcagacgagactaagagtctggaagaggcccaagagtggttaaagcaattcatccagggaccacctgaggtcatccgggcacttaagaaaagtgtgtgtagcggcagagaattgtacttagaggaggccctgcagaacgagcgcgatcttctgggaactgtgtgggggggccccgcaaatctagaagctatagctaagaaaggcaaattcaataagtag

SEQ ID NO: 280719 - DNA, 906 bp, Artificial Sequence
  derived and/or modified sequence
atggccaagagcctgctgaagaccgccagcctgagcggccggaccaaactactgcaccagacaggactatctttatattcgacctcccacggtttctacgaggaggaggtcaaaaagaccctgcaacagtttccaggaggctctatcgatttacagaaagaagacaacgggattggaatacttacgctaaataatcccagccgaatgaatgcattttccggcgtgatgatgctccagctactggagaaggtgatagagctggaaaactggaccgaaggtaaaggcctcattgtacgcggcgctaagaacacattctcaagcggctcagatctgaatgccgtgaagtcattaggtacccctgaggacggaatggcggtctgcatgttcatgcagaatacactgacacggttcatgcgccttccccttatcagcgtggccttggttcaaggatgggcccttggtgggggtgccgagtttactacagcatgcgacttccggctgatgacccctgagtctaagatccgatttgtgcacaaggagatgggtataatcccatcctggggaggtacaacgcgcttggtcgaaattattggaagccgacaagcactaaaggtgctcagtggagctctgaagctggatagtaagaacgcgcttaatattggcatggtggaagaagtactccagagttccgacgaaacaaagagcctggaagaggctcaggaatggcttaaacagttcattcagggtcctccggaggtgattcgggccctgaagaaaagcgtgtgttcaggccgggaactgtacctagaggaggcactccagaacgaaagggatctgttgggaaccgtctgggggggcccagctaacctggaagccattgctaaaaagggcaagttcaacaagtag

SEQ ID NO: 280720 - DNA, 906 bp, Artificial Sequence
  derived and/or modified sequence
atggccaagagcctgctgaagaccgccagcctgagcggccggaccaagctgttgcaccagacgggcctgtctctgtactctacctcccacgggttctacgaggaggaagttaaaaagacactgcagcagtttcccgggggttccattgatctgcaaaaggaggacaacggtatcggcatcctcactctgaacaatccgagcagaatgaacgccttttccggagtgatgatgctccaactcctggagaaggtcatcgagctggagaattggacagagggcaagggcctcattgtgaggggggcaaaaaacacctttagcagtggcagtgacctcaatgcagtcaaatccctgggtacgcctgaggatggaatggcggtctgtatgtttatgcagaacacccttactaggttcatgcgcctgcctttaatttccgtcgcactcgtgcagggatgggcacttggtgggggtgccgagttcacaacagcttgcgattttaggctcatgacgcctgagtctaagattcggtttgttcataaggaaatgggcatcattccctcttgggggggcacaacccgcctggttgagatcatcggttcaagacaggctctgaaagtccttagtggagctttgaagctggattcaaaaaatgcactgaatatcggaatggtagaagaagtgctccagagcagcgacgaaactaagagcctcgaggaagcccaagagtggctcaaacaatttattcagggaccccctgaggtgattcgggccctgaagaagtccgtatgtagcggtcgagaattatacctcgaagaagcattgcagaatgagcgggacttgttgggcaccgtgtggggcggcccggccaatctcgaagcgattgctaagaagggcaagttcaataaatag

SEQ ID NO: 280721 - DNA, 456 bp, Artificial Sequence
  derived and/or modified sequence
atggccaagagcctgctgaagaccgccagcctgagcggccggaccaagctgctccaccagacaggactctctctgtacagcacatcccacggtttctatgaggaggaagttaagaagaccctccagcagttccccggcggatcaatagacctgcaaaaggaagacaatggcatcggaatcctgacattaaacaatccctccaggatgaacgccttctccggcgtgatgatgctccaactcctggaaaaagtgatagagttggaaaactggaccgaaggtaaaggactgattgtccgcggcgccaagaacacattctcatcaggatctgacctgaatgccgtgaagtccttagggaccccagaggatggcatggctgtctgcatgttcatgcagaacacattgacaagattcatgcggttacctctgatcagtgtcgccctggtgcagggctggtag

SEQ ID NO: 280722 - DNA, 855 bp, Artificial Sequence
  derived and/or modified sequence
atggccaaaagcctcttaaaaaccgcaagcctgtccggcaggacgaagctgcttcaccagactggcctttctctttattccaccagccacgggttctacgaggaggaagtgaaaaagactctgcagcaattccccggagggtcaatcgatctccagaaagaagacaacgggattggcattctaaccctgaacaatcctagtcgaatgaatgccttttccggcgtgatgatgctgcagctgctcgagaaggttatcgaactcgaaaattggacagagggaaagggattgattgtaagaggcgctaaaaacacgtttagttccggctccgacctgaacgctgtcaagtcccttggtctgcagaggcgactgccacttatttcagtcgcactggtgcagggctgggcattaggcggaggtgcagagttcaccacggcatgtgacttccgcctaatgactccagaatcaaagatccgttttgtgcacaaggagatgggaattattccgtcttgggggggtaccacacgcctggtggaaattataggcagcagacaggcactcaaagtgctgtcgggcgctctgaaactcgacagcaagaacgcccttaacatcgggatggttgaagaggtgctccaatcaagcgacgaaactaagagcctcgaggaagcacaagagtggctgaagcaattcatccagggacccccagaggttataagagcgctgaagaagtccgtatgctcaggaagggagctctatctagaggaagccctgcagaatgagagggacctcctcggcactgtgtggggcggacctgcaaacctggaggccattgcaaaaaaaggaaagtttaataagtag

SEQ ID NO: 280723 - DNA, 642 bp, Artificial Sequence
  derived and/or modified sequence
atgaatgccttttctggggtcatgatgttgcaactgttggagaaagtaattgaattagagaactggaccgagggaaaaggtttgatagtgagaggtgccaagaataccttttcttccggcagcgacctcaatgctgttaaatcacttggtactccagaagagagttgcaggtggaacactgagttcctgtacaccctgcaccccgtttccccttttattaacatcctgtactcttacgggtggaacggaagaatgcacgtgcatgctaagcaccttaataagatttatgaagttaaaaaacaacgcggaaagattctgctgggactttcacgcctcccactgataagtgttgccctcgtccaggggtgggctctagggggaggggcagaatttaccacggcctgtgacttcaggctgatgacgccggagagcaaaatacggttcgtccataaagagatgggaattattccatcatggggcggaacgacgcgattggtcgagatcataggtagccggcaggccctcaaagtcctgtccggggctctcaagctcgatagcaaaaacgctcttaatattggcatggtggaggaagtgctgcaatctagtgacgagacaaaaagcttggaagaagcccaagaatag

SEQ ID NO: 280724 - DNA, 906 bp, Artificial Sequence
  derived and/or modified sequence
atggctaagagtctgttgaaaacagcgtcactgagcgggagaacgaaacttctgcatcagaccggcctatctctgtatagtacctcccacggattttacgaagaggaagtgaagaaaactctgcagcaatttcccggtggatcaattgacctccagaaggaggacaatggtattggtatcctgaccctcaacaatcccagcaggatgaatgcattcagcggagtgatgatgctgcagctcctggaaaaagtcatcgaactggagaactggaccgaaggcaaaggcctgatcgtgagaggtgccaaaaacacattctcttccgggtctgaccttaatgctgtcaaaagtcttggcacacccgaggatgggatggctgtatgtatgttcatgcagaacaccctcactcgatttatgcgcctgccccttatatcagtggcgctggtgcagggttgggctctcggcggtggggctgaatttacaactgcttgcgatttcagattaatgacccccgaaagcaaaatccgttttgtccataaggagatgggaattatcccatcctggggaggcacaactcgcctagtcgagatcatcggatccagacaggccctaaaggtgttaagcggggctctgaagttggattcgaagaacgccctcaatatagggatggttgaggaggtgttgcaaagcagcgatgagaccaaaagtctggaggaggctcaggagtggctcaagcagttcatacagggacctccagaagtgatccgggctctcaaaaaatccgtctgctcaggacgggaactctaccttgaggaagccttgcagaatgagcgagacctgctggggacagtctggggtgggccagccaacttagaggcgatcgctaagaaaggtaaatttaataagtag

SEQ ID NO: 280725 - DNA, 906 bp, Artificial Sequence
  derived and/or modified sequence
atggctaagtcccttctgaagactgcatccctctctggcaggactaaactccttcatcagactgggctgtcgttatattctacttcccatgggttctacgaggaagaagtgaagaagactctccagcaatttccaggcggtagtatcgatctacaaaaggaagacaatggaatcggaatattgactctgaacaacccctccagaatgaatgccttttctggggtaatgatgctgcagctgttagagaaggttattgagctggaaaactggacagagggcaaggggctgatcgttagaggagccaaaaatacctttagtagtggctccgacctgaatgccgtgaagtccctgggaactcccgaagatgggatggctgtctgtatgtttatgcagaacacactgactcgctttatgagactgcccctgatctcagtggcgctggtccaggggtgggcattgggagggggagccgagtttaccacagcatgtgattttcgcctgatgactcctgaatccaagatccggttcgtgcacaaagagatgggaataatccccagctgggggggtactaccagactagtggagatcatcggctcacgtcaggcactgaaggtgctgagcggcgcactaaagctggattctaaaaatgccctgaatattggcatggtcgaggaggtgttgcaatcctcagacgagacgaaaagtctcgaggaggcccaggaatggttgaaacagtttatacagggcccacctgaagtgatacgcgctttaaaaaaaagcgtatgtagcgggagagagctttacctggaggaagctctccagaacgaacgggatctgctcgggactgtttggggcggaccagcaaatctagaggccatcgctaaaaagggaaagttcaataaatag

SEQ ID NO: 280726 - DNA, 906 bp, Artificial Sequence
  derived and/or modified sequence
atggcaaagtcactgttgaagaccgccagcttgagcggtcggactaagctattacaccagacgggcctttccctctattctactagccacggcttttatgaggaggaggttaaaaagacgttgcaacaattcccgggaggcagcatcgatctgcaaaaagaggacaacggcattggcatcctgaccctcaacaatcccagcagaatgaatgccttctcaggagtgatgatgctccagctcctggaaaaggtcatcgagcttgagaactggaccgaaggcaaaggcctgattgtccggggtgctaaaaataccttttcctccgggtccgacctcaacgctgtgaaatctctcggaacacctgaggatggaatggctgtgtgtatgtttatgcagaacacactgacgcgcttcatgaggcttcccctgatctctgtggctctcgttcaggggtgggccctgggtggcggagccgaattcacaacagcttgcgactttcggctgatgacccctgagagtaagatccggttcgtgcataaagaaatgggtattattccctcgtggggagggacaacgcgcctcgtcgagattatcgggagccgccaggcactgaaagtacttagcggagctctgaagctggattccaaaaatgccctaaacatcggtatggtagaggaggttctgcaatctagtgatgagactaaatccctagaagaagctcaggaatggctgaaacagttcatccagggccctcccgaggtcatcagggcattgaagaaatctgtgtgctccggcagagaactttacctggaggaagccctccaaaatgaacgcgacctactgggcacagtctggggcggtcctgccaatcttgaggctattgcgaagaaggggaagttcaacaaatag

SEQ ID NO: 280727 - DNA, 456 bp, Artificial Sequence
  derived and/or modified sequence
atggccaagagcctgctcaagaccgcaagcttgagcggtaggacgaagctgctgcaccaaaccgggctgtcactttatagtacatctcacggcttttacgaggaagaggtgaagaagactcttcagcagttccccggaggttcaatcgacctgcaaaaagaggataacgggataggaatcctcactctgaataatccttcccgtatgaacgccttttctggggtgatgatgctccaattactggagaaggttattgaactggaaaattggactgagggcaaaggcctgattgtgagaggagcaaagaacactttctcatccggatccgacctgaacgctgtgaagtctctgggcacacccgaggacgggatggcagtgtgtatgtttatgcaaaataccctcactaggttcatgcgcctgcccctgatctctgtggccttagttcaaggatggtag

SEQ ID NO: 280728 - DNA, 855 bp, Artificial Sequence
  derived and/or modified sequence
atggccaagagcctgctgaagaccgccagcctgagcggcagaaccaagctgctgcaccagaccggcctgagcctgtacagcaccagccacggcttctacgaggaggaggtgaagaagaccctgcagcagttccccggcggcagcatcgacctgcagaaggaggacaacggcatcggcatcctgaccctgaacaaccccagcagaatgaacgccttcagcggcgtgatgatgctgcagctgctggagaaggtgatcgagctggagaactggaccgagggcaagggcctgatcgtgagaggcgccaagaacaccttcagcagcggcagcgacctgaacgccgtgaagagcctgggcctgcagagaagactgcccctgatcagcgtggccctggtgcagggctgggccctgggcggcggcgccgagttcaccaccgcctgcgacttcagactgatgacccccgagagcaagatcagattcgtgcacaaggagatgggcatcatccccagctggggcggcaccaccagactggtggagatcatcggcagcagacaggccctgaaggtgctgagcggcgccctgaagctggacagcaagaacgccctgaacatcggcatggtggaggaggtgctgcagagcagcgacgagaccaagagcctggaggaggcccaggagtggctgaagcagttcatccagggcccccccgaggtgatcagagccctgaagaagagcgtgtgcagcggcagagagctgtacctggaggaggccctgcagaacgagagagacctgctgggcaccgtgtggggcggccccgccaacctggaggccatcgccaagaagggcaagttcaacaagtag

SEQ ID NO: 280729 - DNA, 642 bp, Artificial Sequence
  derived and/or modified sequence
atgaacgccttcagcggcgtgatgatgctgcagctgctggagaaggtgatcgagctggagaactggaccgagggcaagggcctgatcgtgagaggcgccaagaacaccttcagcagcggcagcgacctgaacgccgtgaagagcctgggcacccccgaggagagctgcagatggaacaccgagttcctgtacaccctgcaccccgtgagccccttcatcaacatcctgtacagctacggctggaacggcagaatgcacgtgcacgccaagcacctgaacaagatctacgaggtgaagaagcagagaggcaagatcctgctgggcctgagcagactgcccctgatcagcgtggccctggtgcagggctgggccctgggcggcggcgccgagttcaccaccgcctgcgacttcagactgatgacccccgagagcaagatcagattcgtgcacaaggagatgggcatcatccccagctggggcggcaccaccagactggtggagatcatcggcagcagacaggccctgaaggtgctgagcggcgccctgaagctggacagcaagaacgccctgaacatcggcatggtggaggaggtgctgcagagcagcgacgagaccaagagcctggaggaggcccaggagtag

SEQ ID NO: 280730 - DNA, 906 bp, Artificial Sequence
  derived and/or modified sequence
atggccaagagcctgctgaagaccgccagcctgagcggcagaaccaagctgctgcaccagaccggcctgagcctgtacagcaccagccacggcttctacgaggaggaggtgaagaagaccctgcagcagttccccggcggcagcatcgacctgcagaaggaggacaacggcatcggcatcctgaccctgaacaaccccagcagaatgaacgccttcagcggcgtgatgatgctgcagctgctggagaaggtgatcgagctggagaactggaccgagggcaagggcctgatcgtgagaggcgccaagaacaccttcagcagcggcagcgacctgaacgccgtgaagagcctgggcacccccgaggacggcatggccgtgtgcatgttcatgcagaacaccctgaccagattcatgagactgcccctgatcagcgtggccctggtgcagggctgggccctgggcggcggcgccgagttcaccaccgcctgcgacttcagactgatgacccccgagagcaagatcagattcgtgcacaaggagatgggcatcatccccagctggggcggcaccaccagactggtggagatcatcggcagcagacaggccctgaaggtgctgagcggcgccctgaagctggacagcaagaacgccctgaacatcggcatggtggaggaggtgctgcagagcagcgacgagaccaagagcctggaggaggcccaggagtggctgaagcagttcatccagggcccccccgaggtgatcagagccctgaagaagagcgtgtgcagcggcagagagctgtacctggaggaggccctgcagaacgagagagacctgctgggcaccgtgtggggcggccccgccaacctggaggccatcgccaagaagggcaagttcaacaagtag

SEQ ID NO: 280731 - DNA, 456 bp, Artificial Sequence
  derived and/or modified sequence
atggccaagagcctgctgaagaccgccagcctgagcggcagaaccaagctgctgcaccagaccggcctgagcctgtacagcaccagccacggcttctacgaggaggaggtgaagaagaccctgcagcagttccccggcggcagcatcgacctgcagaaggaggacaacggcatcggcatcctgaccctgaacaaccccagcagaatgaacgccttcagcggcgtgatgatgctgcagctgctggagaaggtgatcgagctggagaactggaccgagggcaagggcctgatcgtgagaggcgccaagaacaccttcagcagcggcagcgacctgaacgccgtgaagagcctgggcacccccgaggacggcatggccgtgtgcatgttcatgcagaacaccctgaccagattcatgagactgcccctgatcagcgtggccctggtgcagggctggtag

SEQ ID NO: 280732 - DNA, 1515 bp, Artificial Sequence
  derived and/or modified sequence
gatttccggggtcacgggaaccggcaggggaacgggataaagttcccggagaaaggaaaggagagcgtgggatagtaaaagagaagacgcggagaagaggagaggacctacaagaacggaggacaggggcgcacgatggtcccggggggagcggaaacaaaggcacgcaaaacggaaaagcgtgtgtaggggagcggaaaaggaagtcaccaccgtggcctgcgacggtgttatgatgctacaacttctggaaaaagtaattgaattggaaaattggacagaggggaaaggcctcattgtccgtggggcaaaaaatactttctcttcaggatctgatctgaatgctgtgaaatcactaggaactccagaggatggaatggccgtatgcatgttcatgcaaaacaccttaacaagatttatgagacttcctttaataagtgttgcgctggttcaaggttgggcattgggtggaggagcagaatttactacagcatgtgatttcaggttaatgactccagagagtaagatcagattcgtccacaaagagatgggcataataccaagctggggtggcaccacccggctagttgaaataatcggaagtagacaagctctcaaagtgttgagtggggcccttaaactggattcaaaaaatgctctaaacataggaatggttgaagaggtcttgcagtcttcagatgaaactaaatctctagaagaggcacaagaatggctaaagcaattcatccaagggccaccggaagtaattagagctttgaaaaaatctgtttgttcaggcagagagctatatttggaggaagcattacagaacgaaagagatcttttaggaacagtttggggtgggcctgcaaatttagaggctattgctaagaaaggaaaatttaataaataattggtttttcgtgtggatgtactccaagtaaagctccagtgactaatatgtataaatgttaaatgatattaaatatgaacatcagaattactttgaaggctactattaatatgcagacttacttttaatcatttgaatatctgaactcatttacctcatttcttgccaattactcacttgggtatttactgcgtaatctggaacatttagctaaaatatacacttttggcttaaaaattattgctgtcaattccaataataattcttagcttataaccaaagagcagtgtttaaaaggagagcttctatacaaaacctattcctggcgttacttttcatacaatttttgttctgttttacctggaaataatttaccaaaataactgagtgttgctgctaaagaacaaaagtggggaggtatcagggaacaagaaaacaagaaagggtatgatcaatcattttcttctgctccaaacagctggagtaaaattcatgggaaatggcccttcatttaaaaaaagatgtacctcactacccactacaaatttggaactttgttcttttcaataattagttttctattgtaaattacctactaaaca

SEQ ID NO: 280733 - protein, 145 aa, Artificial Sequence
  derived and/or modified sequence
MAKSLLKTASLSGRTKLLHQTGLSLYSTSHGFYEEEVKKTLQQFPGGSIDLQKEDNGIGILTLNNPSRMNAFSGVMMLQLLEKVIELENWTEGKGLIVRGAKNTFSSGSDLNAVKSLGTPETSFNKCCAGSRLGIGWRSRIYYSM

SEQ ID NO: 280734 - protein, 146 aa, Artificial Sequence
  derived and/or modified sequence
MAKSLLKTASLSGRTKLLHQTGLSLYSTSHGFYEEEVKKTLQQFPGGSIDLQKEDNGIGILTLNNPSRMNAFSGVMMLQLLEKVIELENWTEGKGLIVRGAKNTFSSGSDLNAVKSLGTPEETSFNKCCAGSRLGIGWRSRIYYSM

SEQ ID NO: 280735 - protein, 125 aa, Artificial Sequence
  derived and/or modified sequence
MAKSLLKTASLSGRTKLLHQTGLSLYSTSHGFYEEEVKKTLQQFPGGSIDLQKEDNGIGILTLNNPSRMNAFSGVMMLQLLEKVIELENWTEGKGLIVRGAKNTFSSGSDLNAVKSLGTPEANFL

SEQ ID NO: 280736 - protein, 70 aa, Artificial Sequence
  derived and/or modified sequence
MMLQLLEKVIELENWTEGKGLIVRGAKNTFSSGSDLNAVKSLGTPETSFNKCCAGSRLGIGWRSRIYYSM

SEQ ID NO: 280737 - DNA, 438 bp, Artificial Sequence
  derived and/or modified sequence
atggctaagtccctgctcaaaacagcatccttgtctggcaggacaaagttgctccatcagactggcctgtccttgtacagtacctcccacgggttttacgaagaagaggtcaaaaagaccctgcagcagtttccgggcggatcaatcgatttgcaaaaagaagataacggcatcggaatcttaacgctcaacaatccgagccgcatgaacgccttcagtggagtaatgatgttacagttgctagaaaaggtgattgagctcgagaattggactgagggcaaggggctgattgttaggggcgctaaaaacactttttcctctggaagcgatttaaacgccgtaaagtcactcggcactcctgagaccagcttcaacaaatgttgcgccggctcccgcttaggaattgggtggaggagtagaatttattattccatgtag

SEQ ID NO: 280738 - DNA, 441 bp, Artificial Sequence
  derived and/or modified sequence
atggcaaagagcctcctcaaaaccgcgagcttgtccggccgcactaaacttttgcatcagactggcctgtctctatattccacgtcccacggtttttacgaggaagaagttaaaaaaactctccagcagtttcctggtggctccatagacctgcagaaagaagacaatggcattggaatccttacacttaacaatccttctaggatgaatgcgttttctggtgtgatgatgttacaactgttggagaaagtgattgaactcgaaaattggacagagggcaaggggcttatcgttaggggggccaagaacactttcagttccggatccgacctcaacgctgtcaaaagcctgggaacgcctgaggaaactagctttaacaaatgttgcgccgggagcaggcttggaatcggctggcggagcagaatctattattcaatgtag

SEQ ID NO: 280739 - DNA, 438 bp, Artificial Sequence
  derived and/or modified sequence
atggccaaatccctgttaaagactgcttcactttcaggacggaccaaactcctacaccagactgggctttctctgtactccactagtcacgggttctacgaggaagaagttaagaagactttgcagcagttccccggaggctcaattgatcttcagaaagaggacaacggcataggcatcctgaccctgaacaacccctctcgaatgaatgcgttttcaggcgtcatgatgctgcaattattggaaaaagtgatcgaactggagaactggaccgagggtaagggactgatcgtgagaggagccaagaatacttttagcagcggttcagacctaaacgctgtgaaaagcctggggacccctgaaacatctttcaataagtgctgtgctggcagtcggttgggaatcgggtggaggagtcgcatctactatagcatgtag

SEQ ID NO: 280740 - DNA, 378 bp, Artificial Sequence
  derived and/or modified sequence
atggcaaagtctctgctgaagacagctagccttagcgggcggaccaaactgttgcaccagacgggcttatcactgtattcaactagtcacggattttacgaggaggaagtgaagaagacgctgcagcagttccctggcggctccatcgacttgcagaaggaagataatggcattggcatcctgaccctgaacaaccccagtagaatgaatgcattctctggcgtgatgatgctccagctgctcgagaaggtgattgagctggaaaactggaccgagggaaaaggcctcatcgtgcggggcgctaagaacactttctcatccggcagcgacctaaacgcagtgaaatctctgggcacgcctgaggcgaacttcttatag

SEQ ID NO: 280741 - DNA, 438 bp, Artificial Sequence
  derived and/or modified sequence
atggccaagagcctgctgaagacagccagcctgagcggccgcaccaagctgctgcaccagacaggcctgagcctgtacagcaccagccacggcttctatgaggaggaggtgaagaagaccctgcagcagtttcctgggggcagcattgacctgcagaaggaggacaatggcatcggcatcctgaccctgaacaaccccagcaggatgaatgccttctctggagtgatgatgctgcagctgctggagaaggtgattgagctggagaactggacagagggcaagggcctgattgtgcggggggccaagaacaccttcagcagcggcagtgacctgaatgctgtgaagagcctgggcaccccagagaccagcttcaacaagtgctgtgccggcagccggctgggcatcggctggaggagccgcatctactacagcatgtag

SEQ ID NO: 280742 - DNA, 441 bp, Artificial Sequence
  derived and/or modified sequence
atggccaagagcctgctgaagacagccagcctgagcggccgcaccaagctgctgcaccagacaggcctgagcctgtacagcaccagccacggcttctatgaggaggaggtgaagaagaccctgcagcagtttcctgggggcagcattgacctgcagaaggaggacaatggcatcggcatcctgaccctgaacaaccccagcaggatgaatgccttctctggagtgatgatgctgcagctgctggagaaggtgattgagctggagaactggacagagggcaagggcctgattgtgcggggggccaagaacaccttcagcagcggcagtgacctgaatgctgtgaagagcctgggcaccccagaggagaccagcttcaacaagtgctgtgccggcagccggctgggcatcggctggaggagccgcatctactacagcatgtag

SEQ ID NO: 280743 - DNA, 378 bp, Artificial Sequence
  derived and/or modified sequence
atggccaagagcctgctgaagacagccagcctgagcggccgcaccaagctgctgcaccagacaggcctgagcctgtacagcaccagccacggcttctatgaggaggaggtgaagaagaccctgcagcagtttcctgggggcagcattgacctgcagaaggaggacaatggcatcggcatcctgaccctgaacaaccccagcaggatgaatgccttctctggagtgatgatgctgcagctgctggagaaggtgattgagctggagaactggacagagggcaagggcctgattgtgcggggggccaagaacaccttcagcagcggcagtgacctgaatgctgtgaagagcctgggcaccccagaggccaacttcctgtag

SEQ ID NO: 280744 - DNA, 438 bp, Artificial Sequence
  derived and/or modified sequence
atggccaagagcctgctgaagaccgccagcctgagcggccggaccaagcttctgcatcagacaggcttatcgctgtactcaacaagccatggcttttacgaggaggaggtgaagaaaacgttacaacagtttcccggaggctccatcgatctacagaaagaagataatggcatagggatactgaccttgaataatccatctcggatgaatgcgttctccggagtgatgatgctccagctgttggagaaagtgattgagctggaaaactggaccgaaggaaagggactgatcgttcggggtgcaaagaacacctttagctctggctccgatctgaatgccgtgaagtcgctcggtaccccagaaacgtcctttaataaatgttgcgcagggtcacgattgggcataggttggaggtctcgtatttactattccatgtag

SEQ ID NO: 280745 - DNA, 441 bp, Artificial Sequence
  derived and/or modified sequence
atggccaagagcctgctgaagaccgccagcctgagcggccggaccaaacttctgcaccagacagggttgagcctctactccacaagccatgggttttatgaggaagaggttaaaaaaacattgcagcagttcccaggaggaagtatcgacctccagaaggaagacaacggtattggcatccttaccctaaacaatcccagtcgaatgaatgccttctcgggcgtcatgatgctgcagttactggagaaagtcatagaattggaaaactggaccgaaggaaaaggcttgattgtaaggggcgccaaaaacactttctcctctggatctgaccttaacgctgtgaagtcgttgggaacacctgaagagaccagcttcaacaaatgttgtgccggcagcaggctgggcattgggtggcgtagccgaatttactattccatgtag

SEQ ID NO: 280746 - DNA, 438 bp, Artificial Sequence
  derived and/or modified sequence
atggccaagagcctgctgaagaccgccagcctgagcggccggaccaagcttctgcaccagactggcctctccttgtatagcactagtcacggattttacgaggaagaagttaagaagacgctgcagcagttccccgggggctctatcgatctgcagaaagaagacaatggtattggaatactgacactgaacaatccaagtagaatgaatgctttctccggtgtaatgatgctccagctgttggagaaagttatcgagttagagaactggacggaaggaaagggtctcattgttcgtggggcaaagaacacttttagttcgggttccgacctgaatgccgtaaagtctctggggacacccgaaacgagttttaacaagtgctgcgcgggaagcagacttgggattggttggcgatcacggatctattatagcatgtag

SEQ ID NO: 280747 - DNA, 378 bp, Artificial Sequence
  derived and/or modified sequence
atggccaagagcctgctgaagaccgccagcctgagcggccggaccaaactgctccaccaaactgggctcagcctttactccacctcacatggcttttatgaggaggaggttaaaaagacgctgcagcagttccctggcgggtccatcgatctccaaaaggaggacaatggcattggcatcttgactctgaataacccaagtcgtatgaacgcattctccggcgtgatgatgttgcagctgctggaaaaggtgatcgaattggagaattggacagagggtaaaggcttgatcgtccgaggggcaaagaacacgttctcctccggctccgatttaaatgccgtcaagtcccttggcacccccgaggccaattttctttag

SEQ ID NO: 280748 - DNA, 438 bp, Artificial Sequence
  derived and/or modified sequence
atggcaaagtctctcctgaagacagcttccctgtccgggcgaactaaactgctccaccaaacaggacttagtctgtactccaccagtcacggcttctacgaagaggaagttaaaaaaaccctacagcagtttccgggaggcagcattgacctacagaaagaggataacgggatcggcattctcaccttaaacaatccctcacgcatgaatgccttctctggcgttatgatgcttcaattacttgaaaaagtgatcgaacttgaaaattggactgagggcaaaggtctgatcgttagaggcgcaaagaatacatttagttccggaagcgacctgaacgctgtcaagtccctcggaactcctgaaaccagcttcaacaaatgctgcgccggaagcagactaggtattggctggcgatcgcgcatatattattccatgtag

SEQ ID NO: 280749 - DNA, 441 bp, Artificial Sequence
  derived and/or modified sequence
atggccaaaagtctgctcaagaccgcatctctgtccggaagaactaagctgctgcatcagaccggactgtcactgtatagtacctcacacggtttttatgaagaggaggtgaaaaaaacgctgcagcagttcccaggcggtagtatcgacttacagaaggaagacaatggcattgggatcctgacgctcaataacccatcgcgaatgaacgcatttagcggcgtcatgatgctacagttgttagaaaaagtgatcgaactcgagaactggactgaggggaaaggcctcatcgtgagaggcgctaaaaataccttcagttccggcagtgatctcaacgctgtgaagtctcttggtacacctgaggagacctcctttaataaatgctgtgctggaagcagactggggattggttggcggtcgaggatctattacagcatgtag

SEQ ID NO: 280750 - DNA, 438 bp, Artificial Sequence
  derived and/or modified sequence
atggctaaatccctcttaaaaaccgcctctctctccggccgaacaaaactgctgcatcagacagggttgagcttgtactcaaccagccacgggttctacgaagaagaggtgaaaaaaactcttcagcagtttcccggaggttcaatagatcttcagaaggaggacaatggaatcgggatattgacgctaaataaccccagtcgcatgaatgcgtttagtggcgtgatgatgttgcaattactggaaaaggttatcgaattagagaattggaccgagggcaagggattgatagtgcgaggagctaaaaacaccttctcatcagggtccgacctcaacgcagtaaagtctctgggtaccccagagacttcctttaacaaatgttgcgcaggcagtagactgggtatcggctggagatcaaggatctattattctatgtag

SEQ ID NO: 280751 - DNA, 378 bp, Artificial Sequence
  derived and/or modified sequence
atggcaaaatctcttctgaaaaccgcaagtctctccggcaggactaaactccttcatcagacaggtctttcgctgtactcgacctcacacggattttacgaggaggaggtaaagaaaaccctgcagcaattccctggcggttctattgatctgcaaaaagaggacaatgggatcggcatcttgactcttaataacccctcccgcatgaacgccttctctggagtcatgatgctccagctgttggaaaaagtgatcgaactggagaactggacagaaggaaaaggacttattgttagaggcgcaaaaaatacatttagtagtggtagcgacctaaacgcagtgaagagccttggcacccccgaggcgaattttctttag

SEQ ID NO: 280752 - DNA, 438 bp, Artificial Sequence
  derived and/or modified sequence
atggccaagagcctgctgaagaccgccagcctgagcggcagaaccaagctgctgcaccagaccggcctgagcctgtacagcaccagccacggcttctacgaggaggaggtgaagaagaccctgcagcagttccccggcggcagcatcgacctgcagaaggaggacaacggcatcggcatcctgaccctgaacaaccccagcagaatgaacgccttcagcggcgtgatgatgctgcagctgctggagaaggtgatcgagctggagaactggaccgagggcaagggcctgatcgtgagaggcgccaagaacaccttcagcagcggcagcgacctgaacgccgtgaagagcctgggcacccccgagaccagcttcaacaagtgctgcgccggcagcagactgggcatcggctggagaagcagaatctactacagcatgtag

SEQ ID NO: 280753 - DNA, 441 bp, Artificial Sequence
  derived and/or modified sequence
atggccaagagcctgctgaagaccgccagcctgagcggcagaaccaagctgctgcaccagaccggcctgagcctgtacagcaccagccacggcttctacgaggaggaggtgaagaagaccctgcagcagttccccggcggcagcatcgacctgcagaaggaggacaacggcatcggcatcctgaccctgaacaaccccagcagaatgaacgccttcagcggcgtgatgatgctgcagctgctggagaaggtgatcgagctggagaactggaccgagggcaagggcctgatcgtgagaggcgccaagaacaccttcagcagcggcagcgacctgaacgccgtgaagagcctgggcacccccgaggagaccagcttcaacaagtgctgcgccggcagcagactgggcatcggctggagaagcagaatctactacagcatgtag

SEQ ID NO: 280754 - DNA, 378 bp, Artificial Sequence
  derived and/or modified sequence
atggccaagagcctgctgaagaccgccagcctgagcggcagaaccaagctgctgcaccagaccggcctgagcctgtacagcaccagccacggcttctacgaggaggaggtgaagaagaccctgcagcagttccccggcggcagcatcgacctgcagaaggaggacaacggcatcggcatcctgaccctgaacaaccccagcagaatgaacgccttcagcggcgtgatgatgctgcagctgctggagaaggtgatcgagctggagaactggaccgagggcaagggcctgatcgtgagaggcgccaagaacaccttcagcagcggcagcgacctgaacgccgtgaagagcctgggcacccccgaggccaacttcctgtag

SEQ ID NO: 280755 - protein, 105 aa, Artificial Sequence
  derived and/or modified sequence
  misc_feature (1)..(1): Xaa can be any naturally occurring amino acid
XSAVYDCTLNFRNNENPTLLGVLNGKKYHADLYVRRIPLEDIPEDDDECSAWLHKLYQEKGWGDTEFSKQYVSVSRPGRLALCPSEKIAEQQVEVVHGFSKQSGE

SEQ ID NO: 280756 - protein, 216 aa, Artificial Sequence
  derived and/or modified sequence
MDLAGLLKSQFLCHLVFCYVFIASGLIINTIQLFTLLLWPINKQLFRKINCRLSYCISSLSAVYDCTLNFRNNENPTLLGVLNGKKYHADLYVRRIPLEDIPEDDDECSAWLHKLYQEKDAFQEEYYRTGTFPETPMVPPRRPWTLVNWLFWASLVLYPFFQFLVSMIRSGSSLTLASFILVFFVASVGVRWMIGVTEIDKGSAYGNSDSKQKLND

SEQ ID NO: 280757 - DNA, 318 bp, Artificial Sequence
  derived and/or modified sequence
tgaagcgccgtgtacgactgcaccctgaacttcagaaacaacgagaaccccaccctgctgggcgtgctgaacggcaagaagtaccacgccgacctgtacgtgagaagaatccccctggaggacatccccgaggacgacgacgagtgcagcgcctggctgcacaagctgtaccaggagaagggctggggcgacaccgagttcagcaagcagtacgtgagcgtgagcagacccggcagactggccctgtgccccagcgagaagatcgccgagcagcaggtggaggtggtgcacggcttcagcaagcagagcggcgagtag

SEQ ID NO: 280758 - DNA, 651 bp, Artificial Sequence
  derived and/or modified sequence
atggacctggccggcctgctgaagagccagttcctgtgccacctggtgttctgctacgtgttcatcgccagcggcctgatcatcaacaccatccagctgttcaccctgctgctgtggcccatcaacaagcagctgttcagaaagatcaactgcagactgagctactgcatcagcagcctgagcgccgtgtacgactgcaccctgaacttcagaaacaacgagaaccccaccctgctgggcgtgctgaacggcaagaagtaccacgccgacctgtacgtgagaagaatccccctggaggacatccccgaggacgacgacgagtgcagcgcctggctgcacaagctgtaccaggagaaggacgccttccaggaggagtactacagaaccggcaccttccccgagacccccatggtgccccccagaagaccctggaccctggtgaactggctgttctgggccagcctggtgctgtaccccttcttccagttcctggtgagcatgatcagaagcggcagcagcctgaccctggccagcttcatcctggtgttcttcgtggccagcgtgggcgtgagatggatgatcggcgtgaccgagatcgacaagggcagcgcctacggcaacagcgacagcaagcagaagctgaacgactag

SEQ ID NO: 280759 - DNA, 490 bp, Artificial Sequence
  derived and/or modified sequence
tttcagctgtatatgactgtacactcaatttcagaaataatgaaaatccaacactgctgggagtcctaaacggaaagaaataccatgcagatttgtatgttaggaggatcccactggaagacatccctgaagacgatgacgagtgctcggcctggctgcacaagctctaccaggagaagggctggggcgacaccgagttctctaagcagtatgtgtctgtgagcaggcctgggaggctggccctttgcccttccgagaagatcgctgagcagcaagtggaagtggtgcatggtttctccaagcagagtggtgaatagacatcaagggacaattcctttctgtatcagcctattttgctaggagcctagatctaaagctttacgtgccccaaatctgggtgcccgacccagtttgtcaaagtgggatttcattttaatgatcaaccttgcagtcagaagtgtggtgtatgtcaaaagacagttctgttgat

SEQ ID NO: 280760 - DNA, 1133 bp, Artificial Sequence
  derived and/or modified sequence
gttggctgacttacagctcttataaactagtggcaatttctgaacccagccggctccatctcagcttctggtttctaagtccatgtgccaaaggctgccaggaaggagacgccttcctgagtcctggatctttcttccttctggaaatctttgactgtgggtagttatttatttctgaataagagcgtccacgcatcatggacctcgcgggactgctgaagtctcagttcctgtgccacctggtcttctgctacgtctttattgcctcagggctaatcatcaacaccattcagctcttcactctcctcctctggcccattaacaagcagctcttccggaagatcaactgcagactgtcctattgcatctcaagcctttcagctgtatatgactgtacactcaatttcagaaataatgaaaatccaacactgctgggagtcctaaacggaaagaaataccatgcagatttgtatgttaggaggatcccactggaagacatccctgaagacgatgacgagtgctcggcctggctgcacaagctctaccaggagaaggatgcctttcaggaggagtactacaggacgggcaccttcccagagacgcccatggtgcccccccggcggccctggaccctcgtgaactggctgttttgggcctcgctggtgctctaccctttcttccagttcctggtcagcatgatcaggagcgggtcttccctgacgctggccagcttcatcctcgtcttctttgtggcctccgtgggagttcgatggatgattggtgtgacggaaattgacaagggctctgcctacggcaactctgacagcaagcagaaactgaatgactgactcagggaggtgtcaccatccgaagggaaccttggggaactggtggcctctgcatatcctccttagtgggacacggtgacaaaggctgggtgagcccctgctgggcacggcggaagtcacgacctctccagccagggagtctggtctcaaggccggatggggaggaagatgttttgtaatctttttttccccatgtgctttagtgggctttggttttctttttgtgcgagtgtgtgtgagaatggctgtgtggtgagtgtgaactttgttctgtgatcatagaaa

SEQ ID NO: 280761 - DNA, 318 bp, Artificial Sequence
  derived and/or modified sequence
taatccgccgtttatgactgtactctgaattttaggaataatgaaaatccaactctgctgggcgtgcttaacgggaagaaataccacgctgacctctacgtgagacgcataccactggaagatattcctgaggatgatgatgagtgctctgcctggttacacaagctttaccaggagaagggttggggcgacacggaattttccaaacaatatgtctccgtctcccggcctgggagattagcactgtgtcctagtgaaaaaatagccgaacaacaggttgaggtcgttcacgggtttagcaagcagtcaggcgagtag

SEQ ID NO: 280762 - DNA, 651 bp, Artificial Sequence
  derived and/or modified sequence
atggatctcgcaggtctcttaaagagccaattcctctgccacttggtgttctgttacgtttttattgcatcaggcctgattattaacaccatccaactgtttactcttctgctttggccaatcaacaaacagctgttccggaaaatcaactgtaggctgagctattgtataagctctctgagcgccgtgtacgattgtaccctcaatttccggaataatgaaaatcctacgctacttggtgttctcaacggcaaaaaataccatgctgacttgtacgtacggcgcattcccctcgaagacattccagaagatgacgatgaatgcagcgcttggctgcacaaactgtatcaggagaaggatgctttccaggaggagtactaccggacgggaacctttcccgagacacccatggttcctcctcggaggccctggaccctggttaattggctgttttgggcgtccctggttttatatccattcttccagttcctagtgagcatgatacgcagcggctcgtctctgaccctggcatcttttattctggtgttctttgtcgctagtgtgggcgtaagatggatgattggagtcaccgagattgacaagggctccgcctacggtaatagtgatagcaagcagaagttgaacgactag

SEQ ID NO: 280763 - DNA, 318 bp, Artificial Sequence
  derived and/or modified sequence
tgaagtgctgtgtatgactgcaccctgaacttcaggaacaatgaaaaccccaccctgctgggcgtgctgaatggcaagaagtaccacgccgacctgtatgtgcggcgcatccccctggaggacatcccagaagatgatgatgagtgcagcgcctggctgcacaagctgtaccaggagaagggctggggagacacagagttcagcaagcagtatgtgtctgtgtccaggcctggccgcctggccctgtgccccagcgagaagattgctgagcagcaggtggaggtggtgcacggcttcagcaagcagagcggggagtag

SEQ ID NO: 280764 - DNA, 651 bp, Artificial Sequence
  derived and/or modified sequence
atggacctggccggcctgctgaagagccagttcctgtgccacctggtgttctgctacgtgttcatcgccagcggcctcatcatcaacaccatccagctgttcaccctgctgctgtggcccatcaacaagcagctgttcaggaagatcaactgccgcctgagctactgcatcagcagcctgtctgctgtgtatgactgcaccctgaacttcagaaataatgaaaaccccaccctgctgggcgtgctgaatggcaagaagtaccacgccgacctgtatgtgcggcgcatccccctggaggacatcccagaagatgatgatgaatgttctgcctggctgcacaagctgtaccaggagaaggatgccttccaggaggagtactacagaacaggcaccttccctgagacccccatggtgcccccaagaagaccctggaccctggtgaactggctgttctgggccagcctggtgctgtaccccttcttccagttcctggtgtccatgatccgcagcggcagcagcctgaccctggccagcttcatcctggtgttctttgtggcctctgtgggcgtgcgctggatgattggagtgacagaaattgacaagggcagcgcctacggcaacagcgacagcaagcagaagctgaatgactag

SEQ ID NO: 280765 - DNA, 318 bp, Artificial Sequence
  derived and/or modified sequence
tgaagcgccgtgtacgactgcaccctgaacttccggaacaacgagaatcccaccctgctgggagtgctaaatggaaagaagtatcacgccgacttgtacgtcagaagaattccattggaagacatcccagaggatgatgatgaatgcagtgcctggctccacaaactatatcaagaaaaaggatggggtgataccgaattcagcaaacagtacgtgtctgtttcaaggcccggccggctcgccctctgtccctctgagaaaatcgcagagcaacaagtcgaggtggtacacggttttagcaagcagagcggagagtag

SEQ ID NO: 280766 - DNA, 651 bp, Artificial Sequence
  derived and/or modified sequence
atggacctggccggcctgctgaagagccagttcctgtgccacctggtgttctgttacgtcttcatagcctccggcttgataataaacaccatccagttattcacgctgctgctgtggccaatcaacaaacagctgttccgcaaaatcaactgccgcctgagctattgcatcagtagcctttctgctgtatacgactgcactctgaatttcagaaacaacgaaaatcccacactcttgggagtgttaaacggcaagaagtaccacgcagacctgtatgtgcgacggatcccactggaagacattcccgaagatgatgacgaatgttcggcttggctccataaactttatcaagagaaagacgcatttcaagaagaatactataggacaggcacatttcccgaaacacctatggtcccacctcgcaggccctggacgcttgtgaattggctgttctgggcctcccttgttctgtatccattctttcagtttctggtgagtatgattcggagtggcagcagcctcacattagctagtttcattctggtgtttttcgttgctagcgtgggagtcaggtggatgatcggagtgaccgagatcgataagggaagcgcttacggaaattccgactccaagcagaagctcaacgattag

SEQ ID NO: 280767 - DNA, 318 bp, Artificial Sequence
  derived and/or modified sequence
tgatcggccgtttacgattgtaccttgaatttccgcaataatgaaaatcctacactgctgggagtcctcaatgggaagaaataccatgcagacctgtacgtccggagaattcctctggaagacatccctgaggatgacgatgaatgtagcgcgtggttacacaaactctaccaggagaagggatggggcgacacagagttcagcaagcaatacgtttcggtgtcgcggccaggcaggctggcactatgcccaagtgagaaaatcgcggagcagcaagtcgaggttgtccatggattttcgaaacagagtggcgaatag

SEQ ID NO: 280768 - DNA, 651 bp, Artificial Sequence
  derived and/or modified sequence
atggatctggctgggctgctcaaatctcagttcctgtgtcacttggtgttctgctacgtcttcatcgcctcagggttaatcataaataccatacagctttttactctcctgctgtggccgatcaacaaacaactgtttagaaagatcaattgccgcctttcttactgcatctcatcactctcagccgtgtatgattgtacactcaatttccggaacaatgaaaacccgacgctgctgggcgttctgaacggaaagaaatatcacgctgacctttacgtacgaaggatacctctcgaggacattccagaagacgatgacgaatgtagtgcctggctgcacaagctataccaagaaaaggatgccttccaggaggaatattataggacgggcactttccctgagacacctatggtgcctccacggcgaccatggacactggtgaactggctgttctgggcgtcacttgttctgtaccctttctttcagtttctggtaagcatgataagaagtggctcaagcttgacactcgcctcgtttattctggtgttttttgttgcttccgtgggggtgcggtggatgatcggggtgacagaaatcgacaaggggagcgcttatggcaattccgacagtaaacagaaactcaacgactag

SEQ ID NO: 280769 - protein, 2231 aa, Artificial Sequence
  derived and/or modified sequence
METGLLPNHKLKTVGEAPAAPPHQQHHHHHHAHHHHHHAHHLHHHHALQQQLNQFQQQQQQQQQQQQQQQQQQHPISNNNSLGGAGGGAPQPGPDMEQPQHGGAKDSAAGGQADPPGPPLLSKPGDEDDAPPKMGEPAGGRYEHPGLGALGTQQPPVAVPGGGGGPAAVPEFNNYYGSAAPASGGPGGRAGPCFDQHGGQQSPGMGMMHSASAAAAGAPGSMDPLQNSHEGYPNSQCNHYPGYSRPGAGGGGGGGGGGGGGSGGGGGGGGAGAGGAGAGAVAAAAAAAAAAAGGGGGGGYGGSSAGYGVLSSPRQQGGGMMMGPGGGGAASLSKAAAGSAAGGFQRFAGQNQHPSGATPTLNQLLTSPSPMMRSYGGSYPEYSSPSAPPPPPSQPQSQAAAAGAAAGGQQAAAGMGLGKDMGAQYAAASPAWAAAQQRSHPAMSPGTPGPTMGRSQGSPMDPMVMKRPQLYGMGSNPHSQPQQSSPYPGGSYGPPGPQRYPIGIQGRTPGAMAGMQYPQQQMPPQYGQQGVSGYCQQGQQPYYSQQPQPPHLPPQAQYLPSQSQQRYQPQQDMSQEGYGTRSQPPLAPGKPNHEDLNLIQQERPSSLPDLSGSIDDLPTGTEATLSSAVSASGSTSSQGDQSNPAQSPFSPHASPHLSSIPGGPSPSPVGSPVGSNQSRSGPISPASIPGSQMPPQPPGSQSESSSHPALSQSPMPQERGFMAGTQRNPQMAQYGPQQTGPSMSPHPSPGGQMHAGISSFQQSNSSGTYGPQMSQYGPQGNYSRPPAYSGVPSASYSGPGPGMGISANNQMHGQGPSQPCGAVPLGRMPSAGMQNRPFPGNMSSMTPSSPGMSQQGGPGMGPPMPTVNRKAQEAAAAVMQAAANSAQSRQGSFPGMNQSGLMASSSPYSQPMNNSSSLMNTQAPPYSMAPAMVNSSAASVGLADMMSPGESKLPLPLKADGKEEGTPQPESKSKDSYSSQGISQPPTPGNLPVPSPMSPSSASISSFHGDESDSISSPGWPKTPSSPKSSSSTTTGEKITKVYELGNEPERKLWVDRYLTFMEERGSPVSSLPAVGKKPLDLFRLYVCVKEIGGLAQVNKNKKWRELATNLNVGTSSSAASSLKKQYIQYLFAFECKIERGEEPPPEVFSTGDTKKQPKLQPPSPANSGSLQGPQTPQSTGSNSMAEVPGDLKPPTPASTPHGQMTPMQGGRSSTISVHDPFSDVSDSSFPKRNSMTPNAPYQQGMSMPDVMGRMPYEPNKDPFGGMRKVPGSSEPFMTQGQMPNSSMQDMYNQSPSGAMSNLGMGQRQQFPYGASYDRRHEPYGQQYPGQGPPSGQPPYGGHQPGLYPQQPNYKRHMDGMYGPPAKRHEGDMYNMQYSSQQQEMYNQYGGSYSGPDRRPIQGQYPYPYSRERMQGPGQIQTHGIPPQMMGGPLQSSSSEGPQQNMWAARNDMPYPYQNRQGPGGPTQAPPYPGMNRTDDMMVPDQRINHESQWPSHVSQRQPYMSSSASMQPITRPPQPSYQTPPSLPNHISRAPSPASFQRSLENRMSPSKSPFLPSMKMQKVMPTVPTSQVTGPPPQPPPIRREITFPPGSVEASQPVLKQRRKITSKDIVTPEAWRVMMSLKSGLLAESTWALDTINILLYDDSTVATFNLSQLSGFLELLVEYFRKCLIDIFGILMEYEVGDPSQKALDHNAARKDDSQSLADDSGKEEEDAECIDDDEEDEEDEEEDSEKTESDEKSSIALTAPDAAADPKEKPKQASKFDKLPIKIVKKNNLFVVDRSDKLGRVQEFNSGLLHWQLGGGDTTEHIQTHFESKMEIPPRRRPPPPLSSAGRKKEQEGKGDSEEQQEKSIIATIDDVLSARPGALPEDANPGPQTESSKFPFGIQQAKSHRNIKLLEDEPRSRDETPLCTIAHWQDSLAKRCICVSNIVRSLSFVPGNDAEMSKHPGLVLILGKLILLHHEHPERKRAPQTYEKEEDEDKGVACSKDEWWWDCLEVLRDNTLVTLANISGQLDLSAYTESICLPILDGLLHWMVCPSAEAQDPFPTVGPNSVLSPQRLVLETLCKLSIQDNNVDLILATPPFSRQEKFYATLVRYVGDRKNPVCREMSMALLSNLAQGDALAARAIAVQKGSIGNLISFLEDGVTMAQYQQSQHNLMHMQPPPLEPPSVDMMCRAAKALLAMARVDENRSEFLLHEGRLLDISISAVLNSLVASVICDVLFQIGQL

SEQ ID NO: 280770 - protein, 723 aa, Artificial Sequence
  derived and/or modified sequence
MPPQYGQQGVSGYCQQGQQPYYSQQPQPPHLPPQAQYLPSQSQQRYQPQQDMSQEGYGTRSQPPLAPGKPNHEDLNLIQQERPSSLPDLSGSIDDLPTGTEATLSSAVSASGSTSSQGDQSNPAQSPFSPHASPHLSSIPGGPSPSPVGSPVGSNQSRSGPISPASIPGSQMPPQPPGSQSESSSHPALSQSPMPQERGTQRNPQMAQYGPQQTGPSMSPHPSPGGQMHAGISSFQQSNSSGTYGPQMSQYGPQGNYSRPPAYSGVPSASYSGPGPGMGISANNQMHGQGPSQPCGAVPLGRMPSAGMQNRPFPGNMSSMTPSSPGMSQQGGPGMGPPMPTVNRKAQEAAAAVMQAAANSAQSRQGSFPGMNQSGLMASSSPYSQPMNNSSSLMNTQAPPYSMAPAMVNSSAASVGLADMMSPGESKLPLPLKADGKEEGTPQPESKSKDSYSSQGISQPPTPGNLPVPSPMSPSSASISSFHGDESDSISSPGWPKTPSSPKSSSSTTTGEKITKVYELGNEPERKLWVDRYLTFMEERGSPVSSLPAVGKKPLDLFRLYVCVKEIGGLAQVNKNKKWRELATNLNVGTSSSAASSLKKQYIQYLFAFECKIERGEEPPPEVFSTGDTKKQPKLQPPSPVVQMEPRACDTGGSGRKASWSRPAPRARAGGSRHTQASGGRRQRHPGLQKPLDSLPPTQQVASPIPVPSLGKVSGNIFVVKGK

SEQ ID NO: 280771 - protein, 2289 aa, Artificial Sequence
  derived and/or modified sequence
MAHNAGAAAAAGTHSAKSGGSEAALKEGGSAAALSSSSSSSAAAAAASSSSSSGPGSAMETGLLPNHKLKTVGEAPAAPPHQQHHHHHHAHHHHHHAHHLHHHHALQQQLNQFQQQQQQQQQQQQQQQQQQHPISNNNSLGGAGGGAPQPGPDMEQPQHGGAKDSAAGGQADPPGPPLLSKPGDEDDAPPKMGEPAGGRYEHPGLGALGTQQPPVAVPGGGGGPAAVPEFNNYYGSAAPASGGPGGRAGPCFDQHGGQQSPGMGMMHSASAAAAGAPGSMDPLQNSHEGYPNSQCNHYPGYSRPGAGGGGGGGGGGGGGSGGGGGGGGAGAGGAGAGAVAAAAAAAAAAAGGGGGGGYGGSSAGYGVLSSPRQQGGGMMMGPGGGGAASLSKAAAGSAAGGFQRFAGQNQHPSGATPTLNQLLTSPSPMMRSYGGSYPEYSSPSAPPPPPSQPQSQAAAAGAAAGGQQAAAGMGLGKDMGAQYAAASPAWAAAQQRSHPAMSPGTPGPTMGRSQGSPMDPMVMKRPQLYGMGSNPHSQPQQSSPYPGGSYGPPGPQRYPIGIQGRTPGAMAGMQYPQQQMPPQYGQQGVSGYCQQGQQPYYSQQPQPPHLPPQAQYLPSQSQQRYQPQQDMSQEGYGTRSQPPLAPGKPNHEDLNLIQQERPSSLPDLSGSIDDLPTGTEATLSSAVSASGSTSSQGDQSNPAQSPFSPHASPHLSSIPGGPSPSPVGSPVGSNQSRSGPISPASIPGSQMPPQPPGSQSESSSHPALSQSPMPQERGFMAGTQRNPQMAQYGPQQTGPSMSPHPSPGGQMHAGISSFQQSNSSGTYGPQMSQYGPQGNYSRPPAYSGVPSASYSGPGPGMGISANNQMHGQGPSQPCGAVPLGRMPSAGMQNRPFPGNMSSMTPSSPGMSQQGGPGMGPPMPTVNRKAQEAAAAVMQAAANSAQSRQGSFPGMNQSGLMASSSPYSQPMNNSSSLMNTQAPPYSMAPAMVNSSAASVGLADMMSPGESKLPLPLKADGKEEGTPQPESKSKDSYSSQGISQPPTPGNLPVPSPMSPSSASISSFHGDESDSISSPGWPKTPSSPKSSSSTTTGEKITKVYELGNEPERKLWVDRYLTFMEERGSPVSSLPAVGKKPLDLFRLYVCVKEIGGLAQVNKNKKWRELATNLNVGTSSSAASSLKKQYIQYLFAFECKIERGEEPPPEVFSTGDTKKQPKLQPPSPANSGSLQGPQTPQSTGSNSMAEVPGDLKPPTPASTPHGQMTPMQGGRSSTISVHDPFSDVSDSSFPKRNSMTPNAPYQQGMSMPDVMGRMPYEPNKDPFGGMRKVPGSSEPFMTQGQMPNSSMQDMYNQSPSGAMSNLGMGQRQQFPYGASYDRRHEPYGQQYPGQGPPSGQPPYGGHQPGLYPQQPNYKRHMDGMYGPPAKRHEGDMYNMQYSSQQQEMYNQYGGSYSGPDRRPIQGQYPYPYSRERMQGPGQIQTHGIPPQMMGGPLQSSSSEGPQQNMWAARNDMPYPYQNRQGPGGPTQAPPYPGMNRTDDMMVPDQRINHESQWPSHVSQRQPYMSSSASMQPITRPPQPSYQTPPSLPNHISRAPSPASFQRSLENRMSPSKSPFLPSMKMQKVMPTVPTSQVTGPPPQPPPIRREITFPPGSVEASQPVLKQRRKITSKDIVTPEAWRVMMSLKSGLLAESTWALDTINILLYDDSTVATFNLSQLSGFLELLVEYFRKCLIDIFGILMEYEVGDPSQKALDHNAARKDDSQSLADDSGKEEEDAECIDDDEEDEEDEEEDSEKTESDEKSSIALTAPDAAADPKEKPKQASKFDKLPIKIVKKNNLFVVDRSDKLGRVQEFNSGLLHWQLGGGDTTEHIQTHFESKMEIPPRRRPPPPLSSAGRKKEQEGKGDSEEQQEKSIIATIDDVLSARPGALPEDANPGPQTESSKFPFGIQQAKSHRNIKLLEDEPRSRDETPLCTIAHWQDSLAKRCICVSNIVRSLSFVPGNDAEMSKHPGLVLILGKLILLHHEHPERKRAPQTYEKEEDEDKGVACSKDEWWWDCLEVLRDNTLVTLANISGQLDLSAYTESICLPILDGLLHWMVCPSAEAQDPFPTVGPNSVLSPQRLVLETLCKLSIQDNNVDLILATPPFSRQEKFYATLVRYVGDRKNPVCREMSMALLSNLAQGDALAARAIAVQKGSIGNLISFLEDGVTMAQYQQSQHNLMHMQPPPLEPPSVDMMCRAAKALLAMARVDENRSEFLLHEGRLLDISISAVLNSLVASVICDVLFQIGQL

SEQ ID NO: 280772 - DNA, 103 bp, Artificial Sequence
  derived and/or modified sequence
agcattcatatcttgcagtgttgggaaagagtgagaggttgtgatgtcaagaaggataggtcagaagtggaaggtatgggggattgtgcctgctgtcatggct

SEQ ID NO: 280773 - DNA, 6696 bp, Artificial Sequence
  derived and/or modified sequence
atggaaactggccttcttcccaatcacaaactcaagactgttggggaggcccccgccgctcccccccatcaacagcatcaccaccatcaccacgcccatcatcatcaccatcacgcccatcacctgcaccatcatcacgcgcttcagcagcagttaaaccaatttcagcagcagcaacagcagcagcaacaacagcagcaacaacagcagcagcagcagcacccaatcagcaataataatagccttggcggagccggggggggagcccctcagccaggtcccgacatggaacaaccgcagcatggaggagccaaagacagtgcggccggcggacaggcggaccctcctggaccaccactgctgtcaaaaccaggagacgaagatgatgcgcctccgaaaatgggagagcccgccgggggtaggtacgagcacccgggactgggtgctctggggacacagcagccgccagtggcagtccctggcgggggaggcggtccagcagctgttcccgagtttaacaactattatggaagtgccgcacctgcttcaggcggccctggagggcgggctgggccctgttttgaccagcacggcggtcagcaatcccccggcatgggcatgatgcatagcgccagcgctgctgcagcgggcgccccagggtctatggaccctctacagaattcccatgaaggataccccaacagccaatgcaatcattaccctgggtattctagaccaggggccggtggcggggggggaggtggcggcggcgggggcggaggatcaggcggaggaggaggcggcggtggcgctggtgctggaggcgctggggcgggcgccgttgccgccgcagctgccgcagccgctgcggctgccgggggcggcggcggcggagggtacggtggttcctctgccgggtacggagtcctcagctcccctcgccagcaaggcggcggcatgatgatggggccaggcggcggtggagccgcatctctgtccaaagcggctgctggctcagctgctggtggattccagcgcttcgcaggtcagaatcagcacccatctggagcaactccaacattgaatcagttactcacctcgccttctcctatgatgcgaagctatggcgggtcctatccagaatactcaagcccgagtgcacctccacctcctccttcccagccgcagtctcaagccgcggccgcaggcgcagccgccggcggccaacaagccgccgctggaatggggttgggaaaggatatgggcgcacagtatgcggccgcgagcccagcgtgggctgcggctcagcaacgatcacatcccgccatgagccccggcaccccgggcccaacaatggggagatcacagggctcacctatggatccaatggtgatgaaacgcccacagctctacggtatgggatccaatcctcattcacagccacaacaatcttccccctaccctggcggatcctatggaccacccggcccacagagataccccattgggattcaggggcggacccctggtgccatggcgggcatgcaatacccccagcagcagatgccaccgcaatatggtcagcagggggtgagcgggtactgccagcaggggcagcagccttactactcccagcagcctcagcctccacaccttcctccccaggcccagtatttgccttcacaatcacaacagcgctaccagccacagcaggacatgagtcaggaagggtacggcacacggagtcagccacccctggcccccgggaaacctaaccacgaagatctgaatctcattcagcaagagcgacctagtagcctgcccgatctgtccggcagcatagatgatttgcctacaggcacggaggccaccttgtcctctgctgtctctgcaagcggttcgacaagctcccagggcgaccagtccaatccagcccagagtcctttcagtccacacgcttcaccgcatctgagcagtattcccgggggcccaagccctagccccgtcgggtccccagtcggatctaaccagtcccgtagtgggcccatttccccagcgagcatccccgggtctcagatgcctccacaacctcctgggagccagtcagagagcagcagccaccctgccctgagccagtcccctatgccacaggaacgcgggtttatggcgggcacgcaacgcaaccctcagatggctcaatatggacctcagcaaacgggaccctcaatgtcacctcacccgtctccgggggggcagatgcatgcgggtatcagttcctttcagcagtccaactcatccggcacatatggaccacagatgtctcagtatgggccacagggaaactatagccgacccccagcctatagtggtgtaccctccgcctcttacagtggccctgggcccggaatgggaatcagcgcgaacaatcagatgcacgggcagggcccctcacaaccttgcggcgcagtccctctcggccgtatgccaagtgcaggaatgcagaacagaccgttcccaggcaacatgtcaagcatgaccccctcatctccgggaatgtctcagcagggggggcccggaatgggacctcctatgcctactgtgaaccgcaaagcccaggaagctgcggcggcagtgatgcaggccgccgccaatagtgctcaaagtaggcaggggtcctttccaggtatgaaccagagcggattgatggcctctagtagcccctactcccaaccaatgaataatagttcaagccttatgaatacgcaggctcccccctattcaatggcccccgctatggtgaattcgagcgcagcaagcgtcgggcttgccgatatgatgtctcccggtgaatccaaactgcctctgcctttaaaggccgatgggaaagaagagggcaccccacagcccgaatccaagtccaaggatagctattcttcacagggaatatcccagccccccacgcccggaaacctcccggtgcccagcccaatgtccccttcaagcgcaagcattagctcattccatggcgatgagagcgactccattagtagtcccggctggcctaagactccaagctcacccaagtctagcagctctactactacgggcgagaagataacgaaagtgtatgagcttggcaacgagcctgagcgcaagctttgggtcgaccgctacctgacattcatggaggagcgcgggagccccgtctccagcctgccagcggtaggcaagaagccactggacttattccggctctatgtgtgcgttaaggagatagggggcctggcacaggttaataaaaacaagaaatggcgggaactggctacgaatctgaacgtcggcacgagctcctctgccgcctcatcacttaagaagcaatacatccagtacttatttgcgtttgagtgcaaaattgaaagaggcgaggaaccaccacctgaagttttcagcaccggcgacactaagaagcagccgaaactgcagccaccaagcccagccaactccgggagtctgcaaggtcctcagacaccacagtcaacgggttctaactccatggccgaggtccccggcgacctgaagccacctacgccagccagtaccccacacggtcagatgaccccaatgcaaggtggccgttcaagcacaatttctgtacatgaccccttttctgacgtgtccgacagctcattccctaagcgcaactcaatgactcccaacgctccctatcagcagggaatgagcatgccagatgtgatgggccgaatgccatacgaaccaaataaagatccattcggcgggatgcggaaagtgccagggtcttctgagccatttatgacccaaggccaaatgcctaactcctctatgcaggacatgtataatcagtcgccatcgggcgccatgagcaacctcggaatgggccagagacaacagttcccatacggagcctcatatgaccgtcgtcatgagccatacggccagcagtatcctggtcagggccctcccagtgggcagcctccgtatggggggcaccagcccggactgtacccacaacagcctaattacaaacgacacatggacggcatgtatggccccccggccaagaggcatgaaggagatatgtacaatatgcagtattcgagccagcaacaggagatgtacaaccagtatgggggcagctacagtggtcccgacaggcggcccatccagggccagtacccctacccttactctcgagaacggatgcagggtccagggcagattcagacccacgggattccgccccagatgatgggcggtccactccagagttctagctccgaaggccctcagcaaaatatgtgggccgctagaaatgatatgccttatccctatcagaataggcaggggccagggggtccaacccaggctcccccctaccccggtatgaaccgcaccgacgacatgatggtacccgaccagcgtattaaccatgagagccaatggcccagccacgtgtcccagaggcagccctatatgtccagtagtgcctcaatgcagccaattacgcgccccccccaacccagctaccagactcccccatccctgccaaatcatatatcgcgggcccctagtcctgcctcttttcagcgctctcttgagaatagaatgtctccctctaagagtccttttctaccctccatgaagatgcagaaggtcatgcccacagtgcccaccagtcaggtgacagggcctccaccacagcctccccctattagacgcgaaatcacatttccccctggatccgtggaggcatcacagccagtgctgaagcaaagacgcaagataacttccaaggatatcgtgaccccagaggcctggagagtcatgatgtctctgaagtctggactgctggcagagtccacttgggctcttgatacaataaacatacttttgtatgacgattctactgttgccaccttcaatctttcccagctttcaggatttctggagttgctcgttgaatacttcagaaaatgccttattgatatattcggaatcctcatggagtatgaggttggcgatccctcgcagaaggccttagatcacaacgctgccagaaaggatgactctcaatctctcgccgacgacagcgggaaagaggaggaggatgctgagtgcatcgacgatgatgaagaagatgaagaagatgaagaagaggacagcgaaaaaacggagtccgatgagaaatcaagcatcgccctcactgccccagatgccgctgccgaccctaaagaaaaacccaagcaggcatcaaaattcgacaaactgccaatcaagattgtaaagaagaacaatctttttgtagtggatagatccgacaagttgggcagagtgcaggagtttaacagtggcttgctccactggcaacttgggggaggagacaccacagaacacatccagacgcatttcgaatccaagatggagattcctcccagaagaagacccccgccaccattaagttctgcagggaggaagaaggaacaggaaggcaagggagattccgaagagcagcaggagaagtccattatcgccactatagacgatgtcttgagcgccagacccggcgcactgcccgaagatgccaaccctggccctcaaaccgagagctctaagttccctttcggaatccagcaagctaaatcccacaggaacattaagcttctggaggacgagcctcgaagcagggacgagacccccctctgtacaatcgcacactggcaggatagcctcgccaaaagatgcatttgtgtgtccaatatagtgcgaagcctatcattcgtaccaggcaacgatgccgagatgagcaagcaccctggacttgtcctaatcctggggaaactgattctgctgcaccatgaacacccagagaggaaaagagccccgcagacttacgaaaaggaagaagacgaggacaagggcgtggcctgctccaaagacgaatggtggtgggactgtctggaggtgctcagggataatacactagttacactggctaatattagcggacagctcgaccttagcgcatacaccgaatccatttgcctccctatattggacggactccttcattggatggtctgcccctcagcggaagctcaagacccgttccccacggtcggcccaaattcagtgctctctccgcagagactggtgctcgaaacattgtgtaagctgtcaatccaagacaacaatgtggatctgattttagccacaccacccttctcgcgacaggagaagttttatgccacactggtacgttatgtgggagacaggaagaatcccgtgtgtagagagatgagtatggctctgctgtccaatttagctcaaggcgacgctttggcggcccgtgcgattgccgtgcaaaaggggagcattggaaatctaatctcattcctggaggatggtgtgactatggcccaatatcaacagtcccagcacaatctgatgcatatgcagccacctcctctcgagccgccaagcgttgatatgatgtgccgggccgcaaaggccctattggcaatggccagggttgacgagaaccgaagcgagttcctcctgcatgagggcagactgttggacatcagcataagcgccgttttaaactcactagtcgcgagcgtaatatgcgatgtgttgtttcagatcggacagctgtag

SEQ ID NO: 280774 - DNA, 2172 bp, Artificial Sequence
  derived and/or modified sequence
atgccaccgcagtatggacagcaaggagtgagtggatactgtcagcaagggcagcaaccatattacagtcaacagccccagcctccacacctgccccctcaagctcaatatctcccatcccaatcccaacaaagataccaaccacagcaagatatgagccaggagggatatggtactcgctcccagcccccgctggccccaggtaaaccgaatcacgaggatttgaatcttatccagcaagaaaggcccagttctctgcctgatctgagcggaagcattgatgacctgccaacaggcaccgaagcgaccctgtcgtcggcagtgagcgcgtccggatcgacctcctctcagggggaccagtcgaaccccgctcaatcccccttctccccccacgcctccccccatttgtcctcgattccgggaggccctagtccaagcccagtgggcagcccggtggggtccaatcagagcaggagcggaccaataagccctgcgagcatcccagggagtcagatgccgccccaaccacctggctctcaatcggagtcctcatcccatccggcattgagtcagtcacccatgccccaggagcggggcacgcaacgaaacccccagatggcccagtacggtccacagcagactgggccgtccatgagcccacacccgagtccaggcggacagatgcacgcagggatcagctcattccagcagtctaacagctccgggacttacgggccccagatgtctcagtacggacctcagggaaactatagccggcctcccgcttactcaggcgtgccttcggcctcttattcaggcccaggtcccgggatgggaataagtgccaataatcaaatgcacggccagggacctagtcaaccttgtggggcagtgcccctgggtcggatgccttcagcaggaatgcagaatcggccgtttcctggtaacatgtcttccatgaccccgtcatcccctggcatgagccaacaagggggtcctgggatgggcccgcccatgccgactgtaaaccgaaaagcgcaggaggctgctgcggcagtaatgcaggcagccgcaaactccgcccaatcccgccagggtagtttccctggaatgaatcagagcggacttatggccagttctagcccctattcccagccgatgaacaactcttcgtcactgatgaatacacaagcccctccatactcaatggcccccgctatggtcaattccagcgcggcttctgtcggtcttgcagacatgatgtcccccggcgaaagcaagcttccactgccactgaaggccgacgggaaagaagaggggacccctcagcctgagtctaaaagtaaagatagttacagtagccagggtatatctcagcccccaactccagggaaccttcctgtcccctctccaatgtcgcctagctctgcatctatcagctcctttcacggggacgagtcagattctatcagctcccctggatggccaaaaaccccatccagccccaaatctagcagcagcaccaccacgggagagaaaatcaccaaggtgtatgaactaggaaacgagcccgagagaaagctgtgggtggaccggtacctgactttcatggaagaacgggggtctccggtgtcaagtcttccagccgtaggcaaaaaaccactggatcttttccgattgtacgtttgtgttaaggagatcggcgggctagctcaggtgaacaagaacaaaaagtggcgcgaattggctactaacctgaacgtgggcacatccagcagtgctgcatctagtcttaaaaagcagtacatccaatacctctttgccttcgaatgtaagattgaacgcggagaggagccacccccggaggtcttcagcactggggacacaaagaagcagcccaaattgcagcctccctccccagtagtccagatggagccacgggcctgtgacactgggggtagcggcagaaaagcatcttggagcaggcctgctcctcgagctcgcgcaggtggaagcagacacactcaggcttctggcggccgacgtcagagacatcctggactccagaagccgctagactccctcccgcctacgcagcaagtggcctcccctatcccagttccctcactcggcaaggtctcggggaatatcttcgtggttaaggggaaatag

SEQ ID NO: 280775 - DNA, 6870 bp, Artificial Sequence
  derived and/or modified sequence
atggcacacaacgccggagcagccgcggcagccggaacacatagcgccaagagtggcggatctgaggcagcgcttaaggagggcggctccgccgccgcgctctcctcgagctcttctagcagtgccgccgccgccgctgcatccagctccagttccagtggccccggcagcgcaatggagaccggcctgctcccgaaccacaagctgaaaacggtcggcgaagccccggctgctcccccgcatcagcaacaccatcatcaccaccatgctcatcatcatcaccatcacgcacatcatctgcatcaccaccatgcactgcaacagcagctgaaccagttccagcagcagcagcagcagcagcagcaacagcagcagcaacaacagcagcagcagcaccccatcagcaacaataacagtctgggaggtgctggtggaggagcacctcagcccggcccagacatggaacagccccaacatgggggtgcaaaagatagcgctgcaggcggacaagcagacccgcctggacctcccctgctctcaaaacctggcgacgaagacgacgcgcctcctaaaatgggcgaacctgccggaggacggtacgagcatcctgggctgggggccttgggcacccagcagccacctgtagctgtgccaggtggtggcgggggccccgcagccgttccagagttcaataactactacgggtccgccgctcctgcttcaggaggaccaggcggcagagctgggccctgttttgaccaacacggaggacagcagtctcccggtatgggcatgatgcattctgccagtgcagctgccgctggtgcccccggtagtatggaccccctccagaattcccacgaaggatacccaaatagccagtgtaatcattaccctgggtacagtcgccccggcgcaggtggcgggggaggtggcggcggtggggggggtggcgggtcagggggagggggtggcggcggcggtgcaggcgccgggggggccggggccggtgccgtggcagccgcggctgctgcagctgccgccgctgcgggcgggggcggcggcggcggctatggcgggtcctcagccggctatggagtgctctcttccccccgtcagcaaggaggcggaatgatgatgggccccggaggaggaggcgccgcaagcctgtcaaaggctgccgccggcagcgctgctggtggcttccagcggtttgccggacagaatcagcacccatctggagccacacctacactgaaccagcttctcacatctccgagtcccatgatgagaagttacggtggatcatatcctgaatattcttctccgtcagcacctcctccaccaccatctcagccacagtctcaggccgcagcggcaggcgctgctgctggcgggcaacaggctgccgccgggatgggactaggtaaggatatgggagctcagtacgccgccgcttccccagcctgggctgccgcacagcagcgctctcacccggcgatgtcaccgggcacaccaggtccgaccatgggaaggagccagggttccccaatggacccgatggtcatgaagaggccacagctctacggcatggggagcaatcctcactcccaaccgcagcagagtagcccttatcccgggggctcatacggccccccggggccacaacgttatcctatcggcattcagggccggacccctggtgccatggccggcatgcaatacccccagcagcagatgcctccccagtacggtcagcagggtgtgtcaggttactgccaacagggccagcaaccctactacagccaacagccccagcctccccacctgcccccacaagcgcaatatctcccttcccagtcccaacagcggtatcagccacagcaggatatgagtcaagagggctatggcacccgcagccaaccccccctggcacccggcaaaccaaaccatgaggatctgaatctgatccaacaggagcggccctctagtcttccagacctgagcgggtctattgatgatctgcccaccggaaccgaagccactctctcatccgccgtctccgcgtctggatcaaccagcagccagggcgaccagagtaatcccgcgcaaagcccattttcccctcacgctagccctcatctttctagtatacctgggggtcctagcccgagccctgttggcagcccagtgggaagtaatcagagcagatcagggccaatctcccccgctagtattcccgggagtcaaatgccacctcagcccccaggctcacagagtgagtcctccagccacccagcgctgtcccagtctcccatgccccaggagaggggatttatggctggcactcaacggaatccacagatggcccagtacggtccgcagcagactggccccagcatgtctcctcatccatcacccggcgggcagatgcatgctggaattagctcctttcagcagagtaactcttcagggacctatggccctcagatgagccagtatggccctcagggaaattactctagacctcctgcctactcaggggttccaagtgcatcttactccggaccgggcccaggcatgggcatctctgctaataatcagatgcacgggcagggaccaagtcagccttgtggtgccgtgcccttaggcagaatgccgtccgctgggatgcaaaacagaccattccccggcaatatgtcaagtatgacaccaagctcccctggcatgtcccagcagggcggtcccggtatggggccccctatgccgaccgtgaaccggaaagcacaggaagccgcagccgctgtgatgcaggcagcagccaactcagcccagtctcgacaaggatcctttcccggtatgaaccaatctggcctaatggcaagttccagtccgtactctcagcccatgaataatagttcttctttgatgaatacacaggctcccccctactctatggctcccgcaatggtgaattcttcggccgccagcgtcggcctggcggatatgatgagtccaggggagtccaaactgcccctgcccttgaaggccgacggtaaagaagaaggcacaccacagcctgaatcaaagtctaaggactcttacagttcccagggaatctctcagccccctaccccagggaacttgccagttccgtctccaatgtctccttcttccgcttctatctcttcattccatggcgatgagtcagatagtatttcctcaccaggctggcccaaaaccccctcgagccctaaatctagcagtagtaccactaccggcgagaagataacaaaagtttatgagttgggcaacgaacctgagcgcaagctttgggtggacaggtacctgacatttatggaggaacggggcagccccgtatcatctctaccagcagtcggaaaaaaaccactggatctgtttaggctctatgtctgtgtaaaagagatcggcggcctcgcccaagtgaataaaaacaagaagtggcgcgagttagccactaatctcaatgtcggcacctccagcagcgcagcctccagtctcaaaaagcagtacattcagtacctctttgcttttgaatgcaaaattgagcggggagaagaaccaccccccgaggtcttctccacgggcgataccaagaagcaacccaaactacagccaccttctccagccaattctggctcacttcagggccctcagacaccccaatccaccggtagcaactcaatggccgaggtgcccggtgacctcaagcctccaacacccgcatcaacaccacacggacagatgacaccgatgcagggaggcagaagctcaaccatttctgtccacgacccctttagtgatgtttccgactcctccttcccgaagcgtaactctatgaccccaaacgcgccgtaccagcagggcatgagcatgcccgatgtaatgggcagaatgccctacgaaccaaataaagatccattcggtggcatgcggaaggtgcccggctcttcagagcccttcatgacacagggccagatgcccaactcgtcaatgcaggacatgtacaatcagtcaccaagcggagcgatgtcaaatctcggaatggggcaacgccagcagttcccatacggcgcctcatacgaccggaggcacgaaccttacggtcagcagtatcccggccaaggccccccttcaggtcagcctccttacggcgggcaccagcctggtctgtatccacagcagcccaattataagcgacatatggacggcatgtatggcccacccgccaaaagacatgagggcgacatgtataatatgcagtacagctctcagcagcaggagatgtataaccagtacggaggctcctacagtggccccgacagaaggccgatccaggggcaatacccatacccctactctcgagagcggatgcagggaccagggcaaatccaaacccatggcatccctccacaaatgatggggggcccactacaatccagctcttcagagggtcctcagcagaacatgtgggctgcccggaatgatatgccctatccctaccagaacagacagggcccaggaggtccaacccaagccccaccgtaccccgggatgaatcgcacagacgatatgatggtgcccgatcagaggattaatcacgagtcccaatggccaagtcacgtcagccagcgtcaaccttacatgtcctccagtgcatcaatgcaaccaataactcgtccaccgcagccttcgtaccagactccacctagtctacctaatcacatctcccgcgccccaagtcctgctagcttccagaggtcactagagaataggatgtcgccgtctaaatcccctttccttccttctatgaaaatgcagaaggtaatgccaacagttcccacatcgcaagtcacaggcccccccccccagcccccaccaatccggcgggaaatcacattcccccctggctctgtcgaggcatcgcagccggtgctgaaacaaagaaggaaaatcacgagtaaagacattgtcactcccgaagcctggagagtgatgatgtcactcaagagcggccttctggccgaaagtacttgggcgctggacactattaatatcctcctgtacgatgattcaaccgtggcgactttcaatttaagtcaactctcggggtttctggagcttcttgtggagtatttccggaaatgcctgattgacatctttggcatactaatggaatacgaggtaggagacccttcacagaaggccctggaccataatgcagcgcggaaagacgattcacagtccttagccgatgattcaggcaaggaggaggaggatgccgaatgcatagacgatgacgaggaggacgaagaagacgaagaggaagactcagagaagaccgagtcagacgaaaagtcgtccatcgctttaaccgcacccgacgcagcggctgacccgaaggaaaaacccaagcaagcctccaaatttgacaagctgcctattaagatcgtgaaaaagaacaacctgttcgttgtggataggagtgataagttgggaagagtacaggagttcaattccgggctgctccactggcagctgggcggcggagacaccactgaacacattcagacccacttcgagtcaaagatggagatccctcctaggcgccgcccaccacccccattgtcctccgccggaagaaagaaggaacaggagggtaaaggcgattctgaggagcagcaggagaagtctattatagccacaattgacgatgtcctgagtgccaggccaggggctctgcccgaggatgctaatccagggccacagaccgagagtagtaaatttcccttcggaatccagcaagccaagagccaccgtaacattaaactgttagaggacgaacctaggagtcgtgacgagaccccgctctgcacaattgcgcactggcaggattctctggccaaaaggtgtatttgtgtatccaatattgtgcggtcactcagcttcgtgccaggcaacgacgccgagatgagcaagcacccgggtctggtgctcatcctgggaaagctcatcctcttgcaccacgaacaccccgaacgcaagagagcccctcagacttatgagaaagaagaggatgaggacaagggcgtcgcgtgttctaaagacgaatggtggtgggactgccttgaggtgctgcgcgacaacacccttgtgactcttgccaacatatccggccagctggacttaagcgcctacacagagagtatctgcctacccatactggacggcttgctgcactggatggtatgcccaagcgccgaagcccaggatccttttccaactgtgggacccaacagtgtgttgtcgccccagaggctggtcctcgagactctctgtaaattgtcgattcaggataacaatgttgaccttattctggccacaccacccttcagccgacaggagaagttttacgcaacgctcgtgcgatacgtgggagaccgtaagaatcccgtttgcagagaaatgtccatggccctgctttctaacctcgcccagggtgacgctctggcagctagggctatcgctgtccaaaaaggttccattggcaacctcatttctttcttagaggacggcgtgacaatggctcagtaccaacaatcacagcataacctgatgcacatgcagccgccacctttggagcctccgagcgtggacatgatgtgtagagctgctaaagcgctcctcgcaatggcacgagtggacgagaatcggagtgaattcctcttgcacgaaggccggcttctggatatttccatctcggccgttttgaacagcctggtggcaagcgtgatttgcgacgttttatttcaaattggccaattgtag

SEQ ID NO: 280776 - DNA, 6696 bp, Artificial Sequence
  derived and/or modified sequence
atggagaccggcctgctgcccaaccacaagctgaagacagtgggggaggccccagctgccccaccccaccagcagcaccaccaccaccaccacgcccaccaccaccaccaccacgcccaccacctgcaccaccaccacgccctgcagcagcagctgaaccagttccagcagcagcagcagcagcagcagcagcagcagcagcagcagcagcagcagcagcaccccatcagcaacaacaacagcctgggcggggccggcggcggggccccccagcccggccctgacatggagcagccccagcacggcggggccaaggacagcgctgctgggggccaggccgaccccccaggcccccccctgctgagcaagccaggagatgaagatgatgccccacccaagatgggagagcctgctgggggccgctatgagcaccctggcctgggcgccctgggcacccagcagccccctgtggccgtgcctgggggcggcggcggccctgctgctgtgcctgagttcaacaactactacggcagcgctgccccagccagcggcggccctgggggccgggccggcccctgctttgaccagcacggcggccagcagagccctggcatgggcatgatgcacagcgccagcgctgctgctgctggggcccctggctccatggaccccctgcagaacagccatgagggctaccccaacagccagtgcaaccactacccaggctacagcaggcctggggccggcggcggcggcggcggcggcggcggcggcggcggcggcagcggcggcggcggcggcggcggcggggccggggccggcggggccggggccggggctgtggccgctgctgctgctgctgctgctgctgctgctgggggcggcggcggcggcggctacggcggcagcagcgctggctatggagtgctgagcagcccccggcagcagggcggcggcatgatgatgggccctgggggcggcggggccgccagcctgagcaaggctgctgctggcagcgctgctgggggcttccagagatttgctggccagaaccagcaccccagcggggccacccccaccctgaaccagctgctgaccagccccagccccatgatgaggagctatggaggcagctacccagagtacagcagccccagcgcccctcctcctccacccagccagccccagagccaggccgctgctgctggagctgctgctgggggccagcaggccgctgctggcatgggcctgggcaaggacatgggcgcccagtatgctgctgccagccctgcctgggccgccgcccagcagaggagccacccagccatgagccctggcaccccaggccccaccatgggccgcagccagggcagccccatggaccccatggtgatgaagaggccccagctgtatggcatgggcagcaacccccacagccagccccagcagagcagcccctacccaggcggcagctatggccccccaggcccccagcgctaccccatcggcatccagggccgcacccctggggccatggccggcatgcagtacccccagcagcagatgccaccccagtatggccagcagggcgtgtctggctactgccagcagggccagcagccctactacagccagcagccccagcccccccacctgcccccccaggcccagtacctgcccagccagagccagcagcgctaccagccccagcaggacatgagccaggagggctacggcaccaggagccagccccccctggcccctgggaagcccaaccacgaggacctgaacctgatccagcaggagcggcccagcagcctgcctgacctgagcggcagcattgatgacctgcccactggaacagaggccaccctgagcagcgctgtgtctgccagcggcagcaccagcagccagggcgaccagagcaacccagcccagagccccttcagcccccacgccagcccccacctgagcagcatccctgggggccccagccccagccctgtgggcagccctgtgggcagcaaccagagccgcagcggccccatcagccctgccagcatccctggcagccagatgccaccccagcccccaggcagccagagcgagagcagcagccacccagccctgagccagagccccatgccccaggagcggggcttcatggccggcacccagaggaacccccagatggcccagtatggcccccagcagacaggccccagcatgagcccccaccccagccctgggggccagatgcatgctggcatcagcagcttccagcagagcaacagcagcggcacctacggcccccagatgagccagtatggcccccagggcaactacagccggcccccagcctacagcggcgtgcccagcgccagctacagcggccctggccctggcatgggcatcagcgccaacaaccagatgcacggccagggccccagccagccctgtggggctgtgcccctgggccgcatgcccagcgctggcatgcagaaccggcccttccctggcaacatgagctccatgacccccagcagccctggcatgagccagcagggcggccctggcatgggcccccccatgcccaccgtgaacaggaaggcccaggaggccgctgctgctgtgatgcaggccgccgccaacagcgcccagagccggcagggcagcttccctggcatgaaccagagcggcctgatggccagcagcagcccctacagccagcccatgaacaacagcagcagcctgatgaacacccaggccccaccctacagcatggccccagccatggtgaacagcagcgctgcctctgtgggcctggccgacatgatgagccctggagagagcaagctgcccctgcccctgaaggcagatggcaaggaggagggcaccccccagcctgagagcaagagcaaggacagctacagcagccagggcatcagccagccccccaccccaggcaacctgcctgtgcccagccccatgagccccagcagcgccagcatcagcagcttccatggagatgaaagtgacagcatcagcagccctggctggcccaagacccccagcagccccaagagcagcagcagcaccaccactggagagaagatcaccaaggtgtatgagctgggcaatgaacctgagaggaagctgtgggtggaccgctacctgaccttcatggaggagcggggcagccctgtgagcagcctgcctgctgtgggcaagaagcccctggacctcttccggctgtatgtgtgtgtgaaggagatcggcggcctggcccaggtgaacaagaacaagaagtggagggagctggccaccaacctgaatgtgggcaccagcagcagcgctgccagcagcctgaagaagcagtacatccagtacctgtttgcctttgagtgcaagattgaaagaggagaggagcccccacctgaggtgttcagcactggagacaccaagaagcagcccaagctgcagccccccagccctgccaacagcggcagcctgcagggcccccagaccccccagagcacaggcagcaacagcatggccgaggtgcctggggacctgaagccacccaccccagccagcaccccccacggccagatgacccccatgcagggcggccgcagcagcaccatctctgtgcatgaccccttcagtgatgtgtctgacagcagcttccccaagagaaattccatgaccccaaatgccccctaccagcagggcatgtccatgccagatgtgatgggccgcatgccctatgagcccaacaaggacccctttggaggcatgaggaaggtgcccggcagcagcgagcccttcatgacccagggccagatgcccaacagctccatgcaggacatgtacaaccagagccccagcggggccatgagcaacctgggcatgggccagaggcagcagttcccctatggagccagctatgacagaagacatgagccctacggccagcagtacccaggccagggccccccatctggccagcccccctacggcggccaccagcccggcctgtacccccagcagcccaactacaagaggcacatggatggcatgtatggccccccagccaagagacatgaaggagacatgtacaacatgcagtacagcagccagcagcaggagatgtacaaccagtatggaggcagctacagcggccctgaccggcggcccatccagggccagtacccctacccctacagccgggagaggatgcagggccctggccagatccagacccacggcatccccccccagatgatgggcggccccctgcagagcagcagcagcgagggcccccagcagaacatgtgggccgccagaaatgacatgccctacccctaccagaaccggcagggccctgggggccccacccaggccccaccctacccaggcatgaacagaacagatgacatgatggtgcctgaccagaggatcaaccacgagagccagtggcccagccacgtgtcccagaggcagccctacatgagcagcagcgcctccatgcagcccatcaccaggcctccccagcccagctaccagaccccacccagcctgcccaaccacatcagccgggcccccagccctgccagcttccagaggagcctggagaacaggatgagccccagcaagagccccttcctgcccagcatgaagatgcagaaggtgatgcccaccgtgcccaccagccaggtgactggacctccaccccagcccccacccatcagaagagagatcaccttccccccaggctctgtggaggccagccagcctgtgctgaagcagaggaggaagatcaccagcaaggacatcgtgaccccagaggcctggagggtgatgatgagcctgaagagcggcctgctggccgagagcacctgggccctggacaccatcaacatcctgctgtatgatgacagcacagtggccaccttcaacctgagccagctgagcggcttcctggagctgctggtggagtacttcaggaagtgcctgattgacatcttcggcatcctgatggagtatgaggtgggggaccccagccagaaggccctggaccacaatgctgccaggaaggatgacagccagagcctggctgatgacagcggcaaggaggaggaggatgctgagtgcattgatgatgatgaagaagatgaggaggatgaggaggaggacagcgagaagacagaaagtgatgagaagagcagcatcgccctgacagccccagatgctgctgctgaccccaaggagaagcccaagcaggccagcaagtttgacaagctgcccatcaagatcgtgaagaagaacaacctgtttgtggtggacagaagtgacaagctgggccgggtgcaggagttcaacagcggcctgctgcactggcagctgggcggcggggacaccacagagcacatccagacccactttgagagcaagatggagatccccccaagaagaagacctcctccacccctgagcagcgctggcaggaagaaggagcaggagggcaagggggacagcgaggagcagcaggagaagagcatcatcgccaccattgatgatgtgctgagcgcccggcctggggccctgcctgaagatgccaaccctggcccccagacagagagcagcaagttccccttcggcatccagcaggccaagagccacaggaacatcaagctgctggaggatgagcccaggagcagagatgagacccccctgtgcaccatcgcccactggcaggacagcctggccaagcgctgcatctgtgtgagcaacatcgtgcgcagcctgagctttgtgcctggaaatgatgctgagatgagcaagcaccctggcctggtgctgatcctgggcaagctgatcctgctgcaccacgagcaccctgagaggaagagggccccccagacctatgagaaggaggaggatgaagataaaggagtggcctgcagcaaggatgagtggtggtgggactgcctggaggtgctgcgggacaacaccctggtgaccctggccaacatcagcggccagctggacctgagcgcctacacagagagcatctgcctgcccatcctggatggcctgctgcactggatggtgtgccccagcgctgaggcccaggaccccttccccaccgtgggccccaacagcgtgctgagcccccagaggctggtgctggagaccctgtgcaagctgagcatccaggacaacaacgtggacctgatcctggccaccccacccttcagccggcaggagaagttctacgccaccctggtgcgctacgtgggggacaggaagaaccctgtgtgccgggagatgtccatggccctgctgagcaacctggcccagggagatgccctggccgcccgggccatcgctgtgcagaagggcagcatcggcaacctgatctccttcctggaggatggagtgaccatggcccagtaccagcagagccagcacaacctgatgcacatgcagcccccacccctggagcccccatctgtggacatgatgtgccgggccgccaaggccctgctggccatggcccgggtggatgagaacagaagtgagttcctgctgcacgagggccgcctgctggacatcagcatctctgctgtgctgaacagcctggtggccagcgtcatctgtgatgtgctcttccagatcggccagctgtag

SEQ ID NO: 280777 - DNA, 2172 bp, Artificial Sequence
  derived and/or modified sequence
atgccaccccagtatggccagcagggcgtgtctggctactgccagcagggccagcagccctactacagccagcagccccagcccccccacctgcccccccaggcccagtacctgcccagccagagccagcagcgctaccagccccagcaggacatgagccaggagggctacggcaccaggagccagccccccctggcccctgggaagcccaaccacgaggacctgaacctgatccagcaggagcggcccagcagcctgcctgacctgagcggcagcattgatgacctgcccaccggcacagaggccaccctgagcagcgctgtgtctgccagcggcagcaccagcagccagggcgaccagagcaacccagcccagagccccttcagcccccacgccagcccccacctgagcagcatccctgggggccccagccccagccctgtgggcagccctgtgggcagcaaccagagccgcagcggccccatcagccctgccagcatccctggcagccagatgccaccccagcccccaggcagccagagcgagagcagcagccacccagccctgagccagagccccatgccccaggagcggggcacccagaggaacccccagatggcccagtatggcccccagcagacaggccccagcatgagcccccaccccagccctgggggccagatgcacgccggcatcagcagcttccagcagagcaacagcagcggcacctacggcccccagatgagccagtatggcccccagggcaactacagccggcccccagcctacagcggcgtgcccagcgccagctacagcggccctggccctggcatgggcatcagcgccaacaaccagatgcacggccagggccccagccagccctgtggggctgtgcccctgggccgcatgcccagcgctggcatgcagaaccggcccttccctggcaacatgagctccatgacccccagcagccctggcatgagccagcagggcggccctggcatgggcccccccatgcccaccgtgaacaggaaggcccaggaggccgctgctgctgtgatgcaggccgccgccaacagcgcccagagccggcagggcagcttccctggcatgaaccagagcggcctgatggccagcagcagcccctacagccagcccatgaacaacagcagcagcctgatgaacacccaggccccaccctacagcatggccccagccatggtgaacagcagcgctgcctctgtgggcctggccgacatgatgagccctggagagagcaagctgcccctgcccctgaaggcagatggcaaggaggagggcaccccccagcctgagagcaagagcaaggacagctacagcagccagggcatcagccagccccccaccccaggcaacctgcctgtgcccagccccatgagccccagcagcgccagcatcagcagcttccatggagatgaaagtgacagcatcagcagccctggctggcccaagacccccagcagccccaagagcagcagcagcaccaccaccggggagaagatcaccaaggtgtatgagctgggcaatgaacctgagaggaagctgtgggtggaccgctacctgaccttcatggaggagcggggcagccctgtgagcagcctgcctgctgtgggcaagaagcccctggacctcttccggctgtatgtgtgtgtgaaggagattggaggcctggcccaggtgaacaagaacaagaagtggagggagctggccaccaacctgaatgtgggcaccagcagcagcgctgccagcagcctgaagaagcagtacatccagtacctgtttgcctttgagtgcaagattgagcggggggaggagcccccacctgaggtgttcagcactggagacaccaagaagcagcccaagctgcagccccccagccctgtggtgcagatggagccccgggcctgtgacacaggaggcagcggcaggaaggcctcctggagcaggcctgccccccgggcccgggccggcggcagccgccacacccaggccagcggcggccggcggcagaggcaccctggcctgcagaagcccctggacagcctgccccccacccagcaggtggccagccccatccctgtgcccagcctgggcaaggtgtctggcaacatctttgtggtgaagggcaagtag

SEQ ID NO: 280778 - DNA, 6870 bp, Artificial Sequence
  derived and/or modified sequence
atggcccacaatgctggagctgctgctgctgctggcacccacagcgccaagagcggcggcagcgaggccgccctgaaggagggcggcagcgctgctgccctgagcagcagcagcagcagcagcgctgctgctgctgctgccagcagcagcagcagcagcggccctggcagcgccatggagaccggcctgctgcccaaccacaagctgaagacagtgggggaggccccagctgccccaccccaccagcagcaccaccaccaccaccacgcccaccaccaccaccaccacgcccaccacctgcaccaccaccacgccctgcagcagcagctgaaccagttccagcagcagcagcagcagcagcagcagcagcagcagcagcagcagcagcagcagcaccccatcagcaacaacaacagcctgggcggggccggcggcggggccccccagcccggccctgacatggagcagccccagcacggcggggccaaggacagcgctgctgggggccaggccgaccccccaggcccccccctgctgagcaagccaggagatgaagatgatgccccacccaagatgggagagcctgctgggggccgctatgagcaccctggcctgggcgccctgggcacccagcagccccctgtggccgtgcctgggggcggcggcggccctgctgctgtgcctgagttcaacaactactacggcagcgctgccccagccagcggcggccctgggggccgggccggcccctgctttgaccagcacggcggccagcagagccctggcatgggcatgatgcacagcgccagcgctgctgctgctggggcccctggctccatggaccccctgcagaacagccatgagggctaccccaacagccagtgcaaccactacccaggctacagcaggcctggggccggcggcggcggcggcggcggcggcggcggcggcggcggcagcggcggcggcggcggcggcggcggggccggggccggcggggccggggccggggctgtggccgctgctgctgctgctgctgctgctgctgctgggggcggcggcggcggcggctacggcggcagcagcgctggctatggagtgctgagcagcccccggcagcagggcggcggcatgatgatgggccctgggggcggcggggccgccagcctgagcaaggctgctgctggcagcgctgctgggggcttccagagatttgctggccagaaccagcaccccagcggggccacccccaccctgaaccagctgctgaccagccccagccccatgatgaggagctatggaggcagctacccagagtacagcagccccagcgcccctcctcctccacccagccagccccagagccaggccgctgctgctggagctgctgctgggggccagcaggccgctgctggcatgggcctgggcaaggacatgggcgcccagtatgctgctgccagccctgcctgggccgccgcccagcagaggagccacccagccatgagccctggcaccccaggccccaccatgggccgcagccagggcagccccatggaccccatggtgatgaagaggccccagctgtatggcatgggcagcaacccccacagccagccccagcagagcagcccctacccaggcggcagctatggccccccaggcccccagcgctaccccatcggcatccagggccgcacccctggggccatggccggcatgcagtacccccagcagcagatgccaccccagtatggccagcagggcgtgtctggctactgccagcagggccagcagccctactacagccagcagccccagcccccccacctgcccccccaggcccagtacctgcccagccagagccagcagcgctaccagccccagcaggacatgagccaggagggctacggcaccaggagccagccccccctggcccctgggaagcccaaccacgaggacctgaacctgatccagcaggagcggcccagcagcctgcctgacctgagcggcagcattgatgacctgcccactggaacagaggccaccctgagcagcgctgtgtctgccagcggcagcaccagcagccagggcgaccagagcaacccagcccagagccccttcagcccccacgccagcccccacctgagcagcatccctgggggccccagccccagccctgtgggcagccctgtgggcagcaaccagagccgcagcggccccatcagccctgccagcatccctggcagccagatgccaccccagcccccaggcagccagagcgagagcagcagccacccagccctgagccagagccccatgccccaggagcggggcttcatggccggcacccagaggaacccccagatggcccagtatggcccccagcagacaggccccagcatgagcccccaccccagccctgggggccagatgcatgctggcatcagcagcttccagcagagcaacagcagcggcacctacggcccccagatgagccagtatggcccccagggcaactacagccggcccccagcctacagcggcgtgcccagcgccagctacagcggccctggccctggcatgggcatcagcgccaacaaccagatgcacggccagggccccagccagccctgtggggctgtgcccctgggccgcatgcccagcgctggcatgcagaaccggcccttccctggcaacatgagctccatgacccccagcagccctggcatgagccagcagggcggccctggcatgggcccccccatgcccaccgtgaacaggaaggcccaggaggccgctgctgctgtgatgcaggccgccgccaacagcgcccagagccggcagggcagcttccctggcatgaaccagagcggcctgatggccagcagcagcccctacagccagcccatgaacaacagcagcagcctgatgaacacccaggccccaccctacagcatggccccagccatggtgaacagcagcgctgcctctgtgggcctggccgacatgatgagccctggagagagcaagctgcccctgcccctgaaggcagatggcaaggaggagggcaccccccagcctgagagcaagagcaaggacagctacagcagccagggcatcagccagccccccaccccaggcaacctgcctgtgcccagccccatgagccccagcagcgccagcatcagcagcttccatggagatgaaagtgacagcatcagcagccctggctggcccaagacccccagcagccccaagagcagcagcagcaccaccactggagagaagatcaccaaggtgtatgagctgggcaatgaacctgagaggaagctgtgggtggaccgctacctgaccttcatggaggagcggggcagccctgtgagcagcctgcctgctgtgggcaagaagcccctggacctcttccggctgtatgtgtgtgtgaaggagatcggcggcctggcccaggtgaacaagaacaagaagtggagggagctggccaccaacctgaatgtgggcaccagcagcagcgctgccagcagcctgaagaagcagtacatccagtacctgtttgcctttgagtgcaagattgaaagaggagaggagcccccacctgaggtgttcagcactggagacaccaagaagcagcccaagctgcagccccccagccctgccaacagcggcagcctgcagggcccccagaccccccagagcacaggcagcaacagcatggccgaggtgcctggggacctgaagccacccaccccagccagcaccccccacggccagatgacccccatgcagggcggccgcagcagcaccatctctgtgcatgaccccttcagtgatgtgtctgacagcagcttccccaagagaaattccatgaccccaaatgccccctaccagcagggcatgtccatgccagatgtgatgggccgcatgccctatgagcccaacaaggacccctttggaggcatgaggaaggtgcccggcagcagcgagcccttcatgacccagggccagatgcccaacagctccatgcaggacatgtacaaccagagccccagcggggccatgagcaacctgggcatgggccagaggcagcagttcccctatggagccagctatgacagaagacatgagccctacggccagcagtacccaggccagggccccccatctggccagcccccctacggcggccaccagcccggcctgtacccccagcagcccaactacaagaggcacatggatggcatgtatggccccccagccaagagacatgaaggagacatgtacaacatgcagtacagcagccagcagcaggagatgtacaaccagtatggaggcagctacagcggccctgaccggcggcccatccagggccagtacccctacccctacagccgggagaggatgcagggccctggccagatccagacccacggcatccccccccagatgatgggcggccccctgcagagcagcagcagcgagggcccccagcagaacatgtgggccgccagaaatgacatgccctacccctaccagaaccggcagggccctgggggccccacccaggccccaccctacccaggcatgaacagaacagatgacatgatggtgcctgaccagaggatcaaccacgagagccagtggcccagccacgtgtcccagaggcagccctacatgagcagcagcgcctccatgcagcccatcaccaggcctccccagcccagctaccagaccccacccagcctgcccaaccacatcagccgggcccccagccctgccagcttccagaggagcctggagaacaggatgagccccagcaagagccccttcctgcccagcatgaagatgcagaaggtgatgcccaccgtgcccaccagccaggtgactggacctccaccccagcccccacccatcagaagagagatcaccttccccccaggctctgtggaggccagccagcctgtgctgaagcagaggaggaagatcaccagcaaggacatcgtgaccccagaggcctggagggtgatgatgagcctgaagagcggcctgctggccgagagcacctgggccctggacaccatcaacatcctgctgtatgatgacagcacagtggccaccttcaacctgagccagctgagcggcttcctggagctgctggtggagtacttcaggaagtgcctgattgacatcttcggcatcctgatggagtatgaggtgggggaccccagccagaaggccctggaccacaatgctgccaggaaggatgacagccagagcctggctgatgacagcggcaaggaggaggaggatgctgagtgcattgatgatgatgaagaagatgaggaggatgaggaggaggacagcgagaagacagaaagtgatgagaagagcagcatcgccctgacagccccagatgctgctgctgaccccaaggagaagcccaagcaggccagcaagtttgacaagctgcccatcaagatcgtgaagaagaacaacctgtttgtggtggacagaagtgacaagctgggccgggtgcaggagttcaacagcggcctgctgcactggcagctgggcggcggggacaccacagagcacatccagacccactttgagagcaagatggagatccccccaagaagaagacctcctccacccctgagcagcgctggcaggaagaaggagcaggagggcaagggggacagcgaggagcagcaggagaagagcatcatcgccaccattgatgatgtgctgagcgcccggcctggggccctgcctgaagatgccaaccctggcccccagacagagagcagcaagttccccttcggcatccagcaggccaagagccacaggaacatcaagctgctggaggatgagcccaggagcagagatgagacccccctgtgcaccatcgcccactggcaggacagcctggccaagcgctgcatctgtgtgagcaacatcgtgcgcagcctgagctttgtgcctggaaatgatgctgagatgagcaagcaccctggcctggtgctgatcctgggcaagctgatcctgctgcaccacgagcaccctgagaggaagagggccccccagacctatgagaaggaggaggatgaagataaaggagtggcctgcagcaaggatgagtggtggtgggactgcctggaggtgctgcgggacaacaccctggtgaccctggccaacatcagcggccagctggacctgagcgcctacacagagagcatctgcctgcccatcctggatggcctgctgcactggatggtgtgccccagcgctgaggcccaggaccccttccccaccgtgggccccaacagcgtgctgagcccccagaggctggtgctggagaccctgtgcaagctgagcatccaggacaacaacgtggacctgatcctggccaccccacccttcagccggcaggagaagttctacgccaccctggtgcgctacgtgggggacaggaagaaccctgtgtgccgggagatgtccatggccctgctgagcaacctggcccagggagatgccctggccgcccgggccatcgctgtgcagaagggcagcatcggcaacctgatctccttcctggaggatggagtgaccatggcccagtaccagcagagccagcacaacctgatgcacatgcagcccccacccctggagcccccatctgtggacatgatgtgccgggccgccaaggccctgctggccatggcccgggtggatgagaacagaagtgagttcctgctgcacgagggccgcctgctggacatcagcatctctgctgtgctgaacagcctggtggccagcgtcatctgtgatgtgctcttccagatcggccagctgtag

SEQ ID NO: 280779 - DNA, 6696 bp, Artificial Sequence
  derived and/or modified sequence
atggagaccggcctgctgcccaaccacaagctgaagaccgtgggcgaagcaccagcagcgcccccccaccaacagcatcaccaccatcaccacgcccaccatcatcaccatcatgcccatcacctgcaccaccaccatgccctgcagcaacagctgaaccaatttcaacagcagcaacaacaacagcagcagcagcaacagcagcaacaacagcagcaacatccaataagtaataataacagtttgggaggagccggtgggggcgcaccgcagccaggccctgacatggaacagccccagcacggcggcgccaaggacagcgccgctggcggtcaagccgacccccccggaccaccactcctgagtaagcccggcgatgaagatgatgctcctccaaaaatgggtgagcccgcagggggcaggtatgagcaccccgggctgggggctctggggacacagcaaccacccgttgcggtccctggaggcggcggcggtcctgcagccgtacctgaatttaacaactactatggttccgccgcccctgcgagcggtggtcctggggggcgggcagggccctgctttgatcaacatggcgggcagcagtctcccgggatggggatgatgcacagcgcgtccgccgccgccgctggcgcgcccgggagcatggatccacttcagaacagccatgaaggctatccgaacagccaatgtaaccactaccctggatatagtaggcctggcgctgggggggggggaggaggagggggcggggggggaggcggtagtggcggtggaggcgggggaggcggagccggagcaggcggtgcaggcgcgggtgccgtggcagcagctgctgcggctgcagctgccgcggctggcggaggcggcggcggtggctatggtggcagctctgcgggctatggcgttttgtccagtcccaggcaacagggcggagggatgatgatgggtcccggagggggcggagccgcgagcctgagtaaggctgctgcaggctcggcggcaggcggctttcagaggttcgccggtcagaatcagcatccttctggagcaacccctacactcaaccagctgctgacaagcccttctcccatgatgaggtcttatggtgggtcatacccagagtattcaagcccgagcgcccccccccccccgccctctcaacctcagtcccaggcggccgctgctggggccgctgccggtggccaacaggctgcggcgggtatggggctagggaaagacatgggagcccagtatgccgctgcctccccggcatgggccgctgcccagcagcgatcgcatcccgctatgtcaccgggcactcccgggcccactatgggtcgctcccaaggctcccctatggatcccatggtcatgaaacggccccagctctacggaatgggatctaaccctcacagtcagcctcagcagagcagcccataccccggaggatcctatgggccacctggccctcaaaggtaccctatcggcatccagggcagaacccccggagccatggcgggaatgcaataccctcaacaacagatgccgcctcagtacggccagcaaggtgttagtgggtactgccagcagggtcaacagccatactacagtcagcaaccccaaccccctcacctccctccacaagcccagtacctgccatctcagtcacagcagagataccagccccagcaggatatgagccaggaggggtacggcacaaggagccagcctcctcttgcacccggcaagcccaaccatgaggacttgaacttgattcaacaggaacgacccagttcccttccggatttgtcaggcagcatcgacgacctgcctaccggaactgaagcaacactgtcatcagctgtaagtgccagcggatcaacaagcagtcagggagatcagtccaacccggcacagtccccattctcacctcatgcgtctccacacctctcctcgatccctggcggcccgtccccgagtccagtggggtcacctgtcggtagtaaccagtctcgctcaggacctatctcacctgcgtctataccgggctcccagatgcctccgcaacctcctgggtcacagtccgagtcatcaagccacccagcgctgtcccagtcacctatgccgcaggagagaggattcatggccggcacacagagaaaccctcagatggctcagtacgggcctcaacagacgggaccctccatgtcaccccatccaagcccgggtggtcagatgcatgccgggatttcaagcttccagcagtctaatagcagcggtacttacgggcctcagatgtctcagtacggacctcaaggaaactacagccgtccacctgcctactcaggagttcccagcgcaagctacagtggccctggcccagggatgggcatctctgccaacaatcagatgcacggccagggcccttctcagccatgcggcgccgtccctcttggacgcatgccatccgccggcatgcagaatcgtccattccctggcaacatgagctctatgacaccaagctccccaggcatgagtcaacaaggcggccctggcatgggaccaccaatgcctacggtaaaccggaaggcccaggaagcagctgcagctgtgatgcaagccgcagccaattctgcccagagccgccaaggcagctttcctggcatgaatcagtcgggactgatggcttcaagtagtccttatagccagcccatgaataattccagctcattgatgaacactcaggctcctccatactccatggcgccagcgatggtgaacagctcagccgcctcagtcggtttggctgacatgatgagcccaggtgaatccaagctacccctccctcttaaggccgatggaaaggaagaaggcacaccccagcctgaatcgaaatctaaggatagctactcaagtcagggtatctcacaacccccaacacctggaaatctgccggtgccatcccctatgtccccatcctccgccagcatttcgagcttccatggagatgagagtgattcgatcagttcccccggctggcctaagacccctagttcccctaagtcctcttctagtactactacgggcgagaagataacaaaggtttatgaactgggcaacgagccagagcgtaagctctgggtggaccgctatcttacattcatggaggagagaggctccccggtcagcagcttgcctgcggtcggaaaaaagcctcttgacctgtttcgcctgtacgtatgcgtgaaggagatcgggggcttggcccaagtaaacaagaataagaaatggagggagcttgcaacgaatttgaacgttggcaccagctcctcagctgcatcttccctgaagaaacagtacatacaataccttttcgcttttgagtgcaagatcgaacggggagaagagccccctcctgaagtattctccactggagacacaaagaagcagcccaagctgcagccccccagtccagcgaactctgggagcctccaaggcccccaaacaccacagagtacaggctctaactcgatggctgaagttcccggggacctgaaaccccctaccccagctagcaccccccatgggcagatgacccctatgcagggtggccgatcaagtaccatctcagtgcacgaccccttttccgatgtgagcgactcctctttcccaaagcggaactccatgacacccaatgccccataccaacaggggatgtccatgcctgatgtgatgggccggatgccatacgaacccaacaaagatccgttcggtggaatgagaaaggtccctggctcctcggagcccttcatgacacaagggcagatgcccaattccagcatgcaggacatgtataatcaaagtccctctggggcgatgtccaatttgggaatggggcaacgccaacaatttccctacggggcaagttacgatcgcaggcacgaaccttacggacaacagtacccgggccaaggccccccctcaggacagcccccctacggcggccaccagcccggattatacccacagcagcctaattataagaggcacatggatggtatgtatggacccccagccaaacgacacgaaggcgacatgtacaacatgcagtacagcagtcaacagcaggagatgtacaaccagtatgggggatcatacagtgggccggacagaagacctatccagggtcagtatccttacccttatagtcgtgaacgaatgcagggtcctggacagattcaaacgcacgggatccccccccagatgatgggcggcccgttgcaaagcagttctagtgaaggaccgcagcagaatatgtgggctgctcgaaatgacatgccctacccttaccagaatcgccaggggcccggcggccctactcaagcccctccatatccgggcatgaatcgaacagatgacatgatggtgccggaccaacgtattaatcacgaatcccagtggccatcccatgtatcccaaaggcaaccttacatgagcagttcggcatccatgcagccaataacccggcctccccaacctagctaccagactcccccttcgctgcccaaccatatctcccgcgcgccaagcccggcctcctttcaaagatcattggaaaatagaatgtcaccctccaaaagtccgtttctacctagcatgaagatgcagaaagtcatgcctaccgtccccacgtctcaggtgactggcccgcctccacagccccctccaataaggcgggaaataactttcccacccgggtctgtcgaggcttcacagcctgtcctgaagcaacgtcgaaaaattacaagcaaggacatcgtgactcccgaggcttggagagtcatgatgtcactcaagtctggcctactagctgagagcacctgggcactcgacaccattaatatcctgctgtacgatgattctactgtagccaccttcaacctatcccagttatccggctttctggagctcctggtggaatattttcgaaaatgtctaatcgatatatttgggatacttatggagtacgaagtcggcgacccttcacagaaagcccttgatcataatgctgcacgcaaggacgactcgcagagcttggccgatgacagcggcaaggaggaggaggacgctgagtgcatcgacgatgacgaagaggacgaagaagatgaagaggaggattctgaaaaaacagaatccgacgagaagtcatccatcgccttaaccgctcccgatgccgccgctgaccctaaggaaaagcctaagcaggcgagcaaatttgataaattgccaataaagattgtcaagaaaaataatttgttcgttgttgataggagtgataaattggggagggtgcaagaatttaatagtggtctgctgcactggcagctgggaggaggtgataccacagagcatattcaaactcactttgagagtaagatggagattccacccaggcgcaggcctcctcctcctcttagtagcgctggccgaaagaaggaacaggagggaaagggggattccgaagagcaacaggagaagagtattatcgccactatcgatgacgtgctctcagctcgccctggagccctgcccgaggatgcaaatcctggccctcaaacggagtccagtaaatttcctttcggcatccagcaagcgaaatcccatcgtaatatcaagttgctggaagatgaaccacggagtcgggacgaaactccactttgtacgatcgcccactggcaagattctctcgcaaaaagatgcatctgcgtatctaatatcgtgcgatcattgtcctttgtgcccggaaacgacgccgaaatgagtaaacacccaggcctcgtgctaattctgggtaagttgattcttctccatcatgaacaccctgagcgaaagagggccccacaaacttatgaaaaagaggaggatgaggacaaaggggtggcctgtagcaaagacgagtggtggtgggattgtcttgaggttcttagagataatacactggtgacattggctaacatcagcggccagcttgatctgagcgcctacaccgagtctatttgtttaccaattctcgatggcctgttacactggatggtgtgcccatcagccgaggctcaggatccatttccgactgttggtcctaattcagtactttcaccccaacgtttggtgctcgagactctgtgtaagttatccatccaagataacaacgttgatttaatcctggccaccccaccgttttctaggcaggagaagttctatgccacactggtacggtacgtgggcgaccggaagaatccagtgtgcagggaaatgtccatggctttactgtctaatctcgctcagggcgatgccttggccgctcgtgctatcgccgtgcagaagggtagcattggaaacttgataagcttcctggaagatggcgtgactatggcccagtaccaacaatctcagcacaacttaatgcacatgcagcccccacctcttgaaccccccagtgtagatatgatgtgcagagccgctaaggcattgttggctatggcccgagtagacgagaataggtctgagtttctgcttcacgaaggtagactgctcgatatctccatcagcgccgtgctcaatagtctggttgcctcggtcatatgcgacgtcctgttccagattgggcagctctag

SEQ ID NO: 280780 - DNA, 2172 bp, Artificial Sequence
  derived and/or modified sequence
atgcccccccagtacggccagcagggcgtgagcggctactgccagcagggacagcagccatactactcacaacagcctcagcctccacacctgccaccacaggctcagtacctcccttcccagtcccagcaacgataccagccacagcaggatatgtctcaggagggctatggtacacgttcccaaccaccactggcacccggaaagcctaatcacgaggatctgaatctaatccagcaggaacgaccttccagtttgcccgatctgtccggctccattgacgacctccctactggcaccgaggctaccctgtccagcgccgtgtccgccagcggctccacctcctcccagggcgaccagtctaatccggctcaaagccccttctcaccccacgcttctccacacctgagctcgatacctggcggaccttcacctagccccgtgggatctcccgttgggtccaaccaatctcgaagcggacccataagtccagcctctattccaggctctcagatgcctccacagccaccaggatctcagtctgagagctccagtcatccggccctgagccaatctccgatgccccaggaaaggggaacccagcgaaatcctcagatggcgcagtacggaccccagcagaccggaccaagtatgtctcctcaccccagtcctggtggacaaatgcacgcggggatctcgtcattccagcagtccaattcatctggaacttacgggcctcaaatgtcccagtatggcccccagggcaactacagccggcctcccgcctactcaggagtacccagtgcatcgtacagtgggcccggcccaggcatgggaatctccgcgaataaccagatgcatgggcagggaccttcacagccttgcggagcggtgcccctgggaaggatgccgtctgcaggaatgcagaatcgccccttccctggcaatatgagcagtatgaccccttcgagccccggaatgtctcaacagggcgggcccgggatgggccctcctatgccaacagtaaacagaaaggcccaagaagcggccgctgcggttatgcaagcggcagccaactccgcgcagagtcgccagggtagcttcccagggatgaaccagtctgggctaatggcttcaagcagcccctattcacaaccgatgaataattcctcatccctgatgaacacacaggccccaccttacagtatggcccccgccatggtaaatagtagcgcagcctcagtggggctggctgatatgatgagtccgggtgaatctaaattaccattgccacttaaggcggacggcaaggaggaggggactccccagcctgagtctaagtcgaaggattcctactcaagtcaggggattagtcaaccaccgacacccggaaatttaccagtgcccagcccaatgagtccctcctcagcctccatctcaagctttcatggagatgagtcagactcaattagttccccgggatggcccaagacgccttcatctcctaagagtagctccagcaccaccactggggagaagatcaccaaggtgtatgagctggggaacgagccagagaggaaattgtgggtcgatcgctatctgaccttcatggaagagcgggggtcacctgtgtcctcactccccgcggttggaaaaaaacccctagatctgtttaggctgtacgtgtgcgtgaaggagatcggaggattggctcaggtcaataagaataagaagtggcgggaactggccactaatctgaatgtgggtacttccagtagtgcagctagtagtctaaagaaacaatacatccagtatctgtttgcttttgagtgcaaaatcgagcgaggagaggagccgcccccggaggtttttagtactggggatacaaaaaaacaacctaaattgcaacctccctcgccggtggtccagatggagccacgcgcctgcgacactggaggtagcgggcgcaaggcatcctggtctcgtcccgccccgagggccagagctggcggctctagacatacacaagcctccggcgggcgaaggcagcgtcacccaggccttcagaagccattggacagcctgcccccaacccagcaagtggccagtcccatccctgtgccatccctcggcaaggtgtccgggaacatcttcgtggtgaagggcaagtag

SEQ ID NO: 280781 - DNA, 6870 bp, Artificial Sequence
  derived and/or modified sequence
atggcccacaacgccggcgccgccgccgccgccggcacccacagcgcaaaatccgggggtagcgaagcagctctgaaggagggtggatcagccgctgccctgtcctcttcatcatcatcttcggccgcagcggcggctgcctcttccagtagcagcagtggtccaggcagcgcgatggagacggggcttttgccaaaccataaactcaagaccgtcggcgaggctccagccgctcctccccatcagcaacaccatcatcatcatcacgcgcatcatcaccatcatcacgcacaccatctgcaccaccaccatgcattgcagcagcagctaaaccagttccagcagcagcaacagcaacagcagcagcagcagcagcagcagcagcaacagcaacatcccatctcaaataataacagcttaggcggagccggaggcggcgcaccccagcccggacctgatatggagcagccgcaacatggcggggccaaggatagcgctgccggcggacaggcggaccctccagggccaccactgctcagtaaacccggagacgaagacgatgctccaccaaaaatgggcgagccagccgggggtagatacgagcaccctggccttggggccctcgggacacagcagcctccagtcgccgtcccaggtggcggtggcggcccagcagccgtccccgaatttaataactattacggaagcgctgcacccgcttctggaggccctggcggaagggccggtccatgtttcgatcaacatggagggcagcaatcccccggcatggggatgatgcacagtgcgagcgccgcggctgcaggcgccccaggatccatggatcctctccagaattctcatgagggatatcctaatagccagtgtaaccactatcctgggtattcccgccccggcgcaggcggcggcgggggcggggggggcggcggcggtggaggttccggcggtggcggaggagggggtggcgcgggcgccggaggtgcaggagcaggcgccgtggccgctgccgcggccgctgcggcagccgctgctggaggggggggtggcggcggttacggtggcagcagcgcaggttacggagtcttgtctagcccaagacagcagggcggcggaatgatgatggggccagggggaggcggggctgccagcctatccaaagcagcggcggggtccgccgccggaggctttcagcggtttgctggccagaatcagcatcccagtggagccactcctaccctaaaccagttgcttacatcgccatcccctatgatgagaagttatggcgggagctatccagaatacagctcccccagcgcgcctcccccccctccgtctcaaccgcaatcacaggcagccgccgctggagccgccgctggaggccagcaggccgctgccggcatggggttggggaaggatatgggcgctcagtatgcagctgcatcccctgcatgggctgcagcgcagcagcggagccatcccgcgatgagtcccggaactcccgggccaactatgggtaggagtcagggctcaccgatggacccgatggttatgaagcgcccgcaactttacggtatgggttcaaacccacattcacaaccccagcaatctagtccttatcctggagggtcatacggtcctcccggcccacaacgctacccgatcggcattcaaggaagaacacctggggcaatggccggaatgcagtatccccagcagcagatgccgccacagtatggacagcagggcgtctccggctactgccaacagggacagcaaccttactatagtcagcagccccagcccccacacctcccaccgcaggcacagtacctccccagccagtcacagcagagatatcagccccagcaggatatgagtcaagaggggtacggaaccaggagtcagccacctctagcccctggtaaacccaaccacgaggacctcaacttaattcagcaggaaagaccttcaagcctgcccgatctctcaggaagcatcgacgatttgccaacgggcaccgaggctactctgtcatctgcagtgtccgcatcaggaagcacctcatcccagggtgaccagtccaatccagcccagagcccgttttccccccatgcttcgccccacctttcatctatccccggaggtccgagcccgagtcctgtggggtctcccgtcgggagcaatcagtcacgatccggtcccatatctccggcaagtattcccggctcccagatgcctccccagcctccaggttcccagtcagagtcctccagtcatcctgcactgagccagtccccaatgcctcaggaacgaggtttcatggccggcacacagagaaaccctcagatggcacagtacggaccccaacagaccggaccctcaatgtctccccaccccagcccaggtggccagatgcacgcaggcatctcctccttccagcagtcgaattcatccgggacctatggcccgcagatgtcccaatatgggcctcagggcaattatagccgcccccctgcctactcgggcgtgccatcggcaagttactccggtcccggacccgggatgggcatcagcgctaacaatcaaatgcacggtcagggaccctctcagccgtgtggagcggtccccttaggcagaatgcccagtgccggcatgcagaatcgaccatttcccggtaacatgtcatccatgacaccaagctctccaggtatgagtcagcaggggggccctggtatggggcctccaatgcctaccgtgaatagaaaagctcaggaggccgcagctgctgttatgcaggctgcggccaattcagctcagtctaggcaaggctcttttccaggtatgaaccagtctggactgatggcttcctcctcgccatacagccaaccaatgaataacagttcttctctcatgaatacacaagcccctccctattcaatggctcctgccatggtaaattcgagtgccgcttccgtgggtcttgctgacatgatgtcccctggagagtccaagctgcctctgccgctgaaggccgacgggaaagaggaaggaactcctcagccagagagtaaatctaaggattcatatagctctcagggaatttcgcagcctccaacacctggaaacttgccggtgccaagtccaatgtcaccctcctccgcatctatctcatcttttcatggggatgagtcagattctatttcgagccccggttggccaaagaccccctccagccctaagtctagctccagcacaacaactggggaaaagattaccaaagtctatgagctgggcaatgaaccagagagaaagctgtgggtcgacaggtacctgacttttatggaggaacggggatccccggtctccagcctcccggccgtcgggaaaaagccattggatctctttaggctttacgtgtgtgtgaaggaaatcgggggtttggcccaagttaacaaaaataagaagtggcgggaattagccacaaacttgaacgtcggaaccagctcaagcgcagcctctagtctgaagaagcagtacatacagtaccttttcgccttcgaatgtaaaatagagagaggagaggaaccaccacctgaggtgttttccacaggcgacaccaagaagcaacccaaactgcaaccaccttcaccagccaactccggaagccttcaggggccccagacgccccagtcaacaggcagtaattccatggccgaagtgccaggagatcttaaacccccaactcccgccagcacgccgcatggacaaatgacgcccatgcagggaggcaggagctcgactatcagcgtacacgatcccttcagtgacgtctctgactcgtccttccccaagcgtaactccatgactcccaacgccccttaccagcagggtatgtccatgccagatgtcatggggcggatgccttatgagcccaataaggacccattcggagggatgcgcaaggtccccggcagcagcgagcctttcatgacccagggccagatgcccaactcaagcatgcaagacatgtacaaccagtcacctagtggcgctatgtcgaacctgggcatgggacaaaggcagcagttcccctacggagcctcctacgatcgccggcacgagccttatggccagcagtatccgggtcaaggacctccatccggccaacccccctacgggggacaccagcccggcctctacccccaacagccaaactacaagcgacatatggatggtatgtatggaccacccgctaagaggcacgagggggatatgtataatatgcagtattcttcccagcagcaagaaatgtataaccagtacggcggctcatattccggtcccgatcgccggcctatacagggacagtatccatacccttacagccgagaaagaatgcagggaccagggcaaattcagacacacggcatcccaccccagatgatgggaggtcccttgcagagtagctctagcgagggcccccagcagaatatgtgggctgccaggaacgatatgccctatccctaccagaaccggcagggaccgggggggcccacccaggcccccccttatcccggaatgaatcggactgacgatatgatggtcccggaccaaaggatcaaccatgagtctcagtggccatcgcacgtgtctcaacgacagccatatatgtctagttctgcctctatgcagccaatcactcggcctccgcagcccagctaccagacacctcctagtctgcccaaccacatatcgagggctccgagtcctgcaagcttccagaggtctctcgagaatcggatgtcccccagcaaatcccccttcctgccctcaatgaaaatgcagaaagttatgcctactgtgcccactagccaggtaactggaccaccacctcagcctccccccatccggcgcgagatcactttccctcccggatcagtggaggcatcgcagccggttctgaagcaaaggcgaaagattaccagtaaagatattgtcaccccagaggcttggcgcgtgatgatgtcacttaagagtggcttgctcgccgaaagcacttgggccctcgataccatcaacatattgttatatgacgactccaccgtagctactttcaacctgagccagctatcaggctttctggagctcttggttgagtacttccggaaatgcctaatcgacatctttggcattcttatggaatacgaggtgggggatccctcacagaaagccctcgaccacaacgcagctaggaaggacgactcccagtcactggccgatgattccggaaaagaggaagaggacgccgagtgtatcgatgacgatgaggaggacgaggaggatgaggaggaggatagcgaaaaaacagaaagtgacgaaaaaagctccattgccctcacggctcctgatgccgctgcggaccccaaagagaaacccaaacaagcttcaaagtttgacaagctgcccatcaagattgttaagaagaataacttgttcgtggtggatcgttccgacaaactggggcgggtgcaggaatttaactccggtctgttacactggcaacttggaggtggagatactacagaacacatccagacacatttcgagagcaagatggaaattccgccccgaaggcggccgccccccccactctcttctgccggacggaagaaggaacaagaagggaagggggactctgaagagcaacaagagaaaagtataattgcaaccatcgacgacgtgctgagtgcacgaccaggggctctacctgaagatgccaacccaggcccgcagacagagagtagcaaattcccctttggaatacagcaagcgaagagtcataggaatatcaaacttctagaagacgaaccccgctcccgagacgagactccactgtgtaccatcgcccactggcaggactccctggccaaacgttgcatatgcgtgtccaatatcgtgcggtcactctctttcgtgcctggaaatgacgccgaaatgtcaaagcatccaggtctggtgctgatattggggaaactcattttgctgcaccatgagcacccggagcggaaacgagctcctcagacatacgaaaaagaggaagatgaagataagggcgttgcgtgtagcaaagacgaatggtggtgggattgcctggaggtcctgcgggacaacactctggttacgctagcaaacatctctggacagctggatctgagtgcctataccgagtccatatgtctccccattttggatggtcttctgcactggatggtctgtccgtccgccgaggctcaggacccatttcccactgttggtcctaacagcgtgttgagtcctcaacgcctggtgctggagactctctgcaaattaagcatccaagacaataacgtcgatctcatattggcaacacctccattctcccgccaagaaaaattttatgccacgttggtaaggtacgtcggtgacaggaaaaaccctgtgtgtagggagatgagcatggctctcttgtctaacctggcgcaaggagatgctctagctgcccgagcgattgccgtacagaagggtagtattggcaacttgataagctttctggaggacggagtcaccatggcccagtatcagcagtctcaacacaatttgatgcacatgcaaccccctcccctggagcctccttccgtggatatgatgtgcagagcagccaaagccttgttagccatggcccgagttgacgagaaccggtccgaatttcttctgcatgaagggagactgctggacatctctatttccgccgtgcttaactccctcgtggcctccgtcatctgtgatgttctgtttcaaattgggcagctgtag

SEQ ID NO: 280782 - DNA, 8224 bp, Artificial Sequence
  derived and/or modified sequence
cggccgccgccggcacccacagcgccaagagcggcggctccgaggcggctctcaaggagggtggaagcgccgccgcgctgtcctcctcctcctcctcctccgcggcggcagcggcggcatcctcttcctcctcgtcgggcccgggctcggccatggagacggggctgctccccaaccacaaactgaaaaccgttggcgaagcccccgccgcgccgccccaccagcagcaccaccaccaccaccatgcccaccaccaccaccaccatgcccaccacctccaccaccaccacgcactacagcagcagctaaaccagttccagcagcagcagcagcagcagcaacagcagcagcagcagcagcagcaacagcaacatcccatttccaacaacaacagcttgggcggcgcgggcggcggcgcgcctcagcccggccccgacatggagcagccgcaacatggaggcgccaaggacagtgctgcgggcggccaggccgaccccccgggcccgccgctgctgagcaagccgggcgacgaggacgacgcgccgcccaagatgggggagccggcgggcggccgctacgagcacccgggcttgggcgccctgggcacgcagcagccgccggtcgccgtgcccgggggcggcggcggcccggcggccgtcccggagtttaataattactatggcagcgctgcccctgcgagcggcggccccggcggccgcgctgggccttgctttgatcaacatggcggacaacaaagccccgggatggggatgatgcactccgcctccgccgccgccgccggggcccccggcagcatggaccccctgcagaactcccacgaagggtaccccaacagccagtgcaaccattatccgggctacagccggcccggcgcgggcggcggcggcggcggcggcggcggaggaggaggaggcagcggaggaggaggaggaggaggaggagcaggagcaggaggagcaggagcgggagctgtggcggcggcggccgcggcggcggcggcagcagcaggaggcggcggcggcggcggctatgggggctcgtccgcggggtacggggtgctgagctccccccggcagcagggcggcggcatgatgatgggccccgggggcggcggggccgcgagcctcagcaaggcggccgccggctcggcggcggggggcttccagcgcttcgccggccagaaccagcacccgtcgggggccaccccgaccctcaatcagctgctcacctcgcccagccccatgatgcggagctacggcggcagctaccccgagtacagcagccccagcgcgccgccgccgccgccgtcgcagccccagtcccaggcggcggcggcgggggcggcggcgggcggccagcaggcggccgcgggcatgggcttgggcaaggacatgggcgcccagtacgccgctgccagcccggcctgggcggccgcgcaacaaaggagtcacccggcgatgagccccggcacccccggaccgaccatgggcagatcccagggcagcccaatggatccaatggtgatgaagagacctcagttgtatggcatgggcagtaaccctcattctcagcctcagcagagcagtccgtacccaggaggttcctatggccctccaggcccacagcggtatccaattggcatccagggtcggactcccggggccatggccggaatgcagtaccctcagcagcagatgccacctcagtatggacagcaaggtgtgagtggttactgccagcagggccaacagccatattacagccagcagccgcagcccccgcacctcccaccccaggcgcagtatctgccgtcccagtcccagcagaggtaccagccgcagcaggacatgtctcaggaaggctatggaactagatctcaacctcctctggcccccggaaaacctaaccatgaagacttgaacttaatacagcaagaaagaccatcaagtttaccagatctgtctggctccattgatgacctccccacgggaacggaagcaactttgagctcagcagtcagtgcatccgggtccacgagcagccaaggggatcagagcaacccggcgcagtcgcctttctccccacatgcgtcccctcatctctccagcatcccggggggcccatctccctctcctgttggctctcctgtaggaagcaaccagtctcgatctggcccaatctctcctgcaagtatcccaggtagtcagatgcctccgcagccacccgggagccagtcagaatccagttcccatcccgccttgagccagtcaccaatgccacaggaaagaggttttatggcaggcacacaaagaaaccctcagatggctcagtatggacctcaacagacaggaccatccatgtcgcctcatccttctcctgggggccagatgcatgctggaatcagtagctttcagcagagtaactcaagtgggacttacggtccacagatgagccagtatggaccacaaggtaactactccagacccccagcgtatagtggggtgcccagtgcaagctacagcggcccagggcccggtatgggtatcagtgccaacaaccagatgcatggacaagggccaagccagccatgtggtgctgtgcccctgggacgaatgccatcagctgggatgcagaacagaccatttcctggaaatatgagcagcatgacccccagttctcctggcatgtctcagcagggagggccaggaatggggccgccaatgccaactgtgaaccgtaaggcacaggaggcagccgcagcagtgatgcaggctgctgcgaactcagcacaaagcaggcaaggcagtttccccggcatgaaccagagtggacttatggcttccagctctccctacagccagcccatgaacaacagctctagcctgatgaacacgcaggcgccgccctacagcatggcgcccgccatggtgaacagctcggcagcatctgtgggtcttgcagatatgatgtctcctggtgaatccaaactgcccctgcctctcaaagcagacggcaaagaagaaggcactccacagcccgagagcaagtcaaaggatagctacagctctcagggtatttctcagcccccaaccccaggcaacctgccagtcccttccccaatgtcccccagctctgctagcatctcctcatttcatggagatgaaagtgatagcattagcagcccaggctggccaaagactccatcaagccctaagtccagctcctccaccactactggggagaagatcacgaaggtgtacgagctggggaatgagccagagagaaagctctgggtcgaccgatacctcaccttcatggaagagagaggctctcctgtctcaagtctgcctgccgtgggcaagaagcccctggacctgttccgactctacgtctgcgtcaaagagatcgggggtttggcccaggttaataaaaacaagaagtggcgtgagctggcaaccaacctaaacgttggcacctcaagcagtgcagcgagctccctgaaaaagcagtatattcagtacctgtttgcctttgagtgcaagatcgaacgtggggaggagcccccgccggaagtcttcagcaccggggacaccaaaaagcagcccaagctccagccgccatctcctgctaactcgggatccttgcaaggcccacagaccccccagtcaactggcagcaattccatggcagaggttccaggtgacctgaagccacctaccccagcctccacccctcacggccagatgactccaatgcaaggtggaagaagcagtacaatcagtgtgcacgacccattctcagatgtgagtgattcatccttcccgaaacggaactccatgactccaaacgccccctaccagcagggcatgagcatgcccgatgtgatgggcaggatgccctatgagcccaacaaggacccctttgggggaatgagaaaagtgcctggaagcagcgagccctttatgacgcaaggacagatgcccaacagcagcatgcaggacatgtacaaccaaagtccctccggagcaatgtctaacctgggcatggggcagcgccagcagtttccctatggagccagttacgaccgaaggcatgaaccttatgggcagcagtatccaggccaaggccctccctcgggacagccgccgtatggagggcaccagcccggcctgtacccacagcagccgaattacaaacgccatatggacggcatgtacgggcccccagccaagcgccacgagggcgacatgtacaacatgcagtacagcagccagcagcaggagatgtacaaccagtatggaggctcctactcgggcccggaccgcaggcccatccagggccagtacccgtatccctacagcagggagaggatgcagggcccggggcagatccagacacacggaatcccgcctcagatgatgggcggcccgctgcagtcgtcctccagtgaggggcctcagcagaatatgtgggcagcacgcaatgatatgccttatccctaccagaacaggcagggccctggcggccctacacaggcgcccccttacccaggcatgaaccgcacagacgatatgatggtacccgatcagaggataaatcatgagagccagtggccttctcacgtcagccagcgtcagccttatatgtcgtcctcagcctccatgcagcccatcacacgcccaccacagccgtcctaccagacgccaccgtcactgccaaatcacatctccagggcgcccagcccagcgtccttccagcgctccctggagaaccgcatgtctccaagcaagtctccttttctgccgtctatgaagatgcagaaggtcatgcccacggtccccacatcccaggtcaccgggccaccaccccaaccacccccaatcagaagggagatcacctttcctcctggctcagtagaagcatcacaaccagtcttgaaacaaaggcgaaagattacctccaaagatatcgttactcctgaggcgtggcgtgtgatgatgtcccttaaatcaggtcttttggctgagagtacgtgggctttggacactattaatattcttctgtatgatgacagcactgttgctactttcaatctctcccagttgtctggatttctcgaacttttagtcgagtactttagaaaatgcctgattgacatttttggaattcttatggaatatgaagtgggagaccccagccaaaaagcacttgatcacaacgcagcaaggaaggatgacagccagtccttggcagacgattctgggaaagaggaggaagatgctgaatgtattgatgacgacgaggaagacgaggaggatgaggaggaagacagcgagaagacagaaagcgatgaaaagagcagcatcgctctgactgccccggacgccgctgcagacccaaaggagaagcccaagcaagccagtaagttcgacaagctgccaataaagatagtcaaaaagaacaacctgtttgttgttgaccgatctgacaagttggggcgtgtgcaggagttcaatagtggccttctgcactggcagctcggcgggggtgacaccaccgagcacattcagactcactttgagagcaagatggaaattcctcctcgcaggcgcccacctccccccttaagctccgcaggtagaaagaaagagcaagaaggcaaaggcgactctgaagagcagcaagagaaaagcatcatagcaaccatcgatgacgtcctctctgctcggccaggggcattgcctgaagacgcaaaccctgggccccagaccgaaagcagtaagtttccctttggtatccagcaagccaaaagtcaccggaacatcaagctgctggaggacgagcccaggagccgagacgagactcctctgtgtaccatcgcgcactggcaggactcgctggctaagcgatgcatctgtgtgtccaatattgtccgtagcttgtcattcgtgcctggcaatgatgccgaaatgtccaaacatccaggcctggtgctgatcctggggaagctgattcttcttcaccacgagcatccagagagaaagcgagcaccgcagacctatgagaaagaggaggatgaggacaagggggtggcctgcagcaaagatgagtggtggtgggactgcctcgaggtcttgagggataacacgttggtcacgttggccaacatttccgggcagctagacttgtctgcttacacggaaagcatctgcttgccaattttggatggcttgctgcactggatggtgtgcccgtctgcagaggcacaagatccctttccaactgtgggacccaactcggtcctgtcgcctcagagacttgtgctggagaccctctgtaaactcagtatccaggacaataatgtggacctgatcttggccactcctccatttagtcgtcaggagaaattctatgctacattagttaggtacgttggggatcgcaaaaacccagtctgtcgagaaatgtccatggcgcttttatcgaaccttgcccaaggggacgcactagcagcaagggccatagctgtgcagaaaggaagcattggaaacttgataagcttcctagaggatggggtcacgatggcccagtaccagcagagccagcacaacctcatgcacatgcagcccccgcccctggaaccacctagcgtagacatgatgtgcagggcggccaaggctttgctagccatggccagagtggacgaaaaccgctcggaattccttttgcacgagggccggttgctggatatctcgatatcagctgtcctgaactctctggttgcatctgtcatctgtgatgtactgtttcagattgggcagttatgacataagtgagaaggcaagcatgtgtgagtgaagattagagggtcacatataactggctgttttctgttcttgtttatccagcgtaggaagaaggaaaagaaaatctttgctcctctgccccattcactatttaccaattgggaattaaagaaataattaatttgaacagttatgaaattaatatttgctgtctgtgtgtataagtacatcctttggggttttttttttctcttttttttaaccaaagttgctgtctagtgcattcaaaggtcactttttgttcttcacagatctttttaatgttctttcccatgttgtattgcatttttgggggaagcaaattgactttaaagaaaaaagttgtggcaaaagatgctaagatgcgaaaatttcaccacactgagtcaaaaaggtgaaaaattatccatttcctatgcgttttactcctcagagaatgaaaaaaactgcatcccatcacccaaagttctgtgcaatagaaatttctacagatacaggtataggggctcaaggaggtatgtcggtcagtagtcaaaactatgaaatgatactggtttctccacaggaatatggttccattaggctgggagcaaaaacaatgttttttaagattgagaatacatacctgacaacgatccggaaactgctcctcaccactcccgtcatgcctgctgtcggcgtttgaccttccacgtgacagttcttcacaattcctttcatcattttttaaatattttttttactgcctatgggctgtgatgtatatagaagttgtacattaaacataccctcatttttttcttttcttttttttttttttttttagtacaaagttttagtttctttttcatgatgtggtaactacgaagtgatggtagatttaaataattttttatttttattttatatattttttcattagggccatatctccaaaaaaagaaagaaaaaatacaaaaaacaaaaacaaaaaaaaaagagggtaatgtacaagtttctgtatgtataaagtcatgctcgatttcaggagagcagctgatcacaatttgcttcatgaatcaaggtgtggaaatggttatatatggattgatttagaaaatggttaccagtacagtcaaaaaagagaaaatgaaaaaaatacaactaaaaggaagaaacacaacttcaaagatttttcagtgatgagaatccacatttgtatttcaagataatgtagtttaaaaaaaaaaaaaagaaaaaaacttgatgtaaattcctccttttcctctggcttaatgaatatcatttattcagtataaaatctttatatgttccacatgttaagaataaatgtacattaaatcttgttaagcactgtg

SEQ ID NO: 280783 - DNA, 3887 bp, Artificial Sequence
  derived and/or modified sequence
cggccgccgccggcacccacagcgccaagagcggcggctccgaggcggctctcaaggagggtggaagcgccgccgcgctgtcctcctcctcctcctcctccgcggcggcagcggcggcatcctcttcctcctcgtcgggcccgggctcggccatggagacggggctgctccccaaccacaaactgaaaaccgttggcgaagcccccgccgcgccgccccaccagcagcaccaccaccaccaccatgcccaccaccaccaccaccatgcccaccacctccaccaccaccacgcactacagcagcagctaaaccagttccagcagcagcagcagcagcagcaacagcagcagcagcagcagcagcaacagcaacatcccatttccaacaacaacagcttgggcggcgcgggcggcggcgcgcctcagcccggccccgacatggagcagccgcaacatggaggcgccaaggacagtgctgcgggcggccaggccgaccccccgggcccgccgctgctgagcaagccgggcgacgaggacgacgcgccgcccaagatgggggagccggcgggcggccgctacgagcacccgggcttgggcgccctgggcacgcagcagccgccggtcgccgtgcccgggggcggcggcggcccggcggccgtcccggagtttaataattactatggcagcgctgcccctgcgagcggcggccccggcggccgcgctgggccttgctttgatcaacatggcggacaacaaagccccgggatggggatgatgcactccgcctccgccgccgccgccggggcccccggcagcatggaccccctgcagaactcccacgaagggtaccccaacagccagtgcaaccattatccgggctacagccggcccggcgcgggcggcggcggcggcggcggcggcggaggaggaggaggcagcggaggaggaggaggaggaggaggagcaggagcaggaggagcaggagcgggagctgtggcggcggcggccgcggcggcggcggcagcagcaggaggcggcggcggcggcggctatgggggctcgtccgcggggtacggggtgctgagctccccccggcagcagggcggcggcatgatgatgggccccgggggcggcggggccgcgagcctcagcaaggcggccgccggctcggcggcggggggcttccagcgcttcgccggccagaaccagcacccgtcgggggccaccccgaccctcaatcagctgctcacctcgcccagccccatgatgcggagctacggcggcagctaccccgagtacagcagccccagcgcgccgccgccgccgccgtcgcagccccagtcccaggcggcggcggcgggggcggcggcgggcggccagcaggcggccgcgggcatgggcttgggcaaggacatgggcgcccagtacgccgctgccagcccggcctgggcggccgcgcaacaaaggagtcacccggcgatgagccccggcacccccggaccgaccatgggcagatcccagggcagcccaatggatccaatggtgatgaagagacctcagttgtatggcatgggcagtaaccctcattctcagcctcagcagagcagtccgtacccaggaggttcctatggccctccaggcccacagcggtatccaattggcatccagggtcggactcccggggccatggccggaatgcagtaccctcagcagcagatgccacctcagtatggacagcaaggtgtgagtggttactgccagcagggccaacagccatattacagccagcagccgcagcccccgcacctcccaccccaggcgcagtatctgccgtcccagtcccagcagaggtaccagccgcagcaggacatgtctcaggaaggctatggaactagatctcaacctcctctggcccccggaaaacctaaccatgaagacttgaacttaatacagcaagaaagaccatcaagtttaccagatctgtctggctccattgatgacctccccacgggaacggaagcaactttgagctcagcagtcagtgcatccgggtccacgagcagccaaggggatcagagcaacccggcgcagtcgcctttctccccacatgcgtcccctcatctctccagcatcccggggggcccatctccctctcctgttggctctcctgtaggaagcaaccagtctcgatctggcccaatctctcctgcaagtatcccaggtagtcagatgcctccgcagccacccgggagccagtcagaatccagttcccatcccgccttgagccagtcaccaatgccacaggaaagaggcacacaaagaaaccctcagatggctcagtatggacctcaacagacaggaccatccatgtcgcctcatccttctcctgggggccagatgcatgctggaatcagtagctttcagcagagtaactcaagtgggacttacggtccacagatgagccagtatggaccacaaggtaactactccagacccccagcgtatagtggggtgcccagtgcaagctacagcggcccagggcccggtatgggtatcagtgccaacaaccagatgcatggacaagggccaagccagccatgtggtgctgtgcccctgggacgaatgccatcagctgggatgcagaacagaccatttcctggaaatatgagcagcatgacccccagttctcctggcatgtctcagcagggagggccaggaatggggccgccaatgccaactgtgaaccgtaaggcacaggaggcagccgcagcagtgatgcaggctgctgcgaactcagcacaaagcaggcaaggcagtttccccggcatgaaccagagtggacttatggcttccagctctccctacagccagcccatgaacaacagctctagcctgatgaacacgcaggcgccgccctacagcatggcgcccgccatggtgaacagctcggcagcatctgtgggtcttgcagatatgatgtctcctggtgaatccaaactgcccctgcctctcaaagcagacggcaaagaagaaggcactccacagcccgagagcaagtcaaaggatagctacagctctcagggtatttctcagcccccaaccccaggcaacctgccagtcccttccccaatgtcccccagctctgctagcatctcctcatttcatggagatgaaagtgatagcattagcagcccaggctggccaaagactccatcaagccctaagtccagctcctccaccactactggggagaagatcacgaaggtgtacgagctggggaatgagccagagagaaagctctgggtcgaccgatacctcaccttcatggaagagagaggctctcctgtctcaagtctgcctgccgtgggcaagaagcccctggacctgttccgactctacgtctgcgtcaaagagatcgggggtttggcccaggttaataaaaacaagaagtggcgtgagctggcaaccaacctaaacgttggcacctcaagcagtgcagcgagctccctgaaaaagcagtatattcagtacctgtttgcctttgagtgcaagatcgaacgtggggaggagcccccgccggaagtcttcagcaccggggacaccaaaaagcagcccaagctccagccgccatctcctgtagtccagatggagccgagggcctgtgacacaggaggcagtggaaggaaagcctcctggtctcgtccagccccgagagcgcgtgcagggggctccaggcacacacaggcgtctgggggtcgcaggcagaggcaccctggtcttcagaagcctctcgattcactgccacccacacagcaggtggcctctccgattccagtcccatcattagggaaagtgtctggaaacatttttgttgttaaaggaaaataa

SEQ ID NO: 280784 - DNA, 8246 bp, Artificial Sequence
  derived and/or modified sequence
atggcccataacgcgggcgccgcggccgccgccggcacccacagcgccaagagcggcggctccgaggcggctctcaaggagggtggaagcgccgccgcgctgtcctcctcctcctcctcctccgcggcggcagcggcggcatcctcttcctcctcgtcgggcccgggctcggccatggagacggggctgctccccaaccacaaactgaaaaccgttggcgaagcccccgccgcgccgccccaccagcagcaccaccaccaccaccatgcccaccaccaccaccaccatgcccaccacctccaccaccaccacgcactacagcagcagctaaaccagttccagcagcagcagcagcagcagcaacagcagcagcagcagcagcagcaacagcaacatcccatttccaacaacaacagcttgggcggcgcgggcggcggcgcgcctcagcccggccccgacatggagcagccgcaacatggaggcgccaaggacagtgctgcgggcggccaggccgaccccccgggcccgccgctgctgagcaagccgggcgacgaggacgacgcgccgcccaagatgggggagccggcgggcggccgctacgagcacccgggcttgggcgccctgggcacgcagcagccgccggtcgccgtgcccgggggcggcggcggcccggcggccgtcccggagtttaataattactatggcagcgctgcccctgcgagcggcggccccggcggccgcgctgggccttgctttgatcaacatggcggacaacaaagccccgggatggggatgatgcactccgcctccgccgccgccgccggggcccccggcagcatggaccccctgcagaactcccacgaagggtaccccaacagccagtgcaaccattatccgggctacagccggcccggcgcgggcggcggcggcggcggcggcggcggaggaggaggaggcagcggaggaggaggaggaggaggaggagcaggagcaggaggagcaggagcgggagctgtggcggcggcggccgcggcggcggcggcagcagcaggaggcggcggcggcggcggctatgggggctcgtccgcggggtacggggtgctgagctccccccggcagcagggcggcggcatgatgatgggccccgggggcggcggggccgcgagcctcagcaaggcggccgccggctcggcggcggggggcttccagcgcttcgccggccagaaccagcacccgtcgggggccaccccgaccctcaatcagctgctcacctcgcccagccccatgatgcggagctacggcggcagctaccccgagtacagcagccccagcgcgccgccgccgccgccgtcgcagccccagtcccaggcggcggcggcgggggcggcggcgggcggccagcaggcggccgcgggcatgggcttgggcaaggacatgggcgcccagtacgccgctgccagcccggcctgggcggccgcgcaacaaaggagtcacccggcgatgagccccggcacccccggaccgaccatgggcagatcccagggcagcccaatggatccaatggtgatgaagagacctcagttgtatggcatgggcagtaaccctcattctcagcctcagcagagcagtccgtacccaggaggttcctatggccctccaggcccacagcggtatccaattggcatccagggtcggactcccggggccatggccggaatgcagtaccctcagcagcagatgccacctcagtatggacagcaaggtgtgagtggttactgccagcagggccaacagccatattacagccagcagccgcagcccccgcacctcccaccccaggcgcagtatctgccgtcccagtcccagcagaggtaccagccgcagcaggacatgtctcaggaaggctatggaactagatctcaacctcctctggcccccggaaaacctaaccatgaagacttgaacttaatacagcaagaaagaccatcaagtttaccagatctgtctggctccattgatgacctccccacgggaacggaagcaactttgagctcagcagtcagtgcatccgggtccacgagcagccaaggggatcagagcaacccggcgcagtcgcctttctccccacatgcgtcccctcatctctccagcatcccggggggcccatctccctctcctgttggctctcctgtaggaagcaaccagtctcgatctggcccaatctctcctgcaagtatcccaggtagtcagatgcctccgcagccacccgggagccagtcagaatccagttcccatcccgccttgagccagtcaccaatgccacaggaaagaggttttatggcaggcacacaaagaaaccctcagatggctcagtatggacctcaacagacaggaccatccatgtcgcctcatccttctcctgggggccagatgcatgctggaatcagtagctttcagcagagtaactcaagtgggacttacggtccacagatgagccagtatggaccacaaggtaactactccagacccccagcgtatagtggggtgcccagtgcaagctacagcggcccagggcccggtatgggtatcagtgccaacaaccagatgcatggacaagggccaagccagccatgtggtgctgtgcccctgggacgaatgccatcagctgggatgcagaacagaccatttcctggaaatatgagcagcatgacccccagttctcctggcatgtctcagcagggagggccaggaatggggccgccaatgccaactgtgaaccgtaaggcacaggaggcagccgcagcagtgatgcaggctgctgcgaactcagcacaaagcaggcaaggcagtttccccggcatgaaccagagtggacttatggcttccagctctccctacagccagcccatgaacaacagctctagcctgatgaacacgcaggcgccgccctacagcatggcgcccgccatggtgaacagctcggcagcatctgtgggtcttgcagatatgatgtctcctggtgaatccaaactgcccctgcctctcaaagcagacggcaaagaagaaggcactccacagcccgagagcaagtcaaaggatagctacagctctcagggtatttctcagcccccaaccccaggcaacctgccagtcccttccccaatgtcccccagctctgctagcatctcctcatttcatggagatgaaagtgatagcattagcagcccaggctggccaaagactccatcaagccctaagtccagctcctccaccactactggggagaagatcacgaaggtgtacgagctggggaatgagccagagagaaagctctgggtcgaccgatacctcaccttcatggaagagagaggctctcctgtctcaagtctgcctgccgtgggcaagaagcccctggacctgttccgactctacgtctgcgtcaaagagatcgggggtttggcccaggttaataaaaacaagaagtggcgtgagctggcaaccaacctaaacgttggcacctcaagcagtgcagcgagctccctgaaaaagcagtatattcagtacctgtttgcctttgagtgcaagatcgaacgtggggaggagcccccgccggaagtcttcagcaccggggacaccaaaaagcagcccaagctccagccgccatctcctgctaactcgggatccttgcaaggcccacagaccccccagtcaactggcagcaattccatggcagaggttccaggtgacctgaagccacctaccccagcctccacccctcacggccagatgactccaatgcaaggtggaagaagcagtacaatcagtgtgcacgacccattctcagatgtgagtgattcatccttcccgaaacggaactccatgactccaaacgccccctaccagcagggcatgagcatgcccgatgtgatgggcaggatgccctatgagcccaacaaggacccctttgggggaatgagaaaagtgcctggaagcagcgagccctttatgacgcaaggacagatgcccaacagcagcatgcaggacatgtacaaccaaagtccctccggagcaatgtctaacctgggcatggggcagcgccagcagtttccctatggagccagttacgaccgaaggcatgaaccttatgggcagcagtatccaggccaaggccctccctcgggacagccgccgtatggagggcaccagcccggcctgtacccacagcagccgaattacaaacgccatatggacggcatgtacgggcccccagccaagcgccacgagggcgacatgtacaacatgcagtacagcagccagcagcaggagatgtacaaccagtatggaggctcctactcgggcccggaccgcaggcccatccagggccagtacccgtatccctacagcagggagaggatgcagggcccggggcagatccagacacacggaatcccgcctcagatgatgggcggcccgctgcagtcgtcctccagtgaggggcctcagcagaatatgtgggcagcacgcaatgatatgccttatccctaccagaacaggcagggccctggcggccctacacaggcgcccccttacccaggcatgaaccgcacagacgatatgatggtacccgatcagaggataaatcatgagagccagtggccttctcacgtcagccagcgtcagccttatatgtcgtcctcagcctccatgcagcccatcacacgcccaccacagccgtcctaccagacgccaccgtcactgccaaatcacatctccagggcgcccagcccagcgtccttccagcgctccctggagaaccgcatgtctccaagcaagtctccttttctgccgtctatgaagatgcagaaggtcatgcccacggtccccacatcccaggtcaccgggccaccaccccaaccacccccaatcagaagggagatcacctttcctcctggctcagtagaagcatcacaaccagtcttgaaacaaaggcgaaagattacctccaaagatatcgttactcctgaggcgtggcgtgtgatgatgtcccttaaatcaggtcttttggctgagagtacgtgggctttggacactattaatattcttctgtatgatgacagcactgttgctactttcaatctctcccagttgtctggatttctcgaacttttagtcgagtactttagaaaatgcctgattgacatttttggaattcttatggaatatgaagtgggagaccccagccaaaaagcacttgatcacaacgcagcaaggaaggatgacagccagtccttggcagacgattctgggaaagaggaggaagatgctgaatgtattgatgacgacgaggaagacgaggaggatgaggaggaagacagcgagaagacagaaagcgatgaaaagagcagcatcgctctgactgccccggacgccgctgcagacccaaaggagaagcccaagcaagccagtaagttcgacaagctgccaataaagatagtcaaaaagaacaacctgtttgttgttgaccgatctgacaagttggggcgtgtgcaggagttcaatagtggccttctgcactggcagctcggcgggggtgacaccaccgagcacattcagactcactttgagagcaagatggaaattcctcctcgcaggcgcccacctccccccttaagctccgcaggtagaaagaaagagcaagaaggcaaaggcgactctgaagagcagcaagagaaaagcatcatagcaaccatcgatgacgtcctctctgctcggccaggggcattgcctgaagacgcaaaccctgggccccagaccgaaagcagtaagtttccctttggtatccagcaagccaaaagtcaccggaacatcaagctgctggaggacgagcccaggagccgagacgagactcctctgtgtaccatcgcgcactggcaggactcgctggctaagcgatgcatctgtgtgtccaatattgtccgtagcttgtcattcgtgcctggcaatgatgccgaaatgtccaaacatccaggcctggtgctgatcctggggaagctgattcttcttcaccacgagcatccagagagaaagcgagcaccgcagacctatgagaaagaggaggatgaggacaagggggtggcctgcagcaaagatgagtggtggtgggactgcctcgaggtcttgagggataacacgttggtcacgttggccaacatttccgggcagctagacttgtctgcttacacggaaagcatctgcttgccaattttggatggcttgctgcactggatggtgtgcccgtctgcagaggcacaagatccctttccaactgtgggacccaactcggtcctgtcgcctcagagacttgtgctggagaccctctgtaaactcagtatccaggacaataatgtggacctgatcttggccactcctccatttagtcgtcaggagaaattctatgctacattagttaggtacgttggggatcgcaaaaacccagtctgtcgagaaatgtccatggcgcttttatcgaaccttgcccaaggggacgcactagcagcaagggccatagctgtgcagaaaggaagcattggaaacttgataagcttcctagaggatggggtcacgatggcccagtaccagcagagccagcacaacctcatgcacatgcagcccccgcccctggaaccacctagcgtagacatgatgtgcagggcggccaaggctttgctagccatggccagagtggacgaaaaccgctcggaattccttttgcacgagggccggttgctggatatctcgatatcagctgtcctgaactctctggttgcatctgtcatctgtgatgtactgtttcagattgggcagttatgacataagtgagaaggcaagcatgtgtgagtgaagattagagggtcacatataactggctgttttctgttcttgtttatccagcgtaggaagaaggaaaagaaaatctttgctcctctgccccattcactatttaccaattgggaattaaagaaataattaatttgaacagttatgaaattaatatttgctgtctgtgtgtataagtacatcctttggggttttttttttctcttttttttaaccaaagttgctgtctagtgcattcaaaggtcactttttgttcttcacagatctttttaatgttctttcccatgttgtattgcatttttgggggaagcaaattgactttaaagaaaaaagttgtggcaaaagatgctaagatgcgaaaatttcaccacactgagtcaaaaaggtgaaaaattatccatttcctatgcgttttactcctcagagaatgaaaaaaactgcatcccatcacccaaagttctgtgcaatagaaatttctacagatacaggtataggggctcaaggaggtatgtcggtcagtagtcaaaactatgaaatgatactggtttctccacaggaatatggttccattaggctgggagcaaaaacaatgttttttaagattgagaatacatacctgacaacgatccggaaactgctcctcaccactcccgtcatgcctgctgtcggcgtttgaccttccacgtgacagttcttcacaattcctttcatcattttttaaatattttttttactgcctatgggctgtgatgtatatagaagttgtacattaaacataccctcatttttttcttttcttttttttttttttttttagtacaaagttttagtttctttttcatgatgtggtaactacgaagtgatggtagatttaaataattttttatttttattttatatattttttcattagggccatatctccaaaaaaagaaagaaaaaatacaaaaaacaaaaacaaaaaaaaaagagggtaatgtacaagtttctgtatgtataaagtcatgctcgatttcaggagagcagctgatcacaatttgcttcatgaatcaaggtgtggaaatggttatatatggattgatttagaaaatggttaccagtacagtcaaaaaagagaaaatgaaaaaaatacaactaaaaggaagaaacacaacttcaaagatttttcagtgatgagaatccacatttgtatttcaagataatgtagtttaaaaaaaaaaaaaagaaaaaaacttgatgtaaattcctccttttcctctggcttaatgaatatcatttattcagtataaaatctttatatgttccacatgttaagaataaatgtacattaaatcttgttaagcactgtg

SEQ ID NO: 280785 - DNA, 6696 bp, Artificial Sequence
  derived and/or modified sequence
atggaaaccggcctgttgcctaatcacaaattaaagacagtgggcgaagcccctgcggctcctcctcaccagcagcatcaccatcaccaccacgcccatcaccaccaccaccacgcccaccacctgcaccatcaccacgccctacaacagcaattgaaccagttccaacagcagcagcagcagcagcaacagcagcagcaacagcagcagcagcagcagcatccgatctccaataacaactccctggggggagcaggcggaggagctccacagcctggcccagacatggagcagccgcagcatggtggcgctaaggatagcgctgctggcggtcaggcggatccacccggtcccccactgctgtccaagcccggtgacgaggatgacgctcctcccaaaatgggagaacctgcagggggacgctacgagcatccgggactgggtgccttggggacccagcagccccctgtggccgttcctgggggtgggggaggcccagccgcagtgcctgagtttaacaactactatgggtccgccgctcccgcttctgggggaccaggcggaagagcaggaccttgcttcgaccagcatggaggacagcagtcacctggcatgggcatgatgcattcggcaagtgctgctgccgctggcgcacctgggtccatggatccactgcagaacagccacgagggctacccgaatagtcagtgtaatcactatcccggttattccaggcctggtgcgggaggcggaggcggaggcggagggggtggcggtggcggttccggtggcggagggggtggaggcggtgctggagctggcggtgccggagcaggtgccgtggccgctgccgctgctgccgcagccgctgctgctggagggggaggcggtgggggatacggaggctcatcggctggttacggagtcctctcctccccacgacaacaggggggagggatgatgatgggaccaggagggggtggggcagccagcttgtcaaaggccgcagccggaagcgccgctgggggattccaacgctttgccggacaaaaccagcatccgtcgggtgctaccccaacccttaaccagctgctgaccagccctagccctatgatgagatcctatggagggagttaccccgagtatagcagcccgtcggcccctcctccaccaccttcccaaccccaaagccaggccgctgccgctggtgccgcagccggaggccagcaggccgctgccggaatgggcctgggcaaggacatgggtgcgcaatatgctgctgccagtccggcatgggcagctgctcagcagcggtctcaccctgcaatgagccccggaactcctgggccaacaatgggccgaagtcaaggctcccctatggatcccatggtgatgaagaggccccaactgtacggaatgggatcgaaccctcatagccagccacagcagtctagcccctatccaggcggatcctacggcccaccaggtccgcaacggtacccaatcggtatccaaggtcgcacccccggtgcaatggccggtatgcagtatccccagcaacagatgccaccccaatacggccagcaaggggtatccggttactgccagcagggccagcaaccctattactctcagcagccacagccccctcatctcccccctcaggcccagtatctaccatctcagtcgcagcagcggtaccaacctcagcaggatatgtctcaagagggctacggcactcgaagtcagccgcctctggctcctggtaagcctaatcacgaggatcttaacctcatccaacaggagagacccagctccctgcctgacctgtctggctctattgatgatctccccactgggacggaggccactctgagctccgctgttagcgcttccggctcgacaagctcacaaggagaccagtcgaatcccgcacagagccctttctcacctcatgcctctccacatcttagtagcatccccggaggccctagcccaagtcctgtgggcagcccggtgggcagcaatcagtcacgtagcgggcctatcagtccagcatctatcccaggcagccagatgccgcctcagcctcctggttcccagtcagaatcctccagccacccagccctttcccaaagcccaatgcctcaagagagggggttcatggcgggaacccagagaaaccctcagatggctcaatatggacctcagcagacgggtcctagtatgagccctcacccttctcctggaggacagatgcatgctggcataagcagtttccaacagtctaatagtagcgggacatatggaccacaaatgagtcagtatggtccccaagggaattactctcgaccaccagcctacagcggggtgccttccgcctcttattctgggccagggcctggtatgggcatttcagccaataaccagatgcatggacaggggcctagccagccgtgtggggctgtgccgctaggaagaatgccaagcgccggaatgcagaaccgacccttccccggaaacatgtcatctatgacccccagtagccctggcatgtctcagcaaggaggacccggtatgggccctcctatgcctactgtgaacagaaaagcccaggaggctgctgcggctgttatgcaggctgctgctaactccgctcaatctaggcaggggagtttccccggtatgaaccagtccggcctgatggcaagctcgtctccatacagtcagcctatgaacaatagttcctcattgatgaacacacaggcccctccttactcgatggcccctgctatggtaaatagttccgccgctagcgtcgggctcgcagacatgatgtcccctggagaaagtaagctgcccttacccttaaaggcagacggaaaagaagaaggaacgccccagcccgagtctaaatccaaggactcgtactcatctcaaggtattagccaacctccaaccccagggaacctccctgtgccaagtcccatgagcccatctagcgcctcaatatcgagttttcatggggacgaaagcgatagtatatcaagtcctggatggcccaaaacaccaagtagccctaaaagctcaagctcgactacgaccggggagaaaatcactaaggtgtacgaactgggaaatgagcccgagcgtaaattgtgggtcgatcggtatctgacattcatggaggaaaggggttctcccgtgagttctttaccagccgttggtaaaaagcctctggatctgtttaggctctacgtatgtgtaaaggagattggaggattagcccaggtaaacaaaaacaaaaaatggagggaattagctaccaatctcaatgtgggaaccagctcatctgcagcttcatccctgaaaaagcagtatatccagtacttattcgcgttcgaatgcaagattgagaggggcgaagagcccccaccagaggtgttttctaccggcgatactaaaaaacagccgaaattgcagccaccgtccccagcaaacagcgggagtctgcaagggcctcagaccccccagagcaccggcagtaactcgatggccgaggttccgggtgatctgaagcctcccacacctgcttctacaccacacggacagatgacccctatgcagggcggaagatcctccaccatttccgttcatgacccttttagtgacgtctctgactcttccttcccgaaaagaaacagcatgaccccaaacgccccttatcaacaaggaatgagcatgccagacgttatggggcgaatgccctacgagcctaacaaggaccccttcggcggaatgcgcaaggtgccaggctcctcagagccatttatgacgcagggacagatgcctaatagcagcatgcaggacatgtataatcagtctccatcaggcgcaatgtccaacctgggcatggggcagagacagcagtttccgtatggcgcaagctacgatcgcagacatgaaccgtatgggcagcagtatcctggacagggcccaccaagcgggcagcccccatatggtggccaccagcctgggctttacccacagcaaccaaattacaagcgccacatggatggcatgtacggccctccggctaaaagacacgagggtgacatgtataacatgcagtactctagtcaacagcaggaaatgtataaccaatatgggggaagttattctggacccgatcgacggccaatccagggtcagtatccatacccttacagtagagagagaatgcagggccctggccaaattcagactcatggaattccccctcagatgatgggcggaccgcttcagtcaagtagttcggaaggacctcagcaaaacatgtgggccgcacgcaacgatatgccctacccttatcagaataggcagggtcctggcggaccaactcaggcaccgccttatcctggcatgaatagaacggatgacatgatggtgcctgaccagcgtatcaaccatgagtcacagtggccatctcatgtgagccagaggcagccttacatgtcctcctctgcttccatgcagccaattacacgacctcctcagccttcataccagaccccaccttccttgccaaaccacatcagcagggcaccatcacctgccagcttccaaagatcgctggaaaaccgaatgtcaccctctaagtctccgtttctgccgagcatgaaaatgcaaaaggttatgcctacagttcctacgtcacaagtgaccggtccaccgccacagccccctcccatccggagggaaatcacttttcctcctggaagcgttgaggctagccagccagttctgaagcagagaagaaaaattacaagtaaggatattgtgacaccggaggcctggagagtgatgatgagcctaaaatccggactgctcgctgaaagcacttgggctcttgacacaatcaatatactgttgtatgatgacagcacagtggctactttcaacctcagccagctgtccgggttcctggagcttctagtcgagtactttaggaaatgtctcatagatattttcggaatcctgatggagtacgaggtgggggacccatcccagaaggcactggaccacaatgctgccagaaaggatgactcccagagcctcgccgatgacagtgggaaagaagaggaggatgcagagtgcattgacgacgatgaagaggacgaggaggacgaggaagaggattccgagaaaacggaatccgacgaaaagagttccatcgccctgacagcccctgatgccgctgccgatcccaaggaaaagccaaaacaggcttccaaatttgacaagttgccaattaagattgtaaaaaagaataatttgtttgtggtcgatcggagcgacaagttgggacgcgtgcaggaattcaattcaggcctgttgcactggcaattaggcggtggcgacacgactgaacacatacagacccacttcgaaagtaaaatggagatcccacccaggcgcaggccccctccaccactgtccagcgctggtaggaaaaaggaacaggaggggaaaggtgacagcgaggagcagcaagaaaagtctataattgccacgattgacgacgtgctgagtgcacgacctggagcccttcccgaggatgccaacccaggtcctcagactgaatcctctaagttcccatttgggatccagcaggcaaagagccaccgaaatattaaattgctggaggacgaaccaaggagtagggacgaaacacccctctgcacgatagcccattggcaagattccctggctaagagatgtatctgtgtgagtaatatcgtgaggtccctgtccttcgtgcctggcaacgatgccgaaatgagtaagcacccaggcctggtcttaatactaggaaagctcatattactgcatcacgagcaccctgagcgcaagagggcgcctcagacatacgaaaaggaagaggacgaagataagggcgtcgcttgctctaaggatgagtggtggtgggattgcctggaggtgctccgagataacactctggtaacgctggctaacatctcaggccagttggacctgtctgcctacactgaaagtatttgcttgcccatcctggatggtctcttacattggatggtgtgtccctccgccgaggctcaggatcccttcccgacagtcggccctaacagtgtcttgagccctcagcggctggtgcttgagactctctgcaaattgagtatccaggataataatgtcgatctgattctcgctacacctcctttcagccgccaggagaagttctacgccacactggtgcgatacgtgggcgacagaaagaatccagtatgcagagaaatgtctatggcactgctctcgaatctcgcccaaggggacgcactcgccgcacgggctattgcagtgcagaaagggagcattggaaatctgatttcgttcctggaagacggcgtaacaatggcacagtatcagcagtctcaacacaacctgatgcacatgcagcccccaccactggaaccaccttctgttgacatgatgtgtagggccgctaaagccctactggcaatggccagagtggatgagaacaggtcagagttcctactccatgaaggccgactactggacattagcatctcggctgtgctgaactctctggtcgcaagtgtaatctgcgacgtgctgttccagattggtcagttatac

SEQ ID NO: 280786 - DNA, 2172 bp, Artificial Sequence
  derived and/or modified sequence
atgccaccccagtacggacagcagggcgtgtcgggttactgtcagcaaggccagcagccgtactattcacagcagcctcaaccaccccacctaccaccgcaagcacagtacctcccgtcccagtcccaacagagatatcagcctcaacaggatatgagccaggagggatatggtacccgttctcagccgccattagcacctggaaaacccaaccacgaggatctcaatctgatccagcaggaacggccaagcagtctgccagacctgtccggctccatagatgacttgcctaccggcactgaagcaaccctgagcagcgctgtctctgcatcaggctccacatcatcacaaggagatcagtccaatcctgctcaatcacctttcagcccgcacgctagtccacacctgtcatctatccccggaggcccaagcccctcgcccgtcggcagtcctgtgggctccaatcagagtcggagcggccctattagtcccgcttccattcccggatcacagatgcctcctcagccccctgggagccagtctgaatcaagttcccatccagctctcagccagagccccatgccgcaagaaagaggtacgcagcggaacccgcagatggcacagtacggcccacagcagactgggccatccatgtcaccacatcctagtccaggaggacagatgcacgctggaatcagtagttttcaacagtcaaatagcagcgggacctacggccctcagatgtcccagtacggccctcaaggcaattacagtagaccccctgcctatagcggagtccctagtgccagttacagcggccctgggcctggtatgggcatcagtgctaataatcaaatgcacgggcagggacctagtcagccttgtggggctgttccccttggacgcatgccctccgctggaatgcagaaccggccattccccggaaatatgtcttctatgactccttcatcaccaggcatgagccagcaggggggtcctggaatggggccacctatgcccaccgtcaataggaaggcccaagaggccgcagccgcagttatgcaggctgcggctaattccgcccagagtagacaggggtcatttcccggaatgaaccagagcgggttgatggcctccagttcaccttattctcagcccatgaacaacagttccagcctgatgaatacacaggcgcctccttatagcatggcccctgcaatggtcaactcctccgctgccagcgtgggtctggctgatatgatgtccccaggggagagtaaactgcctctcccactgaaggcagacgggaaggaggaagggacaccacagccagaatccaagagtaaagacagctattcctctcaggggatctcgcagccacctacacccggaaacctgccagtgccaagtcctatgtcaccttccagcgcgagcatctccagcttccacggagatgaatccgattccatctcctctccaggatggcctaagaccccatcttcgcctaagtcatcatcctccacaactacaggcgaaaagattacaaaggtatacgagctagggaatgagcccgagcgaaaactttgggtggatcgctacttgaccttcatggaggagaggggctctcccgtgtcttcgctgcccgcagtgggcaaaaaaccactggatcttttcaggctttatgtctgcgtgaaagaaatcggaggcctggcacaagtgaacaaaaataagaagtggagagagctggctaccaacctcaatgtgggaacctcctcgagtgcagcctctagcctcaagaagcagtatatacagtacctgtttgctttcgaatgtaagattgagagaggcgaagaacctccaccagaagttttttcaaccggggatacaaagaaacaacccaaacttcaacctccgtcacccgttgtgcaaatggagcccagggcctgtgacactggtgggagcggacgcaaggcaagctggagccgacctgccccacgggctagagcgggtgggtcacgccacacacaggcttccggcggaagaaggcagcgacacccaggtctccagaaaccgctcgacagtcttccgccaacacagcaggtggcttcacccatccctgtgccttcactcggaaaggttagcgggaatatcttcgtggttaaaggtaaatag

SEQ ID NO: 280787 - DNA, 6869 bp, Artificial Sequence
  derived and/or modified sequence
atggcccataatgccggagccgcagccgcagcgggtacgcattccgcaaaatcaggaggcagtgaggctgccctgaaagaagggggttcagccgcagcactgtccagttcaagctcctcctctgccgcagccgcagccgcttcatccagctcctcttctggccctggatccgctatggaaacgggtctgctgccaaaccacaaactcaagacagtgggcgaagccccagccgctcccccacaccagcagcatcatcatcaccaccacgcacaccaccaccaccatcatgcacaccacctgcatcaccaccatgctcttcaacagcaactcaatcaatttcagcagcagcagcaacagcaacagcagcagcagcagcaacagcaacagcagcagcaccctatttccaacaataactccctcgggggagctgggggaggagctccccagcccggaccagacatggagcagccccagcacgggggagcgaaggacagcgcagccggagggcaggctgacccccctggtcctcctctgctatctaagcccggagacgaggatgacgctccacctaaaatgggggaacccgctggaggcaggtatgagcatccaggcctgggcgctctcggcactcaacagccccctgtggctgtgccgggagggggaggtggcccagctgcagtgcccgaattcaacaactactacggctctgcagctccagcatcaggaggacccggaggtcgtgccggtccgtgctttgatcaacacggcggtcaacagagtccaggaatgggcatgatgcactcagcctccgcggctgccgcaggtgcgccagggtccatggaccccctgcagaattcccacgagggttatcccaactctcaatgcaatcattatccaggctattcgaggcctggggctggaggcggagggggaggaggcggaggcggaggaggtgggagtgggggaggaggcggtggaggcggtgccggagctgggggagcgggagccggagcagtggccgctgcggcagctgccgcagcggctgccgctgggggtgggggtggcggaggatacggaggatcatcagcgggttacggcgtcctcagctcacctcgccaacagggaggtgggatgatgatgggacctgggggaggaggtgcggcttcactgtcgaaggcagcagccggatctgctgcaggaggtttccagcgttttgcagggcagaaccagcacccctctggcgcaacccctacacttaatcaattgctgactagccctagccctatgatgagatcttacggtgggtcctacccagagtattcctcgccaagtgctcctcctccacccccatcccagcctcagtcacaggctgccgcagcgggtgccgcagccggtggccagcaagccgcagcaggcatggggctggggaaagatatgggagcacagtatgcagcagccagcccagcatgggcggcagcccagcagcgatcgcaccctgcaatgtcccccggaacaccaggaccaaccatggggcgatcccagggcagcccgatggacccaatggttatgaagagaccccagctgtacgggatggggagcaacccacactcccagccccagcaaagttctccctatcccggagggtcttacggaccccctggaccacagcgttacccgatcggcatccagggaagaacacccggagcgatggccggaatgcaataccctcagcagcagatgccaccgcagtacggtcagcaaggtgtcagtggttattgccagcagggccagcagccctactattcccagcagccccagcctccgcatctgccccctcaagcccagtacctgccatctcaatctcagcagagataccagcctcagcaagatatgtcgcaggagggatacggaactcggtcccaacctcccttggctcctgggaagccgaatcacgaagaccttaatctaatacagcaggaaaggccttctagtttaccggacctctcaggatcaatcgacgatcttcccacaggcactgaggcaaccctgagttctgccgtatcagcatccgggtcaacgtcatcgcagggcgatcagtcaaatccggctcagagcccctttagccctcacgcctcccctcatctgtcctccattcccggaggcccaagcccttccccagtgggctctcctgtcggctcgaatcagtcaagatcgggacctatctctcctgcatctatccccggttctcagatgccgccacaaccacctgggtcacaaagcgaaagcagttcgcatccagcgttgtcgcagagccctatgccccaagagcgaggctttatggcaggcactcagcggaatccccagatggcccagtatgggcctcagcaaacaggcccttctatgtcaccccacccctccccgggaggacagatgcatgcaggcatctcctcctttcagcaatctaattcaagcggtacgtatgggccacaaatgtcccagtacgggcctcagggtaattattccagacctcccgcatattccggcgtaccttcagcttcttattctggccctggccctgggatgggcatcagcgccaacaatcagatgcacggccaggggccttcccagccatgtggagctgtgcctttaggcaggatgcccagtgctggaatgcagaacaggccctttcccggaaatatgagctctatgacccccagctctccaggtatgtctcagcagggtggccctggaatgggaccgccaatgccaaccgttaataggaaggcacaggaagcagccgctgctgtgatgcaggccgctgccaactcagcccaatctcgacagggcagcttccctgggatgaaccagtccggcttaatggcatcttcctccccctattcccagcctatgaacaatagctcatcactcatgaacacccaggcaccgccatattctatggcccctgccatggtcaattcctccgcagcatccgtcggactagctgacatgatgagtcctggggagtcaaagctccccctgcccctgaaagcggatggcaaggaggagggcacccctcagcctgagtccaagtcaaaagacagttactccagtcagggaatctctcaaccaccaactccgggaaatctcccagttcctagcccaatgagccctagttctgcctcaatctcgtcttttcacggagatgagtcggattccatatcctctcccggatggccaaagactccaagttctccaaaatcatcatccagtaccacaacgggcgaaaaaattacgaaagtttacgagctgggaaatgaaccggagaggaagctctgggttgatcggtatctaactttcatggaggaaaggggtagccccgtaagctccctgcccgctgtgggcaaaaagcccctcgacttgtttaggctgtacgtctgcgtaaaagagattggcggtctggctcaggtgaacaagaataagaaatggcgcgaacttgccactaacctcaacgtgggcacaagttcttctgctgcgagcagccttaaaaagcagtatatccagtatctttttgcctttgaatgcaaaatcgagaggggggaggaaccaccgcctgaggtttttagcaccggagacaccaaaaagcaacctaagctgcagcctccctccccggctaattccgggtcgctacaggggcctcagactcctcagtctacaggatccaactctatggcagaggtgccgggagacttgaagccgcctacgccagcaagcacacctcacggtcaaatgacacccatgcagggtggtcggtccagcaccattagcgtgcacgaccctttcagcgatgtcagcgatagctcctttcccaaacgtaattcaatgactcccaacgctccttatcagcagggaatgtctatgcctgacgtgatgggtaggatgccttacgaaccaaacaaggaccctttcgggggaatgcggaaggtccctgggtctagcgaaccttttatgactcaggggcagatgcccaattcctcaatgcaggatatgtacaaccagtctccatccggagctatgtccaatctgggcatgggtcaaaggcagcaattcccctacggcgcatcttatgaccggagacacgagccgtatggacagcagtaccccggtcagggccctccctctggccagcctccgtatgggggacaccaaccagggctgtatccccagcagcccaattataaacgccacatggatggtatgtatgggccaccagccaaaagacacgagggagacatgtataacatgcagtacagtagccagcagcaggagatgtacaaccagtatggagggagctattccgggcctgatcgcaggcctatccagggacagtatccgtatccatactcccgggaacggatgcagggccctggccagatacagacccatggtattcctcctcagatgatgggaggccctctgcagagcagctcctcggagggaccacagcaaaatatgtgggctgcacgcaacgatatgccatatccttaccaaaacaggcaggggcctggcggtccaacccaagccccaccatatcctggaatgaatagaacggatgacatgatggttcccgaccaacgcattaaccatgagagccagtggccctcacatgtatcacagagacagccttacatgagtagttctgccagcatgcagcccatcaccaggccgccacagcccagttaccagacacctccaagcctgcctaatcacatctctagggcgcctagccctgcgtccttccagagatcgctggagaataggatgtcaccgtcaaagtccccctttctgccttccatgaaaatgcagaaagtcatgcctacagtgccgacgtcacaggttacaggccctccaccgcaacctcccccaattcggagagagatcacttttcctcccggatcagttgaggcaagtcagccagtgttgaagcagcggagaaaaataacttccaaagacattgtgactcccgaggcttggcgggtgatgatgtcactgaaaagcgggttgttggcagaatcaacttgggcgttggatacaattaacatcctcctctacgacgattcgaccgttgctacgttcaacttatcacagctgagcgggtttttggaattgcttgtggagtactttagaaagtgcctaattgacatcttcggcatcctgatggaatatgaagtaggagatcccagccagaaagccctggatcacaatgctgccaggaaggacgattcacagtcccttgctgatgactcaggaaaggaggaggaagatgcagagtgcatcgacgatgatgaggaggatgaggaagatgaggaggaagactctgagaagaccgagagcgatgaaaaatcttctatcgccctgacggccccagatgccgcagctgatcctaaggaaaagcccaagcaggcctctaagtttgacaaattgcctattaagattgtgaaaaaaaacaacctgttcgtggtggacaggtctgacaaattagggcgagtgcaggaattcaattctggcttgttgcactggcagctcggcggtggcgacacaaccgagcacatccagacacacttcgagtctaagatggagatcccaccccgacgtagacctccccctccactcagtagcgctggcagaaaaaaagaacaagaagggaagggggattccgaggagcaacaagaaaagtcgattatcgctacaatcgacgatgtattgtcagccagacctggcgctcttcctgaggacgctaaccctgggccacaaacagagtcatccaaattcccatttggcattcaacaagctaagtcacatcgtaatatcaagctcctcgaggatgagccccgttctagggatgagacacccctctgcactattgctcactggcaggactcattagcgaagcgatgtatatgcgtgtctaatatcgttcgctccctatcttttgtgccaggcaacgacgccgagatgagtaagcaccctgggctcgtattgattctgggtaaactcattctcttgcatcatgaacacccagagcgaaagagggctccacagacatacgaaaaagaggaagatgaggataagggtgtggcctgctccaaggatgagtggtggtgggactgtctcgaggtgctcagggataataccctagtgaccctcgccaatatctctggacaactcgacctgagcgcgtacacggagtctatttgcctgcccattctcgacggcctgctgcattggatggtctgtcccagtgccgaggctcaagacccgttccctaccgtaggacctaacagtgtattgtccccccaacggttggttcttgaaaccctctgtaagttgtctattcaggataacaacgtagatctcatactggccacccctcccttcagccgccaggagaagttttacgccactttggtccgctacgtgggcgatcgaaagaacccagtttgccgggaaatgagcatggctcttctgagcaaccttgctcagggtgacgctctggcagccagggccattgccgtgcagaaaggaagtatcggaaacctaatttcctttctggaggacggtgtcaccatggcccagtatcagcaatcgcaacataatttgatgcatatgcaaccacccccactggaacctccttctgtggatatgatgtgcagagctgctaaggcccttctagcgatggccagggtcgacgaaaatagatccgaatttttgcttcacgagggcagactgctcgacatttctattagtgccgttttaaattctttagttgcaagcgtgatctgtgacgtattattccaaattggccaacttta

SEQ ID NO: 280788 - DNA, 6696 bp, Artificial Sequence
  derived and/or modified sequence
atggagaccggcctgctgcccaaccacaagctgaagaccgtgggcgaggcccccgccgcccccccccaccagcagcaccaccaccaccaccacgcccaccaccaccaccaccacgcccaccacctgcaccaccaccacgccctgcagcagcagctgaaccagttccagcagcagcagcagcagcagcagcagcagcagcagcagcagcagcagcagcagcaccccatcagcaacaacaacagcctgggcggcgccggcggcggcgccccccagcccggccccgacatggagcagccccagcacggcggcgccaaggacagcgccgccggcggccaggccgacccccccggcccccccctgctgagcaagcccggcgacgaggacgacgccccccccaagatgggcgagcccgccggcggcagatacgagcaccccggcctgggcgccctgggcacccagcagccccccgtggccgtgcccggcggcggcggcggccccgccgccgtgcccgagttcaacaactactacggcagcgccgcccccgccagcggcggccccggcggcagagccggcccctgcttcgaccagcacggcggccagcagagccccggcatgggcatgatgcacagcgccagcgccgccgccgccggcgcccccggcagcatggaccccctgcagaacagccacgagggctaccccaacagccagtgcaaccactaccccggctacagcagacccggcgccggcggcggcggcggcggcggcggcggcggcggcggcggcagcggcggcggcggcggcggcggcggcgccggcgccggcggcgccggcgccggcgccgtggccgccgccgccgccgccgccgccgccgccgccggcggcggcggcggcggcggctacggcggcagcagcgccggctacggcgtgctgagcagccccagacagcagggcggcggcatgatgatgggccccggcggcggcggcgccgccagcctgagcaaggccgccgccggcagcgccgccggcggcttccagagattcgccggccagaaccagcaccccagcggcgccacccccaccctgaaccagctgctgaccagccccagccccatgatgagaagctacggcggcagctaccccgagtacagcagccccagcgcccccccccccccccccagccagccccagagccaggccgccgccgccggcgccgccgccggcggccagcaggccgccgccggcatgggcctgggcaaggacatgggcgcccagtacgccgccgccagccccgcctgggccgccgcccagcagagaagccaccccgccatgagccccggcacccccggccccaccatgggcagaagccagggcagccccatggaccccatggtgatgaagagaccccagctgtacggcatgggcagcaacccccacagccagccccagcagagcagcccctaccccggcggcagctacggcccccccggcccccagagataccccatcggcatccagggcagaacccccggcgccatggccggcatgcagtacccccagcagcagatgcccccccagtacggccagcagggcgtgagcggctactgccagcagggccagcagccctactacagccagcagccccagcccccccacctgcccccccaggcccagtacctgcccagccagagccagcagagataccagccccagcaggacatgagccaggagggctacggcaccagaagccagccccccctggcccccggcaagcccaaccacgaggacctgaacctgatccagcaggagagacccagcagcctgcccgacctgagcggcagcatcgacgacctgcccaccggcaccgaggccaccctgagcagcgccgtgagcgccagcggcagcaccagcagccagggcgaccagagcaaccccgcccagagccccttcagcccccacgccagcccccacctgagcagcatccccggcggccccagccccagccccgtgggcagccccgtgggcagcaaccagagcagaagcggccccatcagccccgccagcatccccggcagccagatgcccccccagccccccggcagccagagcgagagcagcagccaccccgccctgagccagagccccatgccccaggagagaggcttcatggccggcacccagagaaacccccagatggcccagtacggcccccagcagaccggccccagcatgagcccccaccccagccccggcggccagatgcacgccggcatcagcagcttccagcagagcaacagcagcggcacctacggcccccagatgagccagtacggcccccagggcaactacagcagaccccccgcctacagcggcgtgcccagcgccagctacagcggccccggccccggcatgggcatcagcgccaacaaccagatgcacggccagggccccagccagccctgcggcgccgtgcccctgggcagaatgcccagcgccggcatgcagaacagacccttccccggcaacatgagcagcatgacccccagcagccccggcatgagccagcagggcggccccggcatgggcccccccatgcccaccgtgaacagaaaggcccaggaggccgccgccgccgtgatgcaggccgccgccaacagcgcccagagcagacagggcagcttccccggcatgaaccagagcggcctgatggccagcagcagcccctacagccagcccatgaacaacagcagcagcctgatgaacacccaggcccccccctacagcatggcccccgccatggtgaacagcagcgccgccagcgtgggcctggccgacatgatgagccccggcgagagcaagctgcccctgcccctgaaggccgacggcaaggaggagggcaccccccagcccgagagcaagagcaaggacagctacagcagccagggcatcagccagccccccacccccggcaacctgcccgtgcccagccccatgagccccagcagcgccagcatcagcagcttccacggcgacgagagcgacagcatcagcagccccggctggcccaagacccccagcagccccaagagcagcagcagcaccaccaccggcgagaagatcaccaaggtgtacgagctgggcaacgagcccgagagaaagctgtgggtggacagatacctgaccttcatggaggagagaggcagccccgtgagcagcctgcccgccgtgggcaagaagcccctggacctgttcagactgtacgtgtgcgtgaaggagatcggcggcctggcccaggtgaacaagaacaagaagtggagagagctggccaccaacctgaacgtgggcaccagcagcagcgccgccagcagcctgaagaagcagtacatccagtacctgttcgccttcgagtgcaagatcgagagaggcgaggagcccccccccgaggtgttcagcaccggcgacaccaagaagcagcccaagctgcagccccccagccccgccaacagcggcagcctgcagggcccccagaccccccagagcaccggcagcaacagcatggccgaggtgcccggcgacctgaagccccccacccccgccagcaccccccacggccagatgacccccatgcagggcggcagaagcagcaccatcagcgtgcacgaccccttcagcgacgtgagcgacagcagcttccccaagagaaacagcatgacccccaacgccccctaccagcagggcatgagcatgcccgacgtgatgggcagaatgccctacgagcccaacaaggaccccttcggcggcatgagaaaggtgcccggcagcagcgagcccttcatgacccagggccagatgcccaacagcagcatgcaggacatgtacaaccagagccccagcggcgccatgagcaacctgggcatgggccagagacagcagttcccctacggcgccagctacgacagaagacacgagccctacggccagcagtaccccggccagggcccccccagcggccagcccccctacggcggccaccagcccggcctgtacccccagcagcccaactacaagagacacatggacggcatgtacggcccccccgccaagagacacgagggcgacatgtacaacatgcagtacagcagccagcagcaggagatgtacaaccagtacggcggcagctacagcggccccgacagaagacccatccagggccagtacccctacccctacagcagagagagaatgcagggccccggccagatccagacccacggcatccccccccagatgatgggcggccccctgcagagcagcagcagcgagggcccccagcagaacatgtgggccgccagaaacgacatgccctacccctaccagaacagacagggccccggcggccccacccaggcccccccctaccccggcatgaacagaaccgacgacatgatggtgcccgaccagagaatcaaccacgagagccagtggcccagccacgtgagccagagacagccctacatgagcagcagcgccagcatgcagcccatcaccagacccccccagcccagctaccagaccccccccagcctgcccaaccacatcagcagagcccccagccccgccagcttccagagaagcctggagaacagaatgagccccagcaagagccccttcctgcccagcatgaagatgcagaaggtgatgcccaccgtgcccaccagccaggtgaccggcccccccccccagcccccccccatcagaagagagatcaccttcccccccggcagcgtggaggccagccagcccgtgctgaagcagagaagaaagatcaccagcaaggacatcgtgacccccgaggcctggagagtgatgatgagcctgaagagcggcctgctggccgagagcacctgggccctggacaccatcaacatcctgctgtacgacgacagcaccgtggccaccttcaacctgagccagctgagcggcttcctggagctgctggtggagtacttcagaaagtgcctgatcgacatcttcggcatcctgatggagtacgaggtgggcgaccccagccagaaggccctggaccacaacgccgccagaaaggacgacagccagagcctggccgacgacagcggcaaggaggaggaggacgccgagtgcatcgacgacgacgaggaggacgaggaggacgaggaggaggacagcgagaagaccgagagcgacgagaagagcagcatcgccctgaccgcccccgacgccgccgccgaccccaaggagaagcccaagcaggccagcaagttcgacaagctgcccatcaagatcgtgaagaagaacaacctgttcgtggtggacagaagcgacaagctgggcagagtgcaggagttcaacagcggcctgctgcactggcagctgggcggcggcgacaccaccgagcacatccagacccacttcgagagcaagatggagatcccccccagaagaagaccccccccccccctgagcagcgccggcagaaagaaggagcaggagggcaagggcgacagcgaggagcagcaggagaagagcatcatcgccaccatcgacgacgtgctgagcgccagacccggcgccctgcccgaggacgccaaccccggcccccagaccgagagcagcaagttccccttcggcatccagcaggccaagagccacagaaacatcaagctgctggaggacgagcccagaagcagagacgagacccccctgtgcaccatcgcccactggcaggacagcctggccaagagatgcatctgcgtgagcaacatcgtgagaagcctgagcttcgtgcccggcaacgacgccgagatgagcaagcaccccggcctggtgctgatcctgggcaagctgatcctgctgcaccacgagcaccccgagagaaagagagccccccagacctacgagaaggaggaggacgaggacaagggcgtggcctgcagcaaggacgagtggtggtgggactgcctggaggtgctgagagacaacaccctggtgaccctggccaacatcagcggccagctggacctgagcgcctacaccgagagcatctgcctgcccatcctggacggcctgctgcactggatggtgtgccccagcgccgaggcccaggaccccttccccaccgtgggccccaacagcgtgctgagcccccagagactggtgctggagaccctgtgcaagctgagcatccaggacaacaacgtggacctgatcctggccaccccccccttcagcagacaggagaagttctacgccaccctggtgagatacgtgggcgacagaaagaaccccgtgtgcagagagatgagcatggccctgctgagcaacctggcccagggcgacgccctggccgccagagccatcgccgtgcagaagggcagcatcggcaacctgatcagcttcctggaggacggcgtgaccatggcccagtaccagcagagccagcacaacctgatgcacatgcagcccccccccctggagccccccagcgtggacatgatgtgcagagccgccaaggccctgctggccatggccagagtggacgagaacagaagcgagttcctgctgcacgagggcagactgctggacatcagcatcagcgccgtgctgaacagcctggtggccagcgtgatctgcgacgtgctgttccagatcggccagctgtag

SEQ ID NO: 280789 - DNA, 2172 bp, Artificial Sequence
  derived and/or modified sequence
atgcccccccagtacggccagcagggcgtgagcggctactgccagcagggccagcagccctactacagccagcagccccagcccccccacctgcccccccaggcccagtacctgcccagccagagccagcagagataccagccccagcaggacatgagccaggagggctacggcaccagaagccagccccccctggcccccggcaagcccaaccacgaggacctgaacctgatccagcaggagagacccagcagcctgcccgacctgagcggcagcatcgacgacctgcccaccggcaccgaggccaccctgagcagcgccgtgagcgccagcggcagcaccagcagccagggcgaccagagcaaccccgcccagagccccttcagcccccacgccagcccccacctgagcagcatccccggcggccccagccccagccccgtgggcagccccgtgggcagcaaccagagcagaagcggccccatcagccccgccagcatccccggcagccagatgcccccccagccccccggcagccagagcgagagcagcagccaccccgccctgagccagagccccatgccccaggagagaggcacccagagaaacccccagatggcccagtacggcccccagcagaccggccccagcatgagcccccaccccagccccggcggccagatgcacgccggcatcagcagcttccagcagagcaacagcagcggcacctacggcccccagatgagccagtacggcccccagggcaactacagcagaccccccgcctacagcggcgtgcccagcgccagctacagcggccccggccccggcatgggcatcagcgccaacaaccagatgcacggccagggccccagccagccctgcggcgccgtgcccctgggcagaatgcccagcgccggcatgcagaacagacccttccccggcaacatgagcagcatgacccccagcagccccggcatgagccagcagggcggccccggcatgggcccccccatgcccaccgtgaacagaaaggcccaggaggccgccgccgccgtgatgcaggccgccgccaacagcgcccagagcagacagggcagcttccccggcatgaaccagagcggcctgatggccagcagcagcccctacagccagcccatgaacaacagcagcagcctgatgaacacccaggcccccccctacagcatggcccccgccatggtgaacagcagcgccgccagcgtgggcctggccgacatgatgagccccggcgagagcaagctgcccctgcccctgaaggccgacggcaaggaggagggcaccccccagcccgagagcaagagcaaggacagctacagcagccagggcatcagccagccccccacccccggcaacctgcccgtgcccagccccatgagccccagcagcgccagcatcagcagcttccacggcgacgagagcgacagcatcagcagccccggctggcccaagacccccagcagccccaagagcagcagcagcaccaccaccggcgagaagatcaccaaggtgtacgagctgggcaacgagcccgagagaaagctgtgggtggacagatacctgaccttcatggaggagagaggcagccccgtgagcagcctgcccgccgtgggcaagaagcccctggacctgttcagactgtacgtgtgcgtgaaggagatcggcggcctggcccaggtgaacaagaacaagaagtggagagagctggccaccaacctgaacgtgggcaccagcagcagcgccgccagcagcctgaagaagcagtacatccagtacctgttcgccttcgagtgcaagatcgagagaggcgaggagcccccccccgaggtgttcagcaccggcgacaccaagaagcagcccaagctgcagccccccagccccgtggtgcagatggagcccagagcctgcgacaccggcggcagcggcagaaaggccagctggagcagacccgcccccagagccagagccggcggcagcagacacacccaggccagcggcggcagaagacagagacaccccggcctgcagaagcccctggacagcctgccccccacccagcaggtggccagccccatccccgtgcccagcctgggcaaggtgagcggcaacatcttcgtggtgaagggcaagtag

SEQ ID NO: 280790 - DNA, 6870 bp, Artificial Sequence
  derived and/or modified sequence
atggcccacaacgccggcgccgccgccgccgccggcacccacagcgccaagagcggcggcagcgaggccgccctgaaggagggcggcagcgccgccgccctgagcagcagcagcagcagcagcgccgccgccgccgccgccagcagcagcagcagcagcggccccggcagcgccatggagaccggcctgctgcccaaccacaagctgaagaccgtgggcgaggcccccgccgcccccccccaccagcagcaccaccaccaccaccacgcccaccaccaccaccaccacgcccaccacctgcaccaccaccacgccctgcagcagcagctgaaccagttccagcagcagcagcagcagcagcagcagcagcagcagcagcagcagcagcagcagcaccccatcagcaacaacaacagcctgggcggcgccggcggcggcgccccccagcccggccccgacatggagcagccccagcacggcggcgccaaggacagcgccgccggcggccaggccgacccccccggcccccccctgctgagcaagcccggcgacgaggacgacgccccccccaagatgggcgagcccgccggcggcagatacgagcaccccggcctgggcgccctgggcacccagcagccccccgtggccgtgcccggcggcggcggcggccccgccgccgtgcccgagttcaacaactactacggcagcgccgcccccgccagcggcggccccggcggcagagccggcccctgcttcgaccagcacggcggccagcagagccccggcatgggcatgatgcacagcgccagcgccgccgccgccggcgcccccggcagcatggaccccctgcagaacagccacgagggctaccccaacagccagtgcaaccactaccccggctacagcagacccggcgccggcggcggcggcggcggcggcggcggcggcggcggcggcagcggcggcggcggcggcggcggcggcgccggcgccggcggcgccggcgccggcgccgtggccgccgccgccgccgccgccgccgccgccgccggcggcggcggcggcggcggctacggcggcagcagcgccggctacggcgtgctgagcagccccagacagcagggcggcggcatgatgatgggccccggcggcggcggcgccgccagcctgagcaaggccgccgccggcagcgccgccggcggcttccagagattcgccggccagaaccagcaccccagcggcgccacccccaccctgaaccagctgctgaccagccccagccccatgatgagaagctacggcggcagctaccccgagtacagcagccccagcgcccccccccccccccccagccagccccagagccaggccgccgccgccggcgccgccgccggcggccagcaggccgccgccggcatgggcctgggcaaggacatgggcgcccagtacgccgccgccagccccgcctgggccgccgcccagcagagaagccaccccgccatgagccccggcacccccggccccaccatgggcagaagccagggcagccccatggaccccatggtgatgaagagaccccagctgtacggcatgggcagcaacccccacagccagccccagcagagcagcccctaccccggcggcagctacggcccccccggcccccagagataccccatcggcatccagggcagaacccccggcgccatggccggcatgcagtacccccagcagcagatgcccccccagtacggccagcagggcgtgagcggctactgccagcagggccagcagccctactacagccagcagccccagcccccccacctgcccccccaggcccagtacctgcccagccagagccagcagagataccagccccagcaggacatgagccaggagggctacggcaccagaagccagccccccctggcccccggcaagcccaaccacgaggacctgaacctgatccagcaggagagacccagcagcctgcccgacctgagcggcagcatcgacgacctgcccaccggcaccgaggccaccctgagcagcgccgtgagcgccagcggcagcaccagcagccagggcgaccagagcaaccccgcccagagccccttcagcccccacgccagcccccacctgagcagcatccccggcggccccagccccagccccgtgggcagccccgtgggcagcaaccagagcagaagcggccccatcagccccgccagcatccccggcagccagatgcccccccagccccccggcagccagagcgagagcagcagccaccccgccctgagccagagccccatgccccaggagagaggcttcatggccggcacccagagaaacccccagatggcccagtacggcccccagcagaccggccccagcatgagcccccaccccagccccggcggccagatgcacgccggcatcagcagcttccagcagagcaacagcagcggcacctacggcccccagatgagccagtacggcccccagggcaactacagcagaccccccgcctacagcggcgtgcccagcgccagctacagcggccccggccccggcatgggcatcagcgccaacaaccagatgcacggccagggccccagccagccctgcggcgccgtgcccctgggcagaatgcccagcgccggcatgcagaacagacccttccccggcaacatgagcagcatgacccccagcagccccggcatgagccagcagggcggccccggcatgggcccccccatgcccaccgtgaacagaaaggcccaggaggccgccgccgccgtgatgcaggccgccgccaacagcgcccagagcagacagggcagcttccccggcatgaaccagagcggcctgatggccagcagcagcccctacagccagcccatgaacaacagcagcagcctgatgaacacccaggcccccccctacagcatggcccccgccatggtgaacagcagcgccgccagcgtgggcctggccgacatgatgagccccggcgagagcaagctgcccctgcccctgaaggccgacggcaaggaggagggcaccccccagcccgagagcaagagcaaggacagctacagcagccagggcatcagccagccccccacccccggcaacctgcccgtgcccagccccatgagccccagcagcgccagcatcagcagcttccacggcgacgagagcgacagcatcagcagccccggctggcccaagacccccagcagccccaagagcagcagcagcaccaccaccggcgagaagatcaccaaggtgtacgagctgggcaacgagcccgagagaaagctgtgggtggacagatacctgaccttcatggaggagagaggcagccccgtgagcagcctgcccgccgtgggcaagaagcccctggacctgttcagactgtacgtgtgcgtgaaggagatcggcggcctggcccaggtgaacaagaacaagaagtggagagagctggccaccaacctgaacgtgggcaccagcagcagcgccgccagcagcctgaagaagcagtacatccagtacctgttcgccttcgagtgcaagatcgagagaggcgaggagcccccccccgaggtgttcagcaccggcgacaccaagaagcagcccaagctgcagccccccagccccgccaacagcggcagcctgcagggcccccagaccccccagagcaccggcagcaacagcatggccgaggtgcccggcgacctgaagccccccacccccgccagcaccccccacggccagatgacccccatgcagggcggcagaagcagcaccatcagcgtgcacgaccccttcagcgacgtgagcgacagcagcttccccaagagaaacagcatgacccccaacgccccctaccagcagggcatgagcatgcccgacgtgatgggcagaatgccctacgagcccaacaaggaccccttcggcggcatgagaaaggtgcccggcagcagcgagcccttcatgacccagggccagatgcccaacagcagcatgcaggacatgtacaaccagagccccagcggcgccatgagcaacctgggcatgggccagagacagcagttcccctacggcgccagctacgacagaagacacgagccctacggccagcagtaccccggccagggcccccccagcggccagcccccctacggcggccaccagcccggcctgtacccccagcagcccaactacaagagacacatggacggcatgtacggcccccccgccaagagacacgagggcgacatgtacaacatgcagtacagcagccagcagcaggagatgtacaaccagtacggcggcagctacagcggccccgacagaagacccatccagggccagtacccctacccctacagcagagagagaatgcagggccccggccagatccagacccacggcatccccccccagatgatgggcggccccctgcagagcagcagcagcgagggcccccagcagaacatgtgggccgccagaaacgacatgccctacccctaccagaacagacagggccccggcggccccacccaggcccccccctaccccggcatgaacagaaccgacgacatgatggtgcccgaccagagaatcaaccacgagagccagtggcccagccacgtgagccagagacagccctacatgagcagcagcgccagcatgcagcccatcaccagacccccccagcccagctaccagaccccccccagcctgcccaaccacatcagcagagcccccagccccgccagcttccagagaagcctggagaacagaatgagccccagcaagagccccttcctgcccagcatgaagatgcagaaggtgatgcccaccgtgcccaccagccaggtgaccggcccccccccccagcccccccccatcagaagagagatcaccttcccccccggcagcgtggaggccagccagcccgtgctgaagcagagaagaaagatcaccagcaaggacatcgtgacccccgaggcctggagagtgatgatgagcctgaagagcggcctgctggccgagagcacctgggccctggacaccatcaacatcctgctgtacgacgacagcaccgtggccaccttcaacctgagccagctgagcggcttcctggagctgctggtggagtacttcagaaagtgcctgatcgacatcttcggcatcctgatggagtacgaggtgggcgaccccagccagaaggccctggaccacaacgccgccagaaaggacgacagccagagcctggccgacgacagcggcaaggaggaggaggacgccgagtgcatcgacgacgacgaggaggacgaggaggacgaggaggaggacagcgagaagaccgagagcgacgagaagagcagcatcgccctgaccgcccccgacgccgccgccgaccccaaggagaagcccaagcaggccagcaagttcgacaagctgcccatcaagatcgtgaagaagaacaacctgttcgtggtggacagaagcgacaagctgggcagagtgcaggagttcaacagcggcctgctgcactggcagctgggcggcggcgacaccaccgagcacatccagacccacttcgagagcaagatggagatcccccccagaagaagaccccccccccccctgagcagcgccggcagaaagaaggagcaggagggcaagggcgacagcgaggagcagcaggagaagagcatcatcgccaccatcgacgacgtgctgagcgccagacccggcgccctgcccgaggacgccaaccccggcccccagaccgagagcagcaagttccccttcggcatccagcaggccaagagccacagaaacatcaagctgctggaggacgagcccagaagcagagacgagacccccctgtgcaccatcgcccactggcaggacagcctggccaagagatgcatctgcgtgagcaacatcgtgagaagcctgagcttcgtgcccggcaacgacgccgagatgagcaagcaccccggcctggtgctgatcctgggcaagctgatcctgctgcaccacgagcaccccgagagaaagagagccccccagacctacgagaaggaggaggacgaggacaagggcgtggcctgcagcaaggacgagtggtggtgggactgcctggaggtgctgagagacaacaccctggtgaccctggccaacatcagcggccagctggacctgagcgcctacaccgagagcatctgcctgcccatcctggacggcctgctgcactggatggtgtgccccagcgccgaggcccaggaccccttccccaccgtgggccccaacagcgtgctgagcccccagagactggtgctggagaccctgtgcaagctgagcatccaggacaacaacgtggacctgatcctggccaccccccccttcagcagacaggagaagttctacgccaccctggtgagatacgtgggcgacagaaagaaccccgtgtgcagagagatgagcatggccctgctgagcaacctggcccagggcgacgccctggccgccagagccatcgccgtgcagaagggcagcatcggcaacctgatcagcttcctggaggacggcgtgaccatggcccagtaccagcagagccagcacaacctgatgcacatgcagcccccccccctggagccccccagcgtggacatgatgtgcagagccgccaaggccctgctggccatggccagagtggacgagaacagaagcgagttcctgctgcacgagggcagactgctggacatcagcatcagcgccgtgctgaacagcctggtggccagcgtgatctgcgacgtgctgttccagatcggccagctgtag

SEQ ID NO: 280791 - protein, 171 aa, Artificial Sequence
  derived and/or modified sequence
MPIAQLLELWKKIEVEPMEIETTEEDLNLDVEPTTEDTAEEGKSDSAACKTKVAGSVEEEGVVKEIDISHHVKEGFEKADPSQFELLKVLGQGSYGKVFLVRKVKGSDAGQLYAMKVLKKATLKVRDRVRSKMERDILAEVNHPFIVKLHYAFQTEGKLYLILDFLRGGDL

SEQ ID NO: 280792 - protein, 758 aa, Artificial Sequence
  derived and/or modified sequence
MPIAQLLELWKKIEVEPMEIETTEEDLNLDVEPTTEDTAEEGKSDSAACKTKVAGSVEEEGVVKEIDISHHVKEGFEKADPSQFELLKVLGQGSYGKVFLVRKVKGSDAGQLYAMKVLKKATLKVRDRVRSKMERDILAEVNHPFIVKLHYAFQTEGKLYLILDFLRGGDLFTRLSKEVMFTEEDVKFYLAELALALDHLHSLGIIYRDLKPENILLDEEGHIKITDFGLSKEAIDHDKRAYSFCGTIEYMAPEVVNRRGHTQSADWWSFGVLMFEMLTGSLPFQGKDRKETMALILKAKLGMPQFLSGEAQSLLRALFKRNPCNRLGAGIDGVEEIKRHPFFVTIDWNTLYRKEIKPPFKPAVGRPEDTFHFDPEFTARTPTDSPGVPPSANAHHLFRGFSFVASSLIQEPSQQDLHKVPVHPIVQQLHGNNIHFTDGYEIKEDIGVGSYSVCKRCVHKATDTEYAVKIIDKSKRDPSEEIEILLRYGQHPNIITLKDVYDDGKFVYLVMELMRGGELLDRILRQRYFSEREASDVLCTITKTMDYLHSQGVVHRDLKPSNILYRDESGSPESIRVCDFGFAKQLRAGNGLLMTPCYTANFVAPEVLKRQGYDAACDIWSLGILLYTMLAGFTPFANGPDDTPEEILARIGSGKYALSGGNWDSISDAAKDVVSKMLHVDPHQRLTAMQVLKHPWVVNREYLSPNQLSRQDVHLVKGAMAATYFALNRTPQAPRLEPVLSSNLAQRRGMKRLTSTRL

SEQ ID NO: 280793 - DNA, 516 bp, Artificial Sequence
  derived and/or modified sequence
atgcccatcgcccagctgctggagctgtggaagaagatcgaggtggagcccatggagatcgagaccaccgaggaggacctgaacctggacgtggagcccaccaccgaggacaccgccgaggagggcaagagcgacagcgccgcctgcaagaccaaggtggccggcagcgtggaggaggagggcgtggtgaaggagatcgacatcagccaccacgtgaaggagggcttcgagaaggccgaccccagccagttcgagctgctgaaggtgctgggccagggcagctacggcaaggtgttcctggtgagaaaggtgaagggcagcgacgccggccagctgtacgccatgaaggtgctgaagaaggccaccctgaaggtgagagacagagtgagaagcaagatggagagagacatcctggccgaggtgaaccaccccttcatcgtgaagctgcactacgccttccagaccgagggcaagctgtacctgatcctggacttcctgagaggcggcgacctgtag

SEQ ID NO: 280794 - DNA, 2277 bp, Artificial Sequence
  derived and/or modified sequence
atgcccatcgcccagctgctggagctgtggaagaagatcgaggtggagcccatggagatcgagaccaccgaggaggacctgaacctggacgtggagcccaccaccgaggacaccgccgaggagggcaagagcgacagcgccgcctgcaagaccaaggtggccggcagcgtggaggaggagggcgtggtgaaggagatcgacatcagccaccacgtgaaggagggcttcgagaaggccgaccccagccagttcgagctgctgaaggtgctgggccagggcagctacggcaaggtgttcctggtgagaaaggtgaagggcagcgacgccggccagctgtacgccatgaaggtgctgaagaaggccaccctgaaggtgagagacagagtgagaagcaagatggagagagacatcctggccgaggtgaaccaccccttcatcgtgaagctgcactacgccttccagaccgagggcaagctgtacctgatcctggacttcctgagaggcggcgacctgttcaccagactgagcaaggaggtgatgttcaccgaggaggacgtgaagttctacctggccgagctggccctggccctggaccacctgcacagcctgggcatcatctacagagacctgaagcccgagaacatcctgctggacgaggagggccacatcaagatcaccgacttcggcctgagcaaggaggccatcgaccacgacaagagagcctacagcttctgcggcaccatcgagtacatggcccccgaggtggtgaacagaagaggccacacccagagcgccgactggtggagcttcggcgtgctgatgttcgagatgctgaccggcagcctgcccttccagggcaaggacagaaaggagaccatggccctgatcctgaaggccaagctgggcatgccccagttcctgagcggcgaggcccagagcctgctgagagccctgttcaagagaaacccctgcaacagactgggcgccggcatcgacggcgtggaggagatcaagagacaccccttcttcgtgaccatcgactggaacaccctgtacagaaaggagatcaagccccccttcaagcccgccgtgggcagacccgaggacaccttccacttcgaccccgagttcaccgccagaacccccaccgacagccccggcgtgccccccagcgccaacgcccaccacctgttcagaggcttcagcttcgtggccagcagcctgatccaggagcccagccagcaggacctgcacaaggtgcccgtgcaccccatcgtgcagcagctgcacggcaacaacatccacttcaccgacggctacgagatcaaggaggacatcggcgtgggcagctacagcgtgtgcaagagatgcgtgcacaaggccaccgacaccgagtacgccgtgaagatcatcgacaagagcaagagagaccccagcgaggagatcgagatcctgctgagatacggccagcaccccaacatcatcaccctgaaggacgtgtacgacgacggcaagttcgtgtacctggtgatggagctgatgagaggcggcgagctgctggacagaatcctgagacagagatacttcagcgagagagaggccagcgacgtgctgtgcaccatcaccaagaccatggactacctgcacagccagggcgtggtgcacagagacctgaagcccagcaacatcctgtacagagacgagagcggcagccccgagagcatcagagtgtgcgacttcggcttcgccaagcagctgagagccggcaacggcctgctgatgaccccctgctacaccgccaacttcgtggcccccgaggtgctgaagagacagggctacgacgccgcctgcgacatctggagcctgggcatcctgctgtacaccatgctggccggcttcacccccttcgccaacggccccgacgacacccccgaggagatcctggccagaatcggcagcggcaagtacgccctgagcggcggcaactgggacagcatcagcgacgccgccaaggacgtggtgagcaagatgctgcacgtggacccccaccagagactgaccgccatgcaggtgctgaagcacccctgggtggtgaacagagagtacctgagccccaaccagctgagcagacaggacgtgcacctggtgaagggcgccatggccgccacctacttcgccctgaacagaaccccccaggcccccagactggagcccgtgctgagcagcaacctggcccagagaagaggcatgaagagactgaccagcaccagactgtag

SEQ ID NO: 280795 - DNA, 516 bp, Artificial Sequence
  derived and/or modified sequence
atgccgattgctcaattgctggaactgtggaagaagatagaagtggaaccgatggagatcgaaactacagaggaggacctgaatctcgacgtggagcccactaccgaagatacagcagaggagggaaaatccgacagtgccgcctgcaaaacaaaggttgctgggagcgtggaggaggaaggggtggttaaagagattgatatatcacaccacgttaaggaggggttcgaaaaggctgaccctagccagttcgagctacttaaggtgttaggtcaaggcagttacgggaaggttttccttgtaagaaaggttaagggctctgatgccggccagctgtacgcgatgaaggtgttaaaaaaggccacactgaaggtacgtgatagagttagaagcaaaatggagagggatattttagccgaggtgaatcacccgttcatcgttaaactgcactatgccttccagacagagggcaagctgtacctcatcctggacttcttgagagggggagacctgtag

SEQ ID NO: 280796 - DNA, 2277 bp, Artificial Sequence
  derived and/or modified sequence
atgcccattgctcagctcctggagttgtggaagaagatcgaggtggaacctatggaaattgaaaccaccgaggaagatctgaacctggacgttgagcctacgacagaggatacagcagaggagggtaaatcggacagcgcagcctgtaaaacaaaagtggctggatcagtggaggaggagggggttgtcaaagagatagatataagccaccacgttaaagagggctttgaaaaggccgatcctagtcagttcgagttactgaaagtgctggggcaaggatcttatggaaaggtctttttagtacgaaaggtaaaaggatctgacgccggacagctttatgctatgaaagttctgaagaaagccactctgaaagtcagagacagagttcggagtaaaatggaaagggacatcctggcggaagttaaccacccattcatcgtgaagctccactacgctttccagactgaaggcaaactgtatctcatcttagactttctgcgggggggcgatctattcacacggctgtccaaagaggtgatgttcaccgaagaggacgttaaattctatctggcggagctcgccctagcgctggaccacctgcactcactgggaattatctacagagacctgaagccagagaatatccttttggatgaggaagggcacattaaaatcacagattttggactttcaaaagaggccattgaccacgacaagcgagcatattcattttgtgggaccatcgagtatatggctcctgaagtggttaatagacgtggacacactcagtcagccgactggtggagtttcggcgttctgatgttcgagatgctgacggggagtctcccttttcaaggaaaggacaggaaagagaccatggccctcatactcaaagcaaaactgggcatgccacagttcttgagcggcgaagctcaatccctgctgagggcactcttcaaaagaaatccctgcaaccgattgggagcaggcatagatggggtcgaagagatcaagcgccacccttttttcgtgacaatagattggaatactctctaccgaaaggaaatcaagccccctttcaaaccagcagtaggacgccctgaagatacctttcatttcgatccagaatttacagctaggaccccaactgactcacctggcgtaccccccagtgctaatgctcaccatcttttccgaggattctcctttgtggcctccagcctgattcaggaaccatcacagcaggacctgcacaaagtccctgttcatcccattgtccaacagctgcacggaaataatattcactttactgacggctacgaaatcaaggaggatattggcgtgggtagttatagcgtgtgtaaacgctgtgtgcataaagcgacagacactgagtacgccgttaagattatcgataaatctaagagggacccttcagaagagattgagatcttgctacgctatggccagcaccctaacattatcaccttgaaggatgtgtatgatgatggtaaatttgtatatctggtaatggagctgatgagaggaggagaactgctggaccgaattctccgacagcgatatttcagcgagagagaagcaagtgatgtgttatgcacgattaccaagaccatggattatttgcactcccagggtgttgtgcaccgcgatttgaaaccctccaatatcctgtacagggacgagtctggatcccctgaatctataagggtgtgtgacttcggattcgccaaacaacttcgtgccggaaacggtctgctgatgaccccttgttatactgccaattttgtggcccctgaggtcctgaagagacaggggtatgatgccgcttgcgacatttggagtctcggtatcctgttgtataccatgctggcagggttcaccccctttgctaatggtccggacgacacgcctgaggaaatcttggctcgcatcggttctggcaaatacgccctctccggagggaactgggactcaatttcagatgcagctaaggatgttgtgagcaaaatgctgcatgtcgacccacaccagcgcctgacagccatgcaggtgctcaaacatccatgggtcgtaaatcgggaatacctctctccaaatcagctctcccgccaggacgtccatttagtaaaaggcgctatggccgcaacatatttcgccctcaatagaaccccccaggccccccggctggagccagtgctgagtagcaatctcgcacagagaagaggaatgaaacggctgactagcaccagactgtag

SEQ ID NO: 280797 - DNA, 516 bp, Artificial Sequence
  derived and/or modified sequence
atgcccatcgcccagctgctggagctgtggaagaagattgaggtggagcccatggagattgagaccacagaggaggacctgaacctggatgtggagcccaccacagaggacacagctgaggagggcaagagtgacagcgctgcctgcaagaccaaggtggccggctctgtggaggaggagggcgtggtgaaggagattgacatcagccaccacgtgaaggagggctttgagaaggctgaccccagccagtttgagctgctgaaggtgctgggccagggcagctatggcaaggtgttcctggtgaggaaggtgaagggcagtgatgctggccagctgtatgccatgaaggtgctgaagaaggccaccctgaaggtgcgggacagagtgcgcagcaagatggagcgggacatcctggccgaggtgaaccaccccttcatcgtgaagctgcactacgccttccagacagagggcaagctgtacctgatcctggacttcctgcggggcggggacctgtag

SEQ ID NO: 280798 - DNA, 2277 bp, Artificial Sequence
  derived and/or modified sequence
atgcccatcgcccagctgctggagctgtggaagaagattgaggtggagcccatggagattgagaccacagaggaggacctgaacctggatgtggagcccaccacagaggacacagctgaggagggcaagagtgacagcgctgcctgcaagaccaaggtggccggctctgtggaggaggagggcgtggtgaaggagattgacatcagccaccacgtgaaggagggctttgagaaggctgaccccagccagtttgagctgctgaaggtgctgggccagggcagctatggcaaggtgttcctggtgaggaaggtgaagggcagtgatgctggccagctgtatgccatgaaggtgctgaagaaggccaccctgaaggtgcgggacagagtgcgcagcaagatggagcgggacatcctggccgaggtgaaccaccccttcatcgtgaagctgcactacgccttccagacagagggcaagctgtacctgatcctggacttcctgcggggcggggacctcttcacccggctgagcaaggaggtgatgttcacagaggaggatgtgaagttctacctggccgagctggccctggccctggaccacctgcacagcctgggcatcatctacagagacctgaagccagagaacatcctgctggatgaggagggccacatcaagatcacagactttggcctgagcaaggaggccatcgaccatgacaagagggcctacagcttctgtggcaccatcgagtacatggcccctgaggtggtgaacagaagaggccacacccagagcgctgactggtggagctttggagtgctgatgtttgagatgctgaccggcagcctgcccttccagggcaaggacaggaaggagaccatggccctgatcctgaaggccaagctgggcatgccccagttcctgagcggggaggcccagagcctgctgcgggccctcttcaagaggaacccctgcaaccggctgggcgccggcattgatggagtggaggagatcaagaggcaccccttctttgtgaccatcgactggaacaccctgtacaggaaggagatcaagccacccttcaagccagctgtgggccggcctgaggacaccttccactttgatcctgagttcaccgcccggacccccacagacagccctggggtgcccccatctgccaatgcccaccacctgttccggggcttctcctttgtggccagcagcctcatccaggagcccagccagcaggacctgcacaaggtgcctgtgcaccccatcgtgcagcagctgcacggcaacaacatccacttcacagatggctatgagatcaaggaggacatcggcgtgggcagctacagcgtgtgcaagagatgtgtgcacaaggccacagacacagaatatgctgtgaagatcatcgacaagagcaagagggaccccagcgaggagattgagatcctgctgcgctatggccagcaccccaacatcatcaccctgaaggatgtgtatgatgatggcaagtttgtgtacctggtgatggagctgatgaggggcggggagctgctggaccgcatcctgcggcagcgctacttcagcgagcgggaggccagtgatgtgctgtgcaccatcaccaagaccatggactacctgcacagccagggcgtggtgcaccgggacctgaagcccagcaacatcctgtacagagatgaaagtggcagccctgagagcatccgggtgtgtgactttggatttgccaagcagctgcgggctggaaatggcctgctgatgaccccctgctacacagccaactttgtggcccctgaggtgctgaagaggcagggctatgatgctgcctgtgacatctggagcctgggcatcctgctgtacaccatgctggccggcttcaccccatttgccaacggcccagatgacaccccagaggagatcctggccagaattggcagcggcaagtatgccctgagcggcggcaactgggacagcatcagtgatgctgccaaggatgtggtgtccaagatgctgcacgtggacccccaccagaggctgacagccatgcaggtgctgaagcacccctgggtggtgaaccgggagtacctgagccccaaccagctgagccggcaggatgtgcacctggtgaagggggccatggccgccacctactttgccctgaacagaacaccccaggccccccggctggagcctgtgctgagcagcaacctggcccagaggcggggcatgaagaggctgaccagcacccggctgtag

SEQ ID NO: 280799 - DNA, 516 bp, Artificial Sequence
  derived and/or modified sequence
atgcccatcgcccagctgctggagctgtggaagaagatcgaggtggagcccatggagattgaaaccacagaagaggacctgaaccttgatgtagaacccacaaccgaagacaccgcggaggaagggaaatccgattccgcggcctgcaagacaaaggtagccggctcggtggaagaggagggagtcgttaaggagatcgatataagccaccacgtgaaggaaggctttgagaaagctgatccttcgcaattcgagctcttaaaggttctggggcaagggtcatacggtaaagtattcctcgtgcgcaaggttaagggctctgatgccgggcaactgtacgcaatgaaagttctgaagaaggccaccctgaaagtccgagatcgcgttcgctccaaaatggagcgggatattctggcagaggtaaaccatcccttcatagtcaagctacattacgccttccaaaccgaaggaaaactataccttatcctggactttctccgtggcggtgacctttag

SEQ ID NO: 280800 - DNA, 2277 bp, Artificial Sequence
  derived and/or modified sequence
atgcccatcgcccagctgctggagctgtggaagaagatcgaggtggagcccatggagattgaaactactgaggaggacctgaatctggatgtggagccaaccacggaggatacagctgaggagggcaaatcggactctgccgcctgtaagacaaaagtcgctggttcagtggaagaggagggcgtggtaaaggaaattgacatcagccatcatgtaaaggagggattcgagaaagccgacccctctcagttcgaactgcttaaagtgttgggtcagggttcctacggcaaggtgttcctcgtgcgcaaagtcaagggttctgacgcaggccagctttatgccatgaaagtgttaaagaaggctaccctgaaggtcagagatcgcgtccgctctaaaatggaaagggacatacttgcggaggtgaatcatcccttcatcgtgaaacttcactacgcctttcagaccgaaggcaagctctatctgatcctggatttcctccgaggcggggatttattcacacgactgagcaaagaggtgatgtttaccgaagaggacgtgaagttctacttggccgagctggctctcgcgttagatcacctccattctcttgggataatttatagggatctgaaaccagagaacatcctgctcgacgaagagggtcatatcaaaatcaccgacttcgggcttagcaaagaggctatcgatcatgataaacgggcctatagcttctgcggaactatcgaatacatggcccccgaagttgttaacagacgtggtcacacccagtctgccgactggtggagcttcggcgtattgatgttcgagatgctcactggctccttaccatttcaggggaaggatagaaaggaaactatggcactcatcttgaaggcgaagctcgggatgccacagtttcttagcggagaggcacaatctctgctgcgcgcattgtttaaacggaatccgtgtaacagactcggtgccggtattgatggagtagaggagatcaagaggcacccctttttcgtcaccattgactggaacactctgtatcgtaaggagatcaagccgccgtttaaaccggcggtgggaaggccagaggatacattccatttcgatccagagtttacagccaggacacccaccgatagtccgggggtgcccccctcagcaaacgcccatcatctatttcggggcttttcttttgtggctagttctcttattcaggaaccttctcaacaggatctgcacaaagtgcccgtgcaccccatagtgcagcagctacatggtaacaacatacatttcacagatgggtatgagatcaaggaggacatcggcgttggaagctacagcgtgtgcaagcgctgtgtgcacaaagccacggatactgagtacgccgtcaagataatcgataagagcaagagggacccctccgaggagatcgagatactgctacgatacggtcagcaccccaatatcattaccctgaaggatgtctacgatgacggaaagtttgtgtacctcgtcatggaattgatgcgcggtggtgagctgctcgaccggattttgagacagaggtacttcagcgaacgggaagcttccgacgtgctctgcaccatcactaagaccatggattacctccactcccaaggtgtggtacacagggacctgaaaccctcaaacatcctgtacagggacgagtccgggagccctgaatctatacgggtgtgtgattttggcttcgccaaacagctgagggcagggaatggcctcctgatgacgccctgctacaccgcaaactttgtggcccccgaggtgttaaagagacaggggtatgatgcagcatgtgacatatggtccctggggatactgctgtatacaatgctagccggtttcacaccatttgcgaatggacctgacgatactcccgaggaaatattggcgagaataggaagcggcaaatatgcactatcaggaggaaattgggattcaatcagcgatgctgccaaagacgtcgtctcaaagatgcttcacgtggacccacaccagcggctgaccgcaatgcaggtactgaaacatccctgggttgtgaatagagaatacctctcacctaatcagctctcaagacaagatgtccacttagtgaagggggcaatggctgcgacttacttcgctctgaaccggacgcctcaagctcctaggctagagccggtccttagcagcaatctggcacagagaaggggaatgaagcggcttaccagcacacgcctatag

SEQ ID NO: 280801 - DNA, 516 bp, Artificial Sequence
  derived and/or modified sequence
atgcccattgcgcagctactggaactctggaaaaagattgaggtggaacccatggagatcgagaccactgaggaagacctgaacctcgatgtagaacctaccaccgaggacaccgctgaggaggggaaatctgactccgctgcttgcaagaccaaggttgcaggtagcgtggaagaggagggtgtggtgaaggaaattgatatcagtcaccacgtaaaagaggggtttgaaaaagcagaccccagccagttcgaattgctgaaagttctggggcaggggagctacggcaaagtcttcttggtgcgcaaagtcaaggggtctgacgccggacaactctatgcaatgaaggtgctgaaaaaagctaccctcaaggtgcgggatcgggtgaggtcaaagatggaacgagatatcttggctgaagttaaccaccccttcatagttaagctgcactacgcatttcagacagagggaaagctctaccttatcctggactttttaagaggtggcgacttatag

SEQ ID NO: 280802 - DNA, 2277 bp, Artificial Sequence
  derived and/or modified sequence
atgccgatcgctcagttactggagctgtggaaaaagatcgaggtcgagcctatggaaatcgaaaccactgaagaggacctgaacctggacgttgaaccaactaccgaggacaccgctgaggaaggtaagtccgactcagccgcatgtaagactaaggtagccggatccgtggaagaagagggtgttgtgaaggaaattgacatcagtcaccacgtgaaggagggatttgagaaggccgatcccagccagttcgaattattgaaagtgcttgggcaggggtcgtatggcaaagtattcttggtgagaaaggttaagggctctgatgctggccagctgtatgccatgaaggtgctgaaaaaagccaccctcaaggtgagggaccgggtacgctcaaaaatggaacgagatatcctggcagaagttaaccacccatttattgtgaaactgcactacgcttttcagaccgagggcaagctgtacctcatcctagactttctccgcggaggtgacctgtttaccaggttgtcaaaggaggttatgtttactgaagaagacgtcaagttttatttggctgagctcgctctcgcgctcgaccatctgcatagcctggggataatttaccgcgatctgaaacccgaaaatatcctgctcgacgaggagggccacattaagataacagatttcggcctgtcaaaagaggccatagaccacgataaaagggcatactctttttgtggaactattgagtacatggcacctgaagtggtgaatagacggggacatacccagtcggccgactggtggtccttcggggtgctgatgttcgaaatgctgactggatctctgccctttcagggaaaggatcgcaaagaaacaatggccctaatccttaaggctaaactgggcatgcctcagttcctgagcggggaggcccagtctttgttgcgtgctctctttaaacgcaacccctgcaaccgccttggcgcaggaattgacggtgtagaggagattaaaagacaccctttcttcgtgactattgattggaataccctgtatcgaaaagagatcaaacccccttttaagccggctgtcgggaggccagaagacacatttcattttgatccagagttcaccgcccgaacacctactgactctccaggtgtgccaccttctgcaaacgcccatcatctgttccggggatttagttttgtagcttcttccctgattcaggaaccgtcccaacaggacctccacaaagtgcccgttcatcctatcgtccagcaactgcacggcaacaacatccattttacggacggctatgaaatcaaagaagatattggtgtcgggtcttatagcgtttgtaagagatgcgttcataaagccaccgacaccgaatacgccgttaagatcatcgacaagtccaaacgggatccaagcgaagagattgagatcctcctccgatacgggcagcatccgaacattattaccttgaaagatgtgtacgatgatggcaaattcgtgtaccttgttatggagctcatgaggggcggtgagctgctggaccgcatattaagacagagatacttttctgagagggaggcatctgatgtgctgtgcacaataaccaagacaatggattatcttcattcacaaggagtagttcatagggacctgaagccctcgaatatcctctatcgagatgagagcggctcacccgagagcatcagagtctgcgactttggatttgccaagcaattacgtgccggaaatggcctgctgatgaccccatgttacacagcgaacttcgtggctcccgaggttctgaaaagacaggggtatgatgcggcatgtgatatttggagtttagggatcctgctgtacactatgcttgcgggattcaccccgttcgccaacggtccagatgataccccggaagaaattttggcaagaatcggtagcggcaagtatgccttgtccggaggcaattgggatagtatctcagacgctgccaaagatgttgtatctaagatgcttcacgtcgatccgcaccaacgtcttacagctatgcaggtgctcaaacatccttgggtggtaaaccgggaataccttagcccaaatcagctttctcggcaggacgtgcatctggtgaagggagcgatggcggcaacatatttcgcactaaaccgaacaccacaagcaccacggctggaacctgtcctttcatcaaacttggcccaaaggcggggtatgaagaggttaacatccacacggctgtag

SEQ ID NO: 280803 - DNA, 587 bp, Artificial Sequence
  derived and/or modified sequence
atggcagcggcatcctcagactcaactttcaccctcgtttagagccaattaagcagaaaaggaaagtttaaaaatgccaatcgcacagttgctggaactatggaaaaagatcgaggtggagcctatggaaatagagaccacagaggaggatctcaacctggatgtggagcccaccacagaagacactgcagaagaaggcaaaagtgactcagctgcctgcaagacaaaggtagctggatccgtagaggaagaaggcgtcgtgaaggagatagacatcagccatcatgtgaaggagggctttgagaaggcagatccttcccagtttgagctgctgaaggttttaggacaaggatcctatggaaaggtgttcctggtgaggaaggtgaaggggtccgacgctgggcagctctacgccatgaaggtccttaagaaagccaccctaaaagttcgggaccgagtgagatcgaagatggagagagacatcttggcagaagtgaatcaccccttcattgtgaagcttcattatgcctttcagacggaaggaaagctctacctgatcctggacttcctgcggggaggggacctct

SEQ ID NO: 280804 - DNA, 5992 bp, Artificial Sequence
  derived and/or modified sequence
gcagtacagattccgaagccgcagcgccgtcccctcctttcctcgccccagcccgagcgggaagcggcagcagctccccagagccctggcttggcagggaggggacggcgcccgagcagccatattgcagccccccgggtccctcctccggccggcgcaggccccgcgctcacgacctcctctgggagccggatctgtcctctccatcgccgccacccgccggcctctgcgtcccttggcttccgacatcccgtctggccgtccccctgtgccggtccgagcctctgtttatttcctttcctactatcaatactcgaccagcagaaaaggaaagtttaaaaatgccaatcgcacagttgctggaactatggaaaaagatcgaggtggagcctatggaaatagagaccacagaggaggatctcaacctggatgtggagcccaccacagaagacactgcagaagaaggcaaaagtgactcagctgcctgcaagacaaaggtagctggatccgtagaggaagaaggcgtcgtgaaggagatagacatcagccatcatgtgaaggagggctttgagaaggcagatccttcccagtttgagctgctgaaggttttaggacaaggatcctatggaaaggtgttcctggtgaggaaggtgaaggggtccgacgctgggcagctctacgccatgaaggtccttaagaaagccaccctaaaagttcgggaccgagtgagatcgaagatggagagagacatcttggcagaagtgaatcaccccttcattgtgaagcttcattatgcctttcagacggaaggaaagctctacctgatcctggacttcctgcggggaggggacctcttcacccggctctccaaagaggtcatgttcacggaggaggatgtcaagttctacctggctgagctggccttggctttagaccatctccacagcctggggatcatctacagagatctgaagcctgagaacatcctcctggatgaagaggggcacattaagatcacagatttcggcctgagtaaggaggccattgaccacgacaagagagcgtactccttctgcgggacgatcgagtacatggcgcccgaggtggtgaaccggcgaggacacacgcagagtgccgactggtggtccttcggcgtgctcatgtttgagatgctcacggggtccctgccgttccaggggaaggacaggaaggagaccatggctctcatcctcaaagccaagctggggatgccgcagttcctcagtggggaggcacagagtttgctgcgagctctcttcaaacggaacccctgcaaccggctgggtgctggcattgacggagtggaggaaattaagcgccatcccttctttgtgaccatagactggaacacgctgtaccggaaggagatcaagccaccgttcaaaccagcagtgggcaggcctgaggacaccttccactttgaccccgagttcacagcgcggacgcccacagactctcctggcgtccccccgagtgcaaacgctcatcacctgtttagaggattcagctttgtggcctcaagcctgatccaggagccctcacagcaagatctgcacaaagtcccagttcacccaatcgtgcagcagttacacgggaacaacatccacttcaccgatggctacgagatcaaggaggacatcggggtgggctcctactcagtgtgcaagcgatgtgtgcataaagccacagacaccgagtatgccgtgaagatcattgataagagcaagagagacccctcggaagagattgagatcctcctgcggtacggccagcacccgaacatcatcaccctcaaggatgtctatgatgatggcaagtttgtgtacctggtaatggagctgatgcgtggtggggagctcctggaccgcatcctccggcagagatacttctcggagcgcgaagccagtgacgtcctgtgcaccatcaccaagaccatggactacctccattcccagggggttgttcatcgagacctgaagccgagtaacatcctgtacagggatgagtcggggagcccagaatccatccgagtctgcgacttcggctttgccaagcagctgcgcgcggggaacgggctgctcatgacaccctgctacacggccaatttcgtggccccggaggtcctgaagcgtcaaggctatgatgcggcgtgtgacatctggagtttggggatcctgttgtacaccatgctggcaggatttaccccttttgcaaatgggccagacgatacccctgaggagattctggcgcggatcggcagtgggaagtatgccctttctgggggaaactgggactcgatatctgacgcagctaaagacgtcgtgtccaagatgctccacgtggaccctcatcagcgcctgacggcgatgcaagtgctcaaacacccgtgggtggtcaacagagagtacctgtccccaaaccagctcagccgacaggacgtgcacctggtgaagggcgcgatggccgccacctactttgctctaaacagaacacctcaggccccgcggctggagcccgtgctgtcatccaacctggctcagcgcagaggcatgaagagactcacgtccacgcggctgtagcgggtgggaccctggccccagcgtcccctgccagcatcctcgtgggctcacagaccccggcctcggagcccgtctggcacccagagtgaccacaagtccagcagggaggcggcgcccgccctcgccgtgtccgtgttttctttttcagccccggagagggtcctgacctgggggcttctccaagcctcactgcgccagcctccccgcccgctctcttttctcccaagcgaaaccaaatgcgccccttcacctcgcgtgcccgtgcgaggccgggggcttctttcagagcccgcgggtcctctcatacatggcttctgtttctgccgagagatctgttttccaattatgaagccggtcggtttggtcagactcccgacacccacgtcccaggtacccggtgggaaagtggcagtgcgagggcgcagccattggtggttgcagggccccagagggctggggtgacctggcatcccggggctccccacgggctggatgacggggttggcactgtggcgtccaggaggagatgcctggttctgcccaaaataatccaaagagccgtttcctcctcgcccttcagtttttgcctgaggtgctgggtagcccatcctttcctctgtcccagattcaaatgaggagtaagagcccagacgagaggaaggcaggctggatctttgccttgagagctccgtgtcaccaggatggaagggggtgcctctcggaggagcctgtgtccacctccagtctcggctttccccggggggccaagcgcactgggctgccgtctgtccccagctcccgtggccacacagctatctggaggctttgcagggagtcgtgggttctcgcacctgctcagccctgtgtcggcttcctgtgtgctcacctaaagctgtggttttgctgtgttcacttcgatttttctggtctgtggagaaactgtgaattggagaaatggagctctgtggcttcccacccaaaccttctcagtccagctggaggctggagggagacacaggccccacccagcagactgaggggcagaggcacaggtgggagggcagcggagatcagcgtggacaggagcgatgcactttgtagatgctgtggctttgtgttgcgttttgtgtctctgttgcacagatctgttttttcacactgatccgtattcccctgggtgtgcacacagggcgggtgtggggcatttaggccatgctgtgctctacttcattgagtaaaatcgagtgagaggttccgggcagcaggatcgacgcccagtccagccggcagagggaacacacgggtccttcattgtcctgtaagggtgttgaagatgctccctggcggcccccaagcagactagatgggaggaggcgccgctcagcccctcaccctgcatcactgaagagcggcgcctctgcagcaagcagggcttcaggaggtgcccgctggccacagccaggttttccctaagaagatgttattttgttgggttttgttccccctccatctcgattctcgtacccaactaaaaaaaaaaaaataaagaaaaaatgtgctgcgttctgaaaaataactccttagcttggtctgattgttttcagaccttaaaatataaacttgtttcacaagctttaatccatgtggattttttttttcttagagaaccacaaaacataaaaggagcaagtcggactgaatacctgtttccatagtgcccacagggtattcctcacattttctccatagaagatgctttttcccaaggctagaacgacttccaccatgatgaatttgctttttaggtcttaattatttcacttctttttagaaacttaggaagaagtggataatcctgaggtcacacaatctgtcctcccagaaatgaacaaaagtcatcaccttttctgcttgctacacaggcaacgattcccccatcagctgcccggaccctttggcctggcttggtgtgcaggcctgtctgtttgcttaaagtcagtgggttctggtgcagggagtgagaagtgggggaagtgaaagggaaagcatccgtgagaaagcggccacggttttccctccttgtgtgcccatggggcaccagctcatggtctttttcagtcatcccagtttgtacagacttagcttctgaactctaagaatgccaaagggaccgacgagactccccatcacagcgagctctgtccttacatgtatttgatgtgcatcagcggaggagaacactggcttggccctgctccgctgagtgtctgtgaaatacctctactttccctcccatatccagaacaaaatgatacttgacatccttccacaaaagtcagcctaaagaagttatggtatcatatgttaaactaagctttcaaaaaccttagtgaaatagcaagtgactgctttcaagcagcagtcgacatgtaaatgaaggtgttcttagaattcgcattttgccagctcagcgcacctccacaacgaatgaaatgctccgtatgatttgcacaaatgacatagacctccccaaaagttaactggctctccttcctcacacagttcatcataacccaaccccccacccccgggtcatgaaaatcacagaacttataaacacattgaaccctagatctcaggcttcctgacctaccgccagtggccccttgctggccaccctatagggtcctccttccctggcagccccccatgtgggagaaatacctgattctcccaatctgcagtgggagagctttgctgaattccatcccaaagtcaaacatgggcaagaggtgaggatttcacttttaccctcaagtccgatttgtctgtgattttaaactaactgtgtatgtattgatgtttggaagattgtttgaattttaaagtgataatagtacttaatgttatccagtattgttcattaaatggtgttatcctaaagctgcacttgggatttttacctaacgctttactgattctctcaagcacatggcaaagtttgatttgcactccgttcatttctgacacgttttgctgcctcctacctttctaagcgtcatgcaaattcgagaatggagaaggacgctgccggtccctgagcggtgtggagagggcggaaggtggactccagcgcagcttgaggggctgaggacggaggctgcagcatctgtgtcgttctactgagcacgcttctctgcctcgctcctgactcagcactttgttcactggctcagcagttatgtttacacatcatttttatgttcctgctttgtaattcatgtttgagatgggtggccactgtacagatatttattacgctttccagactttctgaatagatttttttgaataaacatggttttatgaagtgt

SEQ ID NO: 280805 - protein, 766 aa, Artificial Sequence
  derived and/or modified sequence
MKEKSKNAARTRREKENSEFYELAKLLPLPSAITSQLDKASIIRLTTSYLKMRVVFPEGLGEAWGHSSRTSPLDNVGRELGSHLLQTLDGFIFVVAPDGKIMYISETASVHLGLSQVELTGNSIYEYIHPADHDEMTAVLTAHQPYHSHFVQEYEIERSFFLRMKCVLAKRNAGLTCGGYKVIHCSGYLKIRQYSLDMSPFDGCYQNVGLVAVGHSLPPSAVTEIKLHSNMFMFRASLDMKLIFLDSRVAELTGYEPQDLIEKTLYHHVHGCDTFHLRCAHHLLLVKGQVTTKYYRFLAKHGGWVWVQSYATIVHNSRSSRPHCIVSVNYVLTDTEYKGLQLSLDQISASKPAFSYTSSSTPTMTDNRKGAKSRLSSSKSKSRTSPYPQYSGFHTERSESDHDSQWGGSPLTDTASPQLLDPADRPGSQHDASCAYRQFSDRSSLCYGFALDHSRLVEERHFHTQACEGGRCEAGRYFLGTPQAGREPWWGSRAALPLTKASPESREAYENSMPHIASVHRIHGRGHWDEDSVVSSPDPGSASESGDRYRTEQYQSSPHEPSKIETLIRATQQMIKEEENRLQLRKAPSDQLASINGAGKKHSLCFANYQQPPPTGEVCHGSALANTSPCDHIQQREGKMLSPHENDYDNSPTALSRISSPNSDRISKSSLILAKDYLHSDISPHQTAGDHPTVSPNCFGSHRQYFDKHAYTLTGYALEHLYDSETIRNYSLGCNGSHFDVTSHLRMQPDPAQGHKGTSVIITNGS

SEQ ID NO: 280806 - DNA, 3995 bp, Artificial Sequence
  derived and/or modified sequence
cgaattttcaaagaacatattttccgttcacccccgctggtcttttactgccatcaatacactgttcttggtgcaaatacttcagcctctttattcaaagtatgttttatgtttttgccaaatatgatctctaattgaaagtttatttttggttttggatgaatctgcggagcttaagttgtgagaagaaagggggaacaagacacaatgaaagaaaagtccaaaaatgctgcgcggactaggagggagaaggaaaacagtgaattttatgaactggctaaattactgcctttgccctcggctatcacctcgcagctggacaaagcatccataatcagactcacgaccagctatctcaaaatgagagtggtgttcccagaagggctcggcgaggcgtggggccactcaagtcggaccagccccctggacaacgttggccgagaactgggctcccatctgctccagaccctggatggcttcatcttcgtggtagccccagatgggaagatcatgtacatctcagagacagcctcagtccacttgggtctttctcaggtagagctgaccggaaacagcatttatgaatacattcacccggcagaccacgacgagatgacggcggtgctcaccgcccatcaaccctaccactctcacttcgtgcaggagtatgagatcgagcgctccttcttcctgaggatgaagtgcgtcttggccaagcgtaacgccggcctcacctgtggcggctacaaggtcatccactgcagcggctacttgaagatccgccagtacagcctggacatgtcccccttcgacggctgctaccaaaacgtgggcctggtggccgtgggccactcgctgcctcccagcgccgtcacggagatcaagctacacagcaatatgtttatgttccgcgccagcctggacatgaagctcatctttctggactccagggtggcggagctgacggggtacgaacctcaggacctgattgagaagactctgtaccaccatgtgcacggctgcgacaccttccacctgcgctgcgcgcaccatttgctgctggtgaagggacaggtgaccaccaagtactacaggttcctggcgaaacacggcggctgggtatgggtgcagagctacgcgaccatcgtgcacaacagtcgctcctccaggccacactgtatcgtcagcgtcaactatgtcctcacagacacagaatacaaagggctgcagctctccctggatcagatctcagcctccaaaccagccttctcctataccagcagctccacccccaccatgactgacaacagaaagggggccaaatcccggctctccagctcaaagtcaaaatccaggacttccccataccctcagtattcgggatttcacacagaaagatcggaatctgatcatgacagccagtggggcggaagtcccttgaccgacacggcctctccgcagcttctggaccccgccgataggcctggctcccagcacgacgcatcgtgcgcctacagacagttttcggaccgcagctctctctgctatggctttgcgcttgaccactcgaggctggtggaagagaggcatttccatacccaggcctgtgaaggaggccgatgtgaggcaggcaggtacttcctgggaacgccgcaggccgggagggagccctggtggggctctcgcgcagccttgcccctgacaaaggcctccccagaaagcagagaagcctatgaaaacagcatgcctcacatcgcttcagtccacaggatccatgggcgaggtcattgggatgaagatagtgtggtcagttctccagaccctgggtcggccagtgaatcaggtgaccgatatcgtactgagcagtatcaaagtagcccacatgaacccagcaaaattgaaactcttataagagccactcagcaaatgattaaagaagaagagaacagattacagctaaggaaagccccctcagaccaactggcttccattaatggggctgggaaaaaacactccctgtgttttgcaaactaccaacagcccccaccaacaggtgaagtctgccatggctctgctcttgccaacacttcaccatgtgaccatatccagcagagagagggaaaaatgttgagcccccatgaaaatgactatgacaacagtcccaccgcactatctcggataagtagtcccaattcggatcgcatttcaaaatccagtttgatcctagctaaagactatctgcattcggatatatctcctcatcagacagcaggagaccaccctactgtctctccaaactgctttggctctcaccggcagtattttgacaagcatgcttacacattaactggatatgccctggagcacttatatgacagcgaaaccattagaaactattccttgggctgtaatggctcacactttgatgtaacttcccatctgaggatgcaaccagacccagcacaaggacacaagggaacatctgttataataaccaacggaagctgatgttttgctgaaatattttgttctttaaggatctctgaaacatatttatagtttaataccccattaccagcatttactatgccacagattgttagagagtataacttaagttactgggtatttgatacgtgttcctataaaatcaaagaaaacatagcactagcattcagggttatacacagaaaagggagctaaattgaatacacaaatttcccctctaattatatgggaaccagaatagataaattttgacttgaaaaatattcatgtagatcaagtgtgcatatatactacatgagaggactgatgaatgacaacattgcattgtgactatccagtgatcctcaaacacacaaactattacttacaaactgcggtatacattttacatatggaaatataggctatgtaatgtaaatacatcaaaaatgggtaattttctttgactctgtcacactaaacttcttaacgaaatttccattcccaaaataactgagaaagagagagatacatcttataaactgacttctttgtggtttcaaatcagccagctcatttggttcaggcataaattagagaaatggttctggatatggtgcaaaaatgagttttcacctggtatccattataaacaatcaggaagaggtaatttttcaccttgcttttcagttagacaaggaccaggattgcactgacatggcgctgagggtttttctaagtaagaacactgagatattgggacacacatcaaaaacctggagtgctcaattggaagtagttctatgaatatggaaaggccagaggcagagtgaaataaaatgctatctcaaagtttaacacaatttaagggctcagcataagtaaacaacatatttggggtttgcttgtaaaaccaactaaataaaaaattcaaaccaattcacccagaaaaaagaccaataggtgcaaaaataaaaggaaaaccagtgaagtgccacatgacagcagtgttaagtgtttgaaaacgtttcaaagcacatatgtgccaatgtgacaacatgtggaaagcctcaggagagagtctaagataaaagcttaggctgatagacaagtagttaagagctaagagcagtactctgaaggaataggcaaaatgtttattttccttattgtttgtaaacaacaaacttggtcttacatctgtgtggtatagtagaaaggccagctgactagatctctggattctaattttggccctacctgtaacttaattttgtgaccacagttgtaccattcaccgtgcctgggctctagtttcctggtttgtaaggcagccccagcgttcatgttctgtgatagagcagaactgaacttattacctaattaactctctgctatgagttgtcaagactgatcattctgttttttctgtacacagaagtttagatgctttgtgacttaagcaggtgtgtgggctcctttaggcaggttacagttaactttctaga

SEQ ID NO: 280807 - DNA, 2301 bp, Artificial Sequence
  derived and/or modified sequence
atgaaggaaaaatctaaaaatgccgccagaactagacgggagaaggagaacagcgaattctatgaattggccaagctcctccctcttccgtcggccattacttcacagctggataaagcgagcataattcgccttaccacctcctatctgaagatgagggttgtctttcccgaaggactaggagaagcttgggggcattccagcaggacatcccctttggacaacgtgggtagagagctaggcagccacctgttacagactctcgatggcttcatcttcgtcgtggccccagatgggaaaattatgtacatcagtgaaacggccagtgtgcatctcggcctgtcacaggtggaactgaccggaaattctatttatgagtacatccatcctgctgatcacgacgagatgaccgccgttttgaccgctcatcagccttaccacagtcattttgtccaggagtatgagatcgagcggtccttcttcctgcgaatgaagtgcgtgctcgccaaacgaaatgccgggctcacatgtggtggatacaaggttatccactgtagcggctacctcaagatcagacagtacagcctggacatgtctcctttcgatggatgctaccagaacgtcggccttgtcgctgtgggccacagcttgcctccttccgccgtgaccgaaatcaagctgcatagcaacatgttcatgtttagagccagcctcgatatgaaattaatatttcttgatagcagagttgccgagttaactgggtacgagccacaggacttaatcgagaaaaccctgtaccaccacgtccacggctgcgacacctttcacttgcgatgtgcccatcacctgttgttggttaagggtcaggtcaccacgaagtattatcgcttcctggccaaacacggcggctgggtttgggtgcagtcatacgcgacaatagtccacaattccagatcctcaagaccccattgtatcgtgagtgtcaattacgtcttgaccgacaccgagtacaaggggcttcagctgtccctggatcagatttcagccagtaaacctgccttctcatatacaagctcgtcaacacctactatgacggataatagaaagggggccaagagccggctaagctctagtaagagtaagtcgagaacttcaccctacccccagtactccggtttccacacagaacgttccgagtcagaccacgacagtcagtggggcggtagccccctcaccgatactgcatccccgcaactgctagaccccgctgacaggcccgggtcccagcacgacgctagttgtgcctaccgccagttttccgaccgatcctccttatgttacggcttcgcgctggaccattcgcgtcttgtggaagaacggcacttccacacgcaggcatgcgaaggcgggcggtgcgaggcagggcggtatttcttaggaacaccccaagctggacgggagccatggtggggatcccgcgctgctctgccactcaccaaagcctccccagaatcccgggaggcctatgaaaactccatgccacatatcgccagcgtgcatcggatccatggaaggggtcattgggacgaagatagcgttgtgtcttcgccggatcccggatctgccagtgagtccggtgaccggtaccgcaccgagcagtatcagtcctcaccccacgagcctagcaagatagaaacgttgatccgcgccacccagcagatgatcaaagaagaagagaatagactgcagctgagaaaggccccttctgaccagctggcgtcaatcaatggggccgggaaaaagcattccctgtgttttgcgaattatcagcagcccccacccactggagaagtgtgccatggttcggcactggcgaatacgtctccgtgcgaccacatccagcaacgcgaggggaagatgttgtccccacatgaaaatgattatgacaactctccaacggctctctctcgtatctcatcaccaaattccgatcggattagcaagagctcgttgatccttgccaaggattacctccattctgacatatcaccccaccagactgccggagatcacccaacagtttcccctaattgctttggatcacatcgtcagtattttgacaaacacgcttacacccttacggggtacgcactggagcatctctatgacagtgagaccattcggaattattctctggggtgcaatgggagtcactttgacgtgacatcacatcttcgtatgcagcccgaccccgcgcagggtcataaaggcacttcagtgattatcactaatggctcctag

SEQ ID NO: 280808 - DNA, 2301 bp, Artificial Sequence
  derived and/or modified sequence
atgaaagagaaatccaagaacgcagctaggacccggcgagagaaagagaacagcgagttttatgagctcgccaagctactgccattaccctccgcgataacctcacagctggataaggcatccattatccgtttgaccactagctatctgaagatgagggttgtgttcccagagggtctgggcgaagcttggggccattcctctaggacaagccctctcgataatgtgggtcgtgagctaggaagccatctgctgcaaaccctggatggatttatcttcgtagtggcgccagacggaaagatcatgtatatctcggaaaccgcttctgtgcacttaggcttgtcgcaggtggaactaacggggaattccatttatgaatacatacacccagccgatcacgatgaaatgactgcggtgctgactgcccaccaaccatatcactcgcactttgtccaggaatacgagatcgagaggagcttcttcctcagaatgaaatgtgtgctggccaaaagaaacgcggggctgacttgcggagggtataaggtgattcactgctccggctacctgaaaattcgtcaatattcgctggatatgagtccattcgatggctgttatcagaatgtggggctagtggccgtgggtcattcattaccacctagtgccgtgacagagataaaactgcattcaaacatgtttatgtttcgcgcgtctctggatatgaagcttatcttcttggactctcgtgtcgctgaactgaccggctacgaaccacaggacctgatcgaaaagacgctataccatcacgtacacggctgtgacacctttcacctgaggtgcgcccatcacttgctgcttgtcaaagggcaggtgaccaccaagtattataggttcctcgctaagcatggaggatgggtgtgggtccagtcctatgctactatcgtacacaattcacgttcctcaagacctcattgcattgtcagcgtcaattacgttctcacggacaccgaatacaaaggcctccagctgagcttggatcaaatctctgcttccaagcctgctttctcctacacgtcaagctccacacctacaatgaccgataacaggaaaggggcaaagtctcgcctctccagcagcaaatccaagtcccggacttctccttaccctcagtacagcggtttccacacagagcgtagcgagagcgaccatgactctcagtggggtggaagcccccttacagacaccgccagtccacagctccttgacccagccgatagaccgggtagccaacacgacgccagttgtgcctatcgccaattttcagaccggagctcattgtgttatggcttcgcccttgatcacagcaggctggtcgaggagcgccacttccacacacaagcttgcgagggggggagatgtgaagccggaaggtacttcctaggcactccccaagctggccgcgaaccatggtggggttcccgcgccgcacttccattaaccaaagccagtccggaaagtcgggaggcctatgagaactcaatgccccatattgccagcgtacaccggatacatggccggggccactgggatgaggacagcgtcgtgtcttctcctgaccccggcagcgcctcagaatctggtgaccgctatcgcactgagcagtatcaaagctctccccacgaaccttccaagatcgaaactctgatcagagctacacagcagatgatcaaagaggaggaaaaccggctgcagctgaggaaggccccctcggaccagttggccagtattaacggcgctggcaaaaagcactccctgtgttttgccaactaccagcaacctccaccgactggcgaggtgtgtcacgggtcggccttagcgaacaccagcccatgtgatcatatccagcagcgagaggggaagatgctctccccccacgaaaacgattatgacaactctcccacggcactcagcagaatctcctctcctaacagcgacaggatctcaaaatcttctctgattttggccaaggactacctgcactccgacatcagcccacatcaaacagccggggatcaccctactgtaagcccgaactgcttcggctcccacagacagtactttgacaaacatgcctacaccctgacagggtatgctctggagcacttgtatgactctgaaactataagaaattatagcctcggatgcaacgggtcacactttgatgttacttcgcacttgagaatgcagcccgacccagcacagggtcacaaaggtacaagtgtgatcattaccaatggttcctag

SEQ ID NO: 280809 - DNA, 2301 bp, Artificial Sequence
  derived and/or modified sequence
atgaaggagaagagcaagaatgctgcccggacccggcgggagaaggagaacagcgagttctatgagctggccaagctgctgcccctgcccagcgccatcaccagccagctggacaaggccagcatcatccggctgaccaccagctacctgaagatgagggtggtgtttcctgagggcctgggggaggcctggggccacagcagcaggaccagccccctggacaacgtgggccgggagctgggcagccacctgctgcagaccctggatggcttcatctttgtggtggccccagatggcaagatcatgtacatcagcgagacagcctctgtgcacctgggcctgagccaggtggagctgaccggcaacagcatctatgagtacatccaccctgctgaccatgatgagatgacagctgtgctgacagcccaccagccctaccacagccactttgtgcaggagtatgaaattgaaagaagcttcttcctgaggatgaagtgtgtgctggccaagagaaatgccggcctgacctgtggcggctacaaggtgatccactgcagcggctacctgaagatccggcagtacagcctggacatgagcccctttgatggctgctaccagaatgtgggcctggtggccgtgggccacagcctgccccccagcgctgtgacagagatcaagctgcacagcaacatgttcatgttccgggccagcctggacatgaagctgatcttcctggacagccgggtggccgagctgaccggctatgagccccaggacctgattgagaagaccctgtaccaccacgtgcacggctgtgacaccttccacctgcgctgtgcccaccacctgctgctggtgaagggccaggtgaccaccaagtactaccgcttcctggccaagcatggaggctgggtgtgggtgcagagctatgccaccatcgtgcacaacagccgcagcagccggccccactgcatcgtgtctgtgaactacgtgctgacagacacagagtacaagggcctgcagctgagcctggaccagatcagcgccagcaagccagccttctcctacaccagcagcagcacccccaccatgacagacaacagaaaaggagccaagagccggctgagcagcagcaagagcaagagcaggaccagcccctacccccagtacagcggcttccacacagagaggtctgagagtgaccatgacagccagtggggcggcagccccctgacagacacagccagcccccagctgctggaccctgctgaccggcccggcagccagcatgatgccagctgtgcctaccggcagttcagtgacaggagcagcctgtgctacggctttgccctggaccacagccggctggtggaggagcggcacttccacacccaggcctgtgagggcggccgctgtgaggccggccgctacttcctgggcaccccccaggccggccgggagccctggtggggcagccgggccgccctgcccctgaccaaggccagccctgagagccgggaggcctatgagaacagcatgccccacatcgcctctgtgcaccgcatccacggccggggccactgggatgaggacagcgtggtgagcagcccagaccccggcagcgccagcgagagcggggaccgctacagaacagagcagtaccagagcagcccccatgagcccagcaagattgagaccctcatccgggccacccagcagatgatcaaggaggaggagaaccggctgcagctgaggaaggcccccagcgaccagctggccagcatcaacggggccggcaagaagcacagcctgtgctttgccaactaccagcagcccccacccactggagaggtgtgccacggcagcgccctggccaacaccagcccctgtgaccacatccagcagcgggagggcaagatgctgagcccccatgaaaatgactatgacaacagccccacagccctgagccgcatcagcagccccaacagcgaccgcatcagcaagagcagcctcatcctggccaaggactacctgcacagcgacatcagcccccaccagacagctggggaccaccccaccgtgagccccaactgcttcggcagccaccggcagtactttgacaagcacgcctacaccctgaccggctacgccctggagcacctgtatgacagcgagaccatccggaactacagcctgggctgcaatggcagccactttgatgtgaccagccacctgaggatgcagcctgaccctgcccagggccacaagggcaccagcgtcatcatcaccaacggcagctag

SEQ ID NO: 280810 - DNA, 2301 bp, Artificial Sequence
  derived and/or modified sequence
atgaaggagaagagcaagaacgccgcccggacccggcgggagaaggaaaatagcgagttctacgaactggctaaactgttaccattgcccagcgcaattaccagtcaactggataaggccagcatcatacggctgacaacgagttacctgaagatgcgggtcgtatttcccgaggggctgggagaggcttggggccatagctcaagaacctcgcccctcgacaatgttggccgtgaactgggaagccacttactgcagacattggacggctttatttttgtcgtggcaccagacggcaaaatcatgtacattagcgagacagcctcagttcaccttggtctgtcccaggtagagctgaccggcaactctatttatgagtatattcatcctgctgatcatgacgagatgactgcggtgcttactgcccaccagccgtatcattctcacttcgtacaagagtacgagatagagaggagtttcttcctacgaatgaagtgcgtgctggctaagaggaacgcgggcctcacatgtggcggatacaaggtgattcactgctccggttatctcaaaatcagacagtattcgttggatatgtcgcccttcgacggttgttaccaaaacgtgggcctggtggcagtcggccacagtctgcctccttctgcagtcaccgaaatcaagctacattctaacatgttcatgttcagggccagcctggacatgaaactgatttttctggacagtagagttgcagaactgacggggtatgaaccccaggatctgatcgagaaaaccctgtatcaccacgtgcatggctgtgatacctttcatttacgctgcgctcatcatctcttgctcgtgaaaggtcaagtgacaaccaagtactaccggttcttggccaagcacgggggctgggtttgggttcagtcctatgcaacaattgtgcataactcacggtcctctcgtcctcattgcattgtgtcagtgaactatgtactgacagacactgaatataagggccttcaattgtccctggatcaaataagtgctagcaagcctgctttctcgtatacctctagttcgaccccaactatgacagacaaccgcaaaggagcaaagagtaggttgtcaagcagcaaatcaaagtccagaacctccccctatccacagtactcaggctttcataccgagcgctcagaaagcgaccacgacagtcagtggggtggttccccactgacggacaccgcatcacctcagctcctcgatcccgccgacagacccggaagtcagcacgacgcatcatgtgcctatcggcagttcagcgatcgatcctcactgtgctatgggttcgctctggaccactcccggctcgtagaggagcgtcacttccatacccaagcatgtgaaggtgggcggtgcgaagccggtcggtactttttaggtacaccccaagccggccgggagccatggtgggggtctagagcagcgctcccacttacaaaagctagcccagagtcaagggaggcgtacgagaacagcatgcctcatatagctagcgtccaccgcatccatggtagaggtcactgggatgaggattcagtggtcagttctcccgatcctggctccgcgagtgagagtggagaccggtatagaaccgaacagtaccagtcctctccccatgagcccagtaaaatcgagacgctcataagagcgacacagcaaatgatcaaggaggaggaaaataggctgcagcttcgcaaggctcccagtgatcagctcgcgtccattaacggagcaggtaagaaacactcgctgtgctttgccaactatcagcaaccaccaccaaccggagaagtctgccacggtagtgctcttgctaacacatctccatgtgatcacattcagcagcgcgagggtaaaatgctttcgcctcacgagaatgactacgataattcaccgacagccctgagcaggatatcatcccccaactcagaccggatcagcaagtcaagtttaatacttgccaaagactacctgcacagcgacattagcccgcatcagacggccggcgaccaccccactgtgagccctaattgttttggttcccatcgccagtatttcgataagcatgcgtacacactgaccgggtatgcccttgaacacctctatgacagcgaaaccattagaaattattctcttggttgcaacggatctcacttcgacgttacgagtcacctgcggatgcagccagatccggctcaggggcataagggaacctccgtcatcattacaaatggctcctag

SEQ ID NO: 280811 - DNA, 2301 bp, Artificial Sequence
  derived and/or modified sequence
atgaaggagaagagcaagaacgccgcccggacccggcgggagaaggaaaactctgaattctatgaactcgccaaattgctgcccctgcctagcgctatcacctctcagcttgataaagcaagtattattaggctgactacttcatacctgaagatgcgggttgtgtttcctgagggcctcggtgaggcctggggccactcctccaggacatccccactagataacgtgggaagggaactagggagtcacctgcttcaaaccctggacgggttcatattcgtggtggcaccagatggcaaaatcatgtatatctcagagaccgcctcagtgcacctggggctctctcaggtggaacttacgggtaactccatttacgagtacatccacccggctgaccatgatgagatgactgctgtcctgacggcccatcagccatatcactcccattttgtccaagagtacgagatcgaaagatctttttttctccgaatgaaatgcgtgctagccaaaaggaacgctggactgacctgcggaggttataaagttatccattgttccggctatctaaagatacgccagtactcactggatatgtccccgtttgacggttgctaccagaacgtcggtctcgttgccgtgggccactccctcccgccttcagccgtgacagagataaagttgcactccaacatgttcatgttccgcgcaagtcttgatatgaagctgattttccttgactctcgggtcgcagagctgaccggttatgaaccacaagacctgatcgaaaaaaccctgtatcaccacgtgcacgggtgtgacaccttccatttacgctgcgcccatcacctgttgctggttaaaggacaggtcacaacaaagtactatcgatttctggccaagcatggaggatgggtctgggtacagagctacgcaactatcgtacataattcccggtccagtcgcccccactgcatcgtcagcgtgaactatgttctgacagatactgaatacaaggggctccaacttagcctcgaccagatatctgcatcaaagccagcattcagttatacttcctcttctacaccaacgatgacagataataggaagggggccaaatccagactttcaagctcaaaatccaagtcaaggaccagtccttacccgcaatatagtggttttcacaccgaaagatcagagtctgatcatgattcacagtgggggggaagtccactgacggatacagcatcaccccagcttctggaccccgctgatcgccccgggtcccagcatgatgcatcgtgcgcctaccgccagttcagcgacagaagctcattatgttacggatttgctctggaccactcgcgcctagttgaagagcggcactttcacacgcaggcatgcgaagggggacggtgcgaagccggacggtattttctgggtacgccacaggccgggcgggagccatggtggggatcaagagccgcactccccctgacaaaagcctccccggagtcccgcgaagcctatgagaactctatgccccacatcgccagcgttcataggatccatggccgaggacactgggatgaagattccgtggtgtcgtctccagatcctggaagcgcttcagaaagtggcgaccgttaccgcacagagcagtaccaatcctccccccacgagcccagcaaaatcgagaccctaatcagagctacgcagcagatgataaaggaggaggaaaaccggttgcagctgcggaaggccccctccgatcagctggcatccattaatggcgccggaaagaaacattccctgtgcttcgctaactaccagcagccccctcctacaggcgaagtgtgtcacggctccgcccttgcaaatacctccccttgtgaccatatccagcagcgcgaaggcaagatgctgtccccccacgaaaatgactacgataactctcccactgctctgagccggatttcctcaccaaattcagataggattagtaagtcatcactgatcctcgccaaggattacctacattccgatatttccccgcatcagactgcaggtgaccacccgaccgtgagtccaaattgtttcggaagccaccgacagtacttcgataagcatgcttacacgctaactggctatgcacttgagcacctctacgacagcgaaaccatacggaactacagcctgggatgcaatggctcccacttcgatgtgacttcacacctgcgcatgcagcccgatccagcccaggggcacaagggaacaagcgtcattatcaccaacggcagctag

SEQ ID NO: 280812 - DNA, 2301 bp, Artificial Sequence
  derived and/or modified sequence
atgaaggagaagtccaagaatgcagcacgcactagacgcgagaaggaaaactccgaattttatgagttggccaagttactgcccctgccttcagcaattacaagtcaactcgacaaggcttcaattatccgcctcaccacctcctatctgaagatgcgggtggtgttccctgaggggctgggtgaagcttgggggcatagctccaggacgtccccattagacaacgttgggagagagctcggttctcatctgcttcaaaccttggacggatttattttcgtcgtggcccctgacgggaagattatgtacatctccgaaacagcgtcagtgcatttagggctgagccaggtagaactgaccggcaattcaatctatgagtatatccaccccgcagaccacgacgagatgaccgcagtcttgaccgctcaccagccataccacagccatttcgtccaggaatatgaaatcgaacgatcttttttcttacgcatgaagtgtgtactggccaagaggaacgctggtcttacctgcggcggatataaagtaatccactgctccggctatctgaagataagacaatactcgcttgatatgagcccatttgacgggtgctaccaaaacgtgggactggtagctgttggccattcgctgccaccgtctgctgttacggagattaaactgcactccaacatgtttatgttcagggccagcctggacatgaagctcatcttcctggactcgcgcgtggccgaactaaccgggtacgagcctcaggacctgattgagaagaccctatatcatcacgtgcacggttgtgatacattccacctgcggtgtgcacatcatttattgctcgtgaaaggacaggtgaccaccaagtattatagattcttggcaaaacacggaggatgggtgtgggtccagtcctacgcgacaatcgtccacaactcgcgcagtagccgacctcactgtatagtgtctgttaattacgttctgaccgacaccgaatacaaagggctgcagctcagtctagaccagatcagcgcgtctaaaccagctttctcttatacaagcagctccacgcccaccatgactgacaatagaaaaggtgccaaatctagactgtcttcttctaaatccaaatcaaggactagtccctatcctcaatactctggctttcacaccgaacggagcgagtcagaccatgatagccaatggggaggctcccccttgacagataccgcaagcccccagctgctcgatcctgccgacagacctgggagccaacacgatgctagttgtgcttacagacagttcagcgacagaagcagtctgtgctacggcttcgcacttgatcatagtagattggtggaggaaagacatttccatacacaggcttgtgagggcggacgttgcgaggccggaagatacttcctaggaacccctcaggcaggacgcgaaccctggtggggctctcgtgcagcgctgcctttaacaaaggcgtcccccgagagcagagaggcctacgaaaacagtatgcctcacatcgctagcgtgcatcgtatacacgggaggggtcactgggacgaggatagcgtcgttagcagccctgatccgggttccgcttcagaatctggtgaccggtacagaactgagcagtatcagtcctctccccacgagccttccaagatcgaaaccctgatacgagctactcagcaaatgatcaaggaagaggaaaaccgcctgcagctcagaaaggctcccagtgatcaactcgccagcatcaatggagccggaaagaagcactcattgtgcttcgcaaattatcagcagcctcccccaaccggagaagtgtgccacggatccgcactggcaaatacaagcccttgcgatcatattcagcagagagaaggaaagatgctgtctccacatgaaaatgactacgataactctcctactgcactatcccgaatctcctctcctaatagcgacagaatctccaagagttcccttatcctcgcaaaggactacctgcatagtgacatttcaccacaccaaaccgcaggagaccaccctactgtgagtcccaattgttttggctctcatcgacagtacttcgacaaacacgcttatacgttaaccggctatgcactcgagcacctgtacgactctgaaactattaggaactacagcctgggatgtaacggttcccactttgacgtgacttcccaccttcggatgcagcccgaccctgctcagggccacaaagggacaagtgtgattattacaaatggcagttag

SEQ ID NO: 280813 - DNA, 2301 bp, Artificial Sequence
  derived and/or modified sequence
atgaaggaaaaatcgaagaacgccgctaggacgaggagggaaaaggaaaactccgaattttatgagctggccaagctactgccgctgccaagcgccatcacaagccagctggataaggcctcaatcatccggctcaccacatcatatctgaagatgcgcgtggtgttccctgagggactcggcgaggcctggggccatagtagcaggacctcacccctagacaacgtcggaagagaactcggatcacatttgttgcagacattggacggtttcatctttgtggtggcacccgatggcaagatcatgtatatatccgaaacagccagcgtccatctgggcctgagccaggtggagcttacaggcaactctatatatgagtatattcatcccgctgatcacgacgaaatgactgcagttctgactgcccaccagccttatcacagtcacttcgtacaagaatatgaaattgagcgtagtttcttcctcaggatgaagtgtgttctagcgaaaagaaatgcaggactgacctgcggaggttataaagttatccattgtagtggatatttgaagattaggcagtactccctggacatgagcccttttgatggatgttaccagaatgtgggcctggtcgcagtcggacactccttaccgccatcagccgtgactgaaatcaaacttcactctaacatgtttatgttccgcgcatctctagacatgaagctgattttcctggactcgcgggtggccgaactcacagggtatgagcctcaagatctcatagagaagactctctaccaccatgtgcacggatgtgacaccttccatctccgatgcgcacaccatctgctactggtaaaaggacaagtaactaccaagtattaccgctttctggctaaacacggcggttgggtttgggtgcaatcttacgcaacaatcgttcataacagtcggtcttcccgtccccattgcatcgttagtgtcaattacgtcctaacagacactgaatataaggggttacaattgagcctcgatcaaatcagcgctagcaaacctgccttctcatacaccagctcatctacccccacaatgacggataatcgcaagggagctaagtctaggctgtcaagctccaagtcaaaaagtcggactagtccctacccccagtattctggcttccatacggagaggagcgaaagtgaccatgacagtcaatggggcggttcacctctgactgatacagcctcaccgcagctacttgatccagccgaccggccaggctctcaacacgatgcatcgtgtgcctaccgtcagttctcagatcgttcctcactgtgttatgggttcgccctagaccattcccgcctggtggaggaaaggcactttcacacacaggcttgcgagggtggccgatgcgaggctgggagatattttctgggcacaccgcaggccggtagggagccatggtgggggagtcgcgctgcattgcctcttacaaaggctagccctgaaagccgcgaagcttatgagaactctatgcctcatatcgctagcgtccaccgaatccatggcagaggccactgggacgaagattcagtggtgagcagccctgacccaggctcagctagcgagtccggagatagatacagaactgagcagtatcagtctagcccccacgagcctagcaagatagagactttgattcgtgctactcagcagatgattaaagaggaagaaaacagactgcagttaagaaaggccccaagtgaccagctggcctcgatcaatggcgcagggaaaaagcactcattgtgttttgccaactaccagcagcctcctccaaccggcgaggtctgccatgggtcagcactggccaataccagcccttgcgaccacatccagcagcgtgagggtaaaatgctgtctccacacgagaacgattacgacaattcacctaccgctctgtctcgcatcagctcacccaattccgacagaatctctaagagcagcctgatcctggctaaggattacctgcactctgacatttcacctcatcagactgcaggtgatcatccaactgtgagcccaaactgttttggaagtcaccggcagtatttcgataaacatgcctatactcttaccgggtacgccctcgaacacctctatgactcagagaccatcaggaattattcactcggatgtaacggctcgcatttcgatgtcacttctcatctgcgaatgcaacctgaccccgcacaaggccacaaggggacaagtgttatcatcaccaatggctcctag

SEQ ID NO: 280814 - DNA, 3999 bp, Artificial Sequence
  derived and/or modified sequence
cccgaattttcaaagaacatattttccgttcacccccgctggtcttttactgccatcaatacactgttcttggtgcaaatacttcagcctctttattcaaagtatgttttatgtttttgccaaatatgatctctaattgaaagtttatttttggttttggatgaatctgcggagcttaagttgtgagaagaaagggggaacaagacacaatgaaagaaaagtccaaaaatgctgcgcggactaggagggagaaggaaaacagtgaattttatgaactggctaaattactgcctttgccctcggctatcacctcgcagctggacaaagcatccataatcagactcacgaccagctatctcaaaatgagagtggtgttcccagaagggctcggcgaggcgtggggccactcaagtcggaccagccccctggacaacgttggccgagaactgggctcccatctgctccagaccctggatggcttcatcttcgtggtagccccagatgggaagatcatgtacatctcagagacagcctcagtccacttgggtctttctcaggtagagctgaccggaaacagcatttatgaatacattcacccggcagaccacgacgagatgacggcggtgctcaccgcccatcaaccctaccactctcacttcgtgcaggagtatgagatcgagcgctccttcttcctgaggatgaagtgcgtcttggccaagcgtaacgccggcctcacctgtggcggctacaaggtcatccactgcagcggctacttgaagatccgccagtacagcctggacatgtcccccttcgacggctgctaccaaaacgtgggcctggtggccgtgggccactcgctgcctcccagcgccgtcacggagatcaagctacacagcaatatgtttatgttccgcgccagcctggacatgaagctcatctttctggactccagggtggcggagctgacggggtacgaacctcaggacctgattgagaagactctgtaccaccatgtgcacggctgcgacaccttccacctgcgctgcgcgcaccatttgctgctggtgaagggacaggtgaccaccaagtactacaggttcctggcgaaacacggcggctgggtatgggtgcagagctacgcgaccatcgtgcacaacagtcgctcctccaggccacactgtatcgtcagcgtcaactatgtcctcacagacacagaatacaaagggctgcagctctccctggatcagatctcagcctccaaaccagccttctcctataccagcagctccacccccaccatgactgacaacagaaagggggccaaatcccggctctccagctcaaagtcaaaatccaggacttccccataccctcagtattcgggatttcacacagaaagatcggaatctgatcatgacagccagtggggcggaagtcccttgaccgacacggcctctccgcagcttctggaccccgccgataggcctggctcccagcacgacgcatcgtgcgcctacagacagttttcggaccgcagctctctctgctatggctttgcgcttgaccactcgaggctggtggaagagaggcatttccatacccaggcctgtgaaggaggccgatgtgaggcaggcaggtacttcctgggaacgccgcaggccgggagggagccctggtggggctctcgcgcagccttgcccctgacaaaggcctccccagaaagcagagaagcctatgaaaacagcatgcctcacatcgcttcagtccacaggatccatgggcgaggtcattgggatgaagatagtgtggtcagttctccagaccctgggtcggccagtgaatcaggtgaccgatatcgtactgagcagtatcaaagtagcccacatgaacccagcaaaattgaaactcttataagagccactcagcaaatgattaaagaagaagagaacagattacagctaaggaaagccccctcagaccaactggcttccattaatggggctgggaaaaaacactccctgtgttttgcaaactaccaacagcccccaccaacaggtgaagtctgccatggctctgctcttgccaacacttcaccatgtgaccatatccagcagagagagggaaaaatgttgagcccccatgaaaatgactatgacaacagtcccaccgcactatctcggataagtagtcccaattcggatcgcatttcaaaatccagtttgatcctagctaaagactatctgcattcggatatatctcctcatcagacagcaggagaccaccctactgtctctccaaactgctttggctctcaccggcagtattttgacaagcatgcttacacattaactggatatgccctggagcacttatatgacagcgaaaccattagaaactattccttgggctgtaatggctcacactttgatgtaacttcccatctgaggatgcaaccagacccagcacaaggacacaagggaacatctgttataataaccaacggaagctgatgttttgctgaaatattttgttctttaaggatctctgaaacatatttatagtttaataccccattaccagcatttactatgccacagattgttagagagtataacttaagttactgggtatttgatacgtgttcctataaaatcaaagaaaacatagcactagcattcagggttatacacagaaaagggagctaaattgaatacacaaatttcccctctaattatatgggaaccagaatagataaattttgacttgaaaaatattcatgtagatcaagtgtgcatatatactacatgagaggactgatgaatgacaacattgcattgtgactatccagtgatcctcaaacacacaaactattacttacaaactgcggtatacattttacatatggaaatataggctatgtaatgtaaatacatcaaaaatgggtaattttctttgactctgtcacactaaacttcttaacgaaatttccattcccaaaataactgagaaagagagagatacatcttataaactgacttctttgtggtttcaaatcagccagctcatttggttcaggcataaattagagaaatggttctggatatggtgcaaaaatgagttttcacctggtatccattataaacaatcaggaagaggtaatttttcaccttgcttttcagttagacaaggaccaggattgcactgacatggcgctgagggtttttctaagtaagaacactgagatattgggacacacatcaaaaacctggagtgctcaattggaagtagttctatgaatatggaaaggccagaggcagagtgaaataaaatgctatctcaaagtttaacacaatttaagggctcagcataagtaaacaacatatttggggtttgcttgtaaaaccaactaaataaaaaattcaaaccaattcacccagaaaaaagaccaataggtgcaaaaataaaaggaaaaccagtgaagtgccacatgacagcagtgttaagtgtttgaaaacgtttcaaagcacatatgtgccaatgtgacaacatgtggaaagcctcaggagagagtctaagataaaagcttaggctgatagacaagtagttaagagctaagagcagtactctgaaggaataggcaaaatgtttattttccttattgtttgtaaacaacaaacttggtcttacatctgtgtggtatagtagaaaggccagctgactagatctctggattctaattttggccctacctgtaacttaattttgtgaccacagttgtaccattcaccgtgcctgggctctagtttcctggtttgtaaggcagccccagcgttcatgttctgtgatagagcagaactgaacttattacctaattaactctctgctatgagttgtcaagactgatcattctgttttttctgtacacagaagtttagatgctttgtgacttaagcaggtgtgtgggctcctttaggcaggttacagttaactttctagatt

SEQ ID NO: 280815 - DNA, 8430 bp, Artificial Sequence
  derived and/or modified sequence
aaacccttaagctataaagaagttacggggggcagttttcggcttccaattaggaataatagtgaactggcttcgtagcaactacggaggaccaggattctaaaatcacctcactcgtcccaaagcttgcatcctcctctttctgccacgcacccctcctccaattcatgatccagaaaagggagccgggaatgctctgctcctctctgccggtgggaagcggagaggccggcggtgtcgctgggttggacggtaggcatgagaacagttaagagatgggcgcccccgaaacctctgccgcttgtggggactgaagggccttgaaagagttgtctggggttcctgctcttcccaaaggggctcggagataccttaaatgccgcgagactgaagagcaaacgtcagggattattatgtcgattttccgaggaccagggttcgcagctggcagtagaagaaaaggctggctcctcaggggtcccactggcatttgataccctgaacgaccctcaggattgcccaaattcggtggatcgcccaaattcggtggatcagcaactttcctatactgcatcccgaattttcaaagaacatattttccgttcacccccgctggtcttttactgccatcaatacactgttcttggtgcaaatacttcagcctctttattcaaagtatgttttatgtttttgccaaatatgatctctaattgaaagtttatttttggttttggatgaatctgcggagcttaagttgtgagaagaaagggggaacaagacacaatgaaagaaaagtccaaaaatgctgcgcggactaggagggagaaggaaaacagtgaattttatgaactggctaaattactgcctttgccctcggctatcacctcgcagctggacaaagcatccataatcagactcacgaccagctatctcaaaatgagagtggtgttcccagaagggctcggcgaggcgtggggccactcaagtcggaccagccccctggacaacgttggccgagaactgggctcccatctgctccagaccctggatggcttcatcttcgtggtagccccagatgggaagatcatgtacatctcagagacagcctcagtccacttgggtctttctcaggtagagctgaccggaaacagcatttatgaatacattcacccggcagaccacgacgagatgacggcggtgctcaccgcccatcaaccctaccactctcacttcgtgcaggagtatgagatcgagcgctccttcttcctgaggatgaagtgcgtcttggccaagcgtaacgccggcctcacctgtggcggctacaaggtcatccactgcagcggctacttgaagatccgccagtacagcctggacatgtcccccttcgacggctgctaccaaaacgtgggcctggtggccgtgggccactcgctgcctcccagcgccgtcacggagatcaagctacacagcaatatgtttatgttccgcgccagcctggacatgaagctcatctttctggactccagggtggcggagctgacggggtacgaacctcaggacctgattgagaagactctgtaccaccatgtgcacggctgcgacaccttccacctgcgctgcgcgcaccatttgctgctggtgaagggacaggtgaccaccaagtactacaggttcctggcgaaacacggcggctgggtatgggtgcagagctacgcgaccatcgtgcacaacagtcgctcctccaggccacactgtatcgtcagcgtcaactatgtcctcacagacacagaatacaaagggctgcagctctccctggatcagatctcagcctccaaaccagccttctcctataccagcagctccacccccaccatgactgacaacagaaagggggccaaatcccggctctccagctcaaagtcaaaatccaggacttccccataccctcagtattcgggatttcacacagaaagatcggaatctgatcatgacagccagtggggcggaagtcccttgaccgacacggcctctccgcagcttctggaccccgccgataggcctggctcccagcacgacgcatcgtgcgcctacagacagttttcggaccgcagctctctctgctatggctttgcgcttgaccactcgaggctggtggaagagaggcatttccatacccaggcctgtgaaggaggccgatgtgaggcaggcaggtacttcctgggaacgccgcaggccgggagggagccctggtggggctctcgcgcagccttgcccctgacaaaggcctccccagaaagcagagaagcctatgaaaacagcatgcctcacatcgcttcagtccacaggatccatgggcgaggtcattgggatgaagatagtgtggtcagttctccagaccctgggtcggccagtgaatcaggtgaccgatatcgtactgagcagtatcaaagtagcccacatgaacccagcaaaattgaaactcttataagagccactcagcaaatgattaaagaagaagagaacagattacagctaaggaaagccccctcagaccaactggcttccattaatggggctgggaaaaaacactccctgtgttttgcaaactaccaacagcccccaccaacaggtgaagtctgccatggctctgctcttgccaacacttcaccatgtgaccatatccagcagagagagggaaaaatgttgagcccccatgaaaatgactatgacaacagtcccaccgcactatctcggataagtagtcccaattcggatcgcatttcaaaatccagtttgatcctagctaaagactatctgcattcggatatatctcctcatcagacagcaggagaccaccctactgtctctccaaactgctttggctctcaccggcagtattttgacaagcatgcttacacattaactggatatgccctggagcacttatatgacagcgaaaccattagaaactattccttgggctgtaatggctcacactttgatgtaacttcccatctgaggatgcaaccagacccagcacaaggacacaagggaacatctgttataataaccaacggaagctgatgttttgctgaaatattttgttctttaaggatctctgaaacatatttatagtttaataccccattaccagcatttactatgccacagattgttagagagtataacttaagttactgggtatttgatacgtgttcctataaaatcaaagaaaacatagcactagcattcagggttatacacagaaaagggagctaaattgaatacacaaatttcccctctaattatatgggaaccagaatagataaattttgacttgaaaaatattcatgtagatcaagtgtgcatatatactacatgagaggactgatgaatgacaacattgcattgtgactatccagtgatcctcaaacacacaaactattacttacaaactgcggtatacattttacatatggaaatataggctatgtaatgtaaatacatcaaaaatgggtaattttctttgactctgtcacactaaacttcttaacgaaatttccattcccaaaataactgagaaagagagagatacatcttataaactgacttctttgtggtttcaaatcagccagctcatttggttcaggcataaattagagaaatggttctggatatggtgcaaaaatgagttttcacctggtatccattataaacaatcaggaagaggtaatttttcaccttgcttttcagttagacaaggaccaggattgcactgacatggcgctgagggtttttctaagtaagaacactgagatattgggacacacatcaaaaacctggagtgctcaattggaagtagttctatgaatatggaaaggccagaggcagagtgaaataaaatgctatctcaaagtttaacacaatttaagggctcagcataagtaaacaacatatttggggtttgcttgtaaaaccaactaaataaaaaattcaaaccaattcacccagaaaaaagaccaataggtgcaaaaataaaaggaaaaccagtgaagtgccacatgacagcagtgttaagtgtttgaaaacgtttcaaagcacatatgtgccaatgtgacaacatgtggaaagcctcaggagagagtctaagataaaagcttaggctgatagacaagtagttaagagctaagagcagtactctgaaggaataggcaaaatgtttattttccttattgtttgtaaacaacaaacttggtcttacatctgtgtggtatagtagaaaggccagctgactagatctctggattctaattttggccctacctgtaacttaattttgtgaccacagttgtaccattcaccgtgcctgggctctagtttcctggtttgtaaggcagccccagcgttcatgttctgtgatagagcagaactgaacttattacctaattaactctctgctatgagttgtcaagactgatcattctgttttttctgtacacagaagtttagatgctttgtgacttaagcaggtgtgtgggctcctttaggcaggttacagttaactttctagatttagccaaaatgtagttggtagaaatttatgacagagaagaaaaatagcaagatttatttaatgctctattctctagtaattaaagcaaaatgatataagtgattagagagatttcatagataatatttcctaggagtcccgtgcccaaaactcttgccatatttaaggaagggaatgtactggcagaacttgacttacaattttggaaacagaacatgaaattgaatactcagggattagtagtatattttcatcatttaacacagttatttcacagtccataggtaggtgacaatctgaacgataatatgaaagatgagtactgggttgtttgtatatgaaaggagaggctacataaaattaaataatgttaacatttgtgctgtaaatgcaaaaaagtgcaagtaagtgagaaagttagtggttatatatattttcaaaaaattcaaagtgcagttgacccttgaataacatgggtttgaactgtgcagattcacttatgtgtggttttttttccaatcaaatgcagataaaaaacccagtatttggagaaatgtgaaacctgagtatacagagggcgatgttttgtataagtgagcgccacagggccaacaggcaggacttgagtatgtgagaatttgattatatgggggtaatcctggaaccaactccctgtttataccaaggggtgaccatacaataaaaactaagttttgaattatacaaaaaagagtatttagtaattttgagaaaattatttatgagaaatcctggaatacataaaatggagttttgatcaatttgcaacatgaagtaatgtcttaagaatgctaaaggttttgtagaattctgtagattgatagatgtttggaagaaaaaatatttgatgaatatggtgtattttggaaaggtaattttcacagatgggtatttctggtggctatatattctaccaaatgtgccagggacagaagctaaaagaaatggaaacttaagaaccagggaaaatgaactgatattaaagaaaaggctgtcactaaaggaatttcagtggaatttttatatggaagatagttaactggtgagaagaagaaattatgaatttcacagatgagagtaatcagaaggaataatgctctttaaaatgacatgaccaatatttttaagagaatacagaattaactaaattatatattgattcaaaattttggtagattgacccagttttaagtacataaccattttaaaatttactgaatgtcaataattttatagtagcagttttattacattacataaaatgtcatattgactcactatattgtatagcttacattttttgcaatatggcatgattatcacaaaatgacccaaggtaagttaagacatttgatgacaatgtactttcttaatatacatgtgaatgtgttaaaatgtgtttataatctacattattttgttctgtgcagcaacatatttcctcataatgaagatgtcatctgtgtcttttaaaaatagtatataaaataactacgttcccgataatttaatcagttaaacttaatatggctttagttttaattcttgatttccataactttgccaaatgttgagaaacatgaaacttgattgaaatagatacagaagtatgattttcatatcaccttggggatacataaaaatgtgctctatccaattactggtataatatgtatcaattcattagatgatacatagctcatggttttgtagaattctggtttctagtgataataagtatctttattgcccatttcacctgccatacctactttaaaaatttggatgaccaaagaagtgaatgaagtttccccaatctttcttgggaaaattctgtttaaattgttattgggaatatatagatttgatgtgttattttgggatgtgtaatattaatgtcacaatcactacaggtcagatatttaggtgtgcttcggtccacaagtcttttgtcatattgtgctcgcttacctaaactgtaattgcctgataaaagataatatgacagtgctgaggtgacattcaaaatgagacgggatgcaataaatgattgccttcagtatttacacagaaaaaccacttgctctttcttggttatatttcatagggctagattgtttccatcgggcactattcttaattcactctataccgtgttgtcacatgctgcctctgggcagagaatcccacttaaaataagctttaggggatcttctagaaaagggtagtgtgctccaatttttatttctccttcttatgggggatgaggatcaattatagtacaagaccatttggaaaatatgcatatatattttaaaatgaaatacaagatttccgccctcaagatctaaaccaagtaagtttgatggatggcagcacagataaagaaatcttctgaatacacatttgatttttatagctctctctttcaagagtaggatattactaagatattcagtgcaatctatcagtcctagtagtatttagaagtgacagagtgaatgctgatatttggaaaattgagcatttgaccattttggggtcactcacctggcctagtggaatagcttacactttaatacaatcaaacacagtctttctgatataaaatgtttgaatgcccagatttggttccctagttcactcaaatcatagatgttgacatacatcctgttttcataatgattttaaaaagaatgtaaatcctatggtcctccaaataaatgattcaacgtttatgtaaatgtcaagtttttgtgaatagggatttatgtctaagacagaaaaatctactgaactagttcttactgtggaactaattgtggataaaacattcgttatcatctaaattttaaatgaatgacaacagttatggacacatgcaaaaggtatcagacatagaaaatattgttgggggaaatttctgtgtggtgctaatttcttgtaagggttgtacagatagtgcttaactcaaaaagtgagagtgtggtcattgccaaataggggtttgctcagagttccttctctaggactgtatgcagaaagcatacacacacacatacgcacacagaaaaatatgatttttatatcatattcatgaaaatgtgccatatccaattataacacacacacacacacacacacacacacacacacacacacataaataaataaatgatggttcacataagaaatcctaattgctaattttaaaccaaacatttgtagttttgtttattgcaactttgctgcatgggactttgctttcataaatctatatggggttggggttaatttgccctaatttgctgacctgggacacatgtaatcactgttaaacttacacccggtaaccctgatgtgtttacatttcaaaagaaatgaaattggcctggaaaaaaattttggaagtactgtaagtcttttttctttttttttccgaagggaaatatttcaaaaaaggaaacattatgagtagacacttcaaaaaagataaaatattttacatttgttttttgactaatgtgctataaaaaggattatatttgtgagaaaagatactgatcgccaatatttcaaataccgtcttgcaatgtatagtttttagtgacattgtagtataaagctgtaatttgaaattttactttggaatgtaaagtagaaaatattagctatgtcaatgatatcttgcaaagtgttcccatttataattatttatattgtaaatagctttctgaagtaaattcgaagttaatgtgcataaaatgtatttattatgtgaggaattttttggtttaaaatatagttaccaatatgca

SEQ ID NO: 280816 - DNA, 2301 bp, Artificial Sequence
  derived and/or modified sequence
atgaaggagaagagcaagaacgccgccagaaccagaagagagaaggagaacagcgagttctacgagctggccaagctgctgcccctgcccagcgccatcaccagccagctggacaaggccagcatcatcagactgaccaccagctacctgaagatgagagtggtgttccccgagggcctgggcgaggcctggggccacagcagcagaaccagccccctggacaacgtgggcagagagctgggcagccacctgctgcagaccctggacggcttcatcttcgtggtggcccccgacggcaagatcatgtacatcagcgagaccgccagcgtgcacctgggcctgagccaggtggagctgaccggcaacagcatctacgagtacatccaccccgccgaccacgacgagatgaccgccgtgctgaccgcccaccagccctaccacagccacttcgtgcaggagtacgagatcgagagaagcttcttcctgagaatgaagtgcgtgctggccaagagaaacgccggcctgacctgcggcggctacaaggtgatccactgcagcggctacctgaagatcagacagtacagcctggacatgagccccttcgacggctgctaccagaacgtgggcctggtggccgtgggccacagcctgccccccagcgccgtgaccgagatcaagctgcacagcaacatgttcatgttcagagccagcctggacatgaagctgatcttcctggacagcagagtggccgagctgaccggctacgagccccaggacctgatcgagaagaccctgtaccaccacgtgcacggctgcgacaccttccacctgagatgcgcccaccacctgctgctggtgaagggccaggtgaccaccaagtactacagattcctggccaagcacggcggctgggtgtgggtgcagagctacgccaccatcgtgcacaacagcagaagcagcagaccccactgcatcgtgagcgtgaactacgtgctgaccgacaccgagtacaagggcctgcagctgagcctggaccagatcagcgccagcaagcccgccttcagctacaccagcagcagcacccccaccatgaccgacaacagaaagggcgccaagagcagactgagcagcagcaagagcaagagcagaaccagcccctacccccagtacagcggcttccacaccgagagaagcgagagcgaccacgacagccagtggggcggcagccccctgaccgacaccgccagcccccagctgctggaccccgccgacagacccggcagccagcacgacgccagctgcgcctacagacagttcagcgacagaagcagcctgtgctacggcttcgccctggaccacagcagactggtggaggagagacacttccacacccaggcctgcgagggcggcagatgcgaggccggcagatacttcctgggcaccccccaggccggcagagagccctggtggggcagcagagccgccctgcccctgaccaaggccagccccgagagcagagaggcctacgagaacagcatgccccacatcgccagcgtgcacagaatccacggcagaggccactgggacgaggacagcgtggtgagcagccccgaccccggcagcgccagcgagagcggcgacagatacagaaccgagcagtaccagagcagcccccacgagcccagcaagatcgagaccctgatcagagccacccagcagatgatcaaggaggaggagaacagactgcagctgagaaaggcccccagcgaccagctggccagcatcaacggcgccggcaagaagcacagcctgtgcttcgccaactaccagcagcccccccccaccggcgaggtgtgccacggcagcgccctggccaacaccagcccctgcgaccacatccagcagagagagggcaagatgctgagcccccacgagaacgactacgacaacagccccaccgccctgagcagaatcagcagccccaacagcgacagaatcagcaagagcagcctgatcctggccaaggactacctgcacagcgacatcagcccccaccagaccgccggcgaccaccccaccgtgagccccaactgcttcggcagccacagacagtacttcgacaagcacgcctacaccctgaccggctacgccctggagcacctgtacgacagcgagaccatcagaaactacagcctgggctgcaacggcagccacttcgacgtgaccagccacctgagaatgcagcccgaccccgcccagggccacaagggcaccagcgtgatcatcaccaacggcagctag

SEQ ID NO: 280817 - DNA, 528 bp, Artificial Sequence
  derived and/or modified sequence
atgctgagcgaggaggagaaggaggagctgaaggccgagctggtgcagctggaggacgagatcaccaccctgagacaggtgctgagcgccaaggagagacacctggtggagatcaagcagaagctgggcatgaacctgatgaacgagctgaagcagaacttcagcaagagctggcacgacatgcagaccaccaccgcctacaagaagacccacgagaccctgagccacgccggccagaaggccaccgccgccttcagcaacgtgggcaccgccatcagcaagaagttcggcgacatgagctacagcatcagacacagcatcagcatgcccgccatgagaaacagccccaccttcaagagcttcgaggagagagtggagaccaccgtgaccagcctgaagaccaaggtgggcggcaccaaccccaacggcggcagcttcgaggaggtgctgagcagcaccgcccacgccagcgcccagagcctggccggcggcagcagaagaaccaaggaggaggagctgcagtgctag

SEQ ID NO: 280818 - DNA, 528 bp, Artificial Sequence
  derived and/or modified sequence
atgctgagcgaggaagagaaagaagaattgaaagcggagctggtccaactggaggacgagataacaactctgagacaggtgctttccgccaaggaacggcatctggtcgagataaaacagaaactgggcatgaatctgatgaatgagttgaagcaaaatttcagcaagagctggcacgacatgcagactacaactgcctataaaaagacccatgaaactctgtcgcacgcaggtcaaaaagctactgctgcattttcaaatgtgggtactgccatcagcaagaagttcggtgacatgtcctattccatacgacactccataagcatgcctgctatgaggaactcccccacgttcaaatctttcgaagagcgggtcgagaccacagtaacatccctcaagacgaaggtaggtgggacaaatcctaacggaggatcattcgaagaagtgcttagttctaccgctcacgctagcgcccagagtctagcaggaggtagtcggcgcacaaaggaggaagaactgcaatgttag

SEQ ID NO: 280819 - DNA, 528 bp, Artificial Sequence
  derived and/or modified sequence
atgctgtctgaggaggagaaggaggagctgaaggccgagctggtgcagctggaggatgagatcaccaccctgcggcaggtgctgagcgccaaggagcggcacctggtggagatcaagcagaagctgggcatgaacctgatgaatgagctgaagcagaacttcagcaagtcctggcatgacatgcagaccaccacagcctacaagaagacccatgagaccctgagccatgctggccagaaggccacagctgccttcagcaatgtgggcacagccatcagcaagaagtttggagacatgagctacagcatccgccacagcatctccatgcctgccatgaggaacagccccaccttcaagagctttgaggagcgggtggagaccaccgtgaccagcctgaagaccaaggtgggcggcaccaaccccaacggcggcagctttgaggaggtgctgagcagcacagcccacgccagcgcccagagcctggccggcggcagcaggaggaccaaggaggaggagctgcagtgctag

SEQ ID NO: 280820 - DNA, 528 bp, Artificial Sequence
  derived and/or modified sequence
atgctgagcgaggaggagaaggaggagctgaaggccgagctggtgcaactggaagatgagattacgaccctgaggcaagtgctgtctgcaaaggaacgacacctggtggagatcaaacagaaactaggaatgaaccttatgaacgagttaaagcaaaatttttcaaagagctggcacgatatgcagactacgacggcgtataaaaagactcacgaaactcttagtcacgcggggcagaaggctactgctgcctttagtaatgtgggcacagccatcagcaaaaagtttggcgatatgtcgtatagtattcggcactctatctctatgcctgccatgcgcaattctccaacatttaagtcattcgaggagcgcgtcgagaccactgtaacctccctaaagactaaagtagggggaacaaatcccaatggcggcagctttgaggaagtcttgtccagtacagcccacgctagtgcccaatctcttgcaggcgggtcacgccggacaaaagaggaggaactgcagtgctag

SEQ ID NO: 280821 - DNA, 528 bp, Artificial Sequence
  derived and/or modified sequence
atgctgagcgaggaagaaaaggaggaactgaaagccgagcttgtgcaactcgaggatgaaattacaaccctcaggcaggtgctgagtgctaaggagaggcaccttgtggagattaagcagaaactgggcatgaacttgatgaacgagctcaagcagaatttctccaaaagctggcatgatatgcagaccacgactgcatataagaaaacgcacgaaaccctgagtcacgccggacagaaagccaccgctgctttctccaacgtgggaactgcgatctctaaaaagttcggcgacatgagctattccattcgacactccatctcaatgccggcaatgagaaacagtcctacattcaaatctttcgaggaacgggtcgaaactacggtaactagtctcaagaccaaagttggcggaactaatccaaatggagggagttttgaggaagtcctgagtagtacagcccatgcatcagcacagtccttagccggtgggagccgacggacaaaggaggaagaactgcagtgctag

SEQ ID NO: 280822 - protein, 153 aa, Artificial Sequence
  derived and/or modified sequence
MSGLAATTFHWKKCRLDLPGHVALQACKRLPDEHNDVQKKTFTKWINARFSKSGKPPINDMFTDLKDGRKLLDLLEGLTGTSLPKERGSTRVHALNNVNRVLQVLHQNNVELVNIGGTDIVDGNHKLTLGLLWSIILHWQVDVMKDVMSDLQQ

SEQ ID NO: 280823 - DNA, 462 bp, Artificial Sequence
  derived and/or modified sequence
atgagcggcctggccgccaccaccttccactggaagaagtgcagactggacctgcccggccacgtggccctgcaggcctgcaagagactgcccgacgagcacaacgacgtgcagaagaagaccttcaccaagtggatcaacgccagattcagcaagagcggcaagccccccatcaacgacatgttcaccgacctgaaggacggcagaaagctgctggacctgctggagggcctgaccggcaccagcctgcccaaggagagaggcagcaccagagtgcacgccctgaacaacgtgaacagagtgctgcaggtgctgcaccagaacaacgtggagctggtgaacatcggcggcaccgacatcgtggacggcaaccacaagctgaccctgggcctgctgtggagcatcatcctgcactggcaggtggacgtgatgaaggacgtgatgagcgacctgcagcagtag

SEQ ID NO: 280824 - DNA, 462 bp, Artificial Sequence
  derived and/or modified sequence
atgtcaggactggcagctactacctttcattggaaaaagtgtcggctggacttacccgggcatgttgctctccaggcatgcaaacggttgcccgatgaacataacgacgttcaaaagaagacgtttacaaagtggatcaatgcgcgcttcagtaagtcgggaaaaccccccatcaatgatatgttcacggacctgaaagacgggcgtaagctcttggacctgctggaaggactgaccggaacatcactgccaaaggaacgcggcagcactcgcgtacacgcacttaataatgtcaatcgtgtcctacaggtgctacatcagaacaacgtcgagctggtgaatatcggaggcactgacatagtcgacggaaatcataaactcactctgggattattgtggtcaatcatcctgcactggcaggtggacgtcatgaaggatgtaatgagcgaccttcaacagtag

SEQ ID NO: 280825 - DNA, 462 bp, Artificial Sequence
  derived and/or modified sequence
atgagcggcctggccgccaccaccttccactggaagaagtgccgcctggacctgcccggccacgtggccctgcaggcctgcaagaggctgcctgatgagcacaatgatgtgcagaagaagaccttcaccaagtggatcaatgcccgcttcagcaagagcggcaagccacccatcaatgacatgttcacagacctgaaggatggcaggaagctgctggacctgctggagggcctgaccggcaccagcctgcccaaggagcggggcagcaccagggtgcacgccctgaacaacgtgaacagagtgctgcaggtgctgcaccagaacaacgtggagctggtgaacattggaggaacagacatcgtggatggcaaccacaagctgaccctgggcctgctgtggagcatcatcctgcactggcaggtggatgtgatgaaggatgtgatgtctgacctgcagcagtag

SEQ ID NO: 280826 - DNA, 462 bp, Artificial Sequence
  derived and/or modified sequence
atgagcggcctggccgccaccaccttccactggaagaagtgccggctggatctgccagggcacgtggctctccaggcatgcaaacgtctaccagacgagcataacgatgtgcaaaaaaagacatttaccaaatggataaacgcaagattctctaaatcaggcaaaccgccgattaacgacatgttcacagatctgaaagatggaagaaagctgctagatttgcttgaagggctgacagggacatctctgcctaaggaaagaggatccaccagggtccacgcactgaataacgtgaatcgagtgctgcaggtactccatcagaataacgtggaacttgtgaatatcggaggaacggatatcgtggatggaaaccacaaactcaccctcgggctcctgtggagtatcatactccattggcaggttgacgttatgaaggatgttatgtccgatcttcagcagtag

SEQ ID NO: 280827 - DNA, 462 bp, Artificial Sequence
  derived and/or modified sequence
atgtcaggcctggccgcaaccacgtttcattggaagaagtgcaggctcgatttaccgggacacgtggcactgcaagcatgcaaacgacttccggatgaacataatgatgtgcagaagaaaacattcactaagtggataaacgccagattcagcaaatcaggaaagcctccaataaacgatatgttcaccgatctcaaggatggccgtaagctgctcgacctgctggagggcctgaccgggaccagtctgccaaaggaacgaggttcaaccagggtgcacgccttaaataatgtaaatagggttctgcaagtgctgcaccagaacaacgtcgagctcgtcaatatcggcggtactgacatcgtggacggaaatcacaaactgaccctgggattgctatggtccataatactgcactggcaggttgacgtgatgaaagacgtcatgagcgaccttcagcaatag

SEQ ID NO: 280828 - DNA, 569 bp, Artificial Sequence
  derived and/or modified sequence
aaaaaaaaaacccaaaataacacaggacatcccagtgtgcagttcgaaggctgcttttgttgtccacttcctccacatctttttcctcatcatctaagcagatgtaggtgatgagcggcctggcagccaccacgtttcattggaaaaagtgcagattggatttgccagggcatgtagctctccaggcttgcaagcgattaccagatgaacacaatgacgtacagaagaaaacctttaccaaatggataaatgctcgattttcaaagagtgggaaaccacccatcaatgatatgttcacagacctcaaagatggaaggaagctattggatcttctagaaggcctcacaggaacatcactgccaaaggaacgtggttccacaagggtacatgccttaaataacgtcaacagagtgctgcaggttttacatcagaacaatgtggaattagtgaatatagggggaactgacattgtggatggaaatcacaaactgactttggggttactttggagcatcattttgcactggcaggtggatgtcatgaaggatgtcatgtcggacctgcagcag

SEQ ID NO: 280829 - protein, 745 aa, Artificial Sequence
  derived and/or modified sequence
MEEELQHSHCVNCVSRRCMTRPEPGISCDLIGCPLVCGAVFHSCKADEHRLLCPFERVPCLNSDFGCPFTMARNKVAEHLEMCPASVVCCTMEWNRWPVSYADRKSYENLSRDVDEVAQLDMALALQDQRMLLESLKVATMMSKATDKVSKPREQISVKSSVPEIPHANGLVSVDEESYGALYQATVETTRSLAAALDILNTATRDIGMLNTSVPNDMDEQQNARESLEDQNLKDQDHLYEEEIGAVGGIDYNDTNQNAQSEQNGSSDLLCDLNTSSYDTSALCNGFPLENICTQVIDQNQNLHGDSKQSNLTNGDCVASSDGTSKPSSSLAVAAQLREIIPSSALPNGTVQHILMPDDEGEGELCWKKVDLGDVKNVDVLSFSHAPSFNFLSNSCWSKPKEDKAVDTSDLEVAEDPMGLQGIDLITAALLFCLGDSPGGRGISDSRMADIYHIDVGTQTFSLPSAILATSTMVGEIASASACDHANPQLSNPSPFQTLGLDLVLECVARYQPKQRSMFTFVCGQLFRRKEFSSHFKNVHGDIHAGLNGWMEQRCPLAYYGCTYSQRRFCPSIQGAKIIHDRHLRSFGVQPCVSTVLVEPARNCVLGLHNDHLSSLPFEVLQHIAGFLDGFSLCQLSCVSKLMRDVCGSLLQSRGMVILQWGKRKYPEGNSSWQIKEKVWRFSTAFCSVNEWKFADILSMADHLKKCSYNVVEKREEAIPLPCMCVTRELTKEGRSLRSVLKPVL

SEQ ID NO: 280830 - DNA, 4376 bp, Artificial Sequence
  derived and/or modified sequence
gaaaaggcggcggcccggctggggaagaggggcggaggaggcggttcggacggctgtgtggggtacggagcgtcgccgggacagagcggagcagctgggcacggcgtccagggcagctagggcctgggccgcggttcggccgcgccggccgagctggactggccattatggaggaggagctgcagcattcccattgtgtgaattgtgtcagtagacggtgcatgaccaggccagagccagggatttcctgtgatttgattggttgtccattggtttgtggtgcagttttccattcttgtaaagctgatgagcatcgacttttatgtccatttgaacgagtgccttgcttaaatagtgactttggatgtccatttaccatggcccgaaataaagttgctgaacatctagaaatgtgtcctgcaagtgtggtgtgctgtactatggaatggaatcgatggccagttagttatgcagaccggaaatcatatgaaaatctaagcagagatgtcgatgaagtggcacaattggatatggccttggctcttcaagaccaaaggatgctcttagaatccctcaaagtagccaccatgatgtcaaaagcaactgataaagtatccaaacctagagaacaaatctcagttaaatcaagtgtcccagaaataccacatgctaatggtttagtgtctgttgatgaagaatcttatggtgcactttatcaagctactgtagaaacaaccagaagtttggctgctgctttggatatcctgaatactgctacaagagacattggcatgttaaatacaagtgtcccaaatgacatggatgaacagcaaaatgcgagagaaagcttagaggatcaaaacttgaaagaccaagatcatctttatgaggaggaaataggagcagtaggtggaattgactacaatgacacaaatcagaatgcccagtctgaacaaaatggttcaagtgatttattatgtgacttgaatacaagttcttatgacacttctgctctttgtaatggctttcctttggaaaatatatgtacccaggtcatagaccagaatcagaatttacatggtgattcaaaacaaagtaacttaacaaatggagactgtgtggcatcatcagatggcacttcaaaaccttccagctcacttgcggtggcagcacaacttagggaaataataccatccagtgctttgcctaatggcacagttcagcatatcctcatgccagatgatgaaggtgaaggtgaattgtgttggaaaaaagtagacttaggggacgtgaagaatgtggatgtcttatctttcagtcatgctccttcattcaattttctttctaattcatgttggtctaaaccaaaggaagataaagcagtagatacatcagatttggaagttgcagaagatcctatgggcctccaaggaatagatctgatcacagcagcattgcttttttgtctaggagattctccaggagggaggggtatatctgatagccgcatggctgatatttatcacattgacgttgggactcagactttttcacttccatctgcaatattagctacaagtacaatggttggggagatagcttcagcttcagcttgtgatcatgccaatccacagctttcaaatccaagtccgtttcagacacttgggctggatttagtattggaatgtgtcgctaggtaccaacccaagcagcgttcaatgtttacctttgtgtgtggacagttatttagaaggaaagaattttcttcccactttaagaatgtgcatggtgacattcatgctggactcaatggctggatggaacagaggtgccctttagcttactatggttgtacctattctcagcgtagattttgtccatcaatacaaggagcaaagattatacatgaccgccatttgaggtcatttggagttcagccatgtgtatctacagtattagtggagcctgctagaaactgtgtgttgggattacataatgaccatctaagtagtcttccttttgaggtcctgcagcatattgcaggctttctcgatggcttcagcttatgtcagctctcatgtgtatccaagttaatgagggatgtgtgtggcagcctgcttcagtctcgtggcatggtcatactgcagtgggggaaaaggaagtatccagaaggaaattcatcatggcagataaaagaaaaggtatggcgatttagtactgcattttgttctgttaatgaatggaaatttgctgacatcctaagcatggcagaccacttgaagaaatgcagttacaatgttgtcgagaaacgggaggaagcaatccctttgccatgtatgtgtgtgacacgagaactcactaaagaaggacgttcactacgctcagttttaaaacctgtactttaaaagttgtaatattactagcacatatatgcaagcacctagtataatttctttgtaatatgtgaaactttattaatgtattaaatattacaactagctaaatttattgtcactgtgtatataatgttttgaagtgacatctatttttataaagtactgtttagttggaaaaagttgccttaatgtttgaaatgtgtgaaatttttggaacttgctggacagggtgatttaatttttagctacataattttaagaattagtattttcagtggtgtgcatattttggttcttaaatttttgcttcttaaactaaaaaaatcctgaccaatttatttgttgttttctgtgggttgcgacccatgcaatcaaaaagcaaaattttgattgagattttttacagcataggtttttcatataaaaatattctgaatttgttaagcactgccataatatcattataatgtttttgtcttttagtgcttccctatacaattgttaatgcacaaatgatctctaatatatacttacatacgtaaaatcataaagtttggtaatgcagtttatcgttttaaaaataatccacaaagatgtttttatctcacatacttacaactcaacacacagagtgaccatgtgcagctttcttttttgttagatgccacatccgaagactcatcgcagtgtgttatatgacaggacaaagcaaaaacaaacaaaaagcaagcctgtgaatataatttaatttgaaactgctcctggtattatatatttgctagttatctaatgttttaaaagaaaatatacctcatttaggtttgaattgggcgtattgtgtaaatttcaaatattcagaatgcaaagggcttgactattaaatgtttgcctttgatgtttataaacattacaactatgttgttttaagacatttaaaaacgtgaaatttgttatctttgtaaaatgacaatcatgtagaaacctgtcttggttgacaatctctttgaaacatttccgagttaatttcccataggcttcaccaccaagaaagtaagaattgcatctttacataatgatcaaggtataatggaaaaatatacctattcttgaagtagtttattatagttttcaaattgatttataccattattaacctgatgtggtctgcttaaaaaatgaatatatcagtatttagaaataaattgcaaaggtgggaatatatacttaaataatttgtcttaagtaaattagcatttggtagtctgaaatggtgacagattacttgttaaaattgtgaaaactctgttgtgtcctctcttcctacatttgtccctgagagtactccacgattactaggttcttgattcccttatatggcaatcaggcagaggcgttccttaagcattagagagttctgaagcttaagatttgttttggttggatgaagtccttagtacagttgaaaaacagagcattaaagactaatcaattgttttgcctcaccagtcattttaaatagtagaatacttatttctcagtgcttaaaatttctttttcaactgtgagattgaataaacagtctctatttctgtggaaaaaacaacagaaaagagatattaaataccataaaatgtaactctgccttttaaagttttgctgaagaatgtgtctgtggttaggatagcacaagcattaacttttgttttatagttatgctttttaaaattcattgtttttaaatttagacttcttatttccacactggattatgagatacttaacaatttttccaccttatatttcttttacacattttgctgttctcttttttgttattgttatgccaccataccattttgttaaaatgttttctttgtgaaacatttgttcaagttctaataaaattaatgttttcccttaacatggctcaataacttaaaaacgttcatttaaataaaattttaatacttgtttgacaaa

SEQ ID NO: 280831 - DNA, 2238 bp, Artificial Sequence
  derived and/or modified sequence
atggaggaggagctgcagcattctcactgtgtgaattgcgtcagccgacggtgcatgacccgccctgaacccgggattagctgcgatctaatcggatgtcctctggtctgcggtgctgtgtttcacagttgcaaggccgatgaacaccgtttgttatgcccattcgagagagtaccgtgcctgaatagcgactttgggtgccctttcactatggccagaaacaaagtggcggagcatttggagatgtgtccagcaagcgtggtgtgctgtacaatggagtggaaccgatggcctgtgtcatatgccgataggaaatcctacgaaaatctaagtcgcgacgtcgacgaggttgcccagctagacatggccctggccttacaagaccagagaatgctgttagagtccttaaaggtggcaacgatgatgtctaaagcaactgataaagtgagtaagccaagagaacagatttcagtcaaatcatcggtacccgagattccgcacgcgaatggcctcgtctctgtggatgaagagtcctacggagccctttaccaagccacagtggagactactcgttccctggccgccgccctggacattcttaacactgccactagagacatcggaatgctgaacacatcagtccccaatgatatggatgagcaacagaatgcgcgtgaatcgctcgaagatcagaatctcaaggatcaagaccacttgtatgaggaggagatcggcgccgtgggaggtattgactataacgacacaaatcaaaatgctcagagcgaacagaatggtagcagcgatcttctatgtgacttaaatacttctagctacgataccagcgctctctgcaacgggtttcctctagagaatatttgcacccaggtgatcgaccagaatcaaaacttgcatggagactctaaacagagtaacctgacaaatggcgactgtgtcgcgagctctgacggcacatctaaaccttcatctagcctcgctgtggccgctcagctcagagaaatcataccctcaagcgcgcttccaaacggaacggttcagcatatcctgatgcccgacgacgaaggcgagggagagctgtgctggaaaaaagtcgacctcggcgatgttaaaaatgttgatgtgttgagctttagccacgcaccaagctttaacttcctgtctaattcctgttggtcgaaaccaaaggaagacaaggcggtggatacatctgacctcgaagtagccgaagatcctatgggattgcaggggatagatctcataaccgctgctttgctgttttgcctgggtgatagcccaggggggagggggatttccgatagcagaatggcagacatataccatattgacgtgggaacgcagacttttagcctgccttctgccattctcgccacctcgacaatggtcggagagattgcctccgcgtctgcgtgtgaccatgcgaatcctcagctaagcaaccctagccccttccagacactgggcctggatctcgttctcgagtgtgtggctaggtaccagccaaagcagagaagtatgttcacgtttgtgtgcgggcaactttttcgcagaaaagaattctcaagccattttaagaacgtgcacggtgacattcacgcaggcctgaacgggtggatggagcagaggtgcccactcgcatactatggatgtacttactctcagcggcggttttgcccttccatccagggagccaagatcatacacgacaggcatttacggtccttcggggtgcaaccttgcgtttcaaccgtgttagtggagccggctcgcaattgcgttctggggctgcataatgatcatctctccagcctgccctttgaagtgttgcaacacattgccgggttcctcgatggattcagtctgtgtcagttgtcttgcgtatccaaactgatgagagatgtgtgtggatcccttctccagagcagagggatggtcattctccagtggggtaagaggaagtaccctgaaggcaactcctcttggcaaattaaggagaaagtctggcggttttctaccgcattttgttcagtaaacgagtggaagtttgcagatatcctctccatggcggaccatctgaagaagtgctcctataacgtggtggagaaacgagaggaagcgatccctttgccctgtatgtgcgtgactcgggaactgaccaaggaaggtcggtccctgcgcagtgtcctgaaacccgttctctag

SEQ ID NO: 280832 - DNA, 2238 bp, Artificial Sequence
  derived and/or modified sequence
atggaggaggagctgcagcacagccactgtgtgaactgtgtgagccgccgctgcatgaccaggcctgagcccggcatcagctgtgacctgattggctgccccctggtgtgtggggctgtgttccacagctgcaaggcagatgagcaccggctgctgtgcccctttgagcgggtgccctgcctgaacagcgactttggctgccccttcaccatggccaggaacaaggtggccgagcacctggagatgtgcccagcctctgtggtgtgctgcaccatggagtggaaccgctggcctgtgtcctatgctgacaggaagagctatgagaacctgagcagagatgtggatgaggtggcccagctggacatggccctggccctgcaggaccagaggatgctgctggagagcctgaaggtggccaccatgatgagcaaggccacagacaaggtgtccaagccccgggagcagatctctgtgaagagctctgtgcctgagatcccccacgccaacggcctggtgtctgtggatgaggagagctatggagccctgtaccaggccaccgtggagaccaccaggagcctggccgccgccctggacatcctgaacacagccacccgggacatcggcatgctgaacacctctgtgcccaatgacatggatgagcagcagaatgcccgggagagcctggaggaccagaacctgaaggaccaggaccacctgtatgaggaggagatcggggctgtgggcggcatcgactacaatgacaccaaccagaatgcccagagcgagcagaatggcagcagtgacctgctgtgtgacctgaacaccagcagctatgacaccagcgccctgtgcaatggcttccccctggagaacatctgcacccaggtgattgaccagaaccagaacctgcacggggacagcaagcagagcaacctgaccaacggggactgtgtggccagcagtgatggcaccagcaagcccagcagcagcctggccgtggccgcccagctgcgggagatcatccccagcagcgccctgcccaacggcaccgtgcagcacatcctgatgccagatgatgaaggagagggggagctgtgctggaagaaggtggacctgggagatgtgaagaatgtggatgtgctgtccttcagccacgcccccagcttcaacttcctgagcaacagctgctggagcaagcccaaggaggacaaggctgtggacaccagtgacctggaggtggccgaggaccccatgggcctgcagggcatcgacctgatcacagctgccctgctcttctgcctgggggacagccctgggggccggggcatcagtgacagcaggatggctgacatctaccacattgatgtgggcacccagaccttcagcctgcccagcgccatcctggccaccagcaccatggtgggggagatcgccagcgccagcgcctgtgaccacgccaacccccagctgagcaaccccagccccttccagaccctgggcctggacctggtgctggagtgtgtggcccgctaccagcccaagcagaggtccatgttcacctttgtgtgtggccagctgttccggaggaaggagttcagcagccacttcaagaatgtgcacggggacatccatgctggcctgaatggctggatggagcagcgctgccccctggcctactacggctgcacctacagccagaggcgcttctgccccagcatccagggcgccaagatcatccatgacagacacctgcggagctttggagtgcagccctgtgtgtccacagtgctggtggagcccgccaggaactgtgtgctgggcctgcacaatgaccacctgagcagcctgccctttgaggtgctgcagcacatcgccggcttcctggatggcttcagcctgtgccagctgagctgtgtgtccaagctgatgagagatgtgtgtggcagcctgctgcagagccggggcatggtgatcctgcagtggggcaagaggaagtacccagagggcaacagctcctggcagatcaaggagaaggtgtggaggttcagcacagccttctgcagcgtgaatgagtggaagtttgctgacatcctgtccatggctgaccacctgaagaagtgcagctacaacgtggtggagaagcgggaggaggccatccccctgccctgcatgtgtgtgacccgggagctgaccaaggagggccgcagcctgcggtctgtgctgaagcctgtgctgtag

SEQ ID NO: 280833 - DNA, 2238 bp, Artificial Sequence
  derived and/or modified sequence
atggaggaggagctgcagcacagccactgcgtgaactgcgtgagccggcgctgtatgacaaggcctgagccagggatatcctgcgatctcatcggctgccctctggtctgtggcgccgtcttccatagctgtaaggctgacgagcaccgcctcctgtgtccatttgaacgggttccctgtctcaatagcgatttcggttgtcccttcactatggccagaaataaagtggccgagcatctagagatgtgccctgcttctgttgtttgttgtaccatggaatggaacaggtggccggtttcttatgcagatcgcaaaagctacgaaaacctctcaagggacgtggacgaggttgcccagctagatatggctctggcactgcaggatcagcgtatgctactagaaagcctaaaggtcgccacaatgatgagcaaggcaacagacaaggtttccaagccccgcgaacagataagcgttaaatccagtgtgcccgagataccgcacgccaatgggctcgtgagtgtcgatgaggaatcctacggggctttgtatcaagcgacagtcgaaactacacggtcactggcagccgctctcgacatactaaacaccgcaaccagagacataggaatgttaaatacatccgttcctaacgacatggatgaacagcagaatgcacgagaatctcttgaagaccagaacttgaaagaccaggaccatctctacgaggaggaaattggagcagtgggcggaatagactacaatgatacgaaccagaatgcgcaaagcgaacaaaatggaagtagcgacctgctgtgtgatctgaatacgtcctcttacgacaccagcgctctgtgcaacggttttcctttggaaaatatctgcacccaagtgattgaccagaaccagaatcttcatggggattctaagcagtcgaatctgacaaacggggattgcgtggcctcgagcgatgggacctccaagccctccagctccctagccgtggctgcgcagttgcgtgaaattatcccttcgtctgcattaccgaacgggacggtgcagcatattctgatgccagacgatgaaggcgaaggtgagctgtgttggaagaaagtagatctgggagacgtcaagaacgtggacgtactgtcatttagtcacgcaccaagctttaatttcttgtcaaactcatgttggtctaagccgaaggaagataaagccgtggacacctctgacctcgaggtggcggaggatcccatgggacttcagggaatcgatcttattacagccgctttacttttctgcctgggcgacagccctggtggtcggggaatatccgacagtcggatggcagatatataccacattgatgtgggaacacaaactttttctttgccaagtgctattctcgctacatcaactatggttggtgagattgctagtgcatccgcgtgcgaccatgccaacccacagctctcaaacccgtcgccgtttcagacactggggctggaccttgttctggagtgcgttgcccggtatcagcctaagcagaggtccatgttcacgtttgtgtgcggtcagctgttcaggcgcaaggagttctcgagtcacttcaagaatgtgcacggggatatacacgcaggacttaatggatggatggaacagcggtgcccactcgcttattatggctgtacatacagtcagaggcgcttttgtcccagcattcagggggccaagataatccacgaccgtcatctgagatccttcggcgttcagccctgcgtgtccactgtgttggtcgagcctgccagaaactgcgttctgggcctccacaacgatcatttgtcatctttgccttttgaggtgctccagcacattgcgggctttctggatggattttctctgtgtcagctgagctgcgtgtcaaaattgatgcgggacgtttgtggttcactgctgcagagtagggggatggtgatcctgcagtggggaaagagaaagtaccccgagggaaatagtagctggcagatcaaggagaaagtctggagattctccacagccttttgcagtgtgaatgagtggaaatttgccgacattctgtccatggccgaccacctaaagaagtgctcttataacgtggtggaaaagagagaggaggctatcccactgccctgcatgtgtgtgactagagagctgaccaaggagggaagaagcctgcgctccgtgcttaagcctgttctttag

SEQ ID NO: 280834 - DNA, 2238 bp, Artificial Sequence
  derived and/or modified sequence
atggaggaagaacttcaacactcccattgcgtgaattgcgtctcacgacggtgcatgaccagaccagagcccggaattagctgtgatttgatcggctgccctctagtctgcggagccgtgttccacagctgtaaggcagatgagcatcggctcctctgcccatttgagagagtgccttgcttgaactccgacttcggctgtccctttacgatggcacgcaataaggtggcggagcacttggagatgtgccccgcttccgtggtgtgctgcaccatggaatggaaccgatggcccgtcagttatgccgaccgcaagagctatgagaatctctcacgtgacgtggatgaggtggctcagctggacatggcactcgctttacaggaccaaagaatgctgctggagtctttgaaggtggccacaatgatgtctaaagccacagataaagtgagcaagccaagggaacaaatcagcgtcaagtctagcgtccccgagattcctcacgccaacggactggtttcagtggatgaggaatcctacggtgccttgtatcaagctaccgtagagacaacccggtctctcgcagccgctctggatatcctgaacacggccacaagggatattgggatgctgaacacctctgtgcccaacgatatggatgaacagcaaaacgcacgggagtccttagaggatcagaatctcaaggaccaggaccacctttacgaggaggagataggtgccgtaggagggatcgactacaacgataccaatcagaatgcccaatcagagcagaacggcagcagcgacctgctgtgcgatcttaacaccagtagctatgacacatcagcattgtgtaatgggtttcctctggagaacatctgtacacaagtaattgatcagaatcagaaccttcacggcgattccaagcaaagtaatctgactaatggggactgcgtggcgtcatccgacggaaccagtaaaccctcttcgtcacttgctgtggccgcacagctgcgggaaatcatcccttcctccgccttacctaacggaaccgtccagcacattctgatgcccgacgacgaaggtgagggagagctgtgttggaagaaggtcgacctcggggatgtgaagaacgtcgacgtgttgtcattctctcacgcaccatcgtttaattttctgtcaaacagctgctggtccaaaccgaaggaagataaggcagtggacacatccgacctcgaagtggccgaagatcccatgggactgcaagggatcgatttgatcacagccgctcttctgttctgtctgggcgattccccaggcggaagaggtatctcggattctcggatggcagacatctaccatatcgatgtgggtacccagacgttctcgctgccctcagccatcttggccacgagcaccatggttggtgagatcgcttctgcatctgcctgtgatcatgctaatcctcagctgagcaacccgagccctttccagaccctgggattagacttggtgctcgagtgtgtcgccaggtaccagcctaagcagcgtagtatgtttactttcgtgtgcggacagctcttcagacgtaaagagttcagcagccattttaagaacgtccatggggatatccacgccggattaaacggttggatggaacagcgctgtccactggcctattacgggtgtacatatagtcagagacggttttgccctagcattcagggtgctaagatcatccacgataggcatttgagaagcttcggagtgcaaccatgtgtcagtaccgttctggtggagcccgcacggaactgcgtgctgggccttcacaatgatcatctgagctccctgccgttcgaagtgctgcagcatattgccggattcctggacggattttctctctgtcaactcagctgcgtgagcaaacttatgagagacgtttgcggctctttgctgcagagtcggggaatggttattttgcagtgggggaagagaaagtacccagagggcaacagcagctggcaaattaaggagaaggtgtggcgcttttcgaccgccttctgctccgtgaatgaatggaaatttgcagatatcctgtctatggcagaccacctcaaaaagtgttcatacaatgttgttgaaaaaagagaggaggccatacctcttccatgtatgtgcgtgactcgcgagctgaccaaagaaggtcgatccctgcgctcagttctgaagcctgtgctctag

SEQ ID NO: 280835 - DNA, 2238 bp, Artificial Sequence
  derived and/or modified sequence
atggaggaggagctgcagcacagccactgcgtgaactgcgtgagcagaagatgcatgaccagacccgagcccggcatcagctgcgacctgatcggctgccccctggtgtgcggcgccgtgttccacagctgcaaggccgacgagcacagactgctgtgccccttcgagagagtgccctgcctgaacagcgacttcggctgccccttcaccatggccagaaacaaggtggccgagcacctggagatgtgccccgccagcgtggtgtgctgcaccatggagtggaacagatggcccgtgagctacgccgacagaaagagctacgagaacctgagcagagacgtggacgaggtggcccagctggacatggccctggccctgcaggaccagagaatgctgctggagagcctgaaggtggccaccatgatgagcaaggccaccgacaaggtgagcaagcccagagagcagatcagcgtgaagagcagcgtgcccgagatcccccacgccaacggcctggtgagcgtggacgaggagagctacggcgccctgtaccaggccaccgtggagaccaccagaagcctggccgccgccctggacatcctgaacaccgccaccagagacatcggcatgctgaacaccagcgtgcccaacgacatggacgagcagcagaacgccagagagagcctggaggaccagaacctgaaggaccaggaccacctgtacgaggaggagatcggcgccgtgggcggcatcgactacaacgacaccaaccagaacgcccagagcgagcagaacggcagcagcgacctgctgtgcgacctgaacaccagcagctacgacaccagcgccctgtgcaacggcttccccctggagaacatctgcacccaggtgatcgaccagaaccagaacctgcacggcgacagcaagcagagcaacctgaccaacggcgactgcgtggccagcagcgacggcaccagcaagcccagcagcagcctggccgtggccgcccagctgagagagatcatccccagcagcgccctgcccaacggcaccgtgcagcacatcctgatgcccgacgacgagggcgagggcgagctgtgctggaagaaggtggacctgggcgacgtgaagaacgtggacgtgctgagcttcagccacgcccccagcttcaacttcctgagcaacagctgctggagcaagcccaaggaggacaaggccgtggacaccagcgacctggaggtggccgaggaccccatgggcctgcagggcatcgacctgatcaccgccgccctgctgttctgcctgggcgacagccccggcggcagaggcatcagcgacagcagaatggccgacatctaccacatcgacgtgggcacccagaccttcagcctgcccagcgccatcctggccaccagcaccatggtgggcgagatcgccagcgccagcgcctgcgaccacgccaacccccagctgagcaaccccagccccttccagaccctgggcctggacctggtgctggagtgcgtggccagataccagcccaagcagagaagcatgttcaccttcgtgtgcggccagctgttcagaagaaaggagttcagcagccacttcaagaacgtgcacggcgacatccacgccggcctgaacggctggatggagcagagatgccccctggcctactacggctgcacctacagccagagaagattctgccccagcatccagggcgccaagatcatccacgacagacacctgagaagcttcggcgtgcagccctgcgtgagcaccgtgctggtggagcccgccagaaactgcgtgctgggcctgcacaacgaccacctgagcagcctgcccttcgaggtgctgcagcacatcgccggcttcctggacggcttcagcctgtgccagctgagctgcgtgagcaagctgatgagagacgtgtgcggcagcctgctgcagagcagaggcatggtgatcctgcagtggggcaagagaaagtaccccgagggcaacagcagctggcagatcaaggagaaggtgtggagattcagcaccgccttctgcagcgtgaacgagtggaagttcgccgacatcctgagcatggccgaccacctgaagaagtgcagctacaacgtggtggagaagagagaggaggccatccccctgccctgcatgtgcgtgaccagagagctgaccaaggagggcagaagcctgagaagcgtgctgaagcccgtgctgtag

SEQ ID NO: 280836 - protein, 267 aa, Artificial Sequence
  derived and/or modified sequence
MSAGPQAMLGRRVVLWATSSSMFLFGIAAAFAVDYYTFMAARFFLAMVASGYLVVGFVYVMEFIGMKSRTWASVHLHSFFAVGTLLVALTGYLVRTWWLYQMILSTVTVPFILCCWVLPETPFWLLSEGRYEEAQKIVDIMAKWNRASSCKLSELLSLDLQGPVSNSPTEVQKHNLSYLFYNWSITKRTLTVWLIWFTGSLGFYSFSLNSVNLGGNEYLNLFLLGVVEIPAYTFVCIAMDKVGRRTVLAYSLFCSALACGVVMVIPQ

SEQ ID NO: 280837 - DNA, 804 bp, Artificial Sequence
  derived and/or modified sequence
atgtcagccggcccacaggccatgctgggacgtcgagtggttctgtgggctacttccagctcaatgttcctctttgggatagcagccgcctttgcagtggattactacacctttatggccgctcgtttctttctcgcaatggtggcttctgggtatctcgtggtcgggtttgtgtacgtgatggagtttatcggtatgaagagccggacatgggcatctgtgcacctccactcattctttgcggtaggcaccctgttggtggcacttaccggatacttagtgcgcacctggtggctgtatcaaatgatcctgtccaccgtgaccgtgccttttattctgtgctgctgggtcctgccagagactccattctggcttctgtcggaaggccgctacgaggaagcgcagaagattgtggatatcatggccaaatggaatcgggcatcatcttgtaagttgtcagaactcctgagtttagacctacagggacccgtgtcaaatagcccgaccgaggtacagaagcataacctgtcctatctgttttataactggtcaataaccaagcgcaccctcaccgtgtggctcatttggtttacaggatccctcggattctattccttcagcctgaattcagtgaatctgggagggaatgaatacttaaacctgtttttgctaggagttgtcgaaatccccgcttataccttcgtgtgcattgcaatggacaaggttggccgcaggaccgtgcttgcttattcactgttctgttccgcattagcttgtggcgtggtgatggtgatcccacagtag

SEQ ID NO: 280838 - DNA, 804 bp, Artificial Sequence
  derived and/or modified sequence
atgtctgctggcccccaggccatgctgggcagaagagtggtgctgtgggccaccagcagctccatgttcctgtttggaattgctgctgcctttgctgtggactactacaccttcatggccgcccgcttcttcctggccatggtggccagcggctacctggtggtgggctttgtgtatgtgatggagttcatcggcatgaagagcaggacctgggcctctgtgcacctgcacagcttctttgctgtgggcaccctgctggtggccctgaccggctacctggtgaggacctggtggctgtaccagatgatcctgagcacagtgacagtgcccttcatcctgtgctgctgggtgctgcctgagacccccttctggctgctgtctgagggccgctatgaggaggcccagaagatcgtggacatcatggccaagtggaacagagccagcagctgcaagctgtctgagctgctgagcctggacctgcagggccctgtgagcaacagccccacagaggtgcagaagcacaacctgagctacctgttctacaactggagcatcaccaagaggaccctgactgtgtggctgatctggttcaccggcagcctgggcttctacagcttcagcctgaacagcgtgaacctgggcggcaatgagtacctgaacctcttcctgctgggcgtggtggagatcccagcctacacctttgtgtgcatcgccatggacaaggtgggccgcaggacagtgctggcctacagcctcttctgcagcgccctggcctgtggggtggtgatggtgatcccccagtag

SEQ ID NO: 280839 - DNA, 804 bp, Artificial Sequence
  derived and/or modified sequence
atgagcgccggcccccaggccatgctgggccggcgggtggtgctgtgggccacctcctccagcatgttcctgtttggtatcgccgccgctttcgcagttgattactatacgtttatggctgccaggttcttcctggctatggtcgcaagcgggtatctggtggtggggttcgtgtatgtgatggaatttattggcatgaaatcccggacttgggccagtgtgcacctgcattctttctttgccgtgggcactctgcttgtggcgctcacaggttacctcgtgcgcacctggtggttatatcaaatgatcctttctacagtgactgtgcccttcatcctctgctgttgggttttgcctgaaacccccttttggctgctttccgagggcagatacgaagaggcccagaagatcgtagatatcatggcaaagtggaatagagccagttcatgcaagctttccgaactgctcagcctggatctgcagggtcctgtgagtaatagtcctactgaagtacagaaacacaatcttagctacctcttttataactggagcattaccaaaagaactcttaccgtctggctgatttggtttacggggtcccttggcttttattctttctctttgaattccgttaacctaggtggcaatgaatacctgaacctgttcttgcttggcgtagtggagatcccagcctacactttcgtttgcattgcaatggacaaagtgggcagacggaccgttcttgcctacagcctcttctgttccgctctggcatgcggcgtggttatggtaattcctcagtag

SEQ ID NO: 280840 - DNA, 804 bp, Artificial Sequence
  derived and/or modified sequence
atgtctgctggccctcaggctatgttgggtaggcgggttgtactgtgggctacgtcttctagcatgttcctgtttggtattgccgcagcctttgccgtcgattattacactttcatggccgctaggttcttcctggccatggtggcaagtggttacctcgtcgtgggatttgtctacgtgatggagttcatcggcatgaagagccgtacatgggcctcagttcacttgcactctttcttcgctgtgggaacactactggtggcactcaccggttaccttgtccggacctggtggttatatcagatgatactatcaaccgttaccgtgccctttatactttgttgctgggtgctgccagagacacctttctggctcctttctgaagggcgttatgaggaggcccaaaaaatagtggacattatggctaagtggaatagggcctcatcatgcaaactgtccgagctgttgtctctggatctccagggcccagtgagcaattccccaaccgaggtccagaagcacaacctcagctatctgttctacaactggtccatcaccaagcgtactctgaccgtgtggttgatttggttcactggttccctgggcttctattcattctccctcaattccgttaacctgggcggaaacgaatatctgaacctatttcttttaggcgtagtagaaattcctgcctatactttcgtatgtatcgccatggacaaggtgggcagacggaccgtgctggcatacagcttgttttgctcagccctggcatgcggggtagttatggtcataccgcagtag

SEQ ID NO: 280841 - DNA, 804 bp, Artificial Sequence
  derived and/or modified sequence
atgagcgccggcccccaggccatgctgggcagaagagtggtgctgtgggccaccagcagcagcatgttcctgttcggcatcgccgccgccttcgccgtggactactacaccttcatggccgccagattcttcctggccatggtggccagcggctacctggtggtgggcttcgtgtacgtgatggagttcatcggcatgaagagcagaacctgggccagcgtgcacctgcacagcttcttcgccgtgggcaccctgctggtggccctgaccggctacctggtgagaacctggtggctgtaccagatgatcctgagcaccgtgaccgtgcccttcatcctgtgctgctgggtgctgcccgagacccccttctggctgctgagcgagggcagatacgaggaggcccagaagatcgtggacatcatggccaagtggaacagagccagcagctgcaagctgagcgagctgctgagcctggacctgcagggccccgtgagcaacagccccaccgaggtgcagaagcacaacctgagctacctgttctacaactggagcatcaccaagagaaccctgaccgtgtggctgatctggttcaccggcagcctgggcttctacagcttcagcctgaacagcgtgaacctgggcggcaacgagtacctgaacctgttcctgctgggcgtggtggagatccccgcctacaccttcgtgtgcatcgccatggacaaggtgggcagaagaaccgtgctggcctacagcctgttctgcagcgccctggcctgcggcgtggtgatggtgatcccccagtag

SEQ ID NO: 280842 - DNA, 264 bp, Artificial Sequence
  derived and/or modified sequence
atggaacgaaacaccatttacactggatggctgcagtcgaatctgatactagatccagtggagaaccaggccctgcatccggtaattatggccctgattctcatgcccagcctgcactgttttgggaatatcctcattctgttattcctcaaatctccagcccaactcttttgccggataggcagatttgagacaggggaggagaaaacgaggcgcagggaaggcagtgacgtgaccacagaggctgctataggggtgatgtag

SEQ ID NO: 280843 - protein, 618 aa, Artificial Sequence
  derived and/or modified sequence
MNQESTTIKVMEKPPFDRSISQDSLDELSMEDYWIELENIKKSSENSQEDQEVVVVKEPDEGELEEEWLKEAGLSNLFGESAGDPQESIVFLSTLTRTQAAAVQKRVETVSQTLRKKNKQYQIPDVRDIFAQQRESKETAPGGTESQSLRTNENKYQGRDDEASNLVGEEKLIPPEETPAPETDINLEVSFAEQALNQKESSKEKIQKSKGDDATLPSFRLPKDKTGTTRIGDLAPQDMKKVCHLALIELTALYDVLGIELKQQKAVKIKTKDSGLFCVPLTALLEQDQRKVPGMRIPLIFQKLISRIEERGLETEGLLRIPGAAIRIKNLCQELEAKFYEGTFNWESVKQHDAASLLKLFIRELPQPLLSVEYLKAFQAVQNLPTKKQQLQALNLLVILLPDANRDTLKALLEFLQRVIDNKEKNKMTVMNVAMVMAPNLFMCHALGLKSSEQREFVMAAGTANTMHLLIKYQKLLWTIPKFIVNQVRKQNTENHKKDKRAMKKLLKKMAYDREKYEKQDKSTNDADVPQGVIRVQAPHLSKVSMAIQLTEELKASDVLARFLSQESGVAQTLKKGEVFLYEIGGNIGERCLDDDTYMKDLYQLNPNAEWVIKSKPL

SEQ ID NO: 280844 - DNA, 1857 bp, Artificial Sequence
  derived and/or modified sequence
atgaaccaagagagtaccacaatcaaggtcatggagaagcctccttttgacaggtcgatatcacaagatagtctcgatgagttgtctatggaggactactggatagagttggagaacatcaaaaagagctccgagaacagccaggaagaccaggaagtggtggtcgtcaaggaacccgatgagggcgaattggaagaggaatggctgaaagaggcaggtttgtcaaatctcttcggggaatccgccggggacccccaggaaagtatcgtgttcctgagcactctgacaaggacacaggctgctgcagtccaaaaaagagtcgagacggtgtctcagaccctgcgcaaaaagaacaaacagtaccagatccctgacgtacgcgacatatttgctcagcaaagagagagcaaggagactgcccctgggggcaccgagagccagtccttaaggaccaacgagaacaagtaccagggtcgcgacgacgaggcgagtaatctggttggcgaggaaaagctcattccccccgaagagaccccagcgccagaaacggatatcaacctggaagtgagctttgccgagcaagcccttaatcaaaaagagtccagcaaagagaagatccagaagagcaagggcgatgacgctaccctccccagttttcgtcttcccaaggacaaaacaggcaccacgagaatcggagatctggcacctcaggatatgaaaaaagtgtgtcaccttgcactaatcgaactcactgcgctctacgacgtcctgggtatcgagctaaaacagcagaaggctgtgaagattaaaactaaggattccggtctgttttgtgtgcctctgactgccctcctggagcaggatcagagaaaggttccaggcatgcggatacccttgatttttcaaaaactgatttcacgtattgaagagcggggcttagagacagaaggtcttctgcgtatcccgggggctgcaatcagaatcaaaaacctgtgtcaggaactggaggctaagttctatgaaggcaccttcaattgggagagtgtgaagcaacatgatgcggcgtcgctgcttaagctgttcattagagagttgccccaaccactgctgtctgtggaatacctgaaagctttccaggcagtgcagaatttgccaactaagaaacagcaactacaggctctcaatcttttggtgattttgctgcctgacgcgaaccgagataccttgaaggcactgcttgaattcctgcagcgggtgattgataacaaggagaaaaataagatgaccgttatgaatgttgctatggtcatggcccccaacttgttcatgtgccatgctctgggtctgaaatcatctgagcaaagggagttcgtgatggcagccggaacagcaaacacaatgcatcttctgattaagtaccagaagttgctctggactatccctaaatttattgtgaaccaggtgagaaaacagaatacagagaatcacaagaaagataagcgcgccatgaaaaagctgctcaagaagatggcttacgatagagaaaagtacgagaaacaggataaatccactaatgacgctgacgtacctcaaggcgtgatcagggtacaggcgcctcatctgtccaaggtgtccatggccatccagcttactgaggaattgaaggcatctgatgtactcgcacggttcctgagccaagaaagcggcgtggctcagacgctgaaaaagggcgaggtgttcctctatgaaatcggcggcaatatcggagaaagatgcctcgatgacgacacatacatgaaggacctttaccagctgaacccaaatgccgagtgggtgattaaaagcaaacctctctag

SEQ ID NO: 280845 - DNA, 1857 bp, Artificial Sequence
  derived and/or modified sequence
atgaaccaggagagcaccaccatcaaggtgatggagaagcccccatttgacaggagcatcagccaggacagcctggatgagctgtccatggaggactactggattgagctggagaacatcaagaagagcagcgagaacagccaggaggaccaggaggtggtggtggtgaaggagccagatgaaggagagctggaggaggagtggctgaaggaggccggcctgagcaacctgtttggagagagcgctggggacccccaggagagcatcgtgttcctgagcaccctgaccaggacccaggccgctgctgtgcagaagagggtggagaccgtgtcccagaccctgaggaagaagaacaagcagtaccagatcccagatgtgcgggacatctttgcccagcagcgggagagcaaggagacagcccctgggggcacagagagccagagcctgcggaccaatgaaaacaagtaccagggcagagatgatgaggccagcaacctggtgggggaggagaagctgatccccccagaggagaccccagcccctgagacagacatcaacctggaggtgtcctttgctgagcaggccctgaaccagaaggagagcagcaaggagaagatccagaagagcaaaggagatgatgccaccctgcccagcttccggctgcccaaggacaagacaggcaccaccagaattggagacctggccccccaggacatgaagaaggtgtgccacctggccctgattgagctgacagccctgtatgatgtgctgggcatcgagctgaagcagcagaaggctgtgaagatcaagaccaaggacagcggcctcttctgtgtgcccctgacagccctgctggagcaggaccagaggaaggtgcccggcatgaggatccccctcatcttccagaagctgatcagccgcatcgaggagcggggcctggagacagagggcctgctgcgcatccctggggccgccatccgcatcaagaacctgtgccaggagctggaggccaagttctatgagggcaccttcaactgggagagcgtgaagcagcatgatgctgccagcctgctgaagctgttcatccgggagctgccccagcccctgctgtctgtggagtacctgaaggccttccaggccgtgcagaacctgcccaccaagaagcagcagctgcaggccctgaacctgctggtgatcctgctgcctgatgccaacagagacaccctgaaggccctgctggagttcctgcagagggtcatcgacaacaaggagaagaacaagatgacagtgatgaatgtggccatggtgatggcccccaacctcttcatgtgccacgccctgggcctgaagagcagcgagcagcgggagtttgtgatggctgctggaacagccaacaccatgcacctgctgatcaagtaccagaagctgctgtggaccatccccaagttcatcgtgaaccaggtgaggaagcagaacacagagaaccacaagaaggacaagagggccatgaagaagctgctgaagaagatggcctatgaccgggagaagtatgagaagcaggacaagagcaccaatgatgctgatgtgccccagggcgtcatccgggtgcaggccccccacctgagcaaggtgtccatggccatccagctgacagaggagctgaaggccagtgatgtgctggcccgcttcctgagccaggagagcggcgtggcccagaccctgaagaagggggaggtgttcctgtatgagatcggcggcaacatcggggagcgctgcctggatgatgacacctacatgaaggacctgtaccagctgaaccccaatgctgagtgggtgatcaagagcaagcccctgtag

SEQ ID NO: 280846 - DNA, 1857 bp, Artificial Sequence
  derived and/or modified sequence
atgaaccaggagagcaccaccatcaaggtgatggagaagccccccttcgataggagcataagccaagacagcttggatgagttgagcatggaagattactggatcgagctggagaatatcaagaagtcttcagagaattcacaagaagaccaggaagtggtggtcgtgaaagaacctgatgagggcgaactggaggaggaatggttgaaggaggcagggctaagcaatttattcggcgagtcagctggcgacccccaagagagtatcgtctttcttagtaccctgactcgtacacaagcggcagcagtgcagaagcgcgttgaaactgtttcacagaccctgaggaagaagaataagcaataccaaattcccgatgtgcgcgatatatttgctcagcagagggaatcgaaagaaactgctcctggaggtacagaatctcagagtttgagaaccaatgagaacaagtatcagggcagggacgacgaggcctccaaccttgttggggaagagaagctaatcccaccagaggagacacctgccccggaaacagatattaacctagaggtgtcattcgcggagcaggcactgaatcaaaaggagtccagtaaagaaaaaatccagaaaagcaagggtgacgacgccactctgccaagcttcagactccctaaggataagaccggcaccaccaggattggtgacctggcacctcaggacatgaagaaggtgtgccatttagcgcttattgaactcaccgcactatatgatgtcctaggtattgagttgaagcaacagaaggcagtaaaaattaagacaaaagattctggcttgttctgtgtccctctcactgcactcttagagcaggatcagcgaaaggtgcctggaatgagaattcccttgatatttcagaaactcatctcccggatcgaagagcggggcctggaaaccgagggtttactgagaattcccggggctgccatacgtataaagaacttatgtcaggagctagaagccaaattttatgagggcacttttaactgggaatccgtgaagcaacatgacgcagcctcacttctcaaacttttcatccgagagttaccacagccgctattgtctgttgagtatctaaaggcctttcaggcagtgcagaatctgcctacaaagaagcaacagcttcaggctcttaatttgctagttatcttacttcctgatgccaaccgggataccttgaaggccttgctcgagtttttgcaacgggtgatcgataataaggaaaaaaacaagatgactgtgatgaatgttgccatggtgatggcacccaacttattcatgtgccacgcgctcggcttgaaatcgtctgagcaaagagagtttgtcatggccgccgggactgccaacacaatgcacctcctcattaaatatcagaaactcctatggacgattcctaaatttattgtgaatcaggtgcgcaagcaaaacaccgaaaaccacaagaaggacaagcgcgcgatgaaaaagttactcaagaaaatggcctacgatcgcgaaaaatacgagaagcaagataaatccaccaatgacgccgacgtccctcagggggtgattagagttcaggctcctcatctaagtaaagtgagcatggcgatacagcttacagaagagttaaaagcttccgatgtgctcgcccgcttcctgtctcaggagagcggggtcgcacagaccttaaaaaagggcgaggtgtttttatacgagattggggggaacattggcgaaaggtgcttggacgatgacacatatatgaaggacctctaccagcttaacccgaacgccgaatgggtgatcaaaagcaaacctctgtag

SEQ ID NO: 280847 - DNA, 1857 bp, Artificial Sequence
  derived and/or modified sequence
atgaatcaggaatccacaaccattaaggtcatggagaagccccctttcgaccgcagtatcagccaggacagcctcgacgagcttagtatggaggactactggattgaactggagaacatcaagaaaagttccgaaaattcacaggaggatcaggaggtggtggtggttaaagaaccggatgaaggcgagctggaagaggaatggcttaaagaggccggtctgtccaatctgttcggcgaaagcgccggtgatccgcaggaatccattgtgttcttgtcaacccttactcggactcaagctgccgcagtgcagaaacgggtggagactgttagtcagactttgcggaagaaaaataaacagtatcagatcccagatgtgcgagatatctttgctcaacagcgagagtctaaggaaacggctcctgggggtacggagtcccagtccctgcggactaatgaaaataaataccaagggcgagatgatgaagctagcaatcttgtcggcgaagagaagctcatccccccagaagaaactcctgccccagagactgacatcaatctggaggtctcatttgcagagcaggctctgaatcagaaagagagttccaaggaaaaaattcagaagtcaaagggagacgacgctactttaccttcctttcgcctgccgaaagacaagacaggtactactcggattggcgacctggctccacaggatatgaagaaggtgtgccacttggcactgatcgaattgaccgctctgtatgatgtcctcggcattgagttaaagcaacagaaagccgtgaagatcaagacgaaagacagtggactcttttgcgtccctctgacagccctcctggagcaggaccaacgaaaggtacccggtatgcggatccccctgatattccagaagctgatttcaaggatagaggagcgaggactggaaacggaagggttgcttcggattccaggtgcagcgatccggattaagaacctgtgccaggaacttgaggctaaattctatgaggggaccttcaattgggaaagcgtgaaacaacacgacgccgctagcctgttaaagttgtttatcagggagttacctcaacccctgctgtccgtggagtacctcaaagccttccaggcggtacaaaacttgccgaccaaaaaacagcagctgcaggccctgaatcttctcgtaatcctccttcctgatgccaaccgcgacacactcaaggcactattggagtttttgcagcgggtcatcgacaataaggaaaagaacaagatgacagtgatgaatgtggccatggtaatggcccctaatcttttcatgtgccatgccctgggcctgaagtcctctgagcaacgggagttcgtaatggccgcaggcactgccaatactatgcaccttttaataaaataccaaaagctgctctggacaattccgaagttcatcgtgaaccaagtgcgtaagcagaatacagagaaccataaaaaggacaagcgggctatgaaaaagctgctgaaaaagatggcttatgaccgggagaaatacgaaaagcaggacaaatctacaaacgatgccgacgttcctcagggcgtcatacgagttcaagcacctcatctgtcaaaagtgtcgatggctatacagctgactgaggagctcaaggcgagcgatgtgctggctcgattcctcagccaggagtccggagtggctcagactctgaagaagggagaagtttttctgtatgaaatcgggggaaatatcggagagagatgtctggatgacgacacatatatgaaagacctctaccagctgaacccgaatgcagaatgggtgattaaatctaaaccattgtag

SEQ ID NO: 280848 - DNA, 1857 bp, Artificial Sequence
  derived and/or modified sequence
atgaaccaggagagcaccaccatcaaggtgatggagaagccccccttcgacagaagcatcagccaggacagcctggacgagctgagcatggaggactactggatcgagctggagaacatcaagaagagcagcgagaacagccaggaggaccaggaggtggtggtggtgaaggagcccgacgagggcgagctggaggaggagtggctgaaggaggccggcctgagcaacctgttcggcgagagcgccggcgacccccaggagagcatcgtgttcctgagcaccctgaccagaacccaggccgccgccgtgcagaagagagtggagaccgtgagccagaccctgagaaagaagaacaagcagtaccagatccccgacgtgagagacatcttcgcccagcagagagagagcaaggagaccgcccccggcggcaccgagagccagagcctgagaaccaacgagaacaagtaccagggcagagacgacgaggccagcaacctggtgggcgaggagaagctgatcccccccgaggagacccccgcccccgagaccgacatcaacctggaggtgagcttcgccgagcaggccctgaaccagaaggagagcagcaaggagaagatccagaagagcaagggcgacgacgccaccctgcccagcttcagactgcccaaggacaagaccggcaccaccagaatcggcgacctggccccccaggacatgaagaaggtgtgccacctggccctgatcgagctgaccgccctgtacgacgtgctgggcatcgagctgaagcagcagaaggccgtgaagatcaagaccaaggacagcggcctgttctgcgtgcccctgaccgccctgctggagcaggaccagagaaaggtgcccggcatgagaatccccctgatcttccagaagctgatcagcagaatcgaggagagaggcctggagaccgagggcctgctgagaatccccggcgccgccatcagaatcaagaacctgtgccaggagctggaggccaagttctacgagggcaccttcaactgggagagcgtgaagcagcacgacgccgccagcctgctgaagctgttcatcagagagctgccccagcccctgctgagcgtggagtacctgaaggccttccaggccgtgcagaacctgcccaccaagaagcagcagctgcaggccctgaacctgctggtgatcctgctgcccgacgccaacagagacaccctgaaggccctgctggagttcctgcagagagtgatcgacaacaaggagaagaacaagatgaccgtgatgaacgtggccatggtgatggcccccaacctgttcatgtgccacgccctgggcctgaagagcagcgagcagagagagttcgtgatggccgccggcaccgccaacaccatgcacctgctgatcaagtaccagaagctgctgtggaccatccccaagttcatcgtgaaccaggtgagaaagcagaacaccgagaaccacaagaaggacaagagagccatgaagaagctgctgaagaagatggcctacgacagagagaagtacgagaagcaggacaagagcaccaacgacgccgacgtgccccagggcgtgatcagagtgcaggccccccacctgagcaaggtgagcatggccatccagctgaccgaggagctgaaggccagcgacgtgctggccagattcctgagccaggagagcggcgtggcccagaccctgaagaagggcgaggtgttcctgtacgagatcggcggcaacatcggcgagagatgcctggacgacgacacctacatgaaggacctgtaccagctgaaccccaacgccgagtgggtgatcaagagcaagcccctgtag

SEQ ID NO: 280849 - protein, 1374 aa, Artificial Sequence
  derived and/or modified sequence
METQLQSIFEEVVKTEVIEEAFPGMFMDTPEDEKTKLISCLGAFRQFWGGLSQESHEQCIQWIVKFIHGQHSPKRISFLYDCLAMAVETGLLPPRLVCESLINSDTLEWERTQLWALTFKLVRKIIGGVDYKGVRDLLKVILEKILTIPNTVSSAVVQQLLAAREVIAYILERNACLLPAYFAVTEIRKLYPEGKLPHWLLGNLVSDFVDTFRPTARINSICGRCSLLPVVNNSGAICNSWKLDPATLRFPLKGLLPYDKDLFEPQTALLRYVLEQPYSRDMVCNMLGLNKQTLNIAQHKQRCPVLEDQLVDLVVYAMERSETEEKFDDGGTSQLLWQHLSSQLIFFVLFQFASFPHMVLSLHQKLAGRGLIKGRDHLMWVLLQFISGSIQKNALADFLPVMKLFDLLYPEKEYIPVPDINKPQSTHAFAMTCIWIHLNRKAQNDNSKLQIPIPHSLRLHHEFLQQSLRNKSLQMNDYKIALLCNAYSTNSECFTLPMGALVETIYGNGIMRIPLPGTNCMASGSITPLPMNLLDSLTVHAKMSLIHSIATRVIKLAHAKSSVALAPALVETYSRLLVYMEIESLGIKGFISQLLPTVFKSHAWGILHTLLEMFSYRMHHIQPHYRVQLLSHLHTLAAVAQTNQNQLHLCVESTALRLITALGSSEVQPQFTRFLSDPKTVLSAESEELNRALILTLARATHVTDFFTGSDSIQGTWCKDILQTIMSFTPHNWASHTLSCFPGPLQAFFKQNNVPQESRFNLKKNVEEEYRKWKSMSNENDIITHFSMQGSPPLFLCLLWKMLLETDHINQIGYRVLERIGARALVAHVRTFADFLVYEFSTSAGGQQLNKCIEILNDMVWKYNIVTLDRLILCLAMRSHEGNEAQVCYFIIQLLLLKPNDFRNRVSDFVKENSPEHWLQNDWHTKHMNYHKKYPEKLYFEGLAEQVDPPVQIQSPYLPIYFGNVCLRFLPVFDIVIHRFLELLPVSKSLETLLDHLGGLYKFHDRPVTYLYNTLHYYEMHLRDRAFLKRKLVHAIIGSLKDNRPQGWCLSDTYLKCAMNAREENPWVPDDTYYCRLIGRLVDTMAGKSPGPFPNCDWRFNEFPNPAAHALHVTCVELMALAVSGKEVGNALLNVVLKSQPLVPRENITAWMNAIGLIITALPEPYWIVLHDRIVSVISSPSLTSETEWVGYPFRLFDFTACHQSYSEMSCSYTLALAHAVWHHSSIGQLSLIPKFLTEVLLPIVKTEFQLLYVYHLVGPFLQRFQQERTRCMIEIGVAFYDMLLNVDQCSTHLNYMDPICDFLYHMKYMFTGDSVKEQVKKIICNLKPALKLRLRFITHISKMEPAAVPPQAMNSGSPAPQSNQVPVSLPVTQ

SEQ ID NO: 280850 - protein, 1374 aa, Artificial Sequence
  derived and/or modified sequence
METQLQSIFEEVVKTEVIEEAFPGMFMDTPEDEKTKLISCLGAFRQFWGGLSQESHEQCIQWIVKFIHGQHSPKRISFLYDCLAMAVETGLLPPRLVCESLINSDTLEWERTQLWALTFKLVRKIIGGVDYKGVRDLLKVILEKILTIPNTVSSAVVQQLLAAREVIAYILERNACLLPAYFAVTEIRKLYPEGKLPHWLLGNLVSDFVDTFRPTARINSICGRCSLLPVVNNSGAICNSWKLDPATLRFPLKGLLPYDKDLFEPQTALLRYVLEQPYSRDMVCNMLGLNKQLISALQHKQRCPVLEDQLVDLVVYAMERSETEEKFDDGGTSQLLWQHLSSQLIFFVLFQFASFPHMVLSLHQKLAGRGLIKGRDHLMWVLLQFISGSIQKNALADFLPVMKLFDLLYPEKEYIPVPDINKPQSTHAFAMTCIWIHLNRKAQNDNSKLQIPIPHSLRLHHEFLQQSLRNKSLQMNDYKIALLCNAYSTNSECFTLPMGALVETIYGNGIMRIPLPGTNCMASGSITPLPMNLLDSLTVHAKMSLIHSIATRVIKLAHAKSSVALAPALVETYSRLLVYMEIESLGIKGFISQLLPTVFKSHAWGILHTLLEMFSYRMHHIQPHYRVQLLSHLHTLAAVAQTNQNQLHLCVESTALRLITALGSSEVQPQFTRFLSDPKTVLSAESEELNRALILTLARATHVTDFFTGSDSIQGTWCKDILQTIMSFTPHNWASHTLSCFPGPLQAFFKQNNVPQESRFNLKKNVEEEYRKWKSMSNENDIITHFSMQGSPPLFLCLLWKMLLETDHINQIGYRVLERIGARALVAHVRTFADFLVYEFSTSAGGQQLNKCIEILNDMVWKYNIVTLDRLILCLAMRSHEGNEAQVCYFIIQLLLLKPNDFRNRVSDFVKENSPEHWLQNDWHTKHMNYHKKYPEKLYFEGLAEQVDPPVQIQSPYLPIYFGNVCLRFLPVFDIVIHRFLELLPVSKSLETLLDHLGGLYKFHDRPVTYLYNTLHYYEMHLRDRAFLKRKLVHAIIGSLKDNRPQGWCLSDTYLKCAMNAREENPWVPDDTYYCRLIGRLVDTMAGKSPGPFPNCDWRFNEFPNPAAHALHVTCVELMALAVSGKEVGNALLNVVLKSQPLVPRENITAWMNAIGLIITALPEPYWIVLHDRIVSVISSPSLTSETEWVGYPFRLFDFTACHQSYSEMSCSYTLALAHAVWHHSSIGQLSLIPKFLTEVLLPIVKTEFQLLYVYHLVGPFLQRFQQERTRCMIEIGVAFYDMLLNVDQCSTHLNYMDPICDFLYHMKYMFTGDSVKEQVEKIICNLKPALKLRLRFITHISKMEPAAVPPQAMNSGSPAPQSNQVPVSLPVTQ

SEQ ID NO: 280851 - protein, 886 aa, Artificial Sequence
  derived and/or modified sequence
METQLQSIFEEVVKTEVIEEAFPGMFMDTPEDEKTKLISCLGAFRQFWGGLSQESHEQCIQWIVKFIHGQHSPKRISFLYDCLAMAVETGLLPPRLVCESLINSDTLEWERTQLWALTFKLVRKIIGGVDYKGVRDLLKVILEKILTIPNTVSSAVVQQLLAAREVIAYILERNACLLPAYFAVTEIRKLYPEGKLPHWLLGNLVSDFVDTFRPTARINSICGRCSLLPVVNNSGAICNSWKLDPATLRFPLKGLLPYDKDLFEPQTALLRYVLEQPYSRDMVCNMLGLNKQVLKIFKHKQRCPVLEDQLVDLVVYAMERSETEEKFDDGGTSQLLWQHLSSQLIFFVLFQFASFPHMVLSLHQKLAGRGLIKGRDHLMWVLLQFISGSIQKNALADFLPVMKLFDLLYPEKEYIPVPDINKPQSTHAFAMTCIWIHLNRKAQNDNSKLQIPIPHSLRLHHEFLQQSLRNKSLQMNDYKIALLCNAYSTNSECFTLPMGALVETIYGNGIMRIPLPGTNCMASGSITPLPMNLLDSLTVHAKMSLIHSIATRVIKLAHAKSSVALAPALVETYSRLLVYMEIESLGIKGFISQLLPTVFKSHAWGILHTLLEMFSYRMHHIQPHYRVQLLSHLHTLAAVAQTNQNQLHLCVESTALRLITALGSSEVQPQFTRFLSDPKTVLSAESEELNRALILTLARATHVTDFFTGSDSIQGTWCKDILQTIMSFTPHNWASHTLSCFPGPLQAFFKQNNVPQESRFNLKKNVEEEYRKWKSMSNENDIITHFSMQGSPPLFLCLLWKMLLETDHINQIGYRVLERIGARALVAHVRTFADFLVYEFSTSAGGQQLNKCIEILNDMVWKYNIVTLDRLILCLVRINTFLSLFS

SEQ ID NO: 280852 - protein, 1009 aa, Artificial Sequence
  derived and/or modified sequence
MERSETEEKFDDGGTSQLLWQHLSSQLIFFVLFQFASFPHMVLSLHQKYIPVPDINKPQSTHAFAMTCIWIHLNRKAQNDNSKLQIPIPHSLRLHHEFLQQSLRNKSLQMNDYKIALLCNAYSTNSECFTLPMGALVETIYGNGIMRIPLPGTNCMASGSITPLPMNLLDSLTVHAKMSLIHSIATRVIKLAHAKSSVALAPALVETYSRLLVYMEIESLGIKGFISQLLPTVFKSHAWGILHTLLEMFSYRMHHIQPHYRVQLLSHLHTLAAVAQTNQNQLHLCVESTALRLITALGSSEVQPQFTRFLSDPKTVLSAESEELNRALILTLARATHVTDFFTGSDSIQGTWCKDILQTIMSFTPHNWASHTLSCFPGPLQAFFKQNNVPQESRFNLKKNVEEEYRKWKSMSNENDIITHFSMQGSPPLFLCLLWKMLLETDHINQIGYRVLERIGARALVAHVRTFADFLVYEFSTSAGGQQLNKCIEILNDMVWKYNIVTLDRLILCLAMRSHEGNEAQVCYFIIQLLLLKPNDFRNRVSDFVKENSPEHWLQNDWHTKHMNYHKKYPEKLYFEGLAEQVDPPVQIQSPYLPIYFGNVCLRFLPVFDIVIHRFLELLPVSKSLETLLDHLGGLYKFHDRPVTYLYNTLHYYEMHLRDRAFLKRKLVHAIIGSLKDNRPQGWCLSDTYLKCAMNAREENPWVPDDTYYCRLIGRLVDTMAGKSPGPFPNCDWRFNEFPNPAAHALHVTCVELMALAVSGKEVGNALLNVVLKSQPLVPRENITAWMNAIGLIITALPEPYWIVLHDRIVSVISSPSLTSETEWVGYPFRLFDFTACHQSYSEMSCSYTLALAHAVWHHSSIGQLSLIPKFLTEVLLPIVKTEFQLLYVYHLVGPFLQRFQQERTRCMIEIGVAFYDMLLNVDQCSTHLNYMDPICDFLYHMKYMFTGDSVKEQVEKIICNLKPALKLRLRFITHISKMEPAAVPPQAMNSGSPAPQSNQVPVSLPVTQ

SEQ ID NO: 280853 - DNA, 4125 bp, Artificial Sequence
  derived and/or modified sequence
atggagactcagctgcagagcattttcgaggaagtcgtgaagaccgaagtcatcgaggaagccttcccgggcatgttcatggatacccccgaggatgaaaagaccaagttgatttcttgcctcggggctttccgccagttttggggaggcctttcccaagaatcccacgagcaatgtatccagtggatagtcaagttcatccacggtcaacactctcctaagaggattagtttcctttacgattgcctggctatggccgtcgaaaccggactcctaccgccacgcctggtctgtgaatctctcatcaacagcgatactctggagtgggagagaacccaactctgggccctcactttcaaactagtgcggaaaataataggaggcgtcgattacaagggtgtgcgggaccttcttaaggtgatcctggagaaaattctaaccatcccgaatacagtatcatcagctgtggtccaacagctattagccgcccgcgaagtaatcgcgtacatcctggaacgtaacgcctgcctgcttcccgcctattttgccgttaccgagatccgaaagttgtatcccgaagggaaacttccccattggctgttgggtaacctggtgtcagacttcgtagataccttccggcctaccgcgcgcatcaattccatctgcgggcggtgctctctcctgcccgtcgtgaacaatagtggcgcaatctgcaattcctggaagctcgacccagcaacactgcgtttccccctgaaagggcttctcccgtacgacaaggaccttttcgaacctcagacagcgctactgaggtatgttttggaacagccttattcccgagatatggtgtgcaatatgctcggactgaataaacagactctcaacatcgctcaacataagcaaagatgtccagtactagaagatcagttggtagacttggtcgtgtacgccatggaaaggagtgagacagaagagaagtttgatgatggtggtacgagtcagctgctgtggcaacatctctcctcacagctgatcttcttcgtgctcttccaatttgccagctttcctcacatggtgcttagtctgcaccagaagctggccggacggggactgatcaagggcagagatcacttgatgtgggttctccttcaattcataagcggcagcatacaaaaaaatgcactcgctgacttcttgccagtgatgaagctattcgatctgctgtatcccgaaaaggaatacatcccggtgcctgacataaataaaccccaatccactcatgcattcgcaatgacctgcatttggattcacctgaatcgaaaagcccagaacgacaattcgaagcttcagattcccattccccacagtttgaggctgcaccacgagtttcttcagcaaagcctgcgcaacaagtccttgcagatgaacgattataagatagcactgctctgtaacgcgtattccacaaactccgagtgtttcactctgcctatgggagcacttgtggagacgatctacggcaatggcattatgaggatcccgctgcctggcaccaactgcatggcctctggctctatcactccactcccgatgaacctccttgatagcctgaccgtccatgcaaagatgtccctaatccactccatcgcgacgagagtgataaaattagcccacgctaagtcctcggtggccctggctcctgccctcgttgaaacttacagtaggctgcttgtgtacatggagattgaaagtctcggcatcaagggcttcatcagccagctgcttcccaccgtttttaagtcacacgcttggggcatccttcatacactgctcgaaatgttctcctaccggatgcatcacatccagcctcactacagggttcagctactctctcacctgcacaccctggccgctgttgcacaaaccaatcagaatcagctacacttgtgtgttgagtcaaccgcgctacgcctgatcactgctttgggctcttccgaggtgcagccacagttcacacgattcttgagtgaccccaagacggtgttgtcagcagagagtgaggagcttaatcgtgcgctcatcctgaccctagctagagccacgcacgttacagacttttttaccggatctgactccattcagggaacgtggtgtaaagacatactccagacgattatgtcctttaccccacacaactgggcctcccatacactgagttgttttcctggacctctacaggctttcttcaaacagaataacgtgccacaggagtcccggttcaacctgaagaaaaacgtggaggaagaatataggaagtggaaaagcatgagcaacgaaaacgacataatcacccatttttccatgcaaggcagtcctccactcttcctttgtctgctttggaaaatgctgcttgagacggaccacattaatcaaatcggataccgagtactggagaggattggcgcgcgcgccctggtcgcccacgtgcggactttcgccgactttctggtctatgagttctccacttccgcaggaggtcagcaactcaacaagtgcattgagatccttaatgacatggtgtggaagtacaatatcgtgacgctcgaccgcctcattctctgcctggccatgaggtctcacgaaggcaatgaagcccaggtgtgctattttataattcagcttctgcttttgaaaccaaatgacttcaggaaccgcgtatcagacttcgttaaagaaaattctccagagcactggctccagaatgattggcatactaagcacatgaattaccacaagaaatacccggagaaattatacttcgaaggattggctgagcaggtggatccgccagtgcagatccagtccccatacctcccgatttactttggtaacgtttgcctaagatttctgccagtgtttgacatcgtgatccatcgctttctggaactattgccagtgagcaaatctctcgagacacttctagaccatttgggtggcctttataagttccacgaccgaccggtgacctatctgtacaacacactgcattattatgaaatgcatctgagagaccgcgccttcctgaaaaggaagctggtgcacgccatcattggcagccttaaggataacagacctcaaggctggtgtctaagcgacacgtatttgaagtgtgccatgaatgccagggaggagaatccctgggtgcccgacgacacgtactactgtcggctaataggcaggttggtcgacactatggctgggaagagtcctggccccttccccaactgtgactggaggttcaacgaatttcccaaccctgcagctcatgccctgcatgtgacctgtgtggagctgatggcactcgccgtgtcaggtaaagaggtgggcaacgctcttcttaacgtggtgctgaagtcccagcctctcgtccctcgagaaaacatcacggcctggatgaacgccattggcctgatcattacagctttgccagaaccatactggattgtgctgcacgataggatcgtctccgtgatatcttccccaagcttaacgtcagaaacagagtgggtaggttaccctttccggctatttgattttacagcgtgccaccagtcatactctgagatgtcttgtagctatactctcgccctggcccatgccgtttggcaccactcaagtatcggtcagctgagtttgatccccaaatttcttaccgaggtgttactccctattgttaaaactgagtttcagttgttatacgtttaccatttggtaggaccctttctgcagcgatttcaacaggaacgaacacgttgcatgatcgagattggggtcgcgttttacgatatgctcctcaatgtagatcagtgctctacccatttgaactatatggatcccatttgtgacttcctgtaccacatgaaatatatgttcaccggggactcggtgaaggagcaggtgaagaagataatctgcaacctaaagcccgcccttaaactccgactgcggtttattacacacataagtaagatggagcccgcggccgtgcccccacaggctatgaactccgggtcaccagcgcctcagtctaatcaggttcccgtatcattacctgtgactcagtag

SEQ ID NO: 280854 - DNA, 4125 bp, Artificial Sequence
  derived and/or modified sequence
atggagacacagttgcagtcaatctttgaagaggttgttaagactgaggtgatcgaagaagccttcccaggtatgtttatggatacccccgaagatgaaaagactaagctcattagttgcttaggggcttttaggcagttttggggcggactgtcccaggaaagccatgaacagtgcatccagtggatcgttaagtttatacacgggcagcattctccaaagcgcatctccttcctctacgactgccttgccatggcagtcgaaaccgggcttcttccaccccgactcgtgtgcgagagcttaattaatagtgacaccctagaatgggagcggacacagctctgggccctgactttcaaactggtcaggaaaattatcggaggcgttgattacaaaggcgtaagggacctgctcaaggtcatcttggaaaaaattctgaccatacccaatactgtgtcctctgctgtggtgcagcagcttcttgccgcccgggaagtgatagcttacatcctcgagcgaaatgcttgcctcctgccagcatacttcgccgttaccgagataagaaagctgtaccctgagggaaagcttccccactggttactgggtaacctggtgtccgatttcgtggatacgtttagacccaccgcaaggattaactccatctgtgggcgatgctcacttcttcccgtggtgaacaactctggggctatatgcaacagttggaaacttgacccagctacccttagattccccctgaaaggcctgctcccctacgacaaagacctgttcgaacctcaaactgccctactgaggtacgtgttggaacagccttattctcgcgacatggtctgcaacatgctgggcctgaacaaacagttgattagtgctctgcagcataagcagcgctgccctgtgctggaggaccagctggtcgatctggttgtgtacgcaatggaacgcagtgagacagaggagaagttcgatgatggcgggacaagccaactcctgtggcagcatctatcctcccagctgatttttttcgtgttattccagtttgcatccttccctcatatggtgctatcactgcaccagaagttggcgggacggggactgataaaaggtagggatcacctgatgtgggtgttgttgcagtttatcagcgggtcaatccagaagaatgcgctcgcagatttcttgccggtcatgaagctgttcgatttattgtacccagaaaaggagtacataccggtgccggacatcaataagccccaaagcacacacgcttttgcaatgacatgtatatggatccatcttaaccggaaagcccagaacgacaactctaagctgcagattccaataccacacagccttaggctgcatcacgaattcctgcagcagtctctgcgaaataagagtttgcagatgaatgactacaagatcgccctgctctgtaacgcctatagcaccaactctgagtgcttcactctgccaatgggcgccttagttgaaaccatttacggtaatgggatcatgagaatcccgcttcccggcaccaactgtatggccagcggatccattactcccctgccaatgaatctgttggactcactgacagtccacgccaagatgagtctcatccattcaatcgccaccagagtgattaagctcgcccacgctaagtctagcgtcgcactggcgcctgcccttgtagaaacttactcaaggcttctggtgtatatggagattgaatccctcggaatcaaggggttcattagccagctgctgccaaccgtattcaagagccacgcatggggaatccttcatactctcctcgaaatgttttcttatagaatgcaccacatacaaccgcactatcgcgttcagctcctgtcacatctccacacccttgcagcagtagcccagaccaatcagaatcaactccacctgtgtgttgagtctaccgcactgcggctgatcacagccttgggcagcagcgaggtgcaacctcagtttacgcggtttctgagcgaccctaagactgttctcagcgccgaaagcgaggagctcaacagggccctgattcttactttggctcgggcaacccacgtcactgacttctttacaggaagcgatagtatccagggcacatggtgcaaagatatcctgcagaccatcatgtctttcaccccccacaattgggcgagccatacactttcctgtttcccaggccccctccaggctttttttaaacagaacaacgtgccgcaggagagtcgctttaatcttaagaaaaatgtggaagaggagtaccggaagtggaagagtatgtccaacgaaaatgatatcattacccacttctctatgcagggatcaccaccattgttcctctgtctgctgtggaaaatgctcctcgagactgaccacatcaatcaaataggttacagagtgctggagcgcattggtgctagagccctcgtggctcatgtgaggaccttcgctgatttcctggtttatgagttctccacttcagccgggggacagcagctcaataaatgcatcgaaatcctgaacgacatggtgtggaagtacaatatagtgacactcgacaggctgatcctgtgtcttgccatgaggtcacatgaaggaaatgaggcccaggtctgttattttataatccagcttctgttgctgaagccaaacgatttcaggaacagggttagcgatttcgtgaaggagaactcacccgaacattggctgcagaacgattggcatactaaacatatgaattatcataaaaagtatcctgaaaagctgtacttcgagggattagccgaacaggtggaccccccagtgcagatacagagcccttatctccctatttattttggaaatgtttgcttgcgattcctacccgtctttgacatcgtgattcaccgcttcctagagctgctaccagtatccaaaagcttggagacactactggatcacctgggaggactgtacaagttccacgatcggcccgtgacgtacttatacaatactttacactactacgagatgcatctcagagatagagcgttcttaaagaggaagctggtgcacgcaatcatagggagccttaaagataaccgaccacagggatggtgtctgtcagacacctatctgaaatgtgcgatgaatgctcgcgaggaaaatccttgggtccccgacgatacttactactgccgactcatagggagattagttgatacgatggcgggtaagagtccgggtccgtttcctaactgcgactggcggtttaatgaattccctaatccagcagctcatgctttacatgtcacgtgtgtagaactgatggcactagccgtgtctggcaaagaagtgggcaatgctttgctcaatgtcgtacttaaatcccagccactagtgccacgggagaatatcaccgcatggatgaatgcaatcggcctaatcataacagctctgcctgaaccttactggatagttttgcatgatcgtatagtaagcgtgatcagctccccatcgctaacaagcgaaacagaatgggtggggtatccttttcgactgttcgattttaccgcatgtcatcagtcctactctgaaatgtcctgctcttacaccctggccctcgcacatgctgtctggcatcattcttcaatcggtcagctctcactgattcctaaattcctgaccgaagtccttctgcctatcgtcaagactgaattccagctgctctatgtatatcatctggttggcccttttctccagcgcttccaacaagaaaggacacgatgtatgatcgagatcggcgtcgctttctacgacatgcttctcaatgtggaccaatgctccactcatctgaattacatggacccaatctgtgattttctctatcatatgaaatacatgttcacaggagactcagtgaaggagcaagtggagaaaataatctgcaatcttaaacccgctctgaagcttagactgcgttttatcactcatatcagcaagatggagcccgccgccgtgccacctcaggccatgaattccggaagccctgccccccagagcaatcaggtgcctgtctcactgccagtgacgcagtag

SEQ ID NO: 280855 - DNA, 114 bp, Artificial Sequence
  derived and/or modified sequence
atggaaactcagctacagtccatcttcgaggaggtcgtcaaaactgaggtaattgaggaggcttttcctggaatgtttatggatacgcctgaggatgaaaagagctcaaaatag

SEQ ID NO: 280856 - DNA, 132 bp, Artificial Sequence
  derived and/or modified sequence
atggagacccaattgcagagcattttcgaagaagttgtgaagaccgaagtaattgaggaggcattccctggaatgtttatggacacccccgaggatgagaaaacaaaattattcatggaaatggagctgtag

SEQ ID NO: 280857 - DNA, 4125 bp, Artificial Sequence
  derived and/or modified sequence
atggagacccagctgcagagcatctttgaggaggtggtgaagacagaggtgattgaggaggccttccctggcatgttcatggacaccccagaagatgagaagaccaagctgatcagctgcctgggcgccttccggcagttctggggcggcctgagccaggagagccatgagcagtgcatccagtggatcgtgaagttcatccacggccagcacagccccaagaggatctccttcctgtatgactgcctggccatggctgtggagaccggcctgctgcccccccggctggtgtgtgagagcctcatcaacagcgacaccctggagtgggagaggacccagctgtgggccctgaccttcaagctggtgaggaagatcatcggcggcgtggactacaagggcgtgcgggacctgctgaaggtgatcctggagaagatcctgaccatccccaacacagtgagcagcgctgtggtgcagcagctgctggccgcccgggaggtgattgcctacatcctggagagaaatgcctgcctgctgcctgcctactttgctgtgacagagatcaggaagctgtacccagagggcaagctgccccactggctgctgggcaacctggtgtctgactttgtggacaccttccggcccacagcccgcatcaacagcatctgtggccgctgcagcctgctgcctgtggtgaacaacagcggggccatctgcaacagctggaagctggaccctgccaccctgcgcttccccctgaagggcctgctgccctatgacaaggacctgtttgagccccagacagccctgctgcgctacgtgctggagcagccctacagccgggacatggtgtgcaacatgctgggcctgaacaagcagaccctgaacatcgcccagcacaagcagcgctgccctgtgctggaggaccagctggtggacctggtggtgtatgccatggagaggagtgaaacagaggagaagtttgatgatggcggcaccagccagctgctgtggcagcacctgagcagccagctgatcttctttgtgctcttccagtttgccagcttcccccacatggtgctgagcctgcaccagaagctggccggccggggcctcatcaagggccgggaccacctgatgtgggtgctgctgcagttcatcagcggcagcatccagaagaatgccctggccgacttcctgcctgtgatgaagctgtttgacctgctgtacccagagaaggagtacatccctgtgcctgacatcaacaagccccagagcacccacgcctttgccatgacctgcatctggatccacctgaacaggaaggcccagaatgacaacagcaagctgcagatccccatcccccacagcctgcggctgcaccacgagttcctgcagcagagcctgaggaacaagagcctgcagatgaatgactacaagatcgccctgctgtgcaatgcctacagcaccaacagcgagtgcttcaccctgcccatgggcgccctggtggagaccatctatggaaatggcatcatgaggatccccctgcccggcaccaactgcatggccagcggcagcatcacccccctgcccatgaacctgctggacagcctgactgtgcacgccaagatgagcctcatccacagcatcgccaccagggtcatcaagctggcccacgccaagagctctgtggccctggccccagccctggtggagacctacagccggctgctggtgtacatggagattgagagcctgggcatcaagggcttcatcagccagctgctgcccaccgtcttcaagagccacgcctggggcatcctgcacaccctgctggagatgttctcctacaggatgcaccacatccagccccactacagagtgcagctgctgagccacctgcacaccctggccgctgtggcccagaccaaccagaaccagctgcacctgtgtgtggagagcacagccctgcggctcatcacagccctgggcagcagcgaggtgcagccccagttcacccgcttcctgagtgaccccaagacagtgctgtctgctgagagcgaggagctgaacagagccctgatcctgaccctggcccgggccacccacgtgacagacttcttcaccggcagtgacagcatccagggcacctggtgcaaggacatcctgcagaccatcatgtccttcaccccccacaactgggccagccacaccctgagctgcttccctggccccctgcaggccttcttcaagcagaacaacgtgccccaggagagccgcttcaacctgaagaagaatgtggaggaggagtacaggaagtggaagtccatgagcaatgaaaatgacatcatcacccacttctccatgcagggcagccccccactcttcctgtgcctgctgtggaagatgctgctggagacagaccacatcaaccagatcggctacagagtgctggagcgcatcggggcccgggccctggtggcccacgtgaggacctttgctgacttcctggtgtatgagttcagcaccagcgctgggggccagcagctgaacaagtgcatcgagatcctgaatgacatggtgtggaagtacaacatcgtgaccctggacaggctcatcctgtgcctggccatgaggagccatgagggcaatgaggcccaggtgtgctacttcatcatccagctgctgctgctgaagcccaatgacttcaggaacagagtgtctgactttgtgaaggagaacagccctgagcactggctgcagaatgactggcacaccaagcacatgaactaccacaagaagtacccagagaagctgtactttgagggcctggccgagcaggtggacccccctgtgcagatccagagcccctacctgcccatctactttggaaatgtgtgcctgcgcttcctgcctgtgtttgatattgtcatccaccgcttcctggagctgctgcctgtgtccaagagcctggagaccctgctggaccacctgggcggcctgtacaagttccatgacaggcctgtgacctacctgtacaacaccctgcactactatgagatgcacctgcgggaccgggccttcctgaagaggaagctggtgcacgccatcatcggcagcctgaaggacaaccggccccagggctggtgcctgagtgacacctacctgaagtgtgccatgaatgcccgggaggagaacccctgggtgcctgatgacacctactactgccgcctcatcggccgcctggtggacaccatggccggcaagagccctggccccttccccaactgtgactggaggttcaatgagttccccaacccagctgcccacgccctgcacgtgacctgtgtggagctgatggccctggccgtgtctgggaaggaggtgggcaatgccctgctgaatgtggtgctgaagagccagcccctggtgccccgggagaacatcacagcctggatgaatgccatcggcctcatcatcacagccctgcctgagccctactggatcgtgctgcatgaccgcatcgtgtctgtcatcagcagccccagcctgaccagcgagacagagtgggtgggctaccccttccggctgtttgacttcaccgcctgccaccagagctacagcgagatgagctgcagctacaccctggccctggcccatgctgtgtggcaccacagcagcatcggccagctgagcctcatccccaagttcctgacagaggtgctgctgcccatcgtgaagacagagttccagctgctgtatgtgtaccacctggtgggccccttcctgcagcgcttccagcaggagaggacccgctgcatgattgaaattggagtggccttctatgacatgctgctgaatgtggaccagtgcagcacccacctgaactacatggaccccatctgtgacttcctgtaccacatgaagtacatgttcaccggggacagcgtgaaggagcaggtgaagaagatcatctgcaacctgaagccagccctgaagctgcggctgcgcttcatcacccacatcagcaagatggagcctgctgctgtgcccccccaggccatgaacagcggcagccctgccccccagagcaaccaggtgcctgtgtccctgcctgtgacccagtag

SEQ ID NO: 280858 - DNA, 4125 bp, Artificial Sequence
  derived and/or modified sequence
atggagacccagctgcagagcatctttgaggaggtggtgaagacagaggtgattgaggaggccttccctggcatgttcatggacaccccagaagatgagaagaccaagctgatcagctgcctgggcgccttccggcagttctggggcggcctgagccaggagagccatgagcagtgcatccagtggatcgtgaagttcatccacggccagcacagccccaagaggatctccttcctgtatgactgcctggccatggctgtggagaccggcctgctgcccccccggctggtgtgtgagagcctcatcaacagcgacaccctggagtgggagaggacccagctgtgggccctgaccttcaagctggtgaggaagatcatcggcggcgtggactacaagggcgtgcgggacctgctgaaggtgatcctggagaagatcctgaccatccccaacacagtgagcagcgctgtggtgcagcagctgctggccgcccgggaggtgattgcctacatcctggagagaaatgcctgcctgctgcctgcctactttgctgtgacagagatcaggaagctgtacccagagggcaagctgccccactggctgctgggcaacctggtgtctgactttgtggacaccttccggcccacagcccgcatcaacagcatctgtggccgctgcagcctgctgcctgtggtgaacaacagcggggccatctgcaacagctggaagctggaccctgccaccctgcgcttccccctgaagggcctgctgccctatgacaaggacctgtttgagccccagacagccctgctgcgctacgtgctggagcagccctacagccgggacatggtgtgcaacatgctgggcctgaacaagcagctgatcagcgccctgcagcacaagcagcgctgccctgtgctggaggaccagctggtggacctggtggtgtatgccatggagaggagtgaaacagaggagaagtttgatgatggcggcaccagccagctgctgtggcagcacctgagcagccagctgatcttctttgtgctcttccagtttgccagcttcccccacatggtgctgagcctgcaccagaagctggccggccggggcctcatcaagggccgggaccacctgatgtgggtgctgctgcagttcatcagcggcagcatccagaagaatgccctggccgacttcctgcctgtgatgaagctgtttgacctgctgtacccagagaaggagtacatccctgtgcctgacatcaacaagccccagagcacccacgcctttgccatgacctgcatctggatccacctgaacaggaaggcccagaatgacaacagcaagctgcagatccccatcccccacagcctgcggctgcaccacgagttcctgcagcagagcctgaggaacaagagcctgcagatgaatgactacaagatcgccctgctgtgcaatgcctacagcaccaacagcgagtgcttcaccctgcccatgggcgccctggtggagaccatctatggaaatggcatcatgaggatccccctgcccggcaccaactgcatggccagcggcagcatcacccccctgcccatgaacctgctggacagcctgactgtgcacgccaagatgagcctcatccacagcatcgccaccagggtcatcaagctggcccacgccaagagctctgtggccctggccccagccctggtggagacctacagccggctgctggtgtacatggagattgagagcctgggcatcaagggcttcatcagccagctgctgcccaccgtcttcaagagccacgcctggggcatcctgcacaccctgctggagatgttctcctacaggatgcaccacatccagccccactacagagtgcagctgctgagccacctgcacaccctggccgctgtggcccagaccaaccagaaccagctgcacctgtgtgtggagagcacagccctgcggctcatcacagccctgggcagcagcgaggtgcagccccagttcacccgcttcctgagtgaccccaagacagtgctgtctgctgagagcgaggagctgaacagagccctgatcctgaccctggcccgggccacccacgtgacagacttcttcaccggcagtgacagcatccagggcacctggtgcaaggacatcctgcagaccatcatgtccttcaccccccacaactgggccagccacaccctgagctgcttccctggccccctgcaggccttcttcaagcagaacaacgtgccccaggagagccgcttcaacctgaagaagaatgtggaggaggagtacaggaagtggaagtccatgagcaatgaaaatgacatcatcacccacttctccatgcagggcagccccccactcttcctgtgcctgctgtggaagatgctgctggagacagaccacatcaaccagatcggctacagagtgctggagcgcatcggggcccgggccctggtggcccacgtgaggacctttgctgacttcctggtgtatgagttcagcaccagcgctgggggccagcagctgaacaagtgcatcgagatcctgaatgacatggtgtggaagtacaacatcgtgaccctggacaggctcatcctgtgcctggccatgaggagccatgagggcaatgaggcccaggtgtgctacttcatcatccagctgctgctgctgaagcccaatgacttcaggaacagagtgtctgactttgtgaaggagaacagccctgagcactggctgcagaatgactggcacaccaagcacatgaactaccacaagaagtacccagagaagctgtactttgagggcctggccgagcaggtggacccccctgtgcagatccagagcccctacctgcccatctactttggaaatgtgtgcctgcgcttcctgcctgtgtttgatattgtcatccaccgcttcctggagctgctgcctgtgtccaagagcctggagaccctgctggaccacctgggcggcctgtacaagttccatgacaggcctgtgacctacctgtacaacaccctgcactactatgagatgcacctgcgggaccgggccttcctgaagaggaagctggtgcacgccatcatcggcagcctgaaggacaaccggccccagggctggtgcctgagtgacacctacctgaagtgtgccatgaatgcccgggaggagaacccctgggtgcctgatgacacctactactgccgcctcatcggccgcctggtggacaccatggccggcaagagccctggccccttccccaactgtgactggaggttcaatgagttccccaacccagctgcccacgccctgcacgtgacctgtgtggagctgatggccctggccgtgtctgggaaggaggtgggcaatgccctgctgaatgtggtgctgaagagccagcccctggtgccccgggagaacatcacagcctggatgaatgccatcggcctcatcatcacagccctgcctgagccctactggatcgtgctgcatgaccgcatcgtgtctgtcatcagcagccccagcctgaccagcgagacagagtgggtgggctaccccttccggctgtttgacttcaccgcctgccaccagagctacagcgagatgagctgcagctacaccctggccctggcccatgctgtgtggcaccacagcagcatcggccagctgagcctcatccccaagttcctgacagaggtgctgctgcccatcgtgaagacagagttccagctgctgtatgtgtaccacctggtgggccccttcctgcagcgcttccagcaggagaggacccgctgcatgattgaaattggagtggccttctatgacatgctgctgaatgtggaccagtgcagcacccacctgaactacatggaccccatctgtgacttcctgtaccacatgaagtacatgttcaccggggacagcgtgaaggagcaggtggagaagatcatctgcaacctgaagccagccctgaagctgcggctgcgcttcatcacccacatcagcaagatggagcctgctgctgtgcccccccaggccatgaacagcggcagccctgccccccagagcaaccaggtgcctgtgtccctgcctgtgacccagtag

SEQ ID NO: 280859 - DNA, 114 bp, Artificial Sequence
  derived and/or modified sequence
atggagacccagctgcagagcatctttgaggaggtggtgaagacagaggtgattgaggaggccttccctggcatgttcatggacaccccagaagatgagaagagcagcaagtag

SEQ ID NO: 280860 - DNA, 132 bp, Artificial Sequence
  derived and/or modified sequence
atggagacccagctgcagagcatctttgaggaggtggtgaagacagaggtgattgaggaggccttccctggcatgttcatggacaccccagaagatgagaagaccaagctgttcatggagatggagctgtag

SEQ ID NO: 280861 - DNA, 4576 bp, Artificial Sequence
  derived and/or modified sequence
cgggggtgatagtacagatggagacgcaactgcagagcattttcgaagaggtggtgaaaacggaagttatagaagaggcttttcctggcatgtttatggatactcctgaagatgagaaaacaaaactaattagctgtttgggggccttcagacagttttggggtggtctttctcaggagtctcatgaacagtgtatccagtggattgttaagtttattcatggtcagcatagtcctaaaagaatttcttttctttatgactgcttagcaatggcagttgagactggtctccttccacccaggctggtttgtgaatccctgataaactctgacactcttgagtgggaaagaacacagctttgggccttaacatttaaactggttcggaaaataattgggggagtggattacaagggtgttcgagatctcttaaaagtgattttggagaagattttgacaattcctaatacagtgagctctgctgttgtacagcagcttctggcagcaagagaggttatagcatatatcttggaaagaaatgcctgcttattaccagcctattttgcagtcactgagatcaggaaactgtatcctgaaggcaaacttccacactggttacttggaaacctagtatcagactttgtggataccttcaggcccacagcaaggataaactccatttgtggtcgctgtagtcttctgccagttgtaaataattcgggtgccatttgtaattcatggaaactggatcctgctactcttcgttttcctttgaaaggccttttgccatatgataaggatctgtttgaaccacagactgctttgttgagatatgtattggagcagccttattccagggatatggtctgcaatatgctaggtttaaataagcagaccttgaacattgctcagcacaagcagcgctgccctgtgctggaggaccagttggtggatctggttgtttatgccatggagcgatctgagaccgaggagaagtttgacgatgggggaacaagccaactcctgtggcagcatctctcaagtcagctcattttctttgtgcttttccagtttgcaagttttccacatatggtgctttctcttcatcagaagttagcagggcgaggactgattaaaggcagagatcatcttatgtgggttctcctgcaattcatttctggaagtattcagaaaaatgcactagctgattttctccctgtgatgaagctcttcgacttgctatacccagaaaaagaatatatcccagttcctgatattaacaaaccccagtcaacccatgcctttgcaatgacctgtatttggattcatctcaatagaaaagctcaaaatgacaactccaagctacagattccaatacctcattccctaagacttcaccatgagttcctgcagcagagtctaagaaataaaagtttacagatgaatgactataagattgctctattgtgtaatgcatactctacaaattcagaatgttttacattacccatgggagctctggtagaaactatttatggaaatggaattatgaggatacctctccctggaacaaactgtatggcttcaggatctattacccccttacctatgaacctcctggattcactgacagttcatgccaaaatgagccttattcacagcattgcaaccagggtgataaaacttgctcatgcaaagtccagtgtggccttggctccagccctagtggaaacttacagtcgtttattggtctatatggaaatagagtctttgggcatcaaaggatttatcagtcagcttttgccaactgttttcaaatcacatgcatgggggatcttacacacactccttgagatgtttagctaccggatgcatcatattcagcctcattacagagttcagctcctgagtcatcttcatactttggctgcagttgcacaaacaaaccagaaccagctccatctttgtgtcgagagcactgctctcaggcttataacagcattaggtagctcagaggtacaaccgcagtttacacgcttccttagtgatcccaaaacagtgctctcagcagaatctgaagaactgaaccgagccttgatattgaccttggctagagcaactcatgtaacagatttttttacaggctctgattcaattcagggaacttggtgtaaagacatacttcagaccatcatgagtttcactcctcataattgggcttcacacaccctgagctgttttccaggcccactacaggcattcttcaaacaaaataatgtgcctcaggaaagccgttttaatctgaaaaaaaatgtggaggaggagtataggaagtggaagtcaatgagcaacgaaaacgacattattacccacttctctatgcagggctcccctcctctctttctttgtcttctctggaaaatgctcttggaaacagatcatattaatcagattggctatagagtattagagagaattggagccagggccttggtagcccatgtgaggacatttgcagatttcctggtatatgagttttctacatcagcagggggtcagcaactcaataaatgcattgaaattcttaatgacatggtatggaagtataacattgttacactggacagattaattctctgcctggccatgcgtagtcacgaaggaaatgaagcccaggtttgttatttcataattcagttgctgttactcaaaccaaacgattttagaaatcgagtaagtgactttgtgaaggaaaattccccagagcactggttacagaatgactggcacaccaagcacatgaattatcacaagaaatatccagagaagttgtattttgagggcctcgcggaacaggtggatcctcctgtacagatccagtctccctatctgcccatctattttgggaatgtgtgtcttcgattccttccagtatttgatatagtaatccacagatttttagagttgcttccggtatccaaatcactggagactctactggatcatctaggaggcttatataaatttcatgatcgtccagtgacttatctgtataacactctgcactattatgaaatgcacctgagagaccgcgcatttctcaaacgaaaactcgtccatgcgatcattggctctctgaaggataatcgaccgcagggctggtgtctaagtgacacttacctgaaatgcgctatgaatgcacgagaggaaaatccttgggttccagatgacacctactattgcagattgattggcagactagtcgatacgatggctggcaaatctcctggtccctttccaaactgtgactggagattcaatgagtttcccaacccagctgcccatgctctccatgttacttgtgtggagctcatggccttggcagtttcaggcaaagaagttgggaatgcccttctaaatgttgtcctaaaaagtcagcctttagtgccaagagagaacattacagcatggatgaatgcaattggtttgatcatcactgccctaccagagccatattggattgttcttcatgatcgaattgtgagtgtcatcagcagccccagcttgacgtctgaaacagagtgggttggctatccattccgcctctttgatttcactgcctgtcatcagtcctactctgagatgagttgtagctatacgttagctcttgcacatgctgtgtggcaccattctagcatcggacaactttctctcattccaaagtttcttactgaagtacttcttcctatagtgaagaccgaattccagttgctttatgtataccatcttgttggaccatttttacaaagatttcagcaagagagaactcgttgtatgatagagattggtgtggcgttttatgacatgctgctgaatgttgaccagtgtagcacccatttaaattacatggatcccatctgtgacttcctctatcacatgaagtatatgtttactggtgacagcgtgaaagagcaagtaaagaagattatctgtaacttaaaaccagctttaaaacttcgtcttcgattcatcacacacattagcaagatggagccagctgcagtgcctccacaagccatgaacagtgggtctccagcacctcagtctaatcaggtgcccgtgtctttaccagtaactcagtgaagccagactgtactgtggagaaagtagaaatatatccgtctttgagagtggactcaaaccttttaaatctgaatgcgatcacactgtagtgatatagtagaagcagtgatgatattcagattgttttattttgattcaaatgatgaatctgttgacaccttataactcccatctccctatctatatttttgtctctaagagatcaagtaagatacatgttgttcatattcataacaacttattagagctatgtaggaacatagaggtatctgtgatcaaatgacttgtcattggcactttcagtctttcctattctagccgttgtttttgtttgtattttttattattaatgacatatttagtcttcagatatattattttaaaggcaccacacatgtaaaacagttattacaaatattttatacataaatctc

SEQ ID NO: 280862 - DNA, 5245 bp, Artificial Sequence
  derived and/or modified sequence
gctgttggctgggctcgggagggaacgctccaggtaaagcgctgggggaggaagcgacgccgaggagctacggtttcctccagaggtctccgcccctctgcccctatattcccagagctcgagtctgatccgggccttgccgggcaccctggaaaggcgggggtgatagtacagatggagacgcaactgcagagcattttcgaagaggtggtgaaaacggaagttatagaagaggcttttcctggcatgtttatggatactcctgaagatgagaaaacaaaactaattagctgtttgggggccttcagacagttttggggtggtctttctcaggagtctcatgaacagtgtatccagtggattgttaagtttattcatggtcagcatagtcctaaaagaatttcttttctttatgactgcttagcaatggcagttgagactggtctccttccacccaggctggtttgtgaatccctgataaactctgacactcttgagtgggaaagaacacagctttgggccttaacatttaaactggttcggaaaataattgggggagtggattacaagggtgttcgagatctcttaaaagtgattttggagaagattttgacaattcctaatacagtgagctctgctgttgtacagcagcttctggcagcaagagaggttatagcatatatcttggaaagaaatgcctgcttattaccagcctattttgcagtcactgagatcaggaaactgtatcctgaaggcaaacttccacactggttacttggaaacctagtatcagactttgtggataccttcaggcccacagcaaggataaactccatttgtggtcgctgtagtcttctgccagttgtaaataattcgggtgccatttgtaattcatggaaactggatcctgctactcttcgttttcctttgaaaggccttttgccatatgataaggatctgtttgaaccacagactgctttgttgagatatgtattggagcagccttattccagggatatggtctgcaatatgctaggtttaaataagcagttaatctctgccctacagcacaagcagcgctgccctgtgctggaggaccagttggtggatctggttgtttatgccatggagcgatctgagaccgaggagaagtttgacgatgggggaacaagccaactcctgtggcagcatctctcaagtcagctcattttctttgtgcttttccagtttgcaagttttccacatatggtgctttctcttcatcagaagttagcagggcgaggactgattaaaggcagagatcatcttatgtgggttctcctgcaattcatttctggaagtattcagaaaaatgcactagctgattttctccctgtgatgaagctcttcgacttgctatacccagaaaaagaatatatcccagttcctgatattaacaaaccccagtcaacccatgcctttgcaatgacctgtatttggattcatctcaatagaaaagctcaaaatgacaactccaagctacagattccaatacctcattccctaagacttcaccatgagttcctgcagcagagtctaagaaataaaagtttacagatgaatgactataagattgctctattgtgtaatgcatactctacaaattcagaatgttttacattacccatgggagctctggtagaaactatttatggaaatggaattatgaggatacctctccctggaacaaactgtatggcttcaggatctattacccccttacctatgaacctcctggattcactgacagttcatgccaaaatgagccttattcacagcattgcaaccagggtgataaaacttgctcatgcaaagtccagtgtggccttggctccagccctagtggaaacttacagtcgtttattggtctatatggaaatagagtctttgggcatcaaaggatttatcagtcagcttttgccaactgttttcaaatcacatgcatgggggatcttacacacactccttgagatgtttagctaccggatgcatcatattcagcctcattacagagttcagctcctgagtcatcttcatactttggctgcagttgcacaaacaaaccagaaccagctccatctttgtgtcgagagcactgctctcaggcttataacagcattaggtagctcagaggtacaaccgcagtttacacgcttccttagtgatcccaaaacagtgctctcagcagaatctgaagaactgaaccgagccttgatattgaccttggctagagcaactcatgtaacagatttttttacaggctctgattcaattcagggaacttggtgtaaagacatacttcagaccatcatgagtttcactcctcataattgggcttcacacaccctgagctgttttccaggcccactacaggcattcttcaaacaaaataatgtgcctcaggaaagccgttttaatctgaaaaaaaatgtggaggaggagtataggaagtggaagtcaatgagcaacgaaaacgacattattacccacttctctatgcagggctcccctcctctctttctttgtcttctctggaaaatgctcttggaaacagatcatattaatcagattggctatagagtattagagagaattggagccagggccttggtagcccatgtgaggacatttgcagatttcctggtatatgagttttctacatcagcagggggtcagcaactcaataaatgcattgaaattcttaatgacatggtatggaagtataacattgttacactggacagattaattctctgcctggccatgcgtagtcacgaaggaaatgaagcccaggtttgttatttcataattcagttgctgttactcaaaccaaacgattttagaaatcgagtaagtgactttgtgaaggaaaattccccagagcactggttacagaatgactggcacaccaagcacatgaattatcacaagaaatatccagagaagttgtattttgagggcctcgcggaacaggtggatcctcctgtacagatccagtctccctatctgcccatctattttgggaatgtgtgtcttcgattccttccagtatttgatatagtaatccacagatttttagagttgcttccggtatccaaatcactggagactctactggatcatctaggaggcttatataaatttcatgatcgtccagtgacttatctgtataacactctgcactattatgaaatgcacctgagagaccgcgcatttctcaaacgaaaactcgtccatgcgatcattggctctctgaaggataatcgaccgcagggctggtgtctaagtgacacttacctgaaatgcgctatgaatgcacgagaggaaaatccttgggttccagatgacacctactattgcagattgattggcagactagtcgatacgatggctggcaaatctcctggtccctttccaaactgtgactggagattcaatgagtttcccaacccagctgcccatgctctccatgttacttgtgtggagctcatggccttggcagtttcaggcaaagaagttgggaatgcccttctaaatgttgtcctaaaaagtcagcctttagtgccaagagagaacattacagcatggatgaatgcaattggtttgatcatcactgccctaccagagccatattggattgttcttcatgatcgaattgtgagtgtcatcagcagccccagcttgacgtctgaaacagagtgggttggctatccattccgcctctttgatttcactgcctgtcatcagtcctactctgagatgagttgtagctatacgttagctcttgcacatgctgtgtggcaccattctagcatcggacaactttctctcattccaaagtttcttactgaagtacttcttcctatagtgaagaccgaattccagttgctttatgtataccatcttgttggaccatttttacaaagatttcagcaagagagaactcgttgtatgatagagattggtgtggcgttttatgacatgctgctgaatgttgaccagtgtagcacccatttaaattacatggatcccatctgtgacttcctctatcacatgaagtatatgtttactggtgacagcgtgaaagagcaagtagagaagattatctgtaacttaaaaccagctttaaaacttcgtcttcgattcatcacacacattagcaagatggagccagctgcagtgcctccacaagccatgaacagtgggtctccagcacctcagtctaatcaggtgcccgtgtctttaccagtaactcagtgaagccagactgtactgtggagaaagtagaaatatatccgtctttgagagtggactcaaaccttttaaatctgaatgcgatcacactgtagtgatatagtagaagcagtgatgatattcagattgttttattttgattcaaatgatgaatctgttgacaccttataactcccatctccctatctatatttttgtctctaagagatcaagtaagatacatgttgttcatattcataacaacttattagagctatgtaggaacatagaggtatctgtgatcaaatgacttgtcattggcactttcagtctttcctattctagccgttgtttttgtttgtattttttattattaatgacatatttagtcttcagatatattattttaaaggcaccacacatgtaaaacagttattacaaatattttatacataaatctcttggtagattttcagaataatagagatttatatcaagaaaaggaatctagattttgttgcattgtaggagcaaacaaggcttcatattctttttaaaatgacttgaaattttattataaatttccatagtttctatcaaggtcaactggcagttttattacctttgctatggacttgaacttactgtataaaattagttggaagccatgtaagaaaataacatctgaaaattcttgaacttaaaatcatgcttaaatggttgattctccaatttctttttttaaaaataagttaattgcttttgcaggttgacactctcacctgacagatgatgtaattcttcaatttttataatcttaaaatttttaaattttatatttgtaaatacagtacacattttatttcttggattttgagagacattgttaattttgggggaattggcattgcgaaagacttgaaaactaatgagtaaagtctgctgaatgaataaaccgtgtgattgtttcccg

SEQ ID NO: 280863 - DNA, 4125 bp, Artificial Sequence
  derived and/or modified sequence
atggagacccagctgcagagcatcttcgaggaggtggtgaagaccgaggtcatcgaggaggcctttccgggaatgttcatggacacacctgaggacgagaaaacaaaactgatatcttgtctgggcgcctttcggcaattttggggtggcttgtcgcaggagtcacacgaacagtgcatccagtggattgtcaagtttatccatggacagcactctccaaagagaatatctttcctgtacgattgcctcgctatggctgtcgagacggggctcttgcccccaagactggtgtgcgaatccttgatcaacagcgatacgctggagtgggaaaggactcagctttgggcactcaccttcaagcttgtaagaaagattattggcggcgtggactacaagggcgtcagagatttgttgaaagtaatactggaaaaaatcctgacaatccctaacacagtatcatctgcagttgtgcagcagctcctggcagcacgggaagtcattgcctatattttagagcgcaatgcttgtctcctacccgcatactttgccgtcacagaaatccgcaagttatatccagagggaaagcttcctcactggctgctgggcaacttggtatcagattttgttgacacatttcgccctactgctagaattaactcaatttgcgggcgctgctccctgctgccagttgtgaacaacagcggtgccatctgtaactcttggaagctcgatcctgcaaccctccgcttcccattaaaaggactgttaccgtacgacaaagatctcttcgaacctcagacggcactgctgaggtatgtcttagaacagccatattctcgggacatggtttgcaacatgctggggctgaataagcaaactctgaatatcgcacagcacaaacagagatgtcccgtgctggaggatcagctggtcgacctcgtggtctacgccatggagcggagtgaaaccgaggagaagtttgacgacggtggcacctctcagctgctgtggcagcacctgagcagtcagctgatcttcttcgttctgttccaattcgctagcttccctcacatggtcctgagcttgcatcagaagctggccggcagaggattgatcaaaggacgagaccacctaatgtgggtgctgctccagttcatctccggctctattcagaaaaatgctttagccgactttctccctgtgatgaagcttttcgatctgctgtatcccgagaaggagtatattcccgtacctgatattaacaagccacagtcaactcacgccttcgcaatgacatgcatttggattcatctgaacagaaaggcccagaacgataattctaagttgcagatccctatcccacacagcctcagactccaccacgaattcctgcaacagtcattgcggaacaagtctctccagatgaatgactacaagatcgccctattatgcaacgcgtactcaacaaattccgagtgcttcactttgcctatgggagctttggtcgagacaatttacggcaacgggatcatgcggatccctctgccgggcacgaactgcatggcctccggtagtattactcctctccccatgaatttgcttgattcccttacagtgcatgccaagatgtcattgattcactccatagcaacaagggtgatcaagctggcccacgccaagtcatcggttgcactggccccagcactggtggaaacatattcccgcttgctggtttacatggaaattgagtctctgggcatcaagggatttatcagccaactgctgcccactgtttttaaaagtcatgcttggggcatcctgcataccctgctcgagatgttcagctatagaatgcatcatatccagccccactaccgggtgcagctgctctcacaccttcacacactggccgcagtggctcagactaatcagaatcaactgcacctctgcgttgagtctaccgccttacggctgatcaccgcgctcggaagttccgaggtgcaaccgcaattcacacgttttctatcagaccctaaaaccgtgctgagcgccgagtccgaagagcttaacagagccttgatcctgacactggcacgtgccacacacgtcactgatttctttacgggcagtgactccattcagggaacctggtgcaaggacattctacagactataatgtcattcacgcctcacaactgggccagtcacacactgtcttgtttccctgggccactccaggccttctttaagcaaaataacgtcccccaagagtcgaggtttaatttgaaaaaaaatgttgaagaggaatatcgtaagtggaagagcatgtctaatgagaatgacattatcacccactttagcatgcaggggtcacctcccctattcctttgcttgctttggaaaatgttactggagacagaccacataaatcagattggctatcgggtgttggaacgaatcggggccagggccctcgtcgcacatgtgaggacatttgctgactttcttgtatatgagttttccacatcagccggtggccagcagctcaataagtgcatcgagatcctcaatgacatggtgtggaagtacaatatcgtcaccctggaccgcctgatcctgtgtctcgcaatgcgttctcacgaggggaacgaagcccaggtgtgctactttatcattcagctgcttttactgaaacctaacgacttccggaatagagtgtcagacttcgtgaaagagaatagtccggaacattggttgcagaacgattggcacaccaaacacatgaactaccataaaaaatatccggagaagctttattttgagggacttgccgaacaggtggaccctcccgttcaaattcagtctccatacctgccaatatattttggaaacgtgtgcctgcgctttctgcccgtgttcgacattgtcatacaccggttcctggagttgctgcccgtgagcaaaagcctggaaactctgcttgaccacttgggggggctctacaagtttcacgatagacctgttacatacttgtacaacactctgcattattacgagatgcatctccgcgaccgggcgttcctcaagaggaagctcgtccacgcaattatcggaagcctgaaagacaaccgccctcaggggtggtgcctgagcgacacatatcttaaatgcgctatgaatgctcgtgaggagaatccgtgggtacccgacgacacatactattgtcggttgatcggccggctcgtggacaccatggccgggaagagcccagggccgtttcccaattgcgactggcgatttaacgaattccccaatcccgcggcccacgctctccacgtcacctgcgttgaactgatggctttagctgtcagtggaaaagaagtgggcaacgcattgctgaatgtggtgctgaagtcacagccccttgttcctcgtgaaaacatcacggcatggatgaatgccatcgggctgattatcactgctctccctgaaccatattggattgtgctgcacgatcgcattgtctcagtgatatcatcaccctccctgaccagtgaaacagaatgggtgggctatccatttagactgtttgatttcactgcttgccatcagtcctatagtgaaatgtcatgctcatacactctcgcccttgcacacgcagtgtggcaccacagcagcataggccaactgtcactcatacctaagttcttgaccgaagttttgttgcccattgtgaagactgagttccaactgttgtatgtttaccatttggtgggcccattccttcaacgttttcaacaggagaggacgcggtgcatgattgagatcggagtcgcgttctatgatatgctgttgaatgtagaccagtgcagtacacaccttaattacatggacccaatatgcgacttcctgtaccacatgaaatacatgtttaccggcgatagtgtgaaagaacaggtcaagaagatcatttgcaatctgaaaccagctcttaagttgaggctcaggtttattacacacataagtaagatggaacctgcagccgtgccccctcaggccatgaacagtgggagtcccgctccgcagagcaaccaggtccccgtgtcactcccagtaacccagtag

SEQ ID NO: 280864 - DNA, 4125 bp, Artificial Sequence
  derived and/or modified sequence
atggagacccagctgcagagcatcttcgaggaggtggtgaagaccgaagtgatagaggaggctttcccaggcatgtttatggacactcccgaagacgagaaaaccaaactaatatcatgcctcggagcctttcgccagttctgggggggactttctcaggaatcacatgagcagtgtatacagtggatcgtcaagtttatccacggccagcatagccccaaacgaatcagctttctgtacgattgcctggctatggctgttgagaccggactcttgccccctaggctcgtatgtgaaagtctcatcaacagcgatacgctggaatgggagcggacacagctctgggccctgaccttcaagctagtccggaaaattattggtggcgtggactataaaggcgtcagagatcttcttaaagttatcctggagaaaatcctcactattcctaataccgtgtcttccgccgtggttcagcagctgcttgcagcacgggaagtgatcgcgtacatcctggaacgcaatgcttgtctcctgccggcgtacttcgcggtaaccgaaattcgaaaattgtaccccgagggcaaactgccacactggctgctgggcaacctggtgtcagattttgttgacactttccgtcctaccgccagaatcaacagcatctgcggtagatgctctttgctgccagtcgttaataacagcggggccatttgcaatagctggaagctggatcctgctacgctcagattccccttaaaaggcctcctgccctacgataaggacctgttcgaaccgcagactgctctgctgaggtatgtgctggagcagccctactctagggacatggtctgcaatatgttagggctaaataagcagctgatttcagctctccagcacaagcaacggtgtccagtactcgaggatcagctcgttgaccttgtggtatacgccatggaacgaagtgaaactgaggagaagtttgacgatggggggacatcccaactactctggcagcacctgagcagtcagctgattttttttgtgctgttccagttcgcaagcttcccgcacatggtgttaagcctgcatcaaaaactcgccgggcggggactgattaaggggagggaccacctgatgtgggtactgctgcagtttataagcggatccatccaaaagaatgcactggccgacttcctgccggtcatgaagctcttcgacttgttgtatcccgagaaagaatatatccctgttcccgacattaacaagccgcagtccacacatgcattcgccatgacttgcatctggatccacctgaatagaaaggcacagaacgacaattctaagctccagatccctataccccacagtctccgcctgcaccacgaattcctacaacaatctctccggaacaagtccctgcagatgaatgattacaaaatcgcgttgctatgtaacgcctactctaccaatagcgagtgttttactcttcctatgggagctttagtggaaacaatttacggtaatggtattatgaggattcccctgcccgggaccaactgcatggctagcggcagtataacgcccttgccgatgaacctactagattccctaaccgttcacgctaagatgtccctgatccatagcattgctaccagggtcatcaaactggcccatgcaaaatcctctgtggcacttgctccggccctggtagaaacttattctaggctgttggtctacatggaaatcgaatcacttggcatcaaagggtttataagccagcttcttcccactgtcttcaaatctcacgcatggggaatcttacacacactcctggagatgttctcgtacagaatgcaccacattcagccacactatcgcgtccagctcctgagccacctgcacacactggctgcagtggcccagacaaaccagaaccagctgcacctgtgcgtcgagagtactgctctccggctaatcactgctctgggatccagcgaagttcagccccagtttacacggtttctgtctgatcctaagaccgtcttgtcagctgaaagtgaggagctgaaccgcgctctgatcttaacgctggctcgtgcaacacacgtgaccgacttcttcactgggagcgactcaatccagggcacctggtgtaaagacatactgcagaccatcatgtctttcaccccacacaactgggctagccacactttgtcatgctttcccgggcctctgcaggccttcttcaagcagaataacgtgccccaggagtctcgctttaaccttaaaaagaacgtcgaagaggagtatcgcaagtggaagtcaatgagtaatgagaacgacattattacacactttagcatgcagggtagccccccgctttttttgtgtctcctgtggaagatgctcctagagacagaccacattaatcaaattggatatagggtcctggaaagaatcggagctagggccctggtcgcccacgttcgcacattcgctgacttcctggtctatgagttctccactagtgcagggggccagcaattaaataagtgtatcgagattctcaatgacatggtttggaagtataacattgtgactctggatcggttgattctctgcctcgctatgagatcccacgagggcaacgaggctcaagtttgctactttattatacagctactgctgctgaagccgaatgacttcagaaatcgcgtatctgatttcgtcaaagaaaacagtcctgagcactggctgcagaacgattggcacactaaacatatgaactatcataaaaaatatcccgaaaaactgtatttcgaaggcttagccgaacaggtggatccaccagtacagattcagagtccatatttgccaatctattttggcaacgtatgtctgaggttcctcccagtcttcgatatcgtgatccacagatttcttgagctgcttccagtgagtaagagccttgaaacccttcttgatcatctggggggtctctataagttccatgataggcctgttacatacctctataatacgctgcattattacgagatgcaccttcgcgatcgtgcttttctcaaacgcaagctcgtccacgctattatcggctcgttaaaggacaatagaccccaaggctggtgcctctccgatacttacctgaagtgcgctatgaatgctcgggaggagaacccatgggtgccagatgatacatactactgcagattaatagggcggctggttgacactatggctggcaagtcacccggccctttccctaattgcgactggcgctttaatgagtttcccaacccagccgcccacgccctccatgtgacttgtgtcgagctcatggccctagctgtgagtggcaaagaagtcggaaatgctctccttaacgtggtattgaaaagccagcctttggtcccccgggaaaatattaccgcctggatgaacgccataggcttaattattacggcactgcctgaaccgtactggatcgtgttgcacgaccgcattgtatcagtgatctctagtccgagtctcactagtgagaccgagtgggtgggctatccttttagactctttgacttcacagcgtgccaccagtcatattctgagatgagctgcagctatacactagcactggctcatgccgtgtggcaccactccagcataggccagctctctctaatccctaagtttttgactgaggtgttactgccaattgttaaaacagagttccagctcctatacgtgtatcatctcgtcggaccattcctgcaacgctttcagcaggaacgaacgcgctgtatgatcgagatcggggtggctttctatgatatgttgctgaacgtggatcagtgttctacccatctgaattacatggatcccatctgtgactttctgtaccatatgaaatatatgttcaccggtgactccgttaaagagcaagtcgagaaaatcatctgtaacctaaaacccgcactgaagctcagactccgcttcatcacccatattagtaaaatggaaccggccgctgtacctccccaggcgatgaactctggctcccccgcccctcagtcaaatcaggtccccgtctcactgcccgtaacacagtag

SEQ ID NO: 280865 - DNA, 114 bp, Artificial Sequence
  derived and/or modified sequence
atggagacccagctgcagagcatcttcgaggaggtggtgaagaccgaggtgatcgaggaggcatttcccggcatgtttatggacacgccagaagacgagaagagttccaagtag

SEQ ID NO: 280866 - DNA, 132 bp, Artificial Sequence
  derived and/or modified sequence
atggagacccagctgcagagcatcttcgaggaggtggtgaagaccgaagtcatagaagaggctttcccgggaatgtttatggacaccccggaggatgaaaagacaaaactttttatggagatggaactgtag

SEQ ID NO: 280867 - DNA, 4125 bp, Artificial Sequence
  derived and/or modified sequence
atggagacgcagctgcaaagcatctttgaagaggtggtgaagaccgaagtcatcgaagaagcgtttccaggaatgtttatggacactcccgaggacgagaaaacaaagctgattagttgtttgggggcttttaggcagttctggggcggactgagccaggaatcccacgagcagtgcattcagtggatagtaaagttcatacacggtcagcactcgccgaagcggatttcctttctctacgactgcttggcaatggccgtggagaccgggcttttgcctcccagactagtttgtgagtctttaatcaacagcgacactctggagtgggagagaacacaactgtgggctctcactttcaagctcgtcagaaaaataatcggcggagtggattacaagggggtaagggatctgctcaaagtgatcttagaaaaaattctgaccattccgaatacggtttcctctgcagtcgtgcagcagttgctcgcagctcgggaagtgattgcatacatcctcgagagaaacgcctgcctcctgcccgcttactttgccgtgaccgagatcaggaagttataccccgaaggaaagctgccacattggctccttggaaatttggtgtctgattttgtagacactttccggcctactgcaagaatcaattcgatctgcggaaggtgctcccttctgcccgttgtcaataacagcggcgctatttgcaacagttggaagctggatcctgcaacgcttcgattcccgctgaaaggccttctcccctacgacaaagatctgtttgagccccaaaccgcgctcctgcgatacgtgttggaacagccgtactcacgggacatggtttgcaacatgcttggattaaataaacagacgctgaatattgctcaacataagcaacggtgccccgtgctggaagaccagcttgtggacctcgtcgtgtatgccatggaacggagcgagaccgaagagaaattcgacgacgggggaactagccagcttctttggcagcacctcagttcacagctgatcttctttgtgctctttcagtttgcgtccttcccacacatggtgctatccctgcaccagaagttagccggaagaggtcttatcaaggggagggaccacctgatgtgggtcttactgcaattcatatccggatcaatccagaaaaacgcactagccgatttcttgcctgtgatgaaactctttgacctactgtatcctgagaaggagtacatcccagttccggacattaacaagcctcagtccacgcatgcctttgcgatgacttgcatttggatacatttaaacaggaaagcccagaatgacaatagcaagttacagattcccatcccacattccttgcggttacatcatgagtttctacagcagtcactgcgcaacaagtctttgcagatgaacgattacaaaatcgccctgctgtgcaacgcgtatagcactaattctgagtgcttcactctcccaatgggcgcattggtcgaaacaatttacggaaacggtataatgcgaattcctctgcccggtactaattgcatggcgtccggcagcatcacccctctaccaatgaacctcctcgatagcctgaccgtccacgccaagatgtctctgattcactcgatcgctacccgggtaatcaagctggcgcatgctaaatcctctgtagcattggcacctgctcttgtcgaaacttactcccggctcctcgtctacatggagatagaaagcctcggaattaagggattcatctcccagctgctccccaccgtcttcaaatcccatgcttggggcatactccatactcttcttgagatgttttcttataggatgcatcacatccagccccactacagagtgcagctgctcagtcatctgcatactctggctgccgtcgcacagaccaatcagaaccagttacacctttgcgttgagtcgaccgcactcaggttaatcacagctctcgggtctagtgaggtgcagccccagtttaccagatttctgagtgaccctaaaacagttctgagtgcagagagtgaagaactaaaccgagctctcatactaacgctggcaagggccacacatgtgacagacttctttactggctcggatagtatccagggaacttggtgcaaagacattctccagacaattatgtctttcactccgcacaattgggcctcacacaccttgtcctgtttccctggccctctccaggctttctttaagcagaacaatgtgccccaggagtcgagattcaatttaaagaaaaatgtggaggaagaataccgaaagtggaagagcatgtctaacgagaacgacattatcacccacttctcaatgcaggggtcacctccccttttcctgtgtctcctctggaagatgctgctggaaaccgaccacattaaccagattggctacagggtactggaacgaatcggcgcaagagccctggtagcgcatgtccggacatttgccgacttcctagtgtatgagttctctacttcagcaggaggacagcagctgaataagtgcattgagatacttaatgacatggtgtggaaatacaacattgtcaccctagaccggcttatcttatgcctggcaatgaggagccacgaaggtaacgaggcgcaggtttgttatttcatcatacagcttctgttacttaaacccaatgattttcggaatcgtgtgtccgactttgtcaaggagaactcacctgagcattggttacagaacgattggcacaccaagcacatgaactaccataaaaaataccccgagaaactgtactttgaaggactggcagaacaggtggatccacctgtacaaatccagtccccatacctgcccatctattttggcaacgtatgtttgcgcttcttacccgtgttcgatatcgtgatccatcgcttcctagagctgttacctgtcagtaaatcactcgagacactactcgatcatctggggggactgtataagtttcacgatcggccagtcacatatctctataacacacttcactattacgagatgcacttgagagaccgagcattcttgaagaggaaacttgtccatgccattatcgggtccttgaaagataatcggccacaggggtggtgtctgtcagacacatacctgaagtgcgccatgaacgctcgcgaagaaaacccctgggtcccggatgatacatactactgtcggttgatcggccgattggtagataccatggcgggaaagtcacccggacccttccccaactgcgattggagatttaacgagttcccaaatcctgccgctcacgctttacacgtgacatgcgtcgaactgatggccctggcagtgtcaggaaaggaggttggtaatgccctcctgaacgtcgtcctgaagtctcagccgttggtgcccagagagaacataaccgcgtggatgaacgccatcgggctaattataaccgccctcccagaaccatactggattgtgctgcatgacagaattgtgtcagtcatttccagcccttcactcacaagtgaaacagagtgggtggggtatccttttagactgttcgattttaccgcgtgtcaccaaagttattccgagatgtcttgttcctatacacttgccctggcacacgcagtgtggcatcacagctcaatcggacagctgagcctcattccaaagttcctaaccgaggtcctactgcccattgtgaagacagagttccagttactgtatgtatatcatctggtgggcccttttctgcagcggttccagcaggagcggaccaggtgcatgatcgagatcggagttgcgttttatgacatgctcctcaatgttgaccagtgttcaacccacctgaactatatggacccaatttgcgattttctgtatcacatgaagtacatgttcaccggggattccgtcaaggaacaggtcaagaaaattatttgcaatcttaagccagccctgaaattgagattaagatttataacccatattagcaaaatggagcctgccgctgtgccgccacaggcaatgaattcggggagcccggctcctcaatcaaaccaagtaccagtgagtctgcctgtaacgcagtag

SEQ ID NO: 280868 - DNA, 4125 bp, Artificial Sequence
  derived and/or modified sequence
atggagacccagttgcagagtatctttgaggaagtggtgaaaacagaggtgattgaagaggcatttccaggcatgtttatggacactcccgaagatgaaaaaaccaaactgataagctgccttggagcattcagacagttttggggcggactgtcccaagaaagccacgagcagtgcattcaatggatcgtgaaatttatacacggtcagcactccccgaagcggattagctttctgtatgactgcctggcaatggctgtcgagacaggactgctgcctccacgcctggtgtgtgagtctctgatcaacagtgataccctcgagtgggagagaacccagttgtgggctcttacattcaagctggtgcggaagattataggcggagttgactacaaaggcgtgagggatctgttgaaggtcatcctcgaaaagattcttacaattcccaacaccgtgagttccgctgtggttcaacagttactagccgcaagggaagtgattgcctatatcctagagcgcaatgcctgtctactccccgcttatttcgccgttactgagattcgcaaattgtaccctgagggcaagctacctcattggctccttggaaatctagtgagcgattttgtcgataccttccgaccgactgctcgcattaatagcatctgtgggaggtgctccctcttacctgtcgtcaataactcaggtgccatctgcaactcttggaaactcgatcccgcaaccctccggttcccactgaagggcctcctgccctacgacaaagatctgttcgagcctcagacagccttgttacggtatgttttagaacagccatatagtagagacatggtgtgtaatatgctcggactgaacaaacagcttatttctgcccttcaacacaagcaacgttgtcctgtcttggaagaccaactggtcgacttggtggtgtacgctatggagcgcagcgaaacagaagagaagttcgacgatggcggaacaagtcaattactgtggcagcatttgtcatcccaactgatattcttcgtcctcttccagtttgcgtctttcccccacatggtgctctcattacaccagaagctcgctggcagaggcctgatcaaagggagggaccacttaatgtgggtcctgctccagttcatcagcggctctatccagaaaaatgcactcgccgacttcctgcctgttatgaagctgtttgatttgctttaccctgaaaaggagtatatccccgtacccgatataaacaagccacagagcacgcacgcattcgctatgacttgtatctggattcatttgaatcgcaaggcgcaaaatgacaacagtaaactacagattccaataccccacagcctccggctccaccacgagtttctgcagcaaagtctgcggaacaagagtctgcaaatgaatgactataagatagcattgctctgcaacgcctactccactaatagtgagtgcttcacgctccctatgggagctctcgtggagaccatttacggaaatggtatcatgcgcatccccctgcctggaaccaattgtatggcctctggctccatcactccattaccgatgaacttacttgatagccttacagtgcatgcaaagatgtcattgatccatagcatcgcaacccgggtgattaaactggcccatgcaaagagctcagtggctttagcgcctgccttggtggagacctacagtcgcctgctcgtgtatatggaaattgagagtctgggcatcaagggttttattagccagttgctgcccaccgttttcaaaagccacgcatggggcatcctccatacgctgcttgaaatgttctcttacaggatgcaccacatccagcctcactatcgcgtccaactgctgtcacacctccatacgctagcggctgttgcccagacaaaccagaaccagttgcatctgtgtgtagagtcaacagcactacggcttatcaccgccctcggatcctcagaggtccaaccccaattcacccgcttcttaagcgaccccaaaacggtcttatccgccgaaagtgaggaattgaatcgcgctctaatccttacgctcgcaagagccacgcatgtcacggatttcttcaccggcagcgattccattcaaggtacgtggtgcaaagatattcttcaaacaatcatgtcctttaccccacacaactgggcatcccacacactgagctgttttccaggccctctgcaagccttttttaagcaaaataatgtcccgcaggagtctcgattcaatcttaaaaaaaatgtcgaggaggaatatcggaagtggaagtcaatgtcgaatgaaaatgatatcatcacccacttctcaatgcaaggttcacctcccctgttcctgtgcctgctgtggaagatgttgctcgagaccgaccatataaatcagatcggatacagggtccttgagcgtatcggagctagagctttggtggcacatgtgcggacgtttgccgacttccttgtctacgaattctctacttctgccggagggcaacagctgaacaaatgtatagagatccttaatgatatggtgtggaaatacaatatcgtcacattagatcgactgattttgtgcctggctatgcgtagccatgagggaaatgaagctcaggtctgctactttatcattcaactgctgctgttgaaacctaatgactttagaaacagggtctcagatttcgtcaaggaaaacagccccgagcactggttacagaacgactggcataccaagcatatgaattatcacaagaagtatcccgaaaagctgtactttgagggtctagcagaacaggtggatcctcctgtgcagatccaatccccttatctgcctatctattttggaaacgtctgtctgagattccttcccgtctttgatattgtcatccatagattcctggagctgctgcccgtgagcaagagccttgagacgctgctcgatcatctaggtggcctgtataaatttcatgatagacccgtgacctacctatataacactctgcactattacgagatgcaccttcgggaccgcgcatttctcaaacgtaaactggtccatgccatcatcgggtcactgaaagacaatcgaccacaggggtggtgtctcagtgatacttatttgaaatgtgctatgaatgccagagaagagaatccctgggtgccagacgatacttattactgtagacttattgggaggttagtggacaccatggccggaaaaagtccaggacccttccctaattgcgactggcggttcaacgaatttccaaatcccgcagcacacgccctccatgttacatgcgtggagctcatggccttagccgttagcggcaaagaggtgggtaacgctctgttaaacgtggtgctgaaatcacagcccctcgttccaagagagaacattaccgcttggatgaatgccattgggctcattatcacagctctcccagagccctactggattgtgctgcacgaccgcatcgtgtcagtgatatcatctccctctttaacctcggaaactgaatgggttggctacccttttcggctgttcgactttaccgcatgccaccagtcttattccgagatgtcctgttcctatacgctcgctctggcgcacgctgtatggcaccactccagcattggacagctaagtttaataccaaaatttctgactgaggtccttctccccattgtaaagaccgaatttcagctcctatacgtctaccatctggtcggcccattcctccagcgcttccagcaagagcggacaaggtgtatgattgaaattggggtggccttctatgacatgctacttaatgtcgatcagtgctccacgcacttgaattatatggatccaatctgcgactttctctaccatatgaaatacatgtttactggagatagcgtgaaagaacaggtggaaaaaattatctgcaatctaaagccagctttgaaactgagactcaggttcatcacccacatttcaaagatggaaccagccgcagtgccaccccaggccatgaatagcgggtcccccgctcctcagagtaatcaggtgcccgtgtctctgcccgtgacgcagtag

SEQ ID NO: 280869 - DNA, 114 bp, Artificial Sequence
  derived and/or modified sequence
atggaaacccagcttcagtccatcttcgaggaggtagtaaagactgaagtgatagaggaggcttttcctggcatgtttatggacacgcctgaggacgaaaaaagtagcaagtag

SEQ ID NO: 280870 - DNA, 132 bp, Artificial Sequence
  derived and/or modified sequence
atggagacccagttgcagtccatttttgaagaggtggtgaaaaccgaggtgatagaagaggcattcccgggtatgtttatggatactcccgaagatgagaaaaccaaactttttatggaaatggagctgtag

SEQ ID NO: 280871 - DNA, 4125 bp, Artificial Sequence
  derived and/or modified sequence
atggagacccagctgcagagcatcttcgaggaggtggtgaagaccgaggtgatcgaggaggccttccccggcatgttcatggacacccccgaggacgagaagaccaagctgatcagctgcctgggcgccttcagacagttctggggcggcctgagccaggagagccacgagcagtgcatccagtggatcgtgaagttcatccacggccagcacagccccaagagaatcagcttcctgtacgactgcctggccatggccgtggagaccggcctgctgccccccagactggtgtgcgagagcctgatcaacagcgacaccctggagtgggagagaacccagctgtgggccctgaccttcaagctggtgagaaagatcatcggcggcgtggactacaagggcgtgagagacctgctgaaggtgatcctggagaagatcctgaccatccccaacaccgtgagcagcgccgtggtgcagcagctgctggccgccagagaggtgatcgcctacatcctggagagaaacgcctgcctgctgcccgcctacttcgccgtgaccgagatcagaaagctgtaccccgagggcaagctgccccactggctgctgggcaacctggtgagcgacttcgtggacaccttcagacccaccgccagaatcaacagcatctgcggcagatgcagcctgctgcccgtggtgaacaacagcggcgccatctgcaacagctggaagctggaccccgccaccctgagattccccctgaagggcctgctgccctacgacaaggacctgttcgagccccagaccgccctgctgagatacgtgctggagcagccctacagcagagacatggtgtgcaacatgctgggcctgaacaagcagaccctgaacatcgcccagcacaagcagagatgccccgtgctggaggaccagctggtggacctggtggtgtacgccatggagagaagcgagaccgaggagaagttcgacgacggcggcaccagccagctgctgtggcagcacctgagcagccagctgatcttcttcgtgctgttccagttcgccagcttcccccacatggtgctgagcctgcaccagaagctggccggcagaggcctgatcaagggcagagaccacctgatgtgggtgctgctgcagttcatcagcggcagcatccagaagaacgccctggccgacttcctgcccgtgatgaagctgttcgacctgctgtaccccgagaaggagtacatccccgtgcccgacatcaacaagccccagagcacccacgccttcgccatgacctgcatctggatccacctgaacagaaaggcccagaacgacaacagcaagctgcagatccccatcccccacagcctgagactgcaccacgagttcctgcagcagagcctgagaaacaagagcctgcagatgaacgactacaagatcgccctgctgtgcaacgcctacagcaccaacagcgagtgcttcaccctgcccatgggcgccctggtggagaccatctacggcaacggcatcatgagaatccccctgcccggcaccaactgcatggccagcggcagcatcacccccctgcccatgaacctgctggacagcctgaccgtgcacgccaagatgagcctgatccacagcatcgccaccagagtgatcaagctggcccacgccaagagcagcgtggccctggcccccgccctggtggagacctacagcagactgctggtgtacatggagatcgagagcctgggcatcaagggcttcatcagccagctgctgcccaccgtgttcaagagccacgcctggggcatcctgcacaccctgctggagatgttcagctacagaatgcaccacatccagccccactacagagtgcagctgctgagccacctgcacaccctggccgccgtggcccagaccaaccagaaccagctgcacctgtgcgtggagagcaccgccctgagactgatcaccgccctgggcagcagcgaggtgcagccccagttcaccagattcctgagcgaccccaagaccgtgctgagcgccgagagcgaggagctgaacagagccctgatcctgaccctggccagagccacccacgtgaccgacttcttcaccggcagcgacagcatccagggcacctggtgcaaggacatcctgcagaccatcatgagcttcaccccccacaactgggccagccacaccctgagctgcttccccggccccctgcaggccttcttcaagcagaacaacgtgccccaggagagcagattcaacctgaagaagaacgtggaggaggagtacagaaagtggaagagcatgagcaacgagaacgacatcatcacccacttcagcatgcagggcagcccccccctgttcctgtgcctgctgtggaagatgctgctggagaccgaccacatcaaccagatcggctacagagtgctggagagaatcggcgccagagccctggtggcccacgtgagaaccttcgccgacttcctggtgtacgagttcagcaccagcgccggcggccagcagctgaacaagtgcatcgagatcctgaacgacatggtgtggaagtacaacatcgtgaccctggacagactgatcctgtgcctggccatgagaagccacgagggcaacgaggcccaggtgtgctacttcatcatccagctgctgctgctgaagcccaacgacttcagaaacagagtgagcgacttcgtgaaggagaacagccccgagcactggctgcagaacgactggcacaccaagcacatgaactaccacaagaagtaccccgagaagctgtacttcgagggcctggccgagcaggtggacccccccgtgcagatccagagcccctacctgcccatctacttcggcaacgtgtgcctgagattcctgcccgtgttcgacatcgtgatccacagattcctggagctgctgcccgtgagcaagagcctggagaccctgctggaccacctgggcggcctgtacaagttccacgacagacccgtgacctacctgtacaacaccctgcactactacgagatgcacctgagagacagagccttcctgaagagaaagctggtgcacgccatcatcggcagcctgaaggacaacagaccccagggctggtgcctgagcgacacctacctgaagtgcgccatgaacgccagagaggagaacccctgggtgcccgacgacacctactactgcagactgatcggcagactggtggacaccatggccggcaagagccccggccccttccccaactgcgactggagattcaacgagttccccaaccccgccgcccacgccctgcacgtgacctgcgtggagctgatggccctggccgtgagcggcaaggaggtgggcaacgccctgctgaacgtggtgctgaagagccagcccctggtgcccagagagaacatcaccgcctggatgaacgccatcggcctgatcatcaccgccctgcccgagccctactggatcgtgctgcacgacagaatcgtgagcgtgatcagcagccccagcctgaccagcgagaccgagtgggtgggctaccccttcagactgttcgacttcaccgcctgccaccagagctacagcgagatgagctgcagctacaccctggccctggcccacgccgtgtggcaccacagcagcatcggccagctgagcctgatccccaagttcctgaccgaggtgctgctgcccatcgtgaagaccgagttccagctgctgtacgtgtaccacctggtgggccccttcctgcagagattccagcaggagagaaccagatgcatgatcgagatcggcgtggccttctacgacatgctgctgaacgtggaccagtgcagcacccacctgaactacatggaccccatctgcgacttcctgtaccacatgaagtacatgttcaccggcgacagcgtgaaggagcaggtgaagaagatcatctgcaacctgaagcccgccctgaagctgagactgagattcatcacccacatcagcaagatggagcccgccgccgtgcccccccaggccatgaacagcggcagccccgccccccagagcaaccaggtgcccgtgagcctgcccgtgacccagtag

SEQ ID NO: 280872 - DNA, 4125 bp, Artificial Sequence
  derived and/or modified sequence
atggagacccagctgcagagcatcttcgaggaggtggtgaagaccgaggtgatcgaggaggccttccccggcatgttcatggacacccccgaggacgagaagaccaagctgatcagctgcctgggcgccttcagacagttctggggcggcctgagccaggagagccacgagcagtgcatccagtggatcgtgaagttcatccacggccagcacagccccaagagaatcagcttcctgtacgactgcctggccatggccgtggagaccggcctgctgccccccagactggtgtgcgagagcctgatcaacagcgacaccctggagtgggagagaacccagctgtgggccctgaccttcaagctggtgagaaagatcatcggcggcgtggactacaagggcgtgagagacctgctgaaggtgatcctggagaagatcctgaccatccccaacaccgtgagcagcgccgtggtgcagcagctgctggccgccagagaggtgatcgcctacatcctggagagaaacgcctgcctgctgcccgcctacttcgccgtgaccgagatcagaaagctgtaccccgagggcaagctgccccactggctgctgggcaacctggtgagcgacttcgtggacaccttcagacccaccgccagaatcaacagcatctgcggcagatgcagcctgctgcccgtggtgaacaacagcggcgccatctgcaacagctggaagctggaccccgccaccctgagattccccctgaagggcctgctgccctacgacaaggacctgttcgagccccagaccgccctgctgagatacgtgctggagcagccctacagcagagacatggtgtgcaacatgctgggcctgaacaagcagctgatcagcgccctgcagcacaagcagagatgccccgtgctggaggaccagctggtggacctggtggtgtacgccatggagagaagcgagaccgaggagaagttcgacgacggcggcaccagccagctgctgtggcagcacctgagcagccagctgatcttcttcgtgctgttccagttcgccagcttcccccacatggtgctgagcctgcaccagaagctggccggcagaggcctgatcaagggcagagaccacctgatgtgggtgctgctgcagttcatcagcggcagcatccagaagaacgccctggccgacttcctgcccgtgatgaagctgttcgacctgctgtaccccgagaaggagtacatccccgtgcccgacatcaacaagccccagagcacccacgccttcgccatgacctgcatctggatccacctgaacagaaaggcccagaacgacaacagcaagctgcagatccccatcccccacagcctgagactgcaccacgagttcctgcagcagagcctgagaaacaagagcctgcagatgaacgactacaagatcgccctgctgtgcaacgcctacagcaccaacagcgagtgcttcaccctgcccatgggcgccctggtggagaccatctacggcaacggcatcatgagaatccccctgcccggcaccaactgcatggccagcggcagcatcacccccctgcccatgaacctgctggacagcctgaccgtgcacgccaagatgagcctgatccacagcatcgccaccagagtgatcaagctggcccacgccaagagcagcgtggccctggcccccgccctggtggagacctacagcagactgctggtgtacatggagatcgagagcctgggcatcaagggcttcatcagccagctgctgcccaccgtgttcaagagccacgcctggggcatcctgcacaccctgctggagatgttcagctacagaatgcaccacatccagccccactacagagtgcagctgctgagccacctgcacaccctggccgccgtggcccagaccaaccagaaccagctgcacctgtgcgtggagagcaccgccctgagactgatcaccgccctgggcagcagcgaggtgcagccccagttcaccagattcctgagcgaccccaagaccgtgctgagcgccgagagcgaggagctgaacagagccctgatcctgaccctggccagagccacccacgtgaccgacttcttcaccggcagcgacagcatccagggcacctggtgcaaggacatcctgcagaccatcatgagcttcaccccccacaactgggccagccacaccctgagctgcttccccggccccctgcaggccttcttcaagcagaacaacgtgccccaggagagcagattcaacctgaagaagaacgtggaggaggagtacagaaagtggaagagcatgagcaacgagaacgacatcatcacccacttcagcatgcagggcagcccccccctgttcctgtgcctgctgtggaagatgctgctggagaccgaccacatcaaccagatcggctacagagtgctggagagaatcggcgccagagccctggtggcccacgtgagaaccttcgccgacttcctggtgtacgagttcagcaccagcgccggcggccagcagctgaacaagtgcatcgagatcctgaacgacatggtgtggaagtacaacatcgtgaccctggacagactgatcctgtgcctggccatgagaagccacgagggcaacgaggcccaggtgtgctacttcatcatccagctgctgctgctgaagcccaacgacttcagaaacagagtgagcgacttcgtgaaggagaacagccccgagcactggctgcagaacgactggcacaccaagcacatgaactaccacaagaagtaccccgagaagctgtacttcgagggcctggccgagcaggtggacccccccgtgcagatccagagcccctacctgcccatctacttcggcaacgtgtgcctgagattcctgcccgtgttcgacatcgtgatccacagattcctggagctgctgcccgtgagcaagagcctggagaccctgctggaccacctgggcggcctgtacaagttccacgacagacccgtgacctacctgtacaacaccctgcactactacgagatgcacctgagagacagagccttcctgaagagaaagctggtgcacgccatcatcggcagcctgaaggacaacagaccccagggctggtgcctgagcgacacctacctgaagtgcgccatgaacgccagagaggagaacccctgggtgcccgacgacacctactactgcagactgatcggcagactggtggacaccatggccggcaagagccccggccccttccccaactgcgactggagattcaacgagttccccaaccccgccgcccacgccctgcacgtgacctgcgtggagctgatggccctggccgtgagcggcaaggaggtgggcaacgccctgctgaacgtggtgctgaagagccagcccctggtgcccagagagaacatcaccgcctggatgaacgccatcggcctgatcatcaccgccctgcccgagccctactggatcgtgctgcacgacagaatcgtgagcgtgatcagcagccccagcctgaccagcgagaccgagtgggtgggctaccccttcagactgttcgacttcaccgcctgccaccagagctacagcgagatgagctgcagctacaccctggccctggcccacgccgtgtggcaccacagcagcatcggccagctgagcctgatccccaagttcctgaccgaggtgctgctgcccatcgtgaagaccgagttccagctgctgtacgtgtaccacctggtgggccccttcctgcagagattccagcaggagagaaccagatgcatgatcgagatcggcgtggccttctacgacatgctgctgaacgtggaccagtgcagcacccacctgaactacatggaccccatctgcgacttcctgtaccacatgaagtacatgttcaccggcgacagcgtgaaggagcaggtggagaagatcatctgcaacctgaagcccgccctgaagctgagactgagattcatcacccacatcagcaagatggagcccgccgccgtgcccccccaggccatgaacagcggcagccccgccccccagagcaaccaggtgcccgtgagcctgcccgtgacccagtag

SEQ ID NO: 280873 - DNA, 114 bp, Artificial Sequence
  derived and/or modified sequence
atggagacccagctgcagagcatcttcgaggaggtggtgaagaccgaggtgatcgaggaggccttccccggcatgttcatggacacccccgaggacgagaagagcagcaagtag

SEQ ID NO: 280874 - DNA, 132 bp, Artificial Sequence
  derived and/or modified sequence
atggagacccagctgcagagcatcttcgaggaggtggtgaagaccgaggtgatcgaggaggccttccccggcatgttcatggacacccccgaggacgagaagaccaagctgttcatggagatggagctgtag

SEQ ID NO: 280875 - protein, 1677 aa, Artificial Sequence
  derived and/or modified sequence
MVGQRDSEDVSKRDSDKEMATKSAVVHDITDDGQEETPEIIEQIPSSESNLEELTQPTESQANDIGFKKVFKFVGFKFTVKKDKTEKPDTVQLLTVKKDEGEGAAGAGDHKDPSLGAGEAASKESEPKQSTEKPEETLKREQSHAEISPPAESGQAVEECKEEGEEKQEKEPSKSAESPTSPVTSETGSTFKKFFTQGWAGWRKKTSFRKPKEDEVEASEKKKEQEPEKVDTEEDGKAEVASEKLTASEQAHPQEPAESAHEPRLSAEYEKVELPSEEQVSGSQGPSEEKPAPLATEVFDEKIEVHQEEVVAEVHVSTVEERTEEQKTEVEETAGSVPAEELVEMDAEPQEAEPAKELVKLKETCVSGEDPTQGADLSPDEKVLSKPPEGVVSEVEMLSSQERMKVQGSPLKKLFTSTGLKKLSGKKQKGKRGGGDEESGEHTQVPADSPDSQEEQKGESSASSPEEPEEITCLEKGLAEVQQDGEAEEGATSDGEKKREGVTPWASFKKMVTPKKRVRRPSESDKEDELDKVKSATLSSTESTASEMQEEMKGSVEEPKPEEPKRKVDTSVSWEALICVGSSKKRARRGSSSDEEGGPKAMGGDHQKADEAGKDKETGTDGILAGSQEHDPGQGSSSPEQAGSPTEGEGVSTWESFKRLVTPRKKSKSKLEEKSEDSIAGSGVEHSTPDTEPGKEESWVSIKKFIPGRRKKRPDGKQEQAPVEDAGPTGANEDDSDVPAVVPLSEYDAVEREKMEAQQAQKSAEQPEQKAATEVSKELSESQVHMMAAAVADGTRAATIIEERSPSWISASVTEPLEQVEAEAALLTEEVLEREVIAEEEPPTVTEPLPENREARGDTVVSEAELTPEAVTAAETAGPLGAEEGTEASAAEETTEMVSAVSQLTDSPDTTEEATPVQEVEGGVPDIEEQERRTQEVLQAVAEKVKEESQLPGTGGPEDVLQPVQRAEAERPEEQAEASGLKKETDVVLKVDAQEAKTEPFTQGKVVGQTTPESFEKAPQVTESIESSELVTTCQAETLAGVKSQEMVMEQAIPPDSVETPTDSETDGSTPVADFDAPGTTQKDEIVEIHEENEVASGTQSGGTEAEAVPAQKERPPAPSSFVFQEETKEQSKMEDTLEHTDKEVSVETVSILSKTEGTQEADQYADEKTKDVPFFEGLEGSIDTGITVSREKVTEVALKGEGTEEAECKKDDALELQSHAKSPPSPVEREMVVQVEREKTEAEPTHVNEEKLEHETAVTVSEEVSKQLLQTVNVPIIDGAKEVSSLEGSPPPCLGQEEAVCTKIQVQSSEASFTLTAAAEEEKVLGETANILETGETLEPAGAHLVLEEKSSEKNEDFAAHPGEDAVPTGPDCQAKSTPVIVSATTKKGLSSDLEGEKTTSLKWKSDEVDEQVACQEVKVSVAIEDLEPENGILELETKSSKLVQNIIQTAVDQFVRTEETATEMLTSELQTQAHVIKADSQDAGQETEKEGEEPQASAQDETPITSAKEESESTAVGQAHSDISKDMSEASEKTMTVEVEGSTVNDQQLEEVVLPSEEEGGGAGTKSVPEDDGHALLAERIEKSLVEPKEDEKGDDVDDPENQNSALADTDASGGLTKESPDTNGPKQKEKEDAQEVELQEGKVHSESDKAITPQAQEELQKQERESAKSELTES

SEQ ID NO: 280876 - DNA, 5034 bp, Artificial Sequence
  derived and/or modified sequence
atggtgggccagagagacagcgaggacgtgagcaagagagacagcgacaaggagatggccaccaagagcgccgtggtgcacgacatcaccgacgacggccaggaggagacccccgagatcatcgagcagatccccagcagcgagagcaacctggaggagctgacccagcccaccgagagccaggccaacgacatcggcttcaagaaggtgttcaagttcgtgggcttcaagttcaccgtgaagaaggacaagaccgagaagcccgacaccgtgcagctgctgaccgtgaagaaggacgagggcgagggcgccgccggcgccggcgaccacaaggaccccagcctgggcgccggcgaggccgccagcaaggagagcgagcccaagcagagcaccgagaagcccgaggagaccctgaagagagagcagagccacgccgagatcagcccccccgccgagagcggccaggccgtggaggagtgcaaggaggagggcgaggagaagcaggagaaggagcccagcaagagcgccgagagccccaccagccccgtgaccagcgagaccggcagcaccttcaagaagttcttcacccagggctgggccggctggagaaagaagaccagcttcagaaagcccaaggaggacgaggtggaggccagcgagaagaagaaggagcaggagcccgagaaggtggacaccgaggaggacggcaaggccgaggtggccagcgagaagctgaccgccagcgagcaggcccacccccaggagcccgccgagagcgcccacgagcccagactgagcgccgagtacgagaaggtggagctgcccagcgaggagcaggtgagcggcagccagggccccagcgaggagaagcccgcccccctggccaccgaggtgttcgacgagaagatcgaggtgcaccaggaggaggtggtggccgaggtgcacgtgagcaccgtggaggagagaaccgaggagcagaagaccgaggtggaggagaccgccggcagcgtgcccgccgaggagctggtggagatggacgccgagccccaggaggccgagcccgccaaggagctggtgaagctgaaggagacctgcgtgagcggcgaggaccccacccagggcgccgacctgagccccgacgagaaggtgctgagcaagccccccgagggcgtggtgagcgaggtggagatgctgagcagccaggagagaatgaaggtgcagggcagccccctgaagaagctgttcaccagcaccggcctgaagaagctgagcggcaagaagcagaagggcaagagaggcggcggcgacgaggagagcggcgagcacacccaggtgcccgccgacagccccgacagccaggaggagcagaagggcgagagcagcgccagcagccccgaggagcccgaggagatcacctgcctggagaagggcctggccgaggtgcagcaggacggcgaggccgaggagggcgccaccagcgacggcgagaagaagagagagggcgtgaccccctgggccagcttcaagaagatggtgacccccaagaagagagtgagaagacccagcgagagcgacaaggaggacgagctggacaaggtgaagagcgccaccctgagcagcaccgagagcaccgccagcgagatgcaggaggagatgaagggcagcgtggaggagcccaagcccgaggagcccaagagaaaggtggacaccagcgtgagctgggaggccctgatctgcgtgggcagcagcaagaagagagccagaagaggcagcagcagcgacgaggagggcggccccaaggccatgggcggcgaccaccagaaggccgacgaggccggcaaggacaaggagaccggcaccgacggcatcctggccggcagccaggagcacgaccccggccagggcagcagcagccccgagcaggccggcagccccaccgagggcgagggcgtgagcacctgggagagcttcaagagactggtgacccccagaaagaagagcaagagcaagctggaggagaagagcgaggacagcatcgccggcagcggcgtggagcacagcacccccgacaccgagcccggcaaggaggagagctgggtgagcatcaagaagttcatccccggcagaagaaagaagagacccgacggcaagcaggagcaggcccccgtggaggacgccggccccaccggcgccaacgaggacgacagcgacgtgcccgccgtggtgcccctgagcgagtacgacgccgtggagagagagaagatggaggcccagcaggcccagaagagcgccgagcagcccgagcagaaggccgccaccgaggtgagcaaggagctgagcgagagccaggtgcacatgatggccgccgccgtggccgacggcaccagagccgccaccatcatcgaggagagaagccccagctggatcagcgccagcgtgaccgagcccctggagcaggtggaggccgaggccgccctgctgaccgaggaggtgctggagagagaggtgatcgccgaggaggagccccccaccgtgaccgagcccctgcccgagaacagagaggccagaggcgacaccgtggtgagcgaggccgagctgacccccgaggccgtgaccgccgccgagaccgccggccccctgggcgccgaggagggcaccgaggccagcgccgccgaggagaccaccgagatggtgagcgccgtgagccagctgaccgacagccccgacaccaccgaggaggccacccccgtgcaggaggtggagggcggcgtgcccgacatcgaggagcaggagagaagaacccaggaggtgctgcaggccgtggccgagaaggtgaaggaggagagccagctgcccggcaccggcggccccgaggacgtgctgcagcccgtgcagagagccgaggccgagagacccgaggagcaggccgaggccagcggcctgaagaaggagaccgacgtggtgctgaaggtggacgcccaggaggccaagaccgagcccttcacccagggcaaggtggtgggccagaccacccccgagagcttcgagaaggccccccaggtgaccgagagcatcgagagcagcgagctggtgaccacctgccaggccgagaccctggccggcgtgaagagccaggagatggtgatggagcaggccatcccccccgacagcgtggagacccccaccgacagcgagaccgacggcagcacccccgtggccgacttcgacgcccccggcaccacccagaaggacgagatcgtggagatccacgaggagaacgaggtggccagcggcacccagagcggcggcaccgaggccgaggccgtgcccgcccagaaggagagaccccccgcccccagcagcttcgtgttccaggaggagaccaaggagcagagcaagatggaggacaccctggagcacaccgacaaggaggtgagcgtggagaccgtgagcatcctgagcaagaccgagggcacccaggaggccgaccagtacgccgacgagaagaccaaggacgtgcccttcttcgagggcctggagggcagcatcgacaccggcatcaccgtgagcagagagaaggtgaccgaggtggccctgaagggcgagggcaccgaggaggccgagtgcaagaaggacgacgccctggagctgcagagccacgccaagagcccccccagccccgtggagagagagatggtggtgcaggtggagagagagaagaccgaggccgagcccacccacgtgaacgaggagaagctggagcacgagaccgccgtgaccgtgagcgaggaggtgagcaagcagctgctgcagaccgtgaacgtgcccatcatcgacggcgccaaggaggtgagcagcctggagggcagcccccccccctgcctgggccaggaggaggccgtgtgcaccaagatccaggtgcagagcagcgaggccagcttcaccctgaccgccgccgccgaggaggagaaggtgctgggcgagaccgccaacatcctggagaccggcgagaccctggagcccgccggcgcccacctggtgctggaggagaagagcagcgagaagaacgaggacttcgccgcccaccccggcgaggacgccgtgcccaccggccccgactgccaggccaagagcacccccgtgatcgtgagcgccaccaccaagaagggcctgagcagcgacctggagggcgagaagaccaccagcctgaagtggaagagcgacgaggtggacgagcaggtggcctgccaggaggtgaaggtgagcgtggccatcgaggacctggagcccgagaacggcatcctggagctggagaccaagagcagcaagctggtgcagaacatcatccagaccgccgtggaccagttcgtgagaaccgaggagaccgccaccgagatgctgaccagcgagctgcagacccaggcccacgtgatcaaggccgacagccaggacgccggccaggagaccgagaaggagggcgaggagccccaggccagcgcccaggacgagacccccatcaccagcgccaaggaggagagcgagagcaccgccgtgggccaggcccacagcgacatcagcaaggacatgagcgaggccagcgagaagaccatgaccgtggaggtggagggcagcaccgtgaacgaccagcagctggaggaggtggtgctgcccagcgaggaggagggcggcggcgccggcaccaagagcgtgcccgaggacgacggccacgccctgctggccgagagaatcgagaagagcctggtggagcccaaggaggacgagaagggcgacgacgtggacgaccccgagaaccagaacagcgccctggccgacaccgacgccagcggcggcctgaccaaggagagccccgacaccaacggccccaagcagaaggagaaggaggacgcccaggaggtggagctgcaggagggcaaggtgcacagcgagagcgacaaggccatcaccccccaggcccaggaggagctgcagaagcaggagagagagagcgccaagagcgagctgaccgagagctag

SEQ ID NO: 280877 - DNA, 6190 bp, Artificial Sequence
  derived and/or modified sequence
agtgagtagcacgtgcacccaagcggcagttcgccccgcagcgatggcggacacggaatcccgagggccaccaactgtcccttaggaccggcccgagatggttggacagagagactctgaagatgtgagcaaaagagactccgataaagagatggctactaagtcagcggttgttcacgacatcacagatgatgggcaggaggagacacccgaaataatcgaacagattccttcttcagaaagcaatttagaagagctaacacaacccactgagtcccaggctaatgatattggatttaagaaggtgtttaagtttgttggctttaaattcactgtgaaaaaggataagacagagaagcctgacactgtccagctactcactgtgaagaaagatgaaggggagggagcagcaggggctggcgaccacaaggaccccagccttggggctggagaagcagcatccaaagaaagcgaacccaaacaatctacagagaaacccgaagagaccctgaagcgtgagcaaagccacgcagaaatttctcccccagccgaatctggccaagcagtggaggaatgcaaagaggaaggagaagagaaacaagaaaaagaacctagcaagtctgcagaatctccgactagtcccgtgaccagtgaaacaggatcaaccttcaaaaaattcttcactcaaggttgggccggctggcgcaaaaagaccagtttcaggaagccgaaggaggatgaagtggaagcttcagagaagaaaaaggaacaagagccagaaaaagtagacacagaagaagacggaaaggcagaggttgcctccgagaaactgaccgcctccgagcaagcccacccacaggagccggcagaaagtgcccacgagccccggttatcagctgaatatgagaaagttgagctgccctcagaggagcaagtcagtggctcgcagggaccttctgaagagaaacctgctccgttggcgacagaagtgtttgatgagaaaatagaagtccaccaagaagaggttgtggccgaagtccacgtcagcaccgtggaggagagaaccgaagagcagaaaacggaggtggaagaaacagcagggtctgtgccagctgaagaattggttgaaatggatgcagaacctcaggaagctgaacctgccaaggagctggtgaagctcaaagaaacgtgtgtttccggagaggaccctacacagggagctgacctcagtcctgatgagaaggtgctgtccaaaccccccgaaggcgttgtgagtgaggtggaaatgctgtcatcacaggagagaatgaaggtgcagggaagtccactaaagaagctttttaccagcactggcttaaaaaagctttctggaaagaaacagaaagggaaaagaggaggaggagacgaggaatcaggggagcacactcaggttccagccgattctccggacagccaggaggagcaaaagggcgagagctctgcctcatcccctgaggagcccgaggagatcacgtgtctggaaaagggcttagccgaggtgcagcaggatggggaagctgaagaaggagctacttccgatggagagaaaaaaagagaaggtgtcactccctgggcatcattcaaaaagatggtgacgcccaagaagcgtgttagacggccttcggaaagtgataaagaagatgagctggacaaggtcaagagcgctaccttgtcttccaccgagagcacagcctctgaaatgcaagaagaaatgaaagggagcgtggaagagccaaagccggaagaaccaaagcgcaaggtggatacctcagtatcttgggaagctttaatttgtgtgggatcatccaagaaaagagcaaggagagggtcctcttctgatgaggaagggggaccaaaagcaatgggaggagaccaccagaaagctgatgaggccggaaaagacaaagagacggggacagacgggatccttgctggttcccaagaacatgatccagggcagggaagttcctccccggagcaagctggaagccctaccgaaggggagggcgtttccacctgggagtcatttaaaaggttagtcacgccaagaaaaaaatcaaagtccaagctggaagagaaaagcgaagactccatagctgggtctggtgtagaacattccactccagacactgaacccggtaaagaagaatcctgggtctcaatcaagaagtttattcctggacgaaggaagaaaaggccagatgggaaacaagaacaagcccctgttgaagacgcagggccaacaggggccaacgaagatgactctgatgtcccggccgtggtccctctgtctgagtatgatgctgtagaaagggagaaaatggaggcacagcaagcccaaaaaagcgcagagcagcccgagcagaaggcagccactgaggtgtccaaggagctcagcgagagtcaggttcatatgatggcagcagctgtcgctgacgggacgagggcagctaccattattgaagaaaggtctccttcttggatatctgcttcagtgacagaacctcttgaacaagtagaagctgaagccgcactgttaactgaggaggtattggaaagagaagtaattgcagaagaagaaccccccacggttactgaacctctgccagagaacagagaggcccggggcgacacggtcgttagtgaggcggaattgacccccgaagctgtgacagctgcagaaactgcagggccattgggtgccgaagaaggaaccgaagcatctgctgctgaagagaccacagaaatggtgtcagcagtctcccagttaaccgactccccagacaccacagaggaggccactccggtgcaggaggtggaaggtggcgtacctgacatagaagagcaagagaggcggactcaagaggtcctccaggcagtggcagaaaaagtgaaagaggaatcccagctgcctggcaccggtgggccagaagatgtgcttcagcctgtgcagagagcagaggcagaaagaccagaagagcaggctgaagcgtcgggtctgaagaaagagacggatgtagtgttgaaagtagatgctcaggaggcaaaaactgagccttttacacaagggaaggtggtggggcagaccaccccagaaagctttgaaaaagctcctcaagtcacagagagcatagagtccagtgagcttgtaaccacttgtcaagccgaaaccttagctggggtaaaatcacaggagatggtgatggaacaggctatcccccctgactcggtggaaacccctacagacagtgagactgatggaagcacccccgtagccgactttgacgcaccaggcacaacccagaaagacgagattgtggaaatccatgaggagaatgaggtcgcatctggtacccagtcagggggcacagaagcagaggcagttcctgcacagaaagagaggcctccagcaccttccagttttgtgttccaggaagaaactaaagaacaatcaaagatggaagacactctagagcatacagataaagaggtgtcagtggaaactgtatccattctgtcaaagactgaggggactcaagaggctgaccagtatgctgatgagaaaaccaaagacgtaccatttttcgaaggacttgaggggtctatagacacaggcataacagtcagtcgggaaaaggtcactgaagttgcccttaaaggtgaagggacagaagaagctgaatgtaaaaaggatgatgctcttgaactgcagagtcacgctaagtctcctccatcccccgtggagagagagatggtagttcaagtcgaaagggagaaaacagaagcagagccaacccatgtgaatgaagagaagcttgagcacgaaacagctgttaccgtatctgaagaggtcagtaagcagctcctccagacagtgaatgtgcccatcatagatggggcaaaggaagtcagcagtttggaaggaagccctcctccctgcctaggtcaagaggaggcagtatgcaccaaaattcaagttcagagctctgaggcatcattcactctaacagcggctgcagaggaggaaaaggtcttaggagaaactgccaacattttagaaacaggtgaaacgttggagcctgcaggtgcacatttagttctggaagagaaatcctctgaaaaaaatgaagactttgccgctcatccaggggaagatgctgtgcccacagggcccgactgtcaggcaaaatcgacaccagtgatagtatctgctactaccaagaaaggcttaagttccgacctggaaggagagaaaaccacatcactgaagtggaagtcagatgaagtcgatgagcaggttgcttgccaggaggtcaaagtgagtgtagcaattgaggatttagagcctgaaaatgggattttggaacttgagaccaaaagcagtaaacttgtccaaaacatcatccagacagccgttgaccagtttgtacgtacagaagaaacagccaccgaaatgttgacgtctgagttacagacacaagctcacgtgataaaagctgacagccaggacgctggacaggaaacggagaaagaaggagaggaacctcaggcctctgcacaggatgaaacaccaattacttcagccaaagaggagtcagagtcaaccgcagtgggacaagcacattctgatatttccaaagacatgagtgaagcctcagaaaagaccatgactgttgaggtagaaggttccactgtaaatgatcagcagctggaagaggtcgtcctcccatctgaggaagagggaggtggagctggaacaaagtctgtgccagaagatgatggtcatgccttgttagcagaaagaatagagaagtcactagttgaaccgaaagaagatgaaaaaggtgatgatgttgatgaccctgaaaaccagaactcagccctggctgatactgatgcctcaggaggcttaaccaaagagtccccagatacaaatggaccaaaacaaaaagagaaggaggatgcccaggaagtagaattgcaggaaggaaaagtgcacagtgaatcagataaagcgatcacaccccaagcacaggaggagttacagaaacaagagagagaatctgcaaagtcagaacttacagaatcttaaaacatcatgcagttaaactcattgtctgtttggaagaccagaatgtgaagacaagtagtagaagaaaatgaatgctgctgctgagactgaagaccagtatttcagaactttgagaattggagagcaggcacatcaactgatctcatttctagagagcccctgacaatcctgaggcttcatcaggagctagagccatttaacatttcctctttccaagaccaacctacaattttcccttgataaccatataaattctgatttaaggtcctaaattcttaacctggaactggagttggcaatacctagttctgcttctgaaactggagtatcattctttacatatttatatgtatgttttaagtagtcctcctgtatctattgtatatttttttcttaatgtttaaggaaatgtgcaggatactacatgctttttgtatcacacagtatatgatggggcatgtgccatagtgcaggcttggggagctttaagcctcagttatataacccacgaaaaacagagcctcctagatgtaacattcctgatcaaggtacaattctttaaaattcactaatgattgaggtccatatttagtggtactctgaaattggtcactttcctattacacggagtgtgctaaaactaaaaagcattttgaaacatacagaatgttctattgtcattgggaaatttttctttctaacccagtggaggttagaaagaagttatattctggtagcaaattaactttacatcctttttcctacttgttatggttgtttggaccgataagtgtgcttaatcctgaggcaaagtagtgaatatgttttatatgttatgaagaaaagaattgttgtaagtttttgattctactcttatatgctggactgcattcacacatggcatgaaataagtcaggttctttacaaatggtattttgatagatactggattgtgtttgtgccatatttgtgccattcttttaagaacaatgttgcaacacattcatttggataagttgtgatttgacgactgatttaaataaaatatttgcttcactt

SEQ ID NO: 280878 - DNA, 5034 bp, Artificial Sequence
  derived and/or modified sequence
atggtcggtcagagagatagtgaagatgtgagcaaacgcgatagtgataaggaaatggctacaaaatctgctgtagtgcatgatatcacagatgatgggcaggaagagacccccgaaataatagaacagattccgtcgtccgagagcaacttagaagaactgactcagcccaccgagtcccaggccaatgacattggtttcaagaaagtgtttaagttcgttggtttcaagttcacagtcaagaaggacaagactgagaaaccggacacagtccagctactaactgtcaagaaagacgaaggcgagggcgccgcgggagccggggaccataaggatccatcccttggtgccggtgaggccgctagcaaagagtcagaacccaagcaatctacagagaaaccggaagagaccttaaagagggagcagtcccacgccgagattagcccccccgccgaaagcggtcaggctgtggaagagtgcaaggaagagggcgaggaaaaacaggaaaaggagccatcaaagtcagccgaatcacctaccagccccgtgacgagtgaaacgggatcaaccttcaagaaattttttacccagggttgggctggatggagaaagaaaacatcctttaggaaaccgaaagaggatgaagttgaagcgtccgagaagaagaaggaacaggagccagagaaagtggacacagaagaagacggcaaggctgaggtggcttcggaaaagctcacagcaagtgaacaggcgcatccgcaggagcctgccgagtctgctcacgaacccagactgtctgcagagtatgaaaaagtcgagctcccttcggaagaacaggtgagtggtagtcaaggaccatcggaggagaagccagcccctcttgctaccgaggtcttcgatgaaaaaatcgaagtgcatcaggaagaggtggtcgctgaggttcacgtatccacagttgaggaaaggacagaggagcagaaaaccgaggtagaggaaacagcaggtagcgtcccagctgaggagctggtcgagatggacgccgagccccaagaggccgagccggccaaagaactcgtaaagttaaaggagacgtgtgtatccggtgaagatcccacccagggggcagacctcagtcccgatgaaaaggttctgtctaaaccaccagaaggtgtcgtatcggaggtcgagatgctttcctcccaggaaagaatgaaagtccagggatccccactgaagaagcttttcacttcaaccggcctgaagaagctcagcggtaagaagcaaaaggggaagcggggaggcggcgacgaggagtctggagaacacacacaggtccctgcagattcccccgactcccaggaggagcaaaagggtgagagttctgcgtcttcgcccgaggagccagaggaaataacttgtctggagaagggcctggccgaggttcagcaggacggggaagcagaggagggtgccaccagcgatggtgaaaagaagcgtgagggagtcacgccttgggctagttttaaaaaaatggtcacaccaaagaagagggtgcgccgcccttccgaatcggataaggaggacgagctggataaagtgaaatccgctaccctgtcgtccacagaatctactgcctcggaaatgcaggaggaaatgaaaggcagcgtcgaagaacctaagccagaagagccgaagcgcaaagtcgatacatctgtctcttgggaagctctaatctgcgtaggcagctccaagaagcgagcccgacgcggttcctcctccgacgaggaaggggggcctaaagccatgggcggcgatcaccagaaggcagacgaggcagggaaggataaagaaacgggcactgacggaattttggcagggagtcaggaacacgatccaggccagggtagcagttcacccgaacaagcgggtagccctacagagggtgagggggtgtccacgtgggaatccttcaaacggttagtcactccccggaaaaaaagcaaatctaaattagaagagaaaagcgaagattccattgctggctccggcgtagaacactccacccccgatactgaacctggtaaggaagagagctgggtgtccatcaagaaattcataccaggacggaggaagaagcgtccagatggcaagcaggagcaggccccggtggaggacgccggcccaacaggtgccaacgaggatgactcggacgtgccagccgtggtcccgctgagcgagtatgacgccgttgaaagggagaagatggaggcccagcaagcgcaaaaatctgccgagcagccagagcaaaaggccgcgactgaggtgagcaaagaactgtctgagtcccaggtgcatatgatggctgctgctgtcgctgatgggacaagagcggcgacaattattgaggagcgctccccctcatggatctcagcctccgtgacagagcccctggagcaggtggaagccgaagctgcactgttaacggaggaggtactggagcgcgaagtcatcgcagaggaggagccacccacagtgactgaacctctgcccgagaatcgcgaggcaagaggggatactgttgtgtctgaggctgaactcacccccgaggccgtgaccgcggccgagaccgccggacctcttggcgcagaggagggcacggaggctagcgctgccgaagagaccaccgaaatggtgtcggccgtgtcccagcttaccgattccccagacactacagaggaggcgacaccagtgcaggaggtcgaggggggggtgcccgacatcgaggagcaagagcggcggacacaagaagtcctgcaagccgttgccgaaaaggtgaaagaggagagccagctgccaggcactgggggacccgaggacgttctacagccggtgcagcgcgccgaggctgaacgaccagaagagcaggcggaagcttctggcctgaagaaggaaacagatgtcgtgctgaaagtcgacgctcaagaggctaaaaccgaaccttttacccagggcaaagtggtcggccagactacaccggagtcattcgagaaggccccacaggtgaccgagagcatcgagagctcagaactggtgactacctgtcaggcagagaccctggctggcgtgaagtctcaagagatggtcatggaacaagccattccccctgactcggtcgaaactcctacggacagcgaaaccgacgggagtactcccgtggcggattttgatgcacccggcacaacccagaaagatgagattgtggagatccatgaggaaaacgaggtggcttctggcacacagtccgggggaaccgaggctgaagccgtacctgcgcagaaggagcgacccccggcgccctcctccttcgtgtttcaggaggaaactaaagaacagtccaaaatggaggatactctggagcacacggataaggaagtgtctgttgagactgtgtctatcctaagtaagacagaaggtacacaggaggccgatcagtacgcagacgaaaagactaaggacgttcctttttttgagggactggaaggttctatagatacaggcattaccgtcagccgggagaaggttacagaggtcgctctgaagggtgagggcactgaagaggccgaatgcaaaaaggacgatgccctagaattacagagtcatgctaagtctccgccaagtccagtggagcgggaaatggtcgtccaggtagaacgggagaaaacagaggcagagcctacacacgtgaacgaagagaagttagagcacgaaaccgcagtgaccgtatccgaagaggtctcaaaacagctgctgcagaccgttaatgttcccattattgacggagcgaaagaagtgtcctcactcgaggggtcccctccaccgtgtctgggtcaagaagaggcagtctgcactaagattcaggttcagtcgtcagaagccagtttcaccctgacagctgctgctgaagaagagaaagtactcggagagaccgctaatatacttgaaactggggaaaccctggagccagcaggtgctcatttggtccttgaggaaaaaagtagcgagaagaatgaagacttcgctgcgcacccaggcgaggatgccgtgccaacaggacctgactgccaggcaaaaagcaccccagtcatcgtgagcgcaaccacaaagaaggggctctcttcagatctggagggtgaaaagacaacctcattaaagtggaagagcgacgaagtagatgagcaagtcgcgtgccaagaggtgaaggtgtcagtcgcaatcgaagacctcgagcccgaaaatggcattctggagctagagacaaaaagttctaagctcgtgcaaaacataatacaaacggccgtcgatcagtttgtgagaacggaggaaactgcgacggagatgctgactagtgagttgcagactcaggcgcacgttattaaggcagacagccaggacgccggtcaagaaaccgagaaggaaggggaagagccgcaagcctccgcacaggatgagacacccatcacaagcgccaaggaggaaagcgagtccactgctgtgggccaggcccactcagacatcagtaaggatatgtccgaggccagcgaaaagactatgacagtggaagtcgaaggcagcaccgttaacgaccagcaattggaggaagtcgtcctcccgtctgaggaggagggaggtggcgccggaacgaagtccgtgcccgaagatgatggtcatgctcttttagccgagagaatagagaaatcactagttgagcctaaagaagacgagaagggggacgatgtggacgaccccgaaaatcagaattctgctttggccgatacagatgccagcgggggcctgaccaaggaaagtcccgacacaaatggacccaagcaaaaggagaaggaagatgcacaggaggttgagctacaagagggaaaagtacattctgagagtgacaaagctatcactcctcaagctcaagaggagttacaaaaacaggagagagagtccgccaaatccgaactcacagagtcttag

SEQ ID NO: 280879 - DNA, 5034 bp, Artificial Sequence
  derived and/or modified sequence
atggtgggccagagggacagtgaagatgtgtccaagagggacagcgacaaggagatggccaccaagtctgctgtggtgcatgacatcacagatgatggccaggaggagaccccagagatcatcgagcagatccccagcagcgagagcaacctggaggagctgacccagcccacagagagccaggccaatgacatcggcttcaagaaggtgttcaagtttgtgggcttcaagttcaccgtgaagaaggacaagacagagaagccagacacagtgcagctgctgactgtgaagaaggatgaaggagagggcgctgctggagctggggaccacaaggaccccagcctgggcgctggggaggccgccagcaaggagagcgagcccaagcagagcacagagaagccagaggagaccctgaagcgggagcagagccatgctgagatcagccccccagctgagagcggccaggccgtggaggagtgcaaggaggagggggaggagaagcaggagaaggagcccagcaagtctgctgagagccccaccagccctgtgaccagcgagaccggcagcaccttcaagaagttcttcacccagggctgggccggctggaggaagaagaccagcttcaggaagcccaaggaggatgaggtggaggccagcgagaagaagaaggagcaggagcctgagaaggtggacacagaggaggatggcaaggccgaggtggccagcgagaagctgacagccagcgagcaggcccacccccaggagcctgctgagagcgcccacgagccccggctgtctgcagaatatgagaaggtggagctgcccagcgaggagcaggtgtctggcagccagggccccagcgaggagaagccagcccccctggccacagaggtgtttgatgagaagattgaggtgcaccaggaggaggtggtggccgaggtgcacgtgtccacagtggaggagaggacagaggagcagaagacagaggtggaggagacagctggctctgtgcctgctgaggagctggtggagatggatgctgagccccaggaggccgagcccgccaaggagctggtgaagctgaaggagacctgtgtgtctggagaggaccccacccagggcgctgacctgagcccagatgagaaggtgctgagcaagcccccagagggcgtggtgtctgaggtggagatgctgagcagccaggagaggatgaaggtgcagggcagccccctgaagaagctgttcaccagcacaggcctgaagaagctgagcggcaagaagcagaagggcaagagaggaggaggagatgaggagagcggggagcacacccaggtgcctgctgacagcccagacagccaggaggagcagaagggggagagcagcgccagcagccctgaggagcctgaggagatcacctgcctggagaagggcctggccgaggtgcagcaggatggagaggccgaggagggcgccaccagtgatggagagaagaagcgggagggcgtgaccccctgggccagcttcaagaagatggtgacccccaagaagagggtgagaagacccagcgagagtgacaaggaggatgagctggacaaggtgaagagcgccaccctgagcagcacagagagcacagccagcgagatgcaggaggagatgaagggctctgtggaggagcccaagccagaggagcccaagaggaaggtggacacctctgtgtcctgggaggccctgatctgtgtgggcagcagcaagaagagggcccggcggggcagcagcagtgatgaggagggcggccccaaggccatgggcggggaccaccagaaggcagatgaggccggcaaggacaaggagaccggcacagatggcatcctggccggcagccaggagcatgaccccggccagggcagcagcagccctgagcaggccggcagccccacagaaggagagggcgtgtccacctgggagagcttcaagaggctggtgacccccaggaagaagagcaagagcaagctggaggagaagtctgaggacagcattgctggcagcggcgtggagcacagcaccccagacacagagcccgggaaggaggagagctgggtgtccatcaagaagttcatccctggaagaaggaagaagaggccagatggcaagcaggagcaggcccctgtggaggatgctggccccactggagccaatgaagatgacagtgatgtgcctgctgtggtgcccctgtctgaatatgatgctgtggagcgggagaagatggaggcccagcaggcccagaagtctgctgagcagcctgagcagaaggccgccacagaggtgtccaaggagctgtctgagagccaggtgcacatgatggctgctgctgtggctgatggcaccagggctgccaccatcatcgaggagaggagccccagctggatcagcgcctctgtgacagagcccctggagcaggtggaggccgaggccgccctgctgacagaggaggtgctggagcgggaggtgattgctgaggaggagccccccaccgtgacagagcccctgcctgaaaatcgggaggcccggggggacacagtggtgtctgaggccgagctgaccccagaggccgtgacagctgctgagacagctggccccctgggcgctgaggagggcacagaggccagcgctgctgaggagaccacagagatggtgtctgctgtgtcccagctgacagacagcccagacaccacagaggaggccacccctgtgcaggaggtggagggcggcgtgcctgacatcgaggagcaggagaggaggacccaggaggtgctgcaggccgtggccgagaaggtgaaggaggagagccagctgcccggcaccggcggcccagaagatgtgctgcagcctgtgcagagagctgaggccgagaggcctgaggagcaggccgaggccagcggcctgaagaaggagacagatgtggtgctgaaggtggatgcccaggaggccaagacagagcccttcacccagggcaaggtggtgggccagaccaccccagagagctttgagaaggccccccaggtgacagagagcattgagagcagcgagctggtgaccacctgccaggccgagaccctggccggcgtgaagagccaggagatggtgatggagcaggccatccccccagattctgtggagacccccacagacagcgagacagatggcagcacccctgtggccgactttgatgcccctggcaccacccagaaggatgagatcgtggagatccacgaggagaatgaggtggccagcggcacccagagcggcggcacagaggccgaggccgtgcctgcccagaaggagcggcccccagcccccagcagctttgtgttccaggaggagaccaaggagcagagcaagatggaggacaccctggagcacacagacaaggaggtgtctgtggagaccgtgtccatcctgagcaagacagagggcacccaggaggccgaccagtatgcagatgagaagaccaaggatgtgcccttctttgagggcctggagggcagcattgacaccggcatcaccgtgtcccgggagaaggtgacagaggtggccctgaagggggagggcacagaggaggccgagtgcaagaaggatgatgccctggagctgcagagccacgccaagagcccccccagccctgtggagcgggagatggtggtgcaggtggagcgggagaagacagaagctgagcccacccacgtgaatgaggagaagctggagcatgaaacagctgtgacagtgtctgaggaggtgtccaagcagctgctgcagacagtgaatgtgcccatcattgatggagccaaggaggtgagcagcctggagggcagccccccaccctgcctgggccaggaggaggccgtgtgcaccaagatccaggtgcagagcagcgaggccagcttcaccctgacagctgctgctgaggaggagaaggtgctgggggagacagccaacatcctggagactggagagaccctggagcctgctggggcccacctggtgctggaggagaagagcagcgagaagaatgaagattttgctgcccaccctggagaagatgctgtgcccaccggccctgactgccaggccaagagcacccctgtgattgtgtctgccaccaccaagaagggcctgagcagtgacctggagggggagaagaccaccagcctgaagtggaagagtgatgaggtggatgagcaggtggcctgccaggaggtgaaggtgtctgtggccatcgaggacctggagccagaaaatggcatcctggagctggagaccaagagcagcaagctggtgcagaacatcatccagacagctgtggaccagtttgtgaggacagaggagacagccacagagatgctgaccagcgagctgcagacccaggcccacgtgatcaaggctgacagccaggatgctggccaggagacagagaaggagggggaggagccccaggccagcgcccaggatgagacccccatcaccagcgccaaggaggagagcgagagcacagctgtgggccaggcccacagcgacatcagcaaggacatgtctgaggccagcgagaagaccatgacagtggaggtggagggcagcacagtgaatgaccagcagctggaggaggtggtgctgcccagcgaggaggagggcggcggggccggcaccaagtctgtgcctgaagatgatggccacgccctgctggccgagagaattgagaagagcctggtggagcccaaggaggatgagaagggagatgatgtggatgatcctgagaaccagaacagcgccctggccgacacagatgccagcggcggcctgaccaaggagagcccagacaccaacggccccaagcagaaggagaaggaggatgcccaggaggtggagctgcaggagggcaaggtgcacagcgagagtgacaaggccatcaccccccaggcccaggaggagctgcagaagcaggagcgggagagcgccaagtctgagctgacagagagctag

SEQ ID NO: 280880 - DNA, 5034 bp, Artificial Sequence
  derived and/or modified sequence
atggtgggccagcgggacagcgaggacgtgagcaagcgggacagcgacaaggagatggccaccaagtccgccgtggtacatgacattactgacgatggccaggaagagacgcccgagatcattgaacagatccccagcagtgaatcgaatctagaggaacttacccagccaaccgagagccaggctaacgacattggattcaaaaaagtctttaagtttgtgggctttaagtttaccgttaaaaaggataagaccgaaaaacctgacaccgtccagctacttacagtgaagaaggacgaaggggagggagctgccggcgctggagatcacaaggacccctctctaggcgcaggcgaagctgcctcaaaagaatcagaaccgaaacagtccaccgagaagcctgaggaaaccctgaagcgggaacagtcccacgccgaaattagcccaccagcagagtctggacaggcggttgaagaatgtaaggaagagggtgaagaaaaacaggaaaaggaaccaagcaaatctgccgagtcccccacgtcccccgtgacatctgagactggaagcaccttcaaaaaattcttcacccagggttgggccgggtggcggaaaaaaacatcattccggaaacctaaggaggatgaggtagaagccagcgaaaaaaaaaaggaacaagagcccgagaaagtggataccgaagaagacggcaaagccgaggtcgcaagcgaaaaactgactgcgagtgaacaggcacatcctcaggagcctgccgagagtgcccacgagcctagacttagtgcagagtatgagaaagtggagctgccgagcgaagagcaggtttctgggtcccagggaccctccgaggaaaagcccgcccctctggccaccgaagtattcgatgagaaaattgaagtacatcaggaagaggtagtggcagaagttcatgtatcaaccgttgaggagcgtacggaggagcaaaaaactgaggttgaggagaccgctggcagtgtgcccgccgaggaactggtggaaatggatgcagaaccacaggaggccgagccagccaaagaactggtgaagcttaaagagacatgtgtgagtggcgaagatcccacgcagggcgcggatctcagcccggatgagaaggtgctaagcaagcctcctgagggggtggtttcagaggttgagatgctatcttcccaggagaggatgaaggtgcagggatctcccctgaaaaaattgtttacctcaaccggtctgaagaagctatccgggaaaaagcaaaagggtaagcggggaggaggcgatgaggagagcggggaacacacacaggttcccgccgacagccccgatagccaggaggaacaaaagggcgagagtagcgccagctcacctgaagaacctgaagagattacatgtctcgagaaaggcctggccgaggtgcagcaggacggcgaggcagaagagggagccacgagcgatggagagaagaagagggagggcgttacaccttgggcttcctttaagaaaatggtgacccctaaaaaacgggtgcggaggcccagtgaatccgataaggaggacgagctggacaaagtgaaatcagctaccctatcttctacggagtcaactgccagcgagatgcaggaagaaatgaagggttccgtcgaggagcccaaacctgaagagccaaagcggaaggtcgacacaagtgtcagttgggaggcactgatctgcgttggatccagcaagaaacgcgccaggcgaggctcttccagcgacgaagaggggggccccaaagctatggggggcgaccaccagaaagcagatgaggcggggaaggacaaggaaacaggaactgacggcatacttgccgggtcccaggagcatgacccgggacagggatcttcctccccagaacaggcaggatccccgactgagggtgaaggagtctccacttgggagtccttcaagaggctggtgactcccaggaagaaaagcaaatcaaaactggaggagaaatccgaagacagtattgctggctcaggggtcgagcactctacacccgatactgagcctggcaaagaggaatcctgggtgagtatcaaaaagttcatcccgggccgacggaaaaaacggcccgatgggaaacaggagcaggctccagttgaagatgccgggccaaccggagctaacgaagacgacagtgatgtgcccgcagtggtgcccctgtctgaatatgacgccgttgagcgggagaaaatggaagcacagcaggctcagaagagtgcagaacaaccggaacaaaaagcagccactgaagtgagtaaggagcttagtgagagccaagttcacatgatggcggccgcagtggccgacggcaccagggccgcgaccatcattgaggagcgcagccccagctggatctcagcctccgtcaccgaacctttggaacaggtcgaggccgaggccgctctgcttacggaagaggttcttgagagggaggtcatcgccgaggaagagcccccgacagtcacagagccacttcccgaaaatcgcgaggctcgaggagataccgtggtgagtgaggccgagttgacccccgaggcggtgaccgctgcagaaacagcagggcccttgggcgctgaggaagggacagaagcgtctgccgctgaggagaccactgagatggtgtctgccgtgagtcaactgaccgactcccctgataccacggaagaagcgaccccagtccaagaggtggaaggaggcgtacctgatatcgaagaacaggaacggcgaacacaggaagtgctccaggccgtggcagaaaaagtgaaggaagagtcccagctccctgggactggtggacctgaagacgtccttcagcctgtacaacgagctgaggctgagcgccccgaggagcaggctgaggctagtgggcttaagaaggaaaccgacgtggtcctgaaggtggacgcccaggaggctaagacagagccatttacacaggggaaagtcgtaggtcagaccactcccgagtccttcgagaaagctcctcaagtgactgagtcaattgaaagctccgagctggtgactacttgtcaagctgagaccctggccggggtcaagagccaagagatggtgatggaacaggcaattccgcccgacagcgtggaaactcccaccgattctgaaaccgacgggagcactcccgtagccgatttcgatgcccctgggacaactcagaaagatgaaatcgtggagatccacgaggaaaatgaggtggcctcaggcacacagagcggaggcaccgaggctgaggcagttcctgcccaaaaagagcgcccacctgcccccagtagtttcgtgtttcaggaagagaccaaggagcaatcgaagatggaagatactctggagcataccgataaggaggtctctgtggagacggtaagcatcctctctaagaccgagggaacacaagaagcagatcagtatgctgatgagaagaccaaggatgtccccttcttcgaggggttggaggggagcatcgatacagggattactgtgtctagggagaaagtaaccgaggtagcgcttaagggcgagggaacagaagaagccgagtgtaagaaagatgatgccttggaattgcagagccacgcgaagtctccaccttcccccgttgaacgggaaatggtggtgcaggttgagagagaaaaaacagaagccgagcccacgcatgttaatgaggagaagctggaacatgagaccgccgtaacagtgtccgaggaggtctccaagcaactgctccagacggtcaacgtgcccatcatcgacggcgcaaaagaagtttcatcccttgagggaagcccacccccttgcttgggacaggaggaggctgtctgcacaaagatccaggtgcagagttccgaggcttcatttactcttactgccgccgcggaagaagaaaaagttctgggggaaactgcaaatatcctggagacaggtgaaaccttggagcctgccggcgctcatctggtgctggaggagaagagttcagaaaaaaacgaagactttgccgctcaccccggagaggacgccgtccctactgggcccgactgccaggctaaatccacacctgtgatagtgagtgctacaacaaagaagggcctttcctctgacctcgaaggagaaaagacaacctctttgaagtggaagagtgatgaagtggacgagcaagtggcatgccaggaggtaaaggtcagcgtggccatcgaggacctcgaacctgagaacggcattcttgagctggaaacaaaaagctctaagttagtgcagaatatcatccagactgcggttgaccagtttgtaaggacggaggaaaccgccacagaaatgttgacgtctgaactgcaaacgcaagcccacgtgatcaaggccgattctcaggacgctggtcaggaaaccgaaaaggagggggaggagccgcaagcttcagctcaggatgaaacgccaatcacgtctgccaaagaagaatccgagagcaccgctgtcggacaggcccacagcgatatcagcaaggatatgtccgaggcaagtgaaaagacaatgactgtcgaggtggagggttctacagtgaacgaccagcaactggaggaggtggtcctaccctctgaggaggaaggcggtggagcaggtacgaagagcgtacccgaggacgatgggcacgctctgctagccgaacggatcgaaaagtcactggttgagcccaaagaagatgaaaaaggtgacgacgtggatgaccctgagaaccagaattccgcactcgcggatacagacgcctctggaggcctcacgaaagaaagccccgacactaatgggcctaagcagaaagagaaggaggatgcccaggaagtggaattgcaggagggaaaagtccactcagagtcagataaggcaattacaccgcaagctcaggaggaactccagaagcaagagagagaaagcgctaagtctgagctcaccgaaagctag

SEQ ID NO: 280881 - DNA, 5033 bp, Artificial Sequence
  derived and/or modified sequence
atggtcggacaaagggactcagaagacgtctctaaaagagacagcgacaaggaaatggcgactaagtcggcagtggtgcacgatattactgatgatggtcaggaggaaacacccgagatcattgagcagatcccatcctcagagagcaacttggaagaactcactcagcctacggaatctcaggccaatgatataggattcaagaaggtcttcaagttcgtgggcttcaagtttactgtgaagaaagacaaaactgaaaagccagacaccgtccagttgctcactgtcaagaaggacgaaggagagggagccgctggggcaggtgaccacaaggacccaagcttgggcgctggggaggccgctagtaaagaatccgaacctaagcagtcgacagagaaacctgaggaaacattaaagagagagcagagccatgcagagatctctccaccggcagaatccggtcaggcagtggaagagtgtaaggaagaaggggaggagaagcaggaaaaagaaccttccaagagcgcagagagtcctacgtcccccgttacctctgagacaggttccacttttaagaaattctttacccaggggtgggccggatggcggaagaaaacctcattcaggaagccaaaggaggacgaggttgaagcgtccgaaaagaaaaaagaacaggagcctgaaaaggtcgataccgaggaggacggaaaggctgaggtagcctctgaaaaactcactgccagtgagcaggcgcacccgcaggaaccagctgagtctgcccatgagcctagactgtctgccgagtatgagaaggttgaactcccttctgaggagcaagtcagcggcagccagggcccatccgaggagaagccagcacctctggcaaccgaagtgtttgatgagaaaatcgaggtccaccaggaggaggtcgtggccgaggtacacgttagcaccgtggaagaaagaactgaggagcagaaaacagaggtggaggagaccgcgggatcggtacccgctgaggagctggtggagatggatgctgaacctcaggaggccgagcctgccaaagagctggtcaaacttaaggagacttgcgtgtccggtgaggaccccacgcagggggctgacctgagtcccgacgagaaagtcctgtctaagcctcccgaaggggtagtctctgaagtggaaatgctctcctctcaagagcgaatgaaggtccagggcagcccgcttaaaaaactcttcacatctacgggcctcaagaagttgagcgggaaaaagcagaaaggcaagagggggggaggcgatgaagagagcggggaacacacccaggtgcctgctgacagtccagattcccaggaggagcagaagggcgaaagtagcgcttcatcacccgaggaaccagaagagattacctgccttgagaaagggctggctgaggtgcagcaggatggggaagccgaagagggagccacttcagacggtgaaaagaaacgggagggagtcacaccctgggcttcttttaaaaagatggttactccaaaaaaacgggtgagacgtccaagcgagagcgacaaagaggacgagctggacaaggtaaagagcgccaccctctcctcaactgagtccaccgcatctgagatgcaagaggaaatgaagggaagcgttgaggaacccaagcctgaggaacctaagcgcaaggtggatacttctgtgtcttgggaggcattgatttgcgtcggtagtagtaaaaaacgcgcaaggcgcggatcaagctctgacgaggaggggggacccaaggccatgggcggagaccatcagaaagcagatgaggccggtaaagataaggagaccggcacggacggcatccttgccggaagtcaggaacacgaccccggtcagggttcctccagccccgagcaagccggtagccctaccgagggtgagggcgtttctacttgggagtcatttaagagactggtcacccctagaaagaagagcaaatccaaactcgaagaaaagtccgaagactccattgcaggctcaggcgttgagcacagtactcccgatacagagcccggaaaagaagaatcatgggtctcaattaagaaatttatccctggtaggcggaagaaacgccctgatggtaaacaagagcaagcaccagtggaagacgctgggccaaccggagcaaacgaagacgattcggacgtgccggctgtggtgcccctgagtgagtacgacgctgtggaacgtgaaaaaatggaggctcagcaggcccaaaagtccgccgagcagccagaacaaaaggctgcaacagaggtgagcaaggagctgagcgagagccaagtccatatgatggctgccgcagtggccgacggaacccgggcagccacgatcatcgaggagcggagtccatcctggatttccgcgtctgtgaccgaaccgttggagcaggtggaggcagaggccgctctgctgacggaggaagttttggagcgggaagtaattgcagaagaggagcctcccactgtgactgagcctctgcctgagaaccgggaagcccgtggcgacacagtcgtgagcgaggccgaacttacacctgaggccgtcacagctgccgagaccgctgggccactgggggctgaggaagggactgaggcttctgccgcagaggagaccaccgagatggtgtccgctgtgtctcagttgacagacagcccagacaccactgaagaagctactccagttcaggaagtggagggaggcgtgcctgacattgaggagcaggaaaggcgtacacaggaggtgttgcaggccgtggccgagaaggtgaaagaagaaagccagctgcccggtactggcggaccagaggacgtgctgcagccggtacagagagccgaagcagagcgcccagaggaacaggccgaggcgtccggcctgaagaaagaaacagatgtggttctgaaggttgatgcacaggaggccaaaacagagcccttcacacaaggaaaggtcgtcggacaaaccacaccagagagttttgagaaggccccacaggtgactgaatcgatcgagtcctccgaacttgttaccacctgtcaggctgaaacattagccggagtaaagtcgcaagaaatggtgatggaacaagcaattcctccagattcagtggaaacacctacagattctgagaccgatggctctacccccgttgctgacttcgacgcgccaggaactactcagaaggacgaaattgtggaaattcacgaagagaacgaagtggcctccggaacccagtcagggggaacagaagccgaggctgtgcctgcccagaaggagcgcccacccgcacccagtagttttgtcttccaggaggaaaccaaggagcagtcaaagatggaggatacattggagcatacagacaaagaggtcagtgtcgagactgttagtatcttgtccaaaacagaaggaacccaagaagcagatcaatacgctgacgagaaaaccaaggatgtacctttctttgaggggctggaaggaagcattgacaccgggatcactgtttctagagagaaggtgacggaggtagccctcaaaggcgaaggcacagaagaggccgagtgtaagaaggacgatgccctcgaattacaaagccacgccaaatcacccccatcacccgtggagagagagatggtggtacaggttgagcgggagaagaccgaggcagaacctacccacgtgaatgaagaaaagctagagcacgagaccgccgtgacagtgagcgaggaggtgagtaaacagcttcttcaaactgtgaacgtgcccataattgacggcgctaaggaagtatcctctttagagggcagccccccaccgtgtctggggcaagaggaggctgtatgcactaaaatccaggtgcaaagctctgaggcgagctttactctgactgctgcggctgaggaagaaaaagttctcggggagactgccaatattctcgaaaccggagagactctggagcccgctggggcacacctcgtgctggaagaaaaaagcagtgaaaaaaatgaagattttgccgctcatcctggagaggacgcagttccgacaggtccagactgccaggctaagtccactccagtgattgtatccgctacaacaaagaaaggcctttcatcagatctcgagggagagaagacaaccagcttgaagtggaaatcggatgaggttgatgagcaggtggcttgccaggaggttaaggttagtgttgctatcgaggaccttgaacctgagaacgggatccttgaactcgaaaccaagtcctctaagcttgttcagaacatcatccaaactgctgtggaccagtttgtgcgaactgaggaaaccgcaactgagatgctgacatccgagttacagacgcaggcccacgtgataaaagcggactcacaagacgccggacaagagacagagaaggagggggaggagccccaggccagcgcacaagacgagacgcccatcaccagcgccaaagaagaaagtgaatccactgccgtgggacaagcgcatagcgacattagcaaggacatgagcgaggcatccgaaaagactatgaccgtcgaggtcgagggcagcactgtgaatgatcagcagcttgaggaggtggtgctgccctccgaggaagagggcggaggcgctggcacaaagtccgtgcctgaggatgatggccacgccctattggcagagagaatcgagaaatccctcgtggagccaaaggaggacgagaaaggtgatgatgtggacgatccagagaatcagaactctgccctggcagacaccgatgcctcaggcggactgaccaaagagagccccgacaccaacggtccaaaacaaaaagagaaagaagatgcccaagaggtggaattgcaggagggcaaggtgcacagcgagtctgataaagctattacaccccaagcacaggaagaactgcagaagcaggaaagagaatccgctaaatccgagctgacagagagcta

SEQ ID NO: 280882 - DNA, 417 bp, Artificial Sequence
  derived and/or modified sequence
atgaaggaatactctgggtttgctggcgtgagccggcctcggggtactttctttaggattcggggtaggggccgggccagaggcgtctttgctggaaccaatactgggcccaacaacagtaatactaccttccaaaagcgacccaaagaagaggagtgggaccctgagtatactcccaagagcaaaaaatacttcttgcatgatgatcgcgatgacggggtcgattactgggccaagaggggcagaggaagagggacatttcagcggggccgaggccgatttaattttaaaaaatccggcagtagcccgaaatggacacacgacaaataccagggcgacggcattgtcgaagatgaagaggagactatggaaaataatgaggagaagaaggacaggcggaaagaggaaaaagagtag

SEQ ID NO: 280883 - DNA, 417 bp, Artificial Sequence
  derived and/or modified sequence
atgaaggagtacagcggctttgctggggtgtcccggccccggggcaccttcttccgcatccggggccggggccgggcccggggcgtgtttgctggcaccaacacaggccccaacaacagcaacaccaccttccagaagaggcccaaggaggaggagtgggaccctgagtacacccccaagagcaagaagtacttcctgcatgatgacagagatgatggagtggactactgggccaagaggggccggggccggggcaccttccagaggggccggggccgcttcaacttcaagaagagcggcagcagccccaagtggacccatgacaagtaccagggagatggcatcgtggaggatgaggaggagaccatggagaacaatgaggagaagaaggacaggaggaaggaggagaaggagtag

SEQ ID NO: 280884 - DNA, 417 bp, Artificial Sequence
  derived and/or modified sequence
atgaaggagtacagcggcttcgccggcgtgagccggccccggggcacgttctttcgcattcggggaagaggtcgagcacgaggggtcttcgccggcaccaataccggccctaacaactctaataccactttccagaagaggcctaaagaagaggagtgggatccagaatatacgccaaagtccaagaagtattttcttcatgatgatagagacgatggtgtggattattgggcaaagaggggaagaggcagggggaccttccagcgtgggcggggccgatttaactttaagaagtccggtagctcccctaaatggacccacgacaagtatcagggcgacggcatcgtagaagacgaagaagagacaatggaaaacaatgaggagaagaaggaccgtcgcaaggaggagaaggaatag

SEQ ID NO: 280885 - DNA, 417 bp, Artificial Sequence
  derived and/or modified sequence
atgaaggagtatagcggattcgcaggagtgtccaggccgcgtggcacttttttccggattcggggtcgaggcagggcacgtggggtgttcgctggaacaaataccggaccaaataactctaacacaactttccagaagagaccgaaagaagaagagtgggacccagaatacacccccaagtctaagaagtactttctgcacgacgatcgggatgatggtgtggactattgggcgaaacgagggaggggacgcggaacgttccaaaggggcaggggccgtttcaattttaaaaagagcggctccagccccaaatggacgcacgataaataccaaggggacggaatagtcgaggatgaggaagagaccatggaaaataatgaagaaaaaaaagataggaggaaagaggaaaaggagtag

SEQ ID NO: 280886 - DNA, 417 bp, Artificial Sequence
  derived and/or modified sequence
atgaaggaatactcaggttttgccggggtcagtaggcccagaggaacattctttcggatcagagggcgggggcgagctcgaggtgtgttcgcgggcactaatacaggtcctaacaatagtaataccacttttcaaaaacggccaaaggaagaagagtgggatccagaatatactcccaaatctaaaaagtacttcctccacgacgatcgagacgacggtgtagattattgggctaaaagaggtagaggcagagggacattccagcgaggaaggggtagatttaatttcaagaagagcggatcatcaccaaaatggactcacgataaataccagggggatggcatcgtggaggatgaagaagagacaatggagaataacgaggagaagaaagaccggcgtaaagaagagaaggaatag

SEQ ID NO: 280887 - DNA, 417 bp, Artificial Sequence
  derived and/or modified sequence
atgaaggaatactcaggttttgccggggtcagtaggcccagaggaacattctttcggatcagagggcgggggcgagctcgaggtgtgttcgcgggcactaatacaggtcctaacaatagtaataccacttttcaaaaacggccaaaggaagaagagtgggatccagaatatactcccaaatctaaaaagtacttcctccacgacgatcgagacgacggtgtagattattgggctaaaagaggtagaggcagagggacattccagcgaggaaggggtagatttaatttcaagaagagcggaagtagcccgaagtggacgcacgacaaatatcaaggcgatggtatagttgaggatgaagaagagaccatggaaaacaacgaagaaaagaaagaccgcagaaaagaggaaaaggaatag

SEQ ID NO: 280888 - DNA, 1244 bp, Artificial Sequence
  derived and/or modified sequence
atgtgtcctattatccaggctacatcaggaggttggacttcaatgcagtgcatttctagaaacagtttgttaaacataaaagagagcaagatcattctcgatcttcatcctcttcagcatcaccttcttctcccagttctcgagaagaaaaggagagtaagaaggaaagagaagaagaatttaaaactcaccatgaaatgaaagaatactcaggctttgcaggagttagccgaccacgaggaaccttttttcgaattagaggcagaggaagagccagaggagtttttgctgggacaaatactggtccaaacaactcaaatactacttttcaaaagagaccgaaggaagaggaatgggatccagaatataccccaaagagcaagaagtacttcttgcatgacgacagagatgatggtgtggattattgggccaaaagaggaagaggtcgtggtacttttcaacgtggcagagggcgctttaacttcaaaaaatcaggtagcagtcctaaatggactcatgacaaataccaaggggatgggattgttgaagatgaagaagagaccatggaaaataatgaagaaaagaaggacagacgcaaggaagaaaaggaataataaatatgaagtaagattacaacagagcagaacttgcacccaccattttttttacctgatttttgttttcaaataagaatgtaagcattttacttaaattttactgtttgcaagtagtctatagaaattttgttttaagtcttcaaatatcttgagaaatagtagactgtatgttgaaaattgtactgaaataaagtagaaaattgttacgtaccatatttgtaactatcaacttttaaaacttttaacgtttttgttacatgcattgtaattctgctttgtctataagatatggtcaagtacagctctgtgaaagttctgattctcttccttccctgtttgtcaatgttttattctgaagtaaacgttagctctacatataaatcctggaacagaaattgtttatagagactacactaattattttaactgtatacatctgtttaatttgaacacactacatcgtagggtgactgatttttgaagtataccacagacaaaaagttgttactatggtaaactaagctagtttaacacttgagcaaatgcttaagaaggaattaaaaaaaaaaagctttgccaatagctaaaaagtacaagctattaaaaatcagattgaaaagttttgag

SEQ ID NO: 280889 - DNA, 417 bp, Artificial Sequence
  derived and/or modified sequence
atgaaggagtacagcggcttcgccggcgtgagcagacccagaggcaccttcttcagaatcagaggcagaggcagagccagaggcgtgttcgccggcaccaacaccggccccaacaacagcaacaccaccttccagaagagacccaaggaggaggagtgggaccccgagtacacccccaagagcaagaagtacttcctgcacgacgacagagacgacggcgtggactactgggccaagagaggcagaggcagaggcaccttccagagaggcagaggcagattcaacttcaagaagagcggcagcagccccaagtggacccacgacaagtaccagggcgacggcatcgtggaggacgaggaggagaccatggagaacaacgaggagaagaaggacagaagaaaggaggagaaggagtag

SEQ ID NO: 280890 - protein, 663 aa, Artificial Sequence
  derived and/or modified sequence
MPLIFLYVVDTCMEDEDLQALKESMQMSLSLLPPTALVGLITFGRMVQVHELGCEGISKSYVFRGTKDLSAKQLQEMLGLSKVPLTQATRGPQVQQPPPSNRFLQPVQKIDMNLTDLLGELQRDPWPVPQGKRPLRSSGVALSIAVGLLECTFPNTGARIMMFIGGPATQGPGMVVGDELKTPIRSWHDIDKDNAKYVKKGTKHFEALANRAATTGHVIDIYACALDQTGLLEMKCCPNLTGGYMVMGDSFNTSLFKQTFQRVFTKDMHGQFKMGFGGTLEIKTSREIKISGAIGPCVSLNSKGPCVSENEIGTGGTCQWKICGLSPTTTLAIYFEVVNQHNAPIPQGGRGAIQFVTQYQHSSGQRRIRVTTIARNWADAQTQIQNIAASFDQEAAAILMARLAIYRAETEEGPDVLRWLDRQLIRLCQKFGEYHKDDPSSFRFSETFSLYPQRRDFPKTSGEILENQEKARSACLKFMFHLRRSSFLQVFNNSPDESSYYRHHFMRQDLTQSLIMIQPILYAYSFSGPPEPVLLDSSSILADRILLMDTFFQILIYHGETIAQWRKSGYQDMPEYENFRHLLQAPVDDAQEILHSRFPMPRYIDTEHGGSQARFLLSKVNPSQTHNNMYAWGQESGAPILTDDVSLQVFMDHLKKLAVSSAA

SEQ ID NO: 280891 - protein, 169 aa, Artificial Sequence
  derived and/or modified sequence
MTTYLEFIQQNEERDGVRFSWNVWPSSRLEATRMVVPVAALFTPLKERPDLPPIQYEPVLCSRTTCRAVLNPLCQVDYRAKLWACNFCYQRNQFPPSYAGISELNQPAELLPQFSSIEYVVLRGPQMPLIFLYVVDTCMEDEDLQALKESMQMSLSLLPPTALVGLITF

SEQ ID NO: 280892 - protein, 140 aa, Artificial Sequence
  derived and/or modified sequence
MTTYLEFIQQNEERDGVRFSWNVWPSSRLEATRMVVPVAALFTPLKERPDLPPIQYEPVLCSRTTCRAVLNPLCQVDYRAKLWACNFCYQRNQFPPSYAGISELNQPAELLPQFSSIEYVVLRGPQMPLIFLYVVDTCME

SEQ ID NO: 280893 - protein, 40 aa, Artificial Sequence
  derived and/or modified sequence
MTTYLEFIQQNEERDGVRFSWNVWPSSRLEATRMVVPVAA

SEQ ID NO: 280894 - DNA, 1992 bp, Artificial Sequence
  derived and/or modified sequence
atgcccctcatattcctgtatgttgtagacacttgtatggaagacgaagaccttcaggctctaaaggagagcatgcagatgtctctcagtctgctgcctccaaccgccctggttggactgatcacctttggccggatggttcaggtgcacgaactagggtgtgaggggatatccaagtcctatgtgttcaggggaaccaaggacctgagtgccaagcagctgcaagagatgctggggctgtccaaggtgcctcttacgcaggcaacgcgagggcctcaggtccagcaacccccaccatcgaatcgctttctccaacctgtgcagaagatcgatatgaatttaaccgatcttctgggcgaactccagcgcgatccatggcctgttcctcagggcaaaagaccactgaggtcaagcggagttgccctgtctattgctgtggggcttctcgagtgcacattccctaacacaggagcccgaatcatgatgtttatcggcggacccgccactcagggtcccggtatggttgttggggacgaactgaagaccccaattcgttcctggcatgatatcgataaggataacgcgaagtacgtgaaaaagggaactaaacattttgaggctctcgcaaaccgcgcagccaccactggccacgtgatcgatatctacgcatgtgctctcgatcagaccggtctgcttgaaatgaagtgctgtcctaacctgacagggggatatatggtcatgggcgacagttttaatacatctttgtttaaacagactttccagagggtattcacaaaagacatgcacgggcagttcaagatgggctttgggggcacactggaaattaagacctctagagagatcaagatctccggggcaataggcccttgcgtgtcccttaactctaagggcccttgcgtgtcagaaaatgaaattggcacaggcgggacctgccaatggaaaatctgtgggctgtcccccacaactacactggcaatttatttcgaggttgttaaccagcataatgcaccaataccccagggcggaaggggcgctatccagtttgtcacacagtaccagcacagcagcgggcagcgtcggatacgggttaccaccatagcgcgcaattgggccgatgcgcaaacacagatccagaatatcgcagcaagcttcgaccaggaggccgcagccatcttaatggctcgtctcgctatctaccgcgccgaaaccgaagaggggccagacgttttaagatggcttgacagacaactcattcgcctgtgccaaaagttcggcgagtaccataaggatgatcctagcagcttccggttctctgagacatttagtctctaccctcagcgtcgggatttccccaagactagcggcgagatcctcgaaaatcaggagaaggcccggagtgcatgtctgaaattcatgttccacttaaggcggagtagttttctccaagtttttaataacagtcctgacgagagctcttactacaggcaccacttcatgaggcaggatcttacacagagccttatcatgatacagccaatactgtatgcatacagctttagcggcccccccgagcccgttctgctcgatagcagcagtattctcgcagacaggattctgctgatggacacgtttttccagatcctgatctaccacggcgaaacgattgcgcagtggcgaaaatcaggataccaagacatgccagaatatgaaaattttcgacaccttctgcaggcaccagtggacgatgcacaggagatattgcatagtcggttcccaatgcccaggtacatcgacactgagcacggtggctctcaggcacgcttccttttgtcaaaggtgaacccatcacagacccacaataacatgtacgcctggggacaggagagcggagcccccattctgacagacgacgtgtctttgcaggtgttcatggaccaccttaagaagcttgccgtgagctcagccgcctag

SEQ ID NO: 280895 - DNA, 123 bp, Artificial Sequence
  derived and/or modified sequence
atgacaacttatctcgagtttattcaacagaacgaggaacgcgacggcgttaggttcagctggaacgtatggccttcgtctcgtctcgaggctacacgtatggtcgtgcctgtagcagcatag

SEQ ID NO: 280896 - DNA, 1992 bp, Artificial Sequence
  derived and/or modified sequence
atgcccctcatcttcctgtatgtggtggacacctgcatggaggatgaggacctgcaggccctgaaggagagcatgcagatgagcctgagcctgctgcccccaacagccctggtgggcctcatcacctttggaaggatggtgcaggtgcatgagctgggctgtgagggcatcagcaagagctatgtgttccggggcaccaaggacctgagcgccaagcagctgcaggagatgctgggcctgagcaaggtgcccctgacccaggccacccggggcccccaggtgcagcagcccccacccagcaaccgcttcctgcagcctgtgcagaagattgacatgaacctgacagacctgctgggggagctgcagagggacccctggcctgtgccccagggcaagaggcccctgcggagcagcggcgtggccctgagcattgctgtgggcctgctggagtgcaccttccccaacacaggagcccgcatcatgatgttcatcggcggccctgccacccagggccctggcatggtggtgggagatgagctgaagacccccatccgctcctggcatgacatcgacaaggacaatgccaagtatgtgaagaagggcaccaagcactttgaggccctggccaacagagctgccaccactggacatgtgattgacatctatgcctgtgccctggaccagacaggcctgctggagatgaagtgctgccccaacctgactggaggctacatggtgatgggagacagcttcaacaccagcctcttcaagcagaccttccagagggtcttcaccaaggacatgcacggccagttcaagatgggctttggaggcaccctggagatcaagaccagccgggagatcaagatcagcggggccatcggcccctgtgtgtccctgaacagcaagggcccctgtgtgtctgaaaatgagatcggcaccggcggcacctgccagtggaagatctgtggcctgagccccaccaccaccctggccatctactttgaggtggtgaaccagcacaatgcccccatcccccagggcggccgcggggccatccagtttgtgacccagtaccagcacagcagcggccagaggcgcatccgggtgaccaccatcgccaggaactgggcagatgcccagacccagatccagaacattgctgccagctttgaccaggaggccgccgccatcctgatggcccggctggccatctacagagctgagacagaggagggcccagatgtgctgcgctggctggaccggcagctgatccggctgtgccagaagtttggagagtaccacaaggatgaccccagcagcttccgcttcagcgagaccttcagcctgtacccccagaggcgggacttccccaagaccagcggggagatcctggagaaccaggagaaggcccggagcgcctgcctgaagttcatgttccacctgcggcgcagcagcttcctgcaggtgttcaacaacagcccagatgagagcagctactaccgccaccacttcatgaggcaggacctgacccagagcctcatcatgatccagcccatcctgtatgcctacagcttcagcggccccccagagcctgtgctgctggacagcagcagcatcctggccgaccgcatcctgctgatggacaccttcttccagatcctgatctaccacggggagaccatcgcccagtggaggaagagcggctaccaggacatgccagaatatgagaacttccgccacctgctgcaggcccctgtggatgatgcccaggagatcctgcacagccgcttccccatgccccgctacatcgacacagagcacggcggcagccaggcccgcttcctgctgagcaaggtgaaccccagccagacccacaacaacatgtatgcctggggccaggagagcggggcccccatcctgacagatgatgtgtccctgcaggtgttcatggaccacctgaagaagctggccgtgtcctctgctgcctag

SEQ ID NO: 280897 - DNA, 123 bp, Artificial Sequence
  derived and/or modified sequence
atgaccacctacctggagttcatccagcagaatgaggagagagatggagtgcgcttctcctggaatgtgtggcccagcagccggctggaggccaccaggatggtggtgcctgtggccgcctag

SEQ ID NO: 280898 - DNA, 1992 bp, Artificial Sequence
  derived and/or modified sequence
atgcccctgatcttcctgtacgtggtggacacctgcatggaggacgaggacctgcaggctttaaaggaaagtatgcagatgtccctgagtctattgccaccgaccgctctcgtgggcttaatcaccttcgggaggatggttcaggtgcatgagttggggtgcgaggggatctcgaaaagctatgtgttcagaggcaccaaagatctgagtgctaagcagctccaggagatgttgggcctctccaaagttccattgacccaggccacgagggggccacaggtgcagcaaccgccaccaagcaatcgcttcctacagccggttcaaaagatcgacatgaatctgaccgacctgctgggggagctgcagagggacccctggccggtcccacaagggaagaggcccctcaggagctctggcgtggccctcagtattgctgttggcttgctggaatgcaccttccctaacaccggcgcccgcatcatgatgttcatcggcgggccagccactcagggtcccggtatggtagtcggcgacgagctcaagacaccaattcgctcatggcatgatatcgacaaggacaatgcgaaatatgtgaagaaggggacaaaacactttgaggccctcgcaaatagggctgccaccacaggccacgtgatcgacatttatgcttgtgcgctcgaccaaacagggctcctcgagatgaaatgttgcccgaatctcactggtggttatatggtgatgggggactcctttaataccagcctgttcaagcaaacatttcagcgcgttttcacgaaggacatgcacggtcagttcaaaatggggttcgggggcacattggaaattaagacatcaagggaaattaagattagcggagctatcgggccctgcgtgagcctaaactcaaagggcccctgtgtttccgaaaatgaaataggcactggaggtacctgtcagtggaagatatgtgggttatcccccacaactaccctcgccatttatttcgaggtcgtgaatcagcataatgccccgattccccagggcggccgcggagccatccagttcgtgactcagtatcagcatagctccggccagaggagaatcagagtaactaccattgcgagaaattgggccgatgcccaaacccagattcagaatatcgccgctagcttcgatcaggaagctgcggctattcttatggcacgcctagccatctaccgtgcagagaccgaggaaggccccgacgtcttacgctggctggatcgacagttgataaggttgtgccagaaattcggcgaatatcataaagacgatccaagctcttttcggttctctgaaacattcagcctgtatccgcagaggcgagattttcccaagacaagcggcgagatcctggaaaatcaggaaaaagccaggtcagcctgtctgaagtttatgtttcatctgcgaaggtcctcgtttctgcaagttttcaataactcccccgatgagtcctcgtattatagacaccatttcatgcggcaagatctaacgcaatctcttattatgattcagcctatactgtacgcatacagcttctctggcccccctgaacccgttctgctagattcaagctctatactggccgatcgcatcctacttatggacactttttttcagatactgatctatcacggggaaaccatagcacagtggaggaaatcagggtatcaggatatgcccgagtatgaaaacttcaggcatctgcttcaggctccagtagacgacgcccaggaaatactgcatagccgcttcccaatgccgcggtacatcgatactgaacacggtgggtcacaggccagattcctgctctcaaaggttaacccatcacaaactcacaacaacatgtacgcttggggacaggagagcggcgctccaatcctgaccgatgatgtgagtttgcaggtgttcatggatcacctcaaaaagctcgcagtcagctccgcagcatag

SEQ ID NO: 280899 - DNA, 123 bp, Artificial Sequence
  derived and/or modified sequence
atgaccacctacctggagttcatccagcagaacgaggagcgggacggagtgcggtttagctggaacgtgtggccttcttcccggcttgaggcgacgcgcatggtggttccggtggctgcctag

SEQ ID NO: 280900 - DNA, 1992 bp, Artificial Sequence
  derived and/or modified sequence
atgcctctgattttcctctatgtggtagacacatgtatggaggatgaagatctccaggcactgaaggaatctatgcagatgtccctctcacttttgcctcctacagccctggtcggactgatcacatttggaagaatggtgcaggtgcacgaactgggatgcgaaggaatctccaagagctatgtgttcaggggcacaaaggatctctccgcaaagcagttgcaggaaatgctgggactttctaaagtccctctgacccaggctacgcgcggtcctcaagtgcagcagcctccccctagtaacagatttctgcagcccgtccaaaagatcgatatgaacctgaccgatctgttaggtgaactgcagcgcgatccctggcctgttccgcaaggcaagcggccacttaggagtagtggagtggccctaagtatcgccgtgggcctgcttgaatgtacctttcctaacacaggagcacgcattatgatgttcatcggaggtcccgcaactcagggaccgggaatggtggttggggatgaattaaagaccccaatccgcagttggcacgacatcgacaaggataacgctaaatatgtgaaaaaggggacaaagcatttcgaggcccttgccaatcgggctgcaactacgggtcacgtgatcgacatatatgcctgtgcgctcgatcagactggcttgctggagatgaagtgctgcccaaatctcacaggcggatatatggtgatgggcgactcatttaatacctctctgtttaagcagacctttcagagggtgttcaccaaggatatgcatggccagtttaaaatgggcttcggcggtacgctggagataaagactagccgggagatcaagatatccggcgctattgggccttgtgtgagtctgaatagcaaaggcccatgcgtctctgagaatgaaatcggtacagggggaacatgtcagtggaaaatatgcgggctgtcccctactaccaccctcgccatttatttcgaggtggtgaatcagcataatgcccctattcctcagggcggtcgcggagctattcaattcgtcacccaatatcagcattctagtggacagaggcgtattcgggtcactaccatcgccaggaactgggcagacgctcagactcagatccaaaatatagctgcctcctttgatcaagaggctgccgctattcttatggctcgattagccatatatcgcgctgaaaccgaagagggaccagatgtcctacgatggctcgacagacaactaatcaggctgtgtcagaagtttggcgaatatcacaaggatgacccttcgtcatttcggttttcagagactttttcactctaccctcagcgcagagatttccccaagacctccggggagattctggaaaatcaggaaaaggcgagatccgcatgtctgaaattcatgtttcatctgaggcggtcttccttccttcaggtttttaataattctccagatgaaagcagctattacagacatcattttatgcgccaagatcttacccaaagcttgatcatgatccaaccaatcctttacgcctactccttttcaggaccgccagagccagttctccttgactcgtcttccattttggccgaccgaattctcctaatggatacttttttccaaatactgatctatcatggggaaacgatcgctcaatggcgcaaatctggttatcaggatatgcccgagtatgaaaacttccgtcatctgctgcaggctcctgttgacgatgcacaggaaattctccacagcagatttcctatgcccagatatatcgatactgagcacggagggtcccaggccagatttctgttatctaaagtgaatcccagccaaactcacaacaacatgtacgcatggggccaggaatcaggcgctcctatcctcactgatgatgtatctttgcaggtattcatggaccacttgaagaaactcgctgtttcatccgccgcatag

SEQ ID NO: 280901 - DNA, 123 bp, Artificial Sequence
  derived and/or modified sequence
atgacaacttacctggaattcatccaacagaatgaagagagggatggagttcggtttagctggaacgtgtggccctcttctaggctggaagcaacacgaatggtggtgcccgtcgcagcctag

SEQ ID NO: 280902 - DNA, 2685 bp, Artificial Sequence
  derived and/or modified sequence
agtgaggaaagggccgcctcgtctccgctcctgggggaccgcagtcaagtggattatcgagcaaaactttgggcttgcaacttttgttaccaaaggaatcagtttccacctagttatgctggtatatctgaactgaatcagcctgctgaacttttacctcagttttctagcattgaatatgtagttctgcgtggtcctcagatgcctttgatattcctctatgtggttgatacttgcatggaagatgaagatttacaagccctgaaagaatccatgcagatgtcattaagtcttttaccacctacagctttggttggacttattacttttgggagaatggttcaggttcatgaacttggatgtgaaggcatttcaaaaagctatgtcttcagaggaacaaaagatttgtctgccaaacaactgcaggaaatgctggggctctctaaagtaccacttactcaagcaacacgtggtcctcaggtacagcagccacctccttccaacagattcttacaaccagtacagaaaatagacatgaatctcacagatcttctgggagaactccagcgagacccttggcctgtaccacagggaaagagacctttgcgttcctctggggtggcactttccatagctgtaggactgctggagtgtacttttcccaacactggtgctcgtatcatgatgttcattggtggtcctgctactcaggggcctggaatggtggttggagatgagttgaagacacctataagatcgtggcatgacattgacaaagacaatgccaaatatgttaaaaagggaactaagcattttgaagcattggctaatcgagctgctacaactggccatgttattgatatctatgcgtgtgcattagatcagacaggtctcctggagatgaaatgctgtcccaaccttactggaggatacatggtaatgggtgattctttcaatacttccttattcaaacaaacttttcaaagagtctttaccaaagacatgcatggacagtttaaaatgggctttggtggtacgctagaaataaagacctcaagggaaataaagatttcaggagctattggaccctgtgtgtcactcaattctaaaggaccctgtgtgtctgaaaatgagataggaacaggtggcacatgtcagtggaagatatgtggacttagtcccactacaaccttagccatatattttgaggttgtcaatcagcataatgctccaattcctcaaggagggcgtggtgcaatccagtttgtgactcagtatcagcattcaagtgggcagagacgcatccgagtgaccaccattgctaggaactgggcagatgctcaaactcaaatccaaaacattgctgcatcttttgaccaggaggcagctgccattcttatggcccggctagcaatatatagagcagaaacagaagaaggtccagatgtgcttaggtggctggacagacagctcattcgactgtgtcagaaatttggagaatatcataaagatgacccaagttccttcagattttcagaaactttctccctttatccacagaggagagacttccctaaaacctctggtgagatcctggagaaccaggaaaaggcaaggtctgcttgtcttaagtttatgtttcatttaagaagatcttctttcctgcaagtttttaacaatagtcctgatgagagttcatattatcgtcaccattttatgcgtcaagatctgacccagtctctaattatgattcagcctatcctgtatgcgtattcttttagtggaccaccagagccggttcttcttgatagcagtagcattcttgcagatcgtattcttctcatggacacattcttccagattttgatttatcatggtgagaccatagcacagtggcggaagtcaggataccaggatatgcctgagtatgaaaatttccgccaccttctgcaagccccagtggatgatgcacaggaaattcttcactccagatttccaatgccaagatacattgacactgaacatggaggcagccaggcccgtttcctcctttcaaaagtcaacccttcacagactcataataatatgtatgcctgggggcaggagtctggagcacctattcttacagatgatgttagtttacaagtgtttatggatcacttgaagaaacttgctgtgtccagtgctgcttgaagtgctaataatgttaaagacacttaagaagatgaaataatattcaaatttcattttttcctttttccatttatctgtggaaaccaacagatattgctctatattttttgtattagtatggtttgagacaacatatggaaaatgttcacatttgtagattaagctggaattataatgagagcaataagaacaaatttattttgcttaccacagtgttatagctggttctagaaatttgaagtctttataacttaattatgtttaataaaaaatagagtctgcctcgtactacagatgtaactcatttgtatattgcagacagacccaaagtggcactgaattttcttgctcaccttttaaaaacttgttccttaattttagccagaaagcaaaaaaacaatagtaatgataaatgtgaacatttttgcttattcattgaatatttttctgtaattttcagcacttatgtatacactttttctgtacttacta

SEQ ID NO: 280903 - DNA, 1992 bp, Artificial Sequence
  derived and/or modified sequence
atgcccctgatcttcctgtacgtggtggacacctgcatggaggacgaggacctgcaggccctgaaggagagcatgcagatgagcctgagcctgctgccccccaccgccctggtgggcctgatcaccttcggcagaatggtgcaggtgcacgagctgggctgcgagggcatcagcaagagctacgtgttcagaggcaccaaggacctgagcgccaagcagctgcaggagatgctgggcctgagcaaggtgcccctgacccaggccaccagaggcccccaggtgcagcagcccccccccagcaacagattcctgcagcccgtgcagaagatcgacatgaacctgaccgacctgctgggcgagctgcagagagacccctggcccgtgccccagggcaagagacccctgagaagcagcggcgtggccctgagcatcgccgtgggcctgctggagtgcaccttccccaacaccggcgccagaatcatgatgttcatcggcggccccgccacccagggccccggcatggtggtgggcgacgagctgaagacccccatcagaagctggcacgacatcgacaaggacaacgccaagtacgtgaagaagggcaccaagcacttcgaggccctggccaacagagccgccaccaccggccacgtgatcgacatctacgcctgcgccctggaccagaccggcctgctggagatgaagtgctgccccaacctgaccggcggctacatggtgatgggcgacagcttcaacaccagcctgttcaagcagaccttccagagagtgttcaccaaggacatgcacggccagttcaagatgggcttcggcggcaccctggagatcaagaccagcagagagatcaagatcagcggcgccatcggcccctgcgtgagcctgaacagcaagggcccctgcgtgagcgagaacgagatcggcaccggcggcacctgccagtggaagatctgcggcctgagccccaccaccaccctggccatctacttcgaggtggtgaaccagcacaacgcccccatcccccagggcggcagaggcgccatccagttcgtgacccagtaccagcacagcagcggccagagaagaatcagagtgaccaccatcgccagaaactgggccgacgcccagacccagatccagaacatcgccgccagcttcgaccaggaggccgccgccatcctgatggccagactggccatctacagagccgagaccgaggagggccccgacgtgctgagatggctggacagacagctgatcagactgtgccagaagttcggcgagtaccacaaggacgaccccagcagcttcagattcagcgagaccttcagcctgtacccccagagaagagacttccccaagaccagcggcgagatcctggagaaccaggagaaggccagaagcgcctgcctgaagttcatgttccacctgagaagaagcagcttcctgcaggtgttcaacaacagccccgacgagagcagctactacagacaccacttcatgagacaggacctgacccagagcctgatcatgatccagcccatcctgtacgcctacagcttcagcggcccccccgagcccgtgctgctggacagcagcagcatcctggccgacagaatcctgctgatggacaccttcttccagatcctgatctaccacggcgagaccatcgcccagtggagaaagagcggctaccaggacatgcccgagtacgagaacttcagacacctgctgcaggcccccgtggacgacgcccaggagatcctgcacagcagattccccatgcccagatacatcgacaccgagcacggcggcagccaggccagattcctgctgagcaaggtgaaccccagccagacccacaacaacatgtacgcctggggccaggagagcggcgcccccatcctgaccgacgacgtgagcctgcaggtgttcatggaccacctgaagaagctggccgtgagcagcgccgcctag

SEQ ID NO: 280904 - DNA, 123 bp, Artificial Sequence
  derived and/or modified sequence
atgaccacctacctggagttcatccagcagaacgaggagagagacggcgtgagattcagctggaacgtgtggcccagcagcagactggaggccaccagaatggtggtgcccgtggccgcctag

SEQ ID NO: 280905 - protein, 740 aa, Artificial Sequence
  derived and/or modified sequence
MLGRRGSDWAVPAPETMPFPVTTQGSQQTQPPQKHYGITSPISLAAPKETDCVLTQKLIETLKPFGVFEEEEELQRRILILGKLNNLVKEWIREISESKNLPQSVIENVGGKIFTFGSYRLGVHTKGADIDALCVAPRHVDRSDFFTSFYDKLKLQEEVKDLRAVEEAFVPVIKLCFDGIEIDILFARLALQTIPEDLDLRDDSLLKNLDIRCIRSLNGCRVTDEILHLVPNIDNFRLTLRAIKLWAKRHNIYSNILGFLGGVSWAMLVARTCQLYPNAIASTLVHKFFLVFSKWEWPNPVLLKQPEECNLNLPVWDPRVNPSDRYHLMPIITPAYPQQNSTYNVSVSTRMVMVEEFKQGLAITDEILLSKAEWSKLFEAPNFFQKYKHYIVLLASAPTEKQRLEWVGLVESKIRILVGSLEKNEFITLAHVNPQSFPAPKENPDKEEFRTMWVIGLVFKKTENSENLSVDLTYDIQSFTDTVYRQAINSKMFEVDMKIAAMHVKRKQLHQLLPNHVLQKKKKHSTEGVKLTALNDSSLDLSMDSDNSMSVPSPTSATKTSPLNSSGSSQGRNSPAPAVTAASVTNIQATEVSVPQVNSSESSGGTSSESIPQTATQPAISPPPKPTVSRVVSSTRLVNPPPRSSGNAATSGNAATKIPTPIVGVKRTSSPHKEESPKKTKTEEEQLDTETSTTQSETIQTAASLLASQKTSSTDLSDIPALPANPIPVIKNSIKLRLNR

SEQ ID NO: 280906 - DNA, 2223 bp, Artificial Sequence
  derived and/or modified sequence
atgctgggtaggagaggatccgattgggccgtgcctgccccagaaaccatgcctttcccggtgacaactcaggggtcacagcagacacaaccaccccagaaacactacggcatcacctcccccatctccctggccgcccctaaagagacggactgcgtactgacacaaaagctaatagagactcttaaaccattcggggtgtttgaggaagaggaagaactccagcggaggattctgatcctgggtaagttaaacaatcttgtgaaggagtggatcagagagatctccgagagcaagaacttgccccaatcagttatagaaaatgtaggtggaaaaattttcacatttgggtcttacaggctcggggtgcatactaaaggcgccgacatcgatgccttgtgtgttgctcctcgtcatgttgacagaagtgatttttttacatctttctacgataaactgaaactccaggaagaggtgaaagacctgcgggcagtagaggaggccttcgtgcccgttattaaactgtgctttgatggcattgaaatagacatattattcgctagactggcattgcagaccattcccgaggacctcgatctgagggacgattcgctgctgaagaacctggatatcagatgtatcagatcacttaatggctgtagagtgactgacgagattctccatctggtacctaacatcgataattttaggttaaccttgagggccattaagctctgggcgaagaggcataacatctacagcaatattctgggatttctcggtggcgtgtcctgggcgatgctggtcgccaggacatgccagctttatcccaacgctattgcttcaacactagtgcacaagtttttcctggttttttcaaagtgggagtggcctaacccggtgctactcaaacaaccagaagagtgcaatctgaacctccctgtatgggatcctagggtcaaccccagcgataggtatcacctgatgcctattattactccagcttaccctcaacagaactccacttataatgtgtcagttagcacccggatggttatggtggaggagtttaagcaggggctggccattaccgacgagatcctgctcagcaaggcagagtggagcaagctatttgaggccccaaactttttccagaagtataagcactatatcgtgttgttagcctctgcacctactgaaaaacagagactggagtgggtaggcctggtggaatccaagattaggatactggtcggaagtctggaaaagaacgaattcatcaccctagcccacgtgaatccccagtcatttcccgccccgaaggaaaacccagacaaggaggaattcagaactatgtgggtgatcggtttggtgttcaaaaagaccgagaattctgaaaacctgagcgtcgacctgacctacgacatccaaagttttaccgacacagtttatagacaggccatcaacagcaagatgttcgaggtcgacatgaaaatcgctgccatgcatgtcaaaaggaagcagctgcatcagctgctcccaaatcacgtcctgcaaaaaaaaaaaaagcactctacagagggagtgaaactgacagcgctgaatgattctagcttggacctgtcaatggattccgataactccatgagtgtcccctcgcccactagtgctaccaagacaagccctctcaactcttcaggctctagtcagggacgtaacagtcctgcacccgcggttacagcagccagcgtgacaaacatccaggcaactgaagtgtctgtaccccaagtgaacagttccgaatcttccggtggtacttcctcagaatcaatcccccagaccgcgacccagcccgccataagtccaccaccaaaacctactgtgtcacgggtggtgtcatccacccggctggtgaacccaccccctcggtcgtccggcaatgccgcaacttcaggtaacgctgcaactaagattcccaccccaattgtcggcgttaagcgtacttcttccccccacaaagaagagtcccccaaaaagacaaagaccgaggaggaacagctggatactgagactagcaccacacagtccgaaacaattcagaccgctgctagcctgctggctagccagaaaaccagcagcactgacctgagcgatattccagcgcttcctgccaatccgatcccggtgattaagaattctatcaagttgagacttaacaggtag

SEQ ID NO: 280907 - DNA, 2223 bp, Artificial Sequence
  derived and/or modified sequence
atgctgggccggcggggcagtgactgggccgtgcctgcccctgagaccatgcccttccctgtgaccacccagggcagccagcagacccagcccccccagaagcactacggcatcaccagccccatcagcctggccgcccccaaggagacagactgtgtgctgacccagaagctgattgagaccctgaagccctttggagtgtttgaggaggaggaggagctgcagaggcgcatcctgatcctgggcaagctgaacaacctggtgaaggagtggatccgggagatcagcgagagcaagaacctgccccagagcgtgattgaaaatgtgggcggcaagatcttcaccttcggcagctaccgcctgggcgtgcacaccaagggagctgacattgatgccctgtgtgtggcccccaggcatgtggacagaagtgacttcttcaccagcttctatgacaagctgaagctgcaggaggaggtgaaggacctgcgggctgtggaggaggcctttgtgcctgtgatcaagctgtgctttgatggcatcgagattgacatcctgtttgcccggctggccctgcagaccatccctgaggacctggacctgagagatgacagcctgctgaagaacctggacatccgctgcatccgcagcctgaatggctgccgggtgacagatgagatcctgcacctggtgcccaacatcgacaacttccggctgaccctgcgggccatcaagctgtgggccaagaggcacaacatctacagcaacatcctgggcttcctgggcggcgtgtcctgggccatgctggtggcccggacctgccagctgtacccaaatgccatcgccagcaccctggtgcacaagttcttcctggtgttcagcaagtgggagtggcccaaccctgtgctgctgaagcagcctgaggagtgcaacctgaacctgcctgtgtgggacccccgggtgaaccccagcgaccgctaccacctgatgcccatcatcaccccagcctacccccagcagaacagcacctacaacgtgtctgtgtccaccaggatggtgatggtggaggagttcaagcagggcctggccatcacagatgagatcctgctgagcaaggccgagtggagcaagctgtttgaggcccccaacttcttccagaagtacaagcactacatcgtgctgctggccagcgcccccacagagaagcagaggctggagtgggtgggcctggtggagagcaagatccgcatcctggtgggcagcctggagaagaatgagttcatcaccctggcccacgtgaacccccagagcttccctgcccccaaggagaacccagacaaggaggagttccgcaccatgtgggtgattggcctggtgttcaagaagacagaaaattctgagaacctgtctgtggacctgacctatgacatccagagcttcacagacacagtgtaccggcaggccatcaacagcaagatgtttgaggtggacatgaagattgctgccatgcacgtgaagaggaagcagctgcaccagctgctgcccaaccacgtgctgcagaagaagaagaagcacagcacagagggcgtgaagctgacagccctgaatgacagcagcctggacctgtccatggacagcgacaacagcatgtctgtgcccagccccaccagcgccaccaagaccagccccctgaacagcagcggcagcagccagggcaggaacagccctgccccagctgtgacagctgcctctgtgaccaacatccaggccacagaggtgtctgtgccccaggtgaacagcagcgagagcagcggcggcaccagcagcgagagcatcccccagacagccacccagcctgccatcagccccccacccaagcccaccgtgtcccgggtggtgagcagcacccggctggtgaaccccccacccaggagcagtggaaatgctgccaccagcggaaatgctgccaccaagatccccacccccatcgtgggcgtgaagaggaccagcagcccccacaaggaggagagccccaagaagaccaagacagaggaggagcagctggacacagagaccagcaccacccagagcgagaccatccagacagctgccagcctgctggccagccagaagaccagcagcacagacctgagtgacatcccagccctgcctgccaaccccatccctgtgatcaagaacagcatcaagctgcggctgaacagatag

SEQ ID NO: 280908 - DNA, 2223 bp, Artificial Sequence
  derived and/or modified sequence
atgctgggccggcggggcagcgactgggccgtgcccgcccccgagacaatgccgtttcctgtcactacgcaagggtcacagcaaacgcaacccccccaaaaacattatggaattacttctccgataagcttggcggcaccaaaagagaccgactgtgttttgacgcagaagctgattgagaccctgaagccattcggcgtgttcgaagaagaggaggagctgcaacgtcgcattttaatcctggggaagctgaataacctagttaaagagtggatccgggagatttcagaatccaaaaacctgcctcagtctgtcatcgagaacgtggggggcaagatcttcacctttggtagctatcggcttggcgttcacactaaaggagctgacattgatgccctgtgtgttgcacccaggcacgtcgacagaagcgatttctttaccagcttttatgacaaactgaaactccaggaggaggttaaagaccttcgggccgttgaggaggccttcgtgccagttattaagctgtgctttgacgggattgagattgatatcctctttgctcggctcgccctgcaaaccattcctgaggacctcgatctgcgggacgattcactgctcaaaaacctagacattcgctgcatccggtctctcaacgggtgccgagtgacagacgaaattctgcacttggtccccaatattgataatttccggctgacccttagagctatcaagctgtgggcaaagagacataatatatatagcaacatcctggggtttcttggaggtgtgtcgtgggctatgctggtggccagaacttgtcagctgtacccgaacgccatagcatccacactggtccacaaattctttctggtcttttccaagtgggagtggcccaatccagtattactgaaacagcctgaagagtgtaacctcaacctgccggtgtgggatccccgggtgaacccttccgatcgttatcacctaatgccgattattacccccgcttatccacagcagaatagcacctacaacgtctcagtttccactcggatggtaatggtcgaagagttcaaacagggtctggcgatcacagacgagattctgctgagcaaggctgagtggtccaagctgtttgaggcccctaattttttccagaagtacaagcactacatcgtgcttctggcaagtgccccgacagagaagcagagactcgaatgggtcggcttggttgaatctaagattagaattctggtcggatctctcgagaagaatgagttcatcactctggctcacgtgaacccacagagctttcccgcacctaaagaaaatccagacaaggaggagtttcggaccatgtgggtcattggtctggtctttaagaagacggaaaacagtgaaaacctgagcgtcgatcttacctacgacatccagagcttcacggatacagtctaccgtcaggcaataaatagcaaaatgttcgaagtggatatgaagatcgctgctatgcacgtgaaacgcaaacaattgcaccagttactgcccaatcatgttctgcagaagaaaaagaagcactctaccgaaggagtgaagctgactgcactgaacgattcctccttagatctctccatggattcagataacagtatgagcgtgccatctccaacatctgccacaaaaacctctccattgaactccagtggctccagccaggggagaaactcacctgcccccgctgttacagctgcaagcgtgacaaatattcaggctactgaggtcagtgttccccaggtgaactccagcgaatcaagtggtggaacctcatctgaatccatcccacagaccgccacccagcccgcgattagcccacccccaaaaccgaccgtcagccgtgtggtcagcagtaccagattagtcaatccccccccacgatcttcgggcaacgccgcgacgtccggcaatgctgctacaaaaatcccaacacctatagttggagtcaaacggacctcctctccccataaggaagagagccctaagaaaaccaagacggaggaggaacagctcgatactgaaacgtctaccacgcaatcagaaacgattcagactgcggcttctctcctggcctcacaaaaaaccagctctactgatctgtctgatatacccgccctccccgcaaacccaattcccgtaattaagaattcaattaaactgcgtctgaatagatag

SEQ ID NO: 280909 - DNA, 2601 bp, Artificial Sequence
  derived and/or modified sequence
atgttaggacgaaggggaagtgactgggcggtgccggcgccggagacgatgccgtttccagttacaacacagggatcacaacaaacacaaccgccacagaagcactatggcattacttctcctatcagcttagcagcccccaaggagactgactgcgtacttacacagaaactaattgagacattgaaaccctttggggtttttgaagaggaagaggaactgcagcgcaggattttaattttgggaaaactaaataacctggtaaaagagtggatacgagaaatcagtgaaagcaagaatcttccacaatctgtaattgaaaatgttggaggaaaaatttttacatttggatcttacagattaggagtgcatacaaaaggtgctgatattgatgcgttgtgtgttgcaccaagacatgttgatcgaagtgactttttcacctcattctatgataagttgaaattacaggaagaagtaaaagatttaagagctgttgaagaggcattcgtaccagttattaaactctgttttgatgggatagagattgatattttgtttgcaagattagcactgcagacaattcctgaagatttggatctacgagatgacagtctgctaaaaaatttagatataagatgtataagaagtcttaacggttgcagggtaaccgatgaaattttacatctagtaccaaacattgacaacttcaggttaactctgagagctatcaaactatgggccaaacgccacaacatctattccaatatattaggtttcctcggtggtgtttcctgggctatgctagtagcaagaacttgccagctttatccaaatgcaatagcatcaactcttgtacataaatttttcttggtattttctaaatgggaatggccaaatccagtgctattgaaacagcctgaagaatgcaatcttaatttgcctgtatgggacccaagggtaaaccccagtgataggtaccatcttatgcctataattacaccagcatacccacaacagaactccacgtacaatgtgtccgtttcaacacggatggtcatggttgaggagtttaaacaaggtcttgctatcacagatgaaattttgctgagtaaggcagagtggtccaaactttttgaagctccaaacttctttcaaaagtacaagcattatattgtacttctagcaagtgcaccaacagaaaaacaacgcctggaatgggtgggcttggtggaatcaaaaatccgaatcctggttggaagcttggagaagaatgaatttattacactggctcatgtgaatccccagtcatttccagcacccaaagaaaatcccgacaaggaagaatttcgcacgatgtgggtgattgggttagtgtttaaaaaaacagaaaactctgaaaacctcagtgttgatctcacctatgatattcagtctttcacagatacagtttataggcaagcaataaacagcaagatgtttgaggtggatatgaaaattgctgcaatgcatgtaaaaagaaagcaactccatcaactactacctaatcatgtgcttcagaaaaagaaaaagcattcaacagaaggtgtcaaattgacagctctcaatgacagcagcctcgacttgtctatggacagtgataacagcatgtctgtgccttcacctactagtgctacgaagaccagtccattgaacagttctggcagctctcagggcagaaacagtcctgctccagctgtaacagcagcatctgtgaccaacatacaggctactgaagtttctgtgccacaagtaaattccagtgaaagctcagggggtacatcgagtgaaagcattcctcaaactgccacacaaccagccatttctccaccaccaaagcctacggtctccagagttgtttcttcaacacgtctggtaaacccaccacctagatcttcaggaaatgcagcaacttcaggaaatgcagcaacaaaaatacctactcctatagtaggagtcaagaggacatcctcacctcataaagaagagagtcccaagaaaaccaaaacagaagaggaacaacttgatacagagacaagtacaactcaatcagaaactattcagacagcggcttctctgttggcctctcagaaaacatccagtacagacctttctgatatccctgctctccctgcaaatcctattcctgttatcaagaattcaataaaactgagattgaatcggtaaaaacaacctcaggggtccataaacaatatctgccaactcaacctgttgtcttcaaatgctaaaaaaggagaatggagggtacaagactagacatgactgaaatggatttgggttttttggtgacctcccttactgggctaatcagcacttgatcggaagtccaggttagtatgtgaagccaggagtactattattattgtgttagcaacagttgcattaactatttcaaaaattactgcctttaaaaaaaacaacctcaagctatatttgtattcataattgacatctggattgggtttatgtttgatgcattgtttggaaaatttgcaatacaaactggcataagaattacttattctgatgatgcacttttatgta

SEQ ID NO: 280910 - DNA, 2223 bp, Artificial Sequence
  derived and/or modified sequence
atgctcggacgccgaggaagtgactgggcagttccagcaccagagaccatgccattcccagttaccacccaggggtcacagcagactcagcctcctcagaagcattacggaatcaccagcccaatcagtctggcagctcctaaagagactgactgcgttctgacacagaagttgatcgagacattgaaacctttcggcgtttttgaagaagaagaggaactgcagcgtagaattcttatcctcggcaagttaaataatctggtgaaagaatggattcgagagatcagtgaatctaagaacctgccacagagcgtcatagaaaatgtgggcggaaaaatttttacctttgggtcttaccggctgggtgtgcacacaaaaggcgcagatatcgacgcactgtgcgtcgcacctaggcatgtcgatcggagcgattttttcacgtccttctacgacaaattgaagctacaggaggaggttaaagatctcagagccgtcgaagaagccttcgttccggtgatcaagctgtgttttgacggcattgagatagatatactcttcgcccgtcttgccctgcagactattcctgaagacctggacctgagagatgattccttgctcaaaaacctggacataagatgcattaggtccctcaacggctgccgcgttacagacgagattttacatctcgtccctaacattgacaactttcggctgaccctccgtgcaataaagctgtgggctaagaggcacaacatttacagcaacatcctaggctttctgggcggtgtatcttgggccatgctggtagccaggacgtgccagctgtaccccaacgcaatcgcctcaaccctggtgcataagttctttctagttttcagtaaatgggagtggcctaacccagtcctcttgaaacagcctgaggagtgtaaccttaatttgccggtgtgggatcccagggtcaatccctcagatcgctaccacctaatgccaataattaccccggcttatcctcagcagaattcaacatataatgtgagcgtatccacccggatggtgatggtcgaggagttcaagcagggattggctatcacagacgaaattctgctgagcaaggctgaatggtccaagctgttcgaggctcctaacttctttcagaagtacaagcactacatcgtcttgctcgccagcgcaccgactgagaaacaacgcctggagtgggtgggacttgtcgaatcgaagattcgaatccttgtgggaagcctggagaagaacgagtttattacactggcccacgtaaacccccagtccttccctgcaccaaaggagaatccggataaggaagagttccgaacaatgtgggtgatcgggctcgttttcaaaaaaacagaaaactcggagaatttgtctgtagacctaacctacgatatccagtctttcacagacactgtgtaccggcaggcaatcaattcgaagatgttcgaggttgacatgaaaattgctgcgatgcacgtgaagcgtaaacagctgcatcaactcctaccgaaccatgttttgcagaaaaaaaagaaacactccaccgaaggcgtcaaactcactgccctaaacgactcctccctcgatctcagcatggactccgataactctatgagcgtaccttctcccacatctgccacaaaaacatccccacttaatagcagcgggtcatcgcagggcagaaacagtcctgccccagcggtgacggctgccagtgtgaccaacatccaagccactgaagtcagcgtgcctcaggtcaattcctcagagagtagcggtggtaccagctccgagagcatcccacaaaccgctactcagcccgcaatatccccccctcccaagccaacagttagtagagtggtatctagcacaaggctggtcaacccgccaccccgaagctcaggtaatgccgcaacctcaggcaatgcagcgacaaaaatcccaaccccaattgtcggcgtgaagagaacctcctccccacacaaagaagaatcacccaagaaaaccaagacggaggaagagcagctggacactgagacctccacgacccaaagcgagaccatacaaacagcggcttccctgctcgccagccagaagacctcttccactgatctctcagacatccccgctctgccagctaatccaatccctgtgataaagaacagtattaagctcagattgaatcgttag

SEQ ID NO: 280911 - DNA, 2223 bp, Artificial Sequence
  derived and/or modified sequence
atgctgggcagaagaggcagcgactgggccgtgcccgcccccgagaccatgcccttccccgtgaccacccagggcagccagcagacccagcccccccagaagcactacggcatcaccagccccatcagcctggccgcccccaaggagaccgactgcgtgctgacccagaagctgatcgagaccctgaagcccttcggcgtgttcgaggaggaggaggagctgcagagaagaatcctgatcctgggcaagctgaacaacctggtgaaggagtggatcagagagatcagcgagagcaagaacctgccccagagcgtgatcgagaacgtgggcggcaagatcttcaccttcggcagctacagactgggcgtgcacaccaagggcgccgacatcgacgccctgtgcgtggcccccagacacgtggacagaagcgacttcttcaccagcttctacgacaagctgaagctgcaggaggaggtgaaggacctgagagccgtggaggaggccttcgtgcccgtgatcaagctgtgcttcgacggcatcgagatcgacatcctgttcgccagactggccctgcagaccatccccgaggacctggacctgagagacgacagcctgctgaagaacctggacatcagatgcatcagaagcctgaacggctgcagagtgaccgacgagatcctgcacctggtgcccaacatcgacaacttcagactgaccctgagagccatcaagctgtgggccaagagacacaacatctacagcaacatcctgggcttcctgggcggcgtgagctgggccatgctggtggccagaacctgccagctgtaccccaacgccatcgccagcaccctggtgcacaagttcttcctggtgttcagcaagtgggagtggcccaaccccgtgctgctgaagcagcccgaggagtgcaacctgaacctgcccgtgtgggaccccagagtgaaccccagcgacagataccacctgatgcccatcatcacccccgcctacccccagcagaacagcacctacaacgtgagcgtgagcaccagaatggtgatggtggaggagttcaagcagggcctggccatcaccgacgagatcctgctgagcaaggccgagtggagcaagctgttcgaggcccccaacttcttccagaagtacaagcactacatcgtgctgctggccagcgcccccaccgagaagcagagactggagtgggtgggcctggtggagagcaagatcagaatcctggtgggcagcctggagaagaacgagttcatcaccctggcccacgtgaacccccagagcttccccgcccccaaggagaaccccgacaaggaggagttcagaaccatgtgggtgatcggcctggtgttcaagaagaccgagaacagcgagaacctgagcgtggacctgacctacgacatccagagcttcaccgacaccgtgtacagacaggccatcaacagcaagatgttcgaggtggacatgaagatcgccgccatgcacgtgaagagaaagcagctgcaccagctgctgcccaaccacgtgctgcagaagaagaagaagcacagcaccgagggcgtgaagctgaccgccctgaacgacagcagcctggacctgagcatggacagcgacaacagcatgagcgtgcccagccccaccagcgccaccaagaccagccccctgaacagcagcggcagcagccagggcagaaacagccccgcccccgccgtgaccgccgccagcgtgaccaacatccaggccaccgaggtgagcgtgccccaggtgaacagcagcgagagcagcggcggcaccagcagcgagagcatcccccagaccgccacccagcccgccatcagccccccccccaagcccaccgtgagcagagtggtgagcagcaccagactggtgaaccccccccccagaagcagcggcaacgccgccaccagcggcaacgccgccaccaagatccccacccccatcgtgggcgtgaagagaaccagcagcccccacaaggaggagagccccaagaagaccaagaccgaggaggagcagctggacaccgagaccagcaccacccagagcgagaccatccagaccgccgccagcctgctggccagccagaagaccagcagcaccgacctgagcgacatccccgccctgcccgccaaccccatccccgtgatcaagaacagcatcaagctgagactgaacagatag

SEQ ID NO: 280912 - DNA, 3576 bp, Artificial Sequence
  derived and/or modified sequence
atgctgagaaagctgaccatcgagcagatcaacgactggttcaccatcggcaagaccgtgaccaacgtggagctgctgggcgccccccccgccttccccgccggcgccgccagagaggaggtgcagagacaggacgtggcccccggcgccggccccgccgcccaggcccccgccctggcccaggcccccgccagacccgccgccgccttcgagagaagcctgagccagagaagcagcgaggtggagtacatcaacaagtacagacagctggaggcccaggagctggacgtgtgcagaagcgtgcagcccaccagcggccccggccccagacccagcctggccaagctgagcagcgtgacctgcatccccggcaccacctacaagtaccccgacctgcccatcagcagatacaaggaggaggtggtgagcctgatcgagagcaacagcgtggtgatcatccacggcgccaccggcagcggcaagagcacccagctgccccagtacatcctggaccactacgtgcagagaagcgcctactgcagcatcgtggtgacccagcccagaaagatcggcgccagcagcatcgccagatggatcagcaaggagagagcctggaccctgggcggcgtggtgggctaccaggtgggcctggagaagatcgccaccgaggacaccagactgatctacatgaccaccggcgtgctgctgcagaagatcgtgagcgccaagagcctgatggagttcacccacatcatcatcgacgaggtgcacgagagaaccgaggagatggacttcctgctgctggtggtgagaaagctgctgagaaccaacagcagattcgtgaaggtggtgctgatgagcgccaccatcagctgcaaggagttcgccgactacttcgccgtgcccgtgcagaacaagatgaaccccgcctacatcttcgaggtggagggcaagccccacagcgtggaggagtactacctgaacgacctggagcacatccaccacagcaagctgagcccccacctgctggaggagcccgtgatcaccaaggacatctacgaggtggccgtgagcctgatccagatgttcgacgacctggacatgaaggagagcggcaacaaggcctggagcggcgcccagttcgtgctggagagaagcagcgtgctggtgttcctgcccggcctgggcgagatcaactacatgcacgagctgctgaccagcctggtgcacaagagactgcaggtgtaccccctgcacagcagcgtggccctggaggagcagaacaacgtgttcctgagccccgtgcccggctacagaaagatcatcctgagcaccaacatcgccgagagcagcgtgaccgtgcccgacgtgaagtacgtgatcgacttctgcctgaccagaaccctggtgtgcgacgaggacaccaactaccagagcctgagactgagctgggccagcaagaccagctgcaaccagagaaagggcagagccggcagagtgagcagaggctactgctacagactggtgcacaaggacttctgggacaacagcatccccgaccacgtggtgcccgagatgctgagatgccccctgggcagcaccatcctgaaggtgaagctgctggacatgggcgagcccagagccctgctggccaccgccctgagcccccccggcctgagcgacatcgagagaaccatcctgctgctgaaggaggtgggcgccctggccgtgagcggccagagagaggacgagaacccccacgacggcgagctgaccttcctgggcagagtgctggcccagctgcccgtgaaccagcagctgggcaagctgatcgtgctgggccacgtgttcggctgcctggacgagtgcctgatcatcgccgccgccctgagcctgaagaacttcttcgccatgcccttcagacagcacctggacggctacagaaacaaggtgaacttcagcggcagcagcaagagcgactgcatcgccctggtggaggccttcaagacctggaaggcctgcagacagaccggcgagctgagataccccaaggacgagctgaactggggcagactgaactacatccagatcaagagaatcagagaggtggccgagctgtacgaggagctgaagaccagaatcagccagttcaacatgcacgtggacagcagaagacccgtgatggaccaggagtacatctacaagcagagattcatcctgcaggtggtgctggccggcgccttctaccccaactacttcaccttcggccagcccgacgaggagatggccgtgagagagctggccggcaaggaccccaagaccaccgtggtgctgaagcacatccccccctacggcttcctgtactacaagcagctgcagagcctgttcagacagtgcggccaggtgaagagcatcgtgttcgacggcgccaaggccttcgtggagttcagcagaaaccccaccgagagattcaagaccctgcccgccgtgtacatggccatcaagatgagccagctgaaggtgagcctggagctgagcgtgcacagcgccgaggagatcgagggcaaggtgcagggcatgaacgtgagcaagctgagaaacaccagagtgaacgtggacttccagaagcagaccgtggaccccatgcaggtgagcttcaacaccagcgacagaagccagaccgtgaccgacctgctgctgaccatcgacgtgaccgaggtggtggaggtgggccacttctggggctacagaatcgacgagaacaacagcgagatcctgaagaagctgaccgccgagatcaaccagctgaccctggtgcccctgcccacccacccccaccccgacctggtgtgcctggcccccttcgccgacttcgacaagcagagatacttcagagcccaggtgctgtacgtgagcggcaacagcgccgaggtgttcttcgtggactacggcaacaagagccacgtggacctgcacctgctgatggagatcccctgccagttcctggagctgcccttccaggccctggagttcaagatctgcaagatgagacccagcgccaagagcctggtgtgcggcaagcactggagcgacggcgccagccagtggttcgccagcctggtgagcggctgcaccctgctggtgaaggtgttcagcgtggtgcacagcgtgctgcacgtggacgtgtaccagtacagcggcgtgcaggacgccatcaacatcagagacgtgctgatccagcagggctacgccgagctgaccgaggagagctacgagagcaaggtgaacatcctgagagccgccatcaacaagctggtgtgcgacggccccaacggctgcaagtgcctgggccccgagagagtggcccagctgcaggacatcgccagacagaagctgctgggcctgttctgccagagcaagcccagagagaagatcgtgcccaagtggcacgagaagccctacgagtggaaccaggtggaccccaagctggtgatggagcaggccgacagagagagcagcagaggcaagaacaccttcctgtaccagctgcacaagctggtggtgctgggcacctag

SEQ ID NO: 280913 - DNA, 4189 bp, Artificial Sequence
  derived and/or modified sequence
ttgggggatgccgacgcctgggccttgaggatgctgcggaagctcaccatcgagcagatcaacgactggttcaccatcggcaagacggtgaccaatgtggagctgctgggcgcgccgcccgccttcccggcaggggcggccagggaggaggtgcagcgccaggacgtggcccccggcgctggtcccgcggcccaggctccggctctggcccaagctccggcccggccggccgctgcgttcgaaaggtcactcagccaaaggagctcagaagtagagtatattaacaaatacagacagctcgaagcacaagagcttgatgtgtgtcgcagtgtccaaccaaccagtgggccaggtccaaggccatctttggctaaattaagcagtgtgacatgcatcccagggacaacttataaatatcctgatttgcctataagtcgatacaaggaagaggttgtgtctttgatagaaagtaattccgtggtgattatccatggggccacgggaagcggtaaaagcactcagctcccgcagtatatcttggaccactacgttcagcgctccgcctactgcagcattgtggtcacccagccccggaagataggggcaagcagcatcgccaggtggatcagtaaagagcgtgcctggaccctgggaggtgtggtgggctaccaggtagggctagagaaaatagcaacagaggacaccaggctaatttatatgacaactggagtcctgcttcagaaaatagttagtgccaagagtttgatggaattcacacatatcatcattgatgaagtacacgaacgaacagaagaaatggatttcctgctattggtagtccgcaaactcttaagaacaaattcacgttttgtgaaggtggtcctgatgtcggctaccatcagctgtaaagagtttgcagactactttgctgttcctgttcaaaacaagatgaatcctgcatatatttttgaagtggaaggcaagccccattcagttgaagagtattatcttaatgatttggagcacattcatcatagcaagctctctcctcatctcctggaggaaccggtgataactaaggatatatatgaagttgctgtctctctcattcagatgtttgatgacttggatatgaaggagagtgggaacaaggcttggtcgggggcccagtttgtgttggagcgaagcagtgtgttggtgtttttgccaggtctgggtgaaataaattatatgcatgaacttctcacaagcctggttcataaaaggttgcaggtctatccactccattcaagtgtggctttagaagaacagaataatgtctttttaagtccagtccctgggtacagaaagattattctgtccaccaatattgcagagagttctgtcacagttccagatgtcaaatatgttatagatttttgtttgactagaactttggtctgtgatgaagatacaaattatcagagtctgcgattgagttgggcttctaaaaccagctgtaatcagagaaaaggccgtgctggacgagtgtctagagggtactgttaccggctggtacacaaggatttctgggacaactccatccctgatcatgttgttcctgagatgttgcgttgtccattaggaagcacgatcttgaaagtgaaattacttgacatgggtgagccgagagctctgctggccactgccctttccccgcctggtctgagtgacattgagcgcaccatccttctactaaaggaggttggagcacttgcagtgagtgggcagagagaagatgaaaacccccatgatggtgaattgaccttcttaggaagagttttagcccaacttcctgtaaatcagcaacttggtaaactcatagtccttggacatgtatttggatgtctagatgaatgtcttattatagcggcagctctttctttgaagaatttttttgcaatgcctttccggcagcatctcgatggatataggaacaaagtgaatttctctggcagtagcaagagtgactgtattgcacttgttgaggcatttaaaacatggaaggcttgcagacagacaggggagctgcggtacccgaaggatgaacttaattggggacggttaaattacattcaaatcaagagaattagagaggtggctgaattatatgaagaattgaagactagaatctcacagttcaacatgcatgttgattctcggcgacctgtcatggaccaagagtatatatataagcagcgattcatcctacaggttgtattggcaggtgctttctatccaaattactttacttttggacagccggatgaggagatggcggtgagggagctggctggcaaggaccccaagacaactgtcgtgttgaaacacattcctccctatggatttctttactataaacaactacagtctctctttagacagtgtggtcaagtcaaatccattgtatttgatggtgcaaaagcctttgtggaattctcacgaaatccaacagagagatttaaaacccttcctgcagtatatatggcaattaagatgtctcaactaaaagtttcacttgaactcagcgttcattctgcagaggaaattgaagggaaggtgcaaggcatgaacgtctcaaagctcaggaacacaagggtgaatgtggacttccagaagcagacggtagatcctatgcaagtctcctttaacacatcagacaggtcccagacagttacagatctccttctaactattgatgtcacagaggtggttgaagtgggacacttttggggatacaggattgatgaaaacaactcagagattctgaaaaagcttactgctgaaatcaaccaactgacgctggtgcccttgcccactcacccacatccagacttggtctgtctggcaccttttgctgattttgataaacaacgctactttagagctcaagtcctttatgtttctggaaattctgctgaggtattctttgtagattatggcaataagtctcatgtagatctacatcttttgatggagattccctgtcaatttcttgaacttcctttccaggctttggaatttaagatttgcaaaatgagaccatcagcaaagtctcttgtttgtggcaagcactggagtgacggggccagccagtggttcgcctctctggtgagcggctgcaccctccttgtgaaggtcttctctgtggtgcacagcgtcctgcacgtggatgtgtaccagtactcaggggtccaggatgccatcaacataagagacgtcctcatccagcagggctatgccgagctcacggaggagtcctacgagtccaaggttaatattctcagggctgctattaacaagctagtctgtgatggaccaaatggatgcaagtgtcttgggccagagagagttgcgcagcttcaagacattgcccgtcagaagcttttaggtttgttctgtcagtcaaaaccaagggagaagattgttcccaagtggcatgaaaagccctacgagtggaatcaggttgatccaaagctggtcatggagcaggccgaccgtgagagcagcagagggaagaacacctttctctaccagctccacaaactggttgtgctcggcacctgagcatgtccacaggtggcctccagcacacccctcaggaagctgtggaggctggattccaggctccctccgcagactgactttcctctgtgtctgggtgttacagtctgtgcccactgcatcctaaaggccttttctttcttcttttctctttgggtgatagtcagagagtggtgtttttgttcaggtgggaaggattggaaactctagtcttttctagaaacagaaaatcactgtattaaatattttggaaagattgttctgaaagaagtctgtttggataaagagctgtattttgctttaaatttattaaggtaaatataagtagttaatcttagatgtaaggttccagaatgtgcttacatattctgttctgttacagtgatttaaaccagtagtataggaaaaaacttaaaaaaacaaaaaaaccatgtagtattttctgatttttttttccatgagggaaaatatctaatttttataagactaagttgagttatacttcttggttcacattttggaaatcagagattacagattacatggccatagcttatctgtgttaaaacaataaaagcattaaatg

SEQ ID NO: 280914 - DNA, 3576 bp, Artificial Sequence
  derived and/or modified sequence
atgcttagaaagctgacaatcgagcagatcaacgattggttcaccatcggtaagactgtgaccaacgtcgagctgctgggagcaccaccagctttcccggccggcgctgcccgggaggaggtacagcgtcaggacgtagctccaggggccggaccagcagctcaagcacctgccctggcacaagcaccagctagacctgcggccgcctttgagagaagcctttcacagcgaagctctgaagtggagtacattaataagtatcggcagttggaagctcaagagctggatgtttgccgctccgttcagcctacctccggtcctggtcctagaccgagtcttgccaagttgtcctccgtgacttgcattcctggcacaacctataagtaccctgatttgcctatcagtcgctacaaagaggaggtggtgtctttgattgagagcaacagtgtggtcatcatacacggggctaccggcagtggtaaaagcacacagcttcctcagtacatcctggatcactacgtgcaacgcagtgcgtactgttctatcgtagtaacacagccacggaagattggcgcatcctccatagctagatggatctctaaggagagagcttggacactcgggggggttgtgggataccaggtggggcttgagaagatcgctaccgaggacacccgcttgatttacatgaccactggcgttttattgcaaaaaatagtgtccgccaagagtctcatggagtttactcacatcataatcgatgaagtgcatgaaaggactgaagaaatggattttttgttactagtagtcagaaagctgctgcgtactaatagccgctttgtgaaagtcgtcttgatgtccgctaccatttcctgtaaggaattcgctgactatttcgccgtgccagtgcagaacaaaatgaaccctgcatatatctttgaagttgaaggaaagccgcattcggtcgaagagtattatctgaatgacctggaacatatccaccactccaagctctccccgcacctcctcgaggagcctgtcatcactaaggatatctacgaggtggctgttagcctcatacagatgttcgacgacctggacatgaaggagagcggaaataaggcctggagcggggcccagttcgtactggaacggtcatctgtgttggtgttcctgcctggactgggagaaattaattatatgcacgagctccttacatctcttgttcacaagaggttacaggtctaccccctgcacagctccgtggctttggaggaacaaaataacgtgtttctctcacctgttcccggatacaggaagattatcctttcaacaaatatagccgagtcttcagttacagtgcctgacgttaagtacgtcatcgatttttgcttaaccagaacattagtgtgcgacgaggacacaaattaccagagtctcaggctgtcatgggcctcaaagacatcttgcaaccagaggaaggggagggctgggagagtgagcagaggatactgttatcgactggtgcataaggatttttgggataattcaatcccggaccacgtggtgccagagatgctccgatgtccactgggctctaccatactgaaagtcaagctgctagatatgggtgagccccgcgctctcctcgccacagctctgagccctccgggtctgtccgatattgaacgcacaattctgttgctgaaggaagtgggcgcgctggctgtgtctggtcagcgcgaggacgaaaatccgcacgacggggagctgacattcttgggtcgtgtgttggcccaattgcccgtgaatcagcagctggggaagctcatcgttcttggacacgtcttcggctgcctggatgagtgtctcattattgcagctgccctcagccttaagaatttctttgctatgcctttccggcaacacctggacggctaccgcaacaaagtgaacttctcaggttcatctaaatctgactgcatcgcccttgttgaggcgtttaagacatggaaggcttgtcgccagaccggtgaactccggtacccaaaggatgaattgaattggggacgactgaactatatccaaattaaacgcatccgagaagtggccgagttatacgaggagctcaagacccgtatttctcagttcaatatgcatgtggattcgcgccgaccggtgatggatcaggagtacatatataagcagaggttcatcttacaggtggtgttggcaggtgccttttacccgaattattttacctttgggcaaccggatgaggagatggcagtccgtgaactggcgggcaaggaccccaaaacaacagtggtacttaaacacatccccccctatggctttctgtactacaaacagttgcagtccctgtttaggcaatgcggtcaggtaaagtccattgtgttcgacggcgccaaggcgttcgttgagttctccaggaatccgacagaacgatttaagaccctacccgccgtgtacatggccatcaagatgtctcagttaaaggtttctttggagttgagtgtccacagcgccgaggagatcgaaggaaaagttcaggggatgaatgtgagtaaattgcggaacactagggtgaacgtggattttcagaagcagactgtcgaccctatgcaggtctcttttaacacttccgacaggtcccagaccgtgacggatctgctgttgactattgatgtcacagaagtcgtggaagtgggccatttctggggttaccgcatcgatgaaaacaacagcgagattcttaaaaagctgacagccgagatcaaccaactaacattagtacccctgcccacacatcctcatccagacttagtctgcctagctccattcgccgactttgacaagcagcgctacttccgcgcgcaagtgctgtacgtgtccggcaattctgccgaggtattctttgttgactatgggaataaatctcatgtggatttacacctcctgatggaaataccatgccagttcctggagctgccctttcaggcactggaatttaaaatttgcaaaatgcgacccagcgccaagtccttggtgtgtggaaaacactggagcgacggcgcctcacagtggttcgcttccctggtgtcaggctgtacactgcttgtcaaggtctttagtgtggtacacagcgtcctacatgtggatgtgtatcaatactccggtgtgcaggacgccatcaacattagagacgtgctaatccagcagggatatgccgaattaaccgaagagtcctacgaatctaaagttaacattctcagagctgctatcaacaaactcgtttgtgatggaccgaatggctgtaaatgtctgggacctgagagagtggcccagttacaggacatcgcccggcagaagctgttaggacttttctgtcaatcaaagcctagagaaaagatagtccctaaatggcatgagaagccctatgagtggaaccaggtagatccaaagctggttatggaacaggcagacagggagtcatcccgtggaaaaaacactttcctttaccagttgcataaactggtagtcctgggcacctag

SEQ ID NO: 280915 - DNA, 3576 bp, Artificial Sequence
  derived and/or modified sequence
atgctgaggaagctgaccatcgagcagatcaatgactggttcaccatcggcaagacagtgaccaacgtggagctgctgggcgcccccccagccttccctgctggggccgcccgggaggaggtgcagaggcaggatgtggcccctggggccggccctgctgcccaggccccagccctggcccaggccccagcccggcctgctgctgcctttgagaggagcctgagccagaggagcagcgaggtggagtacatcaacaagtaccggcagctggaggcccaggagctggatgtgtgccgctctgtgcagcccaccagcggccctggcccccggcccagcctggccaagctgagctctgtgacctgcatccctggcaccacctacaagtacccagacctgcccatcagccgctacaaggaggaggtggtgtccctgattgagagcaacagcgtggtgatcatccacggggccactggaagtggcaagagcacccagctgccccagtacatcctggaccactacgtgcagaggtctgcctactgcagcatcgtggtgacccagcccaggaagatcggggccagcagcatcgcccgctggatcagcaaggagcgggcctggaccctgggcggcgtggtgggctaccaggtgggcctggagaagatcgccacagaggacaccaggctcatctacatgaccaccggggtgctgctgcagaagatcgtgtctgccaagagcctgatggagttcacccacatcatcattgatgaggtgcatgagaggacagaggagatggacttcctgctgctggtggtgaggaagctgctgcggaccaacagcagatttgtgaaggtggtgctgatgtctgccaccatcagctgcaaggagtttgctgactactttgctgtgcctgtgcagaacaagatgaacccagcctacatctttgaggtggagggcaagccccacagcgtggaggagtactacctgaatgacctggagcacatccaccacagcaagctgagcccccacctgctggaggagcccgtcatcaccaaggacatctatgaggtggccgtgtccctcatccagatgtttgatgacctggacatgaaggagagcggcaacaaggcctggagcggggcccagtttgtgctggagaggagctctgtgctggtgttcctgcccggcctgggggagatcaactacatgcatgagctgctgaccagcctggtgcacaagaggctgcaggtgtaccccctgcacagctctgtggccctggaggagcagaacaacgtgttcctgagccctgtgcccggctacaggaagatcatcctgagcaccaacattgctgagagctctgtgacagtgcctgatgtgaagtatgtgattgacttctgcctgaccaggaccctggtgtgtgatgaggacaccaactaccagagcctgcggctgtcctgggccagcaagaccagctgcaaccagaggaagggccgggccggccgggtgtcccggggctactgctaccgcctggtgcacaaggacttctgggacaacagcatcccagaccacgtggtgcctgagatgctgcgctgccccctgggcagcaccatcctgaaggtgaagctgctggacatgggagagccccgggccctgctggccacagccctgagccccccaggcctgagtgacatcgagaggaccatcctgctgctgaaggaggtgggcgccctggccgtgtctggccagcgggaggatgagaacccccatgatggagagctgaccttcctgggccgggtgctggcccagctgcctgtgaaccagcagctgggcaagctgattgtgctgggccacgtgtttggctgcctggatgagtgcctgatcatcgccgccgccctgagcctgaagaacttctttgccatgcccttccggcagcacctggatggctacagaaacaaggtgaacttcagcggcagcagcaagagtgactgcatcgccctggtggaggccttcaagacctggaaggcctgccggcagacaggagagctgcgctaccccaaggatgagctgaactggggccgcctgaactacatccagatcaagaggatccgggaggtggccgagctgtatgaggagctgaagacccgcatcagccagttcaacatgcacgtggacagccggcggcctgtgatggaccaggagtacatctacaagcagcgcttcatcctgcaggtggtgctggccggggccttctaccccaactacttcaccttcggccagccagatgaggagatggctgtgcgggagctggccggcaaggaccccaagaccaccgtggtgctgaagcacatccccccctacggcttcctgtactacaagcagctgcagagcctcttccggcagtgtggccaggtgaagagcatcgtgtttgatggagccaaggcctttgtggagttcagcaggaaccccacagagcgcttcaagaccctgcctgctgtgtacatggccatcaagatgagccagctgaaggtgtccctggagctgtctgtgcacagcgctgaggagattgagggcaaggtgcagggcatgaatgtgtccaagctgaggaacaccagggtgaatgtggacttccagaagcagacagtggaccccatgcaggtgtccttcaacaccagtgacaggagccagacagtgacagacctgctgctgaccattgatgtgacagaggtggtggaggtgggccacttctggggctacagaattgatgagaacaacagcgagatcctgaagaagctgacagctgagatcaaccagctgaccctggtgcccctgcccacccacccccacccagacctggtgtgcctggccccctttgctgactttgacaagcagcgctacttccgggcccaggtgctgtatgtgtctggcaacagcgctgaggtgttctttgtggactatggcaacaagagccacgtggacctgcacctgctgatggagatcccctgccagttcctggagctgcccttccaggccctggagttcaagatctgcaagatgaggccttctgccaagagcctggtgtgtgggaagcactggagcgatggagccagccagtggtttgccagcctggtgtctggctgcaccctgctggtgaaggtgttttctgtggtgcacagcgtgctgcacgtggatgtgtaccagtacagcggcgtgcaggatgccatcaacatcagagatgtgctgatccagcagggctacgccgagctgacagaggagagctatgagagcaaggtgaacatcctgcgggccgccatcaacaagctggtgtgtgatggccccaacggctgcaagtgcctgggccctgagcgggtggcccagctgcaggacatcgcccggcagaagctgctgggcctcttctgccagagcaagccccgggagaagatcgtgcccaagtggcatgagaagccctatgagtggaaccaggtggaccccaagctggtgatggagcaggccgaccgggagagcagccggggcaagaacaccttcctgtaccagctgcacaagctggtggtgctgggcacctag

SEQ ID NO: 280916 - DNA, 3576 bp, Artificial Sequence
  derived and/or modified sequence
atgctgcggaagctgaccatcgagcagatcaacgactggttcaccatcggaaaaactgtgacaaatgtggaactgcttggagcccctcccgccttccccgcaggggctgcccgggaggaggtgcagagacaggacgtcgctccaggtgcaggccccgcagcgcaggctcctgcacttgcacaggcccccgccaggcctgcggccgcgttcgagcgatccctgtcccagcggtcatcagaggtggaatatattaacaagtacaggcagttagaggcgcaggaacttgatgtatgcaggtccgtgcagccgacctccggccctggccctagaccctccctggcaaagctgtcaagtgtgacatgtattccgggtactacgtataagtatcctgacctgccaatcagcaggtataaggaagaagtcgtgtccctgatagaatctaatagcgtcgttatcatccacggcgcgacggggtcgggcaagtccactcagctgccacagtacattctggatcactatgtgcagcgaagcgcttactgttcaatcgtggtgacccagccacgaaagatcggcgccagctccatcgcaaggtggattagtaaggagcgcgcctggacactggggggtgtggttggttatcaagtgggtctggagaagattgccacagaggacactcggttgatctacatgaccaccggagttctgctgcaaaaaatcgtgtccgcaaagagcttaatggaatttacacatataatcatcgacgaggtgcatgaacgcactgaagaaatggacttcctgttactggtcgtcagaaaactgctgagaaccaattcacgctttgtcaaggtcgtgctcatgtctgccacgatcagttgtaaggaattcgcggactactttgcggtacccgtgcaaaacaagatgaacccagcgtatattttcgaagtagaagggaagccacacagtgtcgaagagtactacctcaatgatctcgagcatatccatcattccaagctcagcccacacctgttagaagaacccgtgattaccaaggatatctatgaagtagccgtatctctgatccagatgttcgacgatctggatatgaaagaaagcggaaacaaggcatggtctggcgcacaattcgtcctggaacgctcctcggtccttgtctttctcccaggccttggtgagattaactatatgcacgagttgctgacctctctggtccataagaggctgcaggtgtaccctctgcacagtagcgtggcgttagaagagcagaataacgtgttcctgagtccagtgcccgggtatagaaagatcattctaagcacaaacatcgctgaatcttcagtgacagtgcccgatgttaagtatgtaattgacttttgtctgacacggacgctcgtgtgtgacgaggataccaactaccaatccttacgactgagctgggcaagtaagacatcttgcaaccagcgaaagggcagagccggccgcgtcagccgggggtactgttacaggctcgttcacaaagacttttgggacaactcgattcctgaccatgtcgttccggaaatgcttcgctgcccactcggctctacaatcctgaaggttaaactgttagatatgggagaaccgagagctctcctcgcaaccgctctctcgccacccggactgagcgatattgaaaggactattctgctgttaaaagaagtgggcgctttggctgtctccgggcagagagaggacgagaaccctcatgacggtgagctgacttttttgggccgcgtgctggcacagctgcctgtgaatcagcagttgggcaaactaatagtactgggacacgttttcggttgcctggacgaatgcttaatcatcgccgccgcattgagcttaaagaacttcttcgctatgcccttccgccaacacttggatggctataggaacaaggttaactttagtggctctagcaaatctgattgtatcgcgttagtggaggcgttcaagacgtggaaagcctgtcggcagaccggcgagctaaggtaccccaaggacgagctcaattggggcagattgaactacattcagatcaagcgtatacgggaggtggctgaactgtacgaggagctgaaaacaagaatttcccagttcaatatgcatgttgacagcagacggccagtcatggaccaggaatatatctataaacagcgcttcatcctgcaggttgtactcgcaggggccttctatcctaattacttcacatttggtcagcccgacgaagaaatggctgtgagggagcttgccggcaaagatccaaaaactactgttgtgctgaagcatatccctccttatggctttctgtactataagcagttgcagagtctgtttagacaatgtggtcaggtgaaatccattgtgttcgatggagctaaggcgtttgtggagttctctagaaatccaactgaacggttcaaaaccctgccagccgtatatatggctattaaaatgagccagctgaaggtgagcttggaactaagcgtccactcagccgaggaaattgagggaaaggtgcaaggcatgaatgtgagcaaactgcgcaatacccgggtcaacgtggatttccaaaagcagaccgtggaccccatgcaggtcagtttcaacacttcagaccgttctcagactgttactgatctgcttctgacgatcgatgtaacagaagtggtggaggtgggacacttttggggttatagaatagatgagaacaactctgagattctcaaaaaactcactgccgaaattaaccaactcactctggtccctctccccacccacccgcacccagacctcgtctgtctggccccctttgcggacttcgacaaacagaggtactttcgagcccaggtgctgtacgtttccggtaatagtgccgaagttttctttgtggattacggcaacaagtcgcacgtggatctccacctcctgatggagatcccttgccagttcctggaattaccctttcaagcgctcgagtttaaaatctgcaaaatgcggccatctgccaagtccctggtttgcgggaaacattggtccgatggagccagccagtggttcgcttctctggtgtcaggatgtacgctattggtcaaggtattttctgtggtacactcggtgcttcacgtagatgtatatcagtacagcggtgttcaggatgctatcaatatcagagacgttttgattcaacaaggctacgctgaactgacagaggagtcttacgagtctaaggtgaacattctacgcgccgcaataaataaattagtttgtgatggcccaaatggatgtaaatgcctcggacctgagcgggtggcccagctgcaggacatcgccaggcagaagttgctgggattattttgccagtctaagcctcgcgagaagattgtgcctaaatggcacgaaaagccatatgaatggaaccaggtcgatcccaaactggtcatggaacaagctgatagggaaagcagtcgcggcaagaacacttttctttaccagctgcacaagctggttgtcctaggaacctag

SEQ ID NO: 280917 - DNA, 3576 bp, Artificial Sequence
  derived and/or modified sequence
atgctcaggaagttaacaatcgagcaaatcaatgactggttcaccataggtaagacggtgacaaatgtggagttactgggcgctccacctgcctttcctgcaggcgctgctcgggaagaagtgcagcggcaagatgttgcccctggggcagggccagcagctcaggcaccagcgttagcccaggcccctgccagaccggcagcagccttcgaaagatccctgtctcagaggagtagcgaagtcgaatacataaacaagtatagacaacttgaggctcaagaacttgacgtgtgtagaagtgttcaaccaacttctgggccaggaccacgaccaagtttggcgaaattgagcagcgtaacatgcatccccggaaccacttataaatatcccgacctgcccatctccagatacaaggaagaagtggtgagcttgatcgaaagcaatagtgtggtgattatacatggggcaacaggctcaggcaagtctactcagctgccacagtacatcctggaccactacgtacagaggtcggcttactgctccattgtagttacgcagcctcgtaagatcggggctagtagcatcgcacgctggatttccaaagaacgagcctggacactaggaggtgttgtaggctatcaggtgggcctggagaagatcgcgacagaagacacccgtctcatatacatgactacaggagtcttacttcagaaaatcgtgtcagccaagtctttaatggagtttacgcacatcatcatcgatgaagtacacgagagaaccgaagaaatggatttcctgctgctggtggtaagaaagctgctgcgtacaaactctcgatttgtgaaagttgttctgatgtcggcgactatctcttgcaaagagttcgcagactacttcgccgtcccagtgcagaataaaatgaaccccgcttacattttcgaagtggaaggcaagccacactccgtggaggagtattacctgaatgatctggaacacatccaccactccaagctcagcccacacctgctggaagaacctgttattacaaaggacatttatgaggtagctgtttcattaatccagatgtttgacgatctcgatatgaaagagagtggtaataaagcttggtcgggggctcagttcgtgctggaaaggagttctgtactggtcttcttaccaggattgggagaaataaactacatgcacgagcttctgaccagcctcgtacataagcgtctgcaggtgtacccactgcacagcagtgttgcccttgaagagcagaataatgtgtttctaagtccggtacctggttatagaaagatcattctgtccacaaacattgccgagagctcagtgaccgtcccagacgttaagtatgtgattgatttctgtctaacgcgcaccctcgtgtgtgatgaagacaccaactatcagagcctgaggcttagttgggcaagtaaaacatcttgcaaccagagaaaaggcagggcagggcgagtgagccggggatattgctataggttagtgcacaaagatttctgggacaactctattcctgatcatgtcgtgcctgagatgttgcgttgccccctgggatcaacgattttgaaggtgaagctcctggatatgggcgagccccgagcccttctggccacagccctgtcccccccaggattaagcgacatcgagcggacaatacttcttttaaaagaggtcggtgccttggccgtgagtggtcagagggaggacgaaaacccgcacgatggcgagctgacttttctcggtagagtattagcccaactgcccgtgaatcagcagttaggaaaactgattgtgctgggccatgtgtttggctgtctcgacgaatgcctgatcattgcagccgcactgtccctgaagaacttcttcgccatgccgttcaggcagcacctggatggctaccgtaacaaggtcaatttctcgggctctagtaaaagcgattgcattgccctggtcgaggccttcaaaacgtggaaggcatgtagacagacaggcgagctccggtaccccaaggatgaactcaactggggaaggctcaactatatacagatcaaacgaatcagagaggtcgcagagctttacgaggagcttaagaccagaatatcccaattcaacatgcacgtggattctagaaggcccgtgatggaccaggaatacatttacaagcagagattcattctccaggtagtgctggccggagcattctatcccaattacttcacgtttggacagccagatgaagaaatggcggtccgtgagctagccggaaaagaccctaagactactgttgtgctaaaacatatcccgccatacggattcctttattacaagcagctgcagtccttgtttcgccaatgcggccaggttaaatcaatagtctttgacggagcaaaagccttcgtggaattttctcgcaatcctacagaacgcttcaaaactctaccggctgtgtatatggccattaagatgagtcagctgaaggtgtccctagagctgtctgttcacagcgcagaagagattgaaggaaaggttcaaggcatgaatgtgagcaaattgcgaaacacccgcgttaacgtggattttcaaaagcagacagtggacccaatgcaggttagcttcaacacatccgatcgatcacagaccgtgacagacttgctcctgaccattgatgtgaccgaggtggtggaggttggccatttctggggatacagaatagatgaaaacaacagtgaaatcctcaagaagctaaccgccgagatcaatcagctcactctggtgcctttacccacccacccccacccagatttagtgtgcctggcgccattcgcagactttgacaagcagaggtatttccgggctcaggtgctttacgtctccgggaatagtgcggaagtgtttttcgtggactatggcaacaaatcccacgtggacctgcatctcctgatggaaattccgtgccaatttttggaattgcctttccaggccctggagttcaaaatctgtaagatgcggccatcagccaaatcactcgtgtgcggaaagcactggtccgatggcgcatcccagtggttcgccagtctcgtgagcggatgcaccctgctcgtgaaagttttctctgtagttcatagtgtgctccacgtagacgtgtaccagtactcaggagtgcaggacgccattaatatcagggacgtgctgatccaacagggctatgccgaactgacagaagagtcttatgagtcgaaagtaaatatattaagagcagcgattaacaagcttgtgtgtgacgggccaaacggttgtaaatgtctgggacctgaaagagttgcccagttacaggatatcgctcggcagaagctgctcgggctcttctgccagagcaaaccaagagagaagatagttcccaaatggcacgagaagccttacgaatggaatcaggtggaccccaagcttgttatggagcaggccgaccgggaaagttcaagaggcaaaaacacgttcctttaccagttgcataagctggttgttcttggcacctag

SEQ ID NO: 280918 - protein, 170 aa, Artificial Sequence
  derived and/or modified sequence
MASEAEKTFHRFAAFGESSSSGTEMNNKNFSKLCKDCGIMDGKTVTSTDVDIVFSKVKAKNARTITFQQFKEAVKELGQKRFKGKSPDEVLENIYGLMEGKDPATTGATKATTVGAVDRLTDTSKYTGTHKERFDESGKGKGIAGREEMTDNTGYVSGYKGSGTYDKKTK

SEQ ID NO: 280919 - DNA, 513 bp, Artificial Sequence
  derived and/or modified sequence
atggcttctgaggctgagaagacattccatcgctttgccgcattcggggaatcctcgagctcagggaccgagatgaacaacaaaaacttcagtaagctatgtaaggattgcggcataatggatggcaagaccgtgacttcaacagacgtagacatcgtgttctccaaggtcaaggcaaagaatgcacgcactatcacatttcaacaattcaaagaagctgtgaaagaacttggccagaaacgctttaaaggcaagtctccagacgaagtcctggagaatatatatggtcttatggaaggaaaggatcctgccaccacgggggcaacaaaggcgacaactgtgggcgccgtggaccgactgactgacacaagcaagtatactggaactcacaaagaacgctttgatgaatccggtaaaggcaaaggaatagccggtcgcgaagagatgaccgataatactggctacgtgtccggttacaaaggaagcgggacttacgataagaaaacaaagtag

SEQ ID NO: 280920 - DNA, 513 bp, Artificial Sequence
  derived and/or modified sequence
atggcctccgaagccgaaaaaacctttcatcgttttgctgcgttcggggagtcgtctagcagcggcactgaaatgaataacaagaacttctccaaactgtgtaaagactgtggaatcatggacggcaagactgtgacatctacagacgtggacattgttttttcgaaggtgaaggctaaaaacgcccggactattacatttcagcagtttaaggaggcagtgaaggaacttggtcagaaacgatttaaaggaaaatcacccgacgaggtcctggaaaatatttacgggctgatggaaggaaaagatcccgccactaccggcgctacaaaagctaccaccgtgggagctgtggataggctgacagatactagcaaatacacggggacccataaggaaagatttgacgagagcggcaagggtaagggaattgcgggtcgggaagagatgacagataacaccggatacgtatcgggctataagggaagcggcacctatgacaagaagacaaaatag

SEQ ID NO: 280921 - DNA, 513 bp, Artificial Sequence
  derived and/or modified sequence
atggccagcgaggccgagaagaccttccacagatttgctgcctttggagagagcagcagcagcggcacagagatgaacaacaagaacttcagcaagctgtgcaaggactgtggcatcatggatggcaagacagtgaccagcacagatgtggacatcgtgttcagcaaggtgaaggccaagaatgcccggaccatcaccttccagcagttcaaggaggccgtgaaggagctgggccagaagcgcttcaagggcaagagcccagatgaggtgctggagaacatctacggcctgatggagggcaaggaccctgccaccaccggggccaccaaggccaccaccgtgggcgctgtggaccggctgacagacaccagcaagtacacaggcacccacaaggagagatttgatgaaagtggaaaaggaaaaggaattgctggccgggaggagatgacagacaacacaggctacgtgtctggctacaagggcagcggcacctatgacaagaagaccaagtag

SEQ ID NO: 280922 - DNA, 513 bp, Artificial Sequence
  derived and/or modified sequence
atggccagcgaggccgagaagaccttccaccggttcgccgccttcggggaatcctcttccagcggcacagaaatgaataataaaaacttctctaaactatgtaaggattgcgggattatggacgggaagacggtgacaagtacggacgtggatattgtgttctcgaaagtcaaagctaaaaatgctagaacaataactttccaacagttcaaggaggccgtgaaggagctggggcagaagagatttaaggggaagtctcccgacgaagtgttagagaacatttatggactgatggagggaaaagatcctgccacaacaggggccactaaggcaactacggtgggcgctgtggacaggcttactgatactagcaaatacactggaactcacaaggagcggttcgacgaatcaggcaagggaaaaggaatcgcaggccgggaggaaatgaccgacaacacaggctacgtctccggctataagggtagcggaacatacgacaagaagacgaaatag

SEQ ID NO: 280923 - DNA, 513 bp, Artificial Sequence
  derived and/or modified sequence
atggccagcgaggccgagaagaccttccaccggttcgccgccttcggagaaagcagttcttccggaacagagatgaacaataagaatttttcaaaactctgcaaggattgcggtatcatggacggcaagacagtcacctctacagacgtggatattgtttttagtaaagtcaaagccaaaaatgcacgaaccattacttttcagcagtttaaggaggctgttaaggaactcggacagaagagattcaaaggaaaatcccccgatgaggtgctggagaacatctacggtctgatggagggtaaagacccggcaacgactggcgcaacgaaggctaccacagtgggggctgtggacaggctcacggatacgtcaaaatatacaggcacacataaggagcgtttcgatgaatcaggaaaagggaaggggatcgccggtcgagaggaaatgacggataacacagggtatgtgtcaggttacaagggatccggtacgtatgacaaaaagacaaaatag

SEQ ID NO: 280924 - DNA, 513 bp, Artificial Sequence
  derived and/or modified sequence
atggcaagtgaagcagaaaagactttccacagatttgcggctttcggagaaagctcctcatccggcacagaaatgaataacaaaaattttagtaagctgtgcaaagactgcggaataatggacgggaaaaccgtgacctcgaccgacgtggacatagtattttccaaggttaaggccaaaaatgctcggaccattacctttcagcagtttaaagaagccgtgaaagaactgggccagaagagattcaagggtaagtctcccgatgaagtccttgaaaacatctacggcctaatggaggggaaggatccagccactacaggagctacgaaagcaaccactgtcggcgcagtcgataggctgaccgataccagcaagtacacaggcacacacaaggagcgcttcgacgagagtgggaaaggaaaagggatagctggcagggaagaaatgaccgataataccggctatgtctcaggatacaagggatccggaacttatgataagaaaaccaagtag

SEQ ID NO: 280925 - DNA, 513 bp, Artificial Sequence
  derived and/or modified sequence
atggcctctgaggccgagaaaactttccatcggttcgctgccttcggggaatccagcagttctgggacagagatgaataacaaaaacttctccaagttgtgcaaggattgcggaattatggacgggaaaacagtgacatcaactgacgttgacatagtgttttccaaggtaaaggcaaaaaatgcccgtactattactttccagcaatttaaggaggccgtaaaagaactaggccagaaacgatttaagggaaagtctccggatgaagtgctggaaaatatctatgggcttatggagggtaaggacccagccaccaccggggctacgaaagccaccactgtcggcgcagtggataggctgacagacacttctaagtacaccgggactcataaagagcggttcgacgagtctgggaagggaaagggaatcgccggacgggaggaaatgactgacaacactggctacgtcagtggctataaaggttcaggcacgtatgacaagaaaacgaagtag

SEQ ID NO: 280926 - DNA, 703 bp, Artificial Sequence
  derived and/or modified sequence
gggaagggtcagaccaccatccgggtactctaaggtacataaaagagtcctccctcccccttctccttcacccccaagtgtctcccacgactgccctccccgacctctagctgaccatggcatcagaggcagaaaaaacattccatcggtttgctgcgtttggagaatcatcaagcagtggcactgaaatgaacaacaagaacttctccaagctgtgcaaagactgtggcatcatggatggcaagacagtcacctccacggacgtggacatcgtgttcagcaaagtcaaggccaagaacgcccgaaccatcacgtttcaacagttcaaagaggcagtgaaggaactgggccagaagcgcttcaaagggaagagtccagatgaagtcctggagaacatttatggactcatggagggcaaagacccagccaccactggcgctactaaagcaacaacagtgggtgcagtggaccgtttgacagacaccagcaagtacaccggcacccacaaggagcgctttgatgagagtggcaagggcaagggcattgcgggacgggaagagatgactgacaacacaggctatgtgagtggttacaagggttctggcacctacgataagaagaccaagtagagaggagcttcatctcagcctgctagccccctgaccctgcatgtttaacaccagggagcttggaaaacaataaa

SEQ ID NO: 280927 - DNA, 752 bp, Artificial Sequence
  derived and/or modified sequence
gccaaccggctcccacatatctgcacacacttaaatacaaaggccgggaagggtcagaccaccatccgggtactctaagtcctccctcccccttctccttcacccccaagtgtctcccacgactgccctccccgacctctagctgaccatggcatcagaggcagaaaaaacattccatcggtttgctgcgtttggagaatcatcaagcagtggcactgaaatgaacaacaagaacttctccaagctgtgcaaagactgtggcatcatggatggcaagacagtcacctccacggacgtggacatcgtgttcagcaaagtcaaggccaagaacgcccgaaccatcacgtttcaacagttcaaagaggcagtgaaggaactgggccagaagcgcttcaaagggaagagtccagatgaagtcctggagaacatttatggactcatggagggcaaagacccagccaccactggcgctactaaagcaacaacagtgggtgcagtggaccgtttgacagacaccagcaagtacaccggcacccacaaggagcgctttgatgagagtggcaagggcaagggcattgcgggacgggaagagatgactgacaacacaggctatgtgagtggttacaagggttctggcacctacgataagaagaccaagtagagaggagcttcatctcagcctgctagccccctgaccctgcatgtttaacaccagggagcttggaaaacaataaacatctgtgtgtgcagca

SEQ ID NO: 280928 - DNA, 513 bp, Artificial Sequence
  derived and/or modified sequence
atggccagcgaggccgagaagaccttccacagattcgccgccttcggcgagagcagcagcagcggcaccgagatgaacaacaagaacttcagcaagctgtgcaaggactgcggcatcatggacggcaagaccgtgaccagcaccgacgtggacatcgtgttcagcaaggtgaaggccaagaacgccagaaccatcaccttccagcagttcaaggaggccgtgaaggagctgggccagaagagattcaagggcaagagccccgacgaggtgctggagaacatctacggcctgatggagggcaaggaccccgccaccaccggcgccaccaaggccaccaccgtgggcgccgtggacagactgaccgacaccagcaagtacaccggcacccacaaggagagattcgacgagagcggcaagggcaagggcatcgccggcagagaggagatgaccgacaacaccggctacgtgagcggctacaagggcagcggcacctacgacaagaagaccaagtag

SEQ ID NO: 280929 - protein, 64 aa, Artificial Sequence
  derived and/or modified sequence
MKGQLRRKAERETFARRVVLLSQEMDAGLQAWQLRQQKLQEEQRKQENALKPKGASLKSPLPSQ

SEQ ID NO: 280930 - DNA, 66 bp, Artificial Sequence
  derived and/or modified sequence
agaggcgccgacagagagagattcgccagatgcgtgatcctggtgacccaggaggccgacgcctag

SEQ ID NO: 280931 - DNA, 66 bp, Artificial Sequence
  derived and/or modified sequence
aggggcgccgacagggagagattcgcacgttgtgtgatcttggtcacccaggaagccgatgcttag

SEQ ID NO: 280932 - DNA, 66 bp, Artificial Sequence
  derived and/or modified sequence
cggggagctgaccgggagagatttgcccgctgtgtgatcctggtgacccaggaggctgatgcctag

SEQ ID NO: 280933 - DNA, 66 bp, Artificial Sequence
  derived and/or modified sequence
cggggcgccgaccgggagcggttcgcccggtgcgtgatcctggtgacccaggaagccgacgcatag

SEQ ID NO: 280934 - DNA, 66 bp, Artificial Sequence
  derived and/or modified sequence
cgcggtgctgaccgcgaacgctttgccagatgtgtcatccttgtgacacaggaagccgatgcatag

SEQ ID NO: 280935 - DNA, 66 bp, Artificial Sequence
  derived and/or modified sequence
cgaggagcggacagggagcggtttgcgaggtgtgtaatcctagttactcaggaggctgatgcatga

SEQ ID NO: 280936 - DNA, 195 bp, Artificial Sequence
  derived and/or modified sequence
atgaagggtcaacttcggcggaaagctgaacgagaaacttttgccaggcgcgtcgttctcctttcacaggagatggatgctggtctccaggcatggcagctacggcagcagaaactgcaagaagagcagagaaagcaggagaatgccctcaagccaaagggtgccagcctgaaaagccctctccctagccagtag

SEQ ID NO: 280937 - DNA, 195 bp, Artificial Sequence
  derived and/or modified sequence
atgaaggggcaactacgccggaaggctgagagggaaacatttgctaggcgggtggtactgctctcccaggagatggacgctgggttgcaggcatggcagctgaggcagcaaaagctacaggaggagcagaggaaacaagagaatgccctcaagcccaaaggggcaagcctaaaatctcccctgcccagtcagtag

SEQ ID NO: 280938 - DNA, 195 bp, Artificial Sequence
  derived and/or modified sequence
atgaaggggcagctccgccggaaggccgaacgggagactttcgctagacgcgtagttctgttatctcaagagatggacgccggcctgcaggcctggcaactgcgtcaacagaagttgcaggaggaacagagaaagcaagagaacgccctgaaaccaaagggcgcatctttgaaatcccccttgcctagccagtag

SEQ ID NO: 280939 - DNA, 195 bp, Artificial Sequence
  derived and/or modified sequence
atgaagggccagctgcggaggaaggccgagcgggagacctttgcccggcgggtggtgctgctgagccaggagatggatgctggcctgcaggcctggcagctgcggcagcagaagctgcaggaggagcagaggaagcaggagaatgccctgaagcccaagggggccagcctgaagagccccctgcccagccagtag

SEQ ID NO: 280940 - DNA, 195 bp, Artificial Sequence
  derived and/or modified sequence
atgaagggccagctgcggcggaaggccgagcgggagaccttcgcccgccgagtagttttacttagtcaggagatggacgccgggctgcaggcttggcagctcagacagcagaaacttcaggaggagcaaagaaaacaagagaacgccctcaagccaaagggggcttcactgaagtcacccctcccctcacaatag

SEQ ID NO: 280941 - DNA, 195 bp, Artificial Sequence
  derived and/or modified sequence
atgaagggccagctgcggcggaaggccgagcgggagaccttcgcccgccgggttgtcctgctgtcccaggagatggacgccgggctgcaggcctggcagttgagacagcaaaaattacaggaggaacagaggaagcaggagaatgctctcaaaccaaagggagccagcctaaagtccccactgcctagccagtag

SEQ ID NO: 280942 - DNA, 195 bp, Artificial Sequence
  derived and/or modified sequence
atgaagggccagctgcggcggaaggccgagcgggagaccttcgccagaagagtggtgttactgagccaggagatggacgcaggactgcaggcctggcaattgaggcagcagaagctccaagaagagcagagaaagcaagaaaatgccctgaaaccaaagggggcaagccttaagtcacctctgcctagccagtag

SEQ ID NO: 280943 - DNA, 195 bp, Artificial Sequence
  derived and/or modified sequence
atgaaggggcaattacgccgaaaggcagagcgggagacattcgccaggcgggtcgtgctcctgtcgcaggaaatggatgcgggactccaggcctggcagctgaggcagcagaaacttcaggaggaacagcgaaaacaggaaaatgcactgaagcctaagggagcttctctcaaatctcctctaccctctcaatag

SEQ ID NO: 280944 - DNA, 195 bp, Artificial Sequence
  derived and/or modified sequence
atgaagggacaactccgccgtaaggcagaacgcgaaaccttcgcaaggcgtgtggtcctcttgtctcaggaaatggacgccggactgcaagcctggcaactcagacaacaaaagttgcaggaagagcagaggaagcaggagaatgctcttaaacccaaaggggcatcactgaagagcccgctgccctcccagtag

SEQ ID NO: 280945 - DNA, 195 bp, Artificial Sequence
  derived and/or modified sequence
atgaaaggccagttgcgcaggaaggccgagcgagagactttcgctaggagagtagtcttactgtcgcaagaaatggacgccggtctccaggcatggcagttaaggcagcaaaagctccaggaagaacagcgaaagcaggagaacgctttgaaaccaaaaggagcaagtctgaagagcccgcttcctagtcagtag

SEQ ID NO: 280946 - DNA, 195 bp, Artificial Sequence
  derived and/or modified sequence
atgaagggccagctgagaagaaaggccgagagagagaccttcgccagaagagtggtgctgctgagccaggagatggacgccggcctgcaggcctggcagctgagacagcagaagctgcaggaggagcagagaaagcaggagaacgccctgaagcccaagggcgccagcctgaagagccccctgcccagccagtag

SEQ ID NO: 280947 - protein, 163 aa, Artificial Sequence
  derived and/or modified sequence
MMPGQIPDPSVTTGSLPGLGPLTGLPSSALTVEELKYADIRNLGAMIAPLHFLEVKLGKRPQPVKSELDEEEERRKRRREKNKVAAARCRNKKKERTEFLQRESERLELMNAELKTQIEELKQERQQLILMLNRHRPTCIVRTDSVKTPESEGNPLLEQLEKK

SEQ ID NO: 280948 - protein, 134 aa, Artificial Sequence
  derived and/or modified sequence
MMPGQIPDPSVTTGSLPGLGPLTGLPSSALTVEELKYADIRNLGAMIAPLHFLEVKLGKRPQPVKSELDEEEERRKRRREKNKVAAARCRNKKKERTEFLQRESERLELMNAELKTQIEELKQERQQLILMLNR

SEQ ID NO: 280949 - DNA, 972 bp, Artificial Sequence
  derived and/or modified sequence
cctgctttctcgagcgctcctgcaccgtggggtggcggagccgggggactgcatggaacccgggacgcccccgcggggagaggagcgcgagcggccgcgggaggagggcgcccaaggcggcgggggaggttaaggctggcctgccactcctcctgctatgatgcctgggcagatcccggacccttcggtgaccacaggctccctgccagggcttggccccctgaccgggctccccagctcggccctgactgtggaggagctgaaatacgctgacatccgcaacctcggggccatgattgcacccttgcacttcctggaggtgaaactgggcaagaggccccagcccgtgaaaagtgagctagatgaggaagaggagcgaaggaaaaggcgccgggagaagaacaaagtcgcagcagcccgatgccggaacaagaagaaggagcgcacggagtttctgcagcgggaatccgagcggctggaactcatgaacgcagagctgaagacccagattgaggagctgaagcaggagcggcagcagctcatcctgatgctgaaccgacaccgccccacctgcatcgtccggaccgacagtgtcaagacccccgagtcagaaggcaacccactgctcgagcagctcgagaagaagtgaccatgggctgggaggaggtggaggaggaggaagaggagaaggaaaagtgacgaagagagaggaggaggggggccccagatggcccttcctttggtgcatgaaaaactgtacaatgaggttcagcacagccagcatcagccgagcttttttgtgaaactcagatcagccacccaggaggaagagcgggctgaggaaacccagagggaccaagcgctgagaccaaagttgaccctcgggtagggttgtcctgcctggggccccacttgaaggaggcaggacagaggcaccgaggccagggagacgcccaacgaggcagccctggg

SEQ ID NO: 280950 - DNA, 492 bp, Artificial Sequence
  derived and/or modified sequence
atgatgcccggccagatacccgaccccagcgttacgacaggctccctaccaggtttggggccactgacaggtctcccaagttctgcgctaactgtggaggaactcaaatacgccgacatacggaatctgggcgcaatgatcgcacccctgcactttctagaagtgaagctaggcaaaaggccgcaaccggtgaaatccgaactggacgaagaggaagagcggcgcaaacggagaagggagaaaaataaagtggctgccgcacgatgtagaaacaagaagaaagagcgcacagaattcctgcagagggagtccgaaagactggagctgatgaacgcagaattgaaaacccagatagaggaattgaaacaggaaagacagcagctgatcctcatgttaaaccgtcaccggccgacatgcatcgttcggaccgattcagttaaaacacccgaatcagagggcaaccctctgcttgagcaactggagaagaagtag

SEQ ID NO: 280951 - DNA, 492 bp, Artificial Sequence
  derived and/or modified sequence
atgatgcctggacagattccggaccctagcgttaccaccgggagtctgccagggctcgggccccttacggggctgccgtcttccgccctgacagtggaagaacttaagtacgccgacatccggaacctaggtgccatgattgctccattacattttctggaagtgaagcttggcaaacggccccagcccgtcaagtcggaactagatgaggaggaagagcggaggaaaagaaggcgggagaagaacaaggttgccgcggcccgttgtagaaataagaagaaagaacggacagagttcctccagagggagtccgagcggttagagctcatgaacgccgaactgaagacccaaatagaagagttaaagcaagaaaggcagcagctcatcctcatgttgaacagacaccgacccacctgtattgtgcgaactgactctgtgaaaacgcccgaatccgaagggaatccacttctcgaacagctagagaagaaatag

SEQ ID NO: 280952 - DNA, 492 bp, Artificial Sequence
  derived and/or modified sequence
atgatgccgggacagatcccagacccttctgtaaccactgggagcctccccgggctgggtccgctgacgggcctcccttcttcggccctgacggtggaggaactcaagtacgccgatattagaaatctgggtgcaatgattgccccactgcatttcttagaagtcaaactcggtaaacgcccccagccagtgaaatctgaattggacgaggaagaggagaggcgcaagcgacgacgcgagaagaacaaagttgcagccgcccggtgcaggaacaaaaagaaggagcgaacagagtttctgcagagggaatcagaacgactcgagctgatgaatgctgaactcaaaactcaaatcgaggagctgaaacaggaaaggcagcaactgattttgatgctcaataggcatcgccctacatgcattgtacgcacagactccgtgaaaactcccgagtctgaagggaaccctcttttagagcagctggaaaagaaatag

SEQ ID NO: 280953 - DNA, 405 bp, Artificial Sequence
  derived and/or modified sequence
atgatgcctggccagatacctgaccctagtgtgaccacaggttcactgcctggcctgggcccgttaacgggattaccctcctccgccttgacagtagaagagctgaagtacgcagacataagaaatctgggcgctatgatcgcgcccctgcacttccttgaagttaaattgggaaagagacctcagccagtaaagtcggagctcgatgaagaggaagagcgaaggaaacgccgaagagagaagaacaaagtagcggccgcccggtgtcgaaacaagaaaaaggagagaaccgaattcctgcagagggagtccgagaggctggaacttatgaacgcggagctcaaaactcagatagaggaactgaaacaggagagacaacagcttatcctgatgctgaaccgatag

SEQ ID NO: 280954 - DNA, 492 bp, Artificial Sequence
  derived and/or modified sequence
atgatgcctggccagatcccagaccccagcgtgaccaccggcagcctgcccggcctgggccccctgaccggcctgcccagcagcgccctgactgtggaggagctgaagtatgctgacatccggaacctgggcgccatgattgcccccctgcacttcctggaggtgaagctgggcaagaggccccagcctgtgaagtctgagctggatgaggaggaggagaggaggaagagaagaagagagaagaacaaggtggccgccgcccgctgcaggaacaagaagaaggagaggacagagttcctgcagcgggagagcgagcggctggagctgatgaatgctgagctgaagacccagatcgaggagctgaagcaggagcggcagcagctgatcctgatgctgaacagacaccggcccacctgcatcgtgaggacagattctgtgaagaccccagagagcgagggcaaccccctgctggagcagctggagaagaagtag

SEQ ID NO: 280955 - DNA, 405 bp, Artificial Sequence
  derived and/or modified sequence
atgatgcctggccagatcccagaccccagcgtgaccaccggcagcctgcccggcctgggccccctgaccggcctgcccagcagcgccctgactgtggaggagctgaagtatgctgacatccggaacctgggcgccatgattgcccccctgcacttcctggaggtgaagctgggcaagaggccccagcctgtgaagtctgagctggatgaggaggaggagaggaggaagagaagaagagagaagaacaaggtggccgccgcccgctgcaggaacaagaagaaggagaggacagagttcctgcagcgggagagcgagcggctggagctgatgaatgctgagctgaagacccagatcgaggagctgaagcaggagcggcagcagctgatcctgatgctgaacagatag

SEQ ID NO: 280956 - DNA, 492 bp, Artificial Sequence
  derived and/or modified sequence
atgatgcccggccagatccccgaccccagcgtgaccaccggcagcctgcccggactgggacccctaactggactacctagcagtgcccttaccgttgaggaactgaagtacgcagatattcgaaatttgggcgctatgattgcgccgcttcatttcctcgaagtgaagctggggaaacggccccagcccgtgaaatccgagctggatgaagaagaagaaagacggaagagaagaagagaaaagaataaagtagccgccgcaaggtgccgcaacaagaagaaagaacggacggagtttctgcagagggaatcagaacgcctcgaactgatgaacgccgaactgaagacccaaatcgaagagcttaagcaagaacgccagcagctaatcttaatgctcaatcggcacagacctacttgtatcgtccggactgatagcgtaaagactcctgagagcgaagggaatcccctgttagagcaactcgaaaagaagtag

SEQ ID NO: 280957 - DNA, 492 bp, Artificial Sequence
  derived and/or modified sequence
atgatgcccggccagatccccgaccccagcgtgaccaccggcagccttccgggtttaggccctttgacgggcctgccaagttcagctttgactgtggaggaacttaagtacgccgacatacgtaacttgggagcaatgattgcacctctccatttcttagaagttaaactcggaaagcggccccagccagtgaaatctgagctggacgaggaggaagagcgccggaaacggcggagggaaaagaacaaagtggccgccgcgcggtgccgcaacaagaaaaaggagaggaccgagtttctgcaaagggagtccgaacgactggagttgatgaacgccgaattaaagacccagattgaggagttaaaacaggaacgccagcagcttatccttatgctcaatagacataggccaacctgcatcgtgaggacagactctgtaaaaacaccggaatctgaggggaacccactgctggagcagctagagaaaaagtag

SEQ ID NO: 280958 - DNA, 492 bp, Artificial Sequence
  derived and/or modified sequence
atgatgcccggccagatccccgaccccagcgtgaccaccggcagccttcccggtctggggcccctgaccggactgccctctagcgcgttgaccgtggaggagcttaaatatgccgacatcagaaacttgggcgccatgatcgctccactgcattttttagaggtgaagctgggtaagagaccacagccagtgaagtccgaactggacgaagaggaggaacgcaggaagcgcaggcgagaaaaaaataaggtggctgctgcccgctgcaggaacaagaaaaaggagcgtacagaattcctccaaagagagtccgaacggcttgaattgatgaacgctgagctgaagactcagatcgaggagcttaagcaggaaagacagcagctcattctgatgctaaaccgtcaccgcccaacatgtatcgtccgaaccgattctgtgaagaccccagaatcggagggtaatcccctgctggagcagttggaaaagaagtag

SEQ ID NO: 280959 - DNA, 405 bp, Artificial Sequence
  derived and/or modified sequence
atgatgcccggccagatccccgaccccagcgtgaccaccggcagcctgcccgggttggggcccttgacaggcctcccatcatcggcattaaccgtagaggagctgaagtacgcagatatacggaacctcggggctatgatcgcacctttgcattttcttgaggttaagctagggaagcgtcctcaaccagtgaaaagcgagttggatgaagaggaagagcggaggaagcgtcgacgcgagaagaacaaggtcgcagccgcccgctgtaggaacaagaaaaaggaacgaaccgaatttctacagcgagaatccgaacgactggaactgatgaatgcagaactaaagacacagatagaagagctgaaacaggagcggcagcagctcattttgatgctgaacagatag

SEQ ID NO: 280960 - DNA, 492 bp, Artificial Sequence
  derived and/or modified sequence
atgatgcccggtcagattcccgatccctccgtcactactggttcactgcccggactagggccactgaccgggctgccctcttctgcactcacagtcgaagagctcaagtacgctgatatcaggaatttaggggcaatgatagcgcctctccattttctggaggttaagctgggcaagcgtcctcagccagttaaatccgagcttgacgaagaagaagagcgtcgcaagaggcgacgcgaaaagaataaggtagccgctgctcgatgtaggaataaaaagaaggagcggaccgagtttttgcagcgcgaaagcgagcggctggaactcatgaatgcagagttgaaaacacaaattgaggagctcaaacaggagaggcaacagcttattctgatgctgaaccggcaccggcctacctgcattgtgcgtaccgactctgtaaaaactcccgaaagtgagggcaacccgttactggagcagctggagaaaaaatag

SEQ ID NO: 280961 - DNA, 492 bp, Artificial Sequence
  derived and/or modified sequence
atgatgcccggacaaattcccgatccaagtgtcacaaccgggtccctaccaggtctcggacccttgacaggcctcccttcttctgcactgaccgtcgaggaactgaagtacgctgacatccgtaacctgggggcaatgatcgctccactgcactttctcgaggtaaagctgggaaagaggccccaaccggtcaaaagcgagctggacgaggaagaggaacgaaggaagcgacgacgagagaaaaataaggtggccgcagcgaggtgcagaaacaagaagaaagagaggaccgaatttctgcagagggaatcagaacggctggagctgatgaatgccgagctgaagacgcagattgaagaactgaaacaggaaagacagcagctgatacttatgttgaaccgccatcggccaacatgcattgtgagaactgattcagtgaagacaccagagagtgagggtaacccgctactggagcagctggagaagaaatag

SEQ ID NO: 280962 - DNA, 492 bp, Artificial Sequence
  derived and/or modified sequence
atgatgcccggacagatccctgacccttccgtcaccaccgggagtcttcctggtctgggaccgctcaccggcctcccatccagcgctttgaccgttgaagaattaaaatatgccgatatcagaaacctcggcgcaatgatcgcaccgctgcattttttggaagtcaaactggggaagcgtccacagcccgtaaagtcagaactcgacgaagaggaggagcgcagaaaaagaagacgcgagaagaacaaggtggctgcagcaaggtgtcgcaataaaaagaaggaaagaaccgaattcctgcaacgagaatcagaacgcctggaacttatgaacgcggaactgaagactcagatcgaagagctcaagcaagaacgccagcagctgatcttgatgcttaaccggcaccggccaacctgtatcgtgcgtaccgactctgtcaaaactccagagtctgagggaaatcctctgcttgagcagcttgaaaaaaagtag

SEQ ID NO: 280963 - DNA, 405 bp, Artificial Sequence
  derived and/or modified sequence
atgatgccgggacaaatacccgatccatccgtcacgactggttctttgcccggactgggccctctaactggcctaccctcatcagctttgactgtagaagagctaaaatatgccgatattcgtaacctgggggcaatgatcgccccactccacttcctggaggtcaaactaggcaaaaggcctcagccagtgaagtccgaattagatgaagaggaggagaggagaaagaggcgacgggaaaagaacaaggtggcggctgccagatgcaggaacaaaaaaaaggagagaaccgagttcctgcagagagagtctgagaggttagaactcatgaacgcggagctgaagactcaaattgaagagttaaaacaggaacgacaacagctgattctaatgctaaaccgttag

SEQ ID NO: 280964 - DNA, 492 bp, Artificial Sequence
  derived and/or modified sequence
atgatgcccggccagatccccgaccccagcgtgaccaccggcagcctgcccggcctgggccccctgaccggcctgcccagcagcgccctgaccgtggaggagctgaagtacgccgacatcagaaacctgggcgccatgatcgcccccctgcacttcctggaggtgaagctgggcaagagaccccagcccgtgaagagcgagctggacgaggaggaggagagaagaaagagaagaagagagaagaacaaggtggccgccgccagatgcagaaacaagaagaaggagagaaccgagttcctgcagagagagagcgagagactggagctgatgaacgccgagctgaagacccagatcgaggagctgaagcaggagagacagcagctgatcctgatgctgaacagacacagacccacctgcatcgtgagaaccgacagcgtgaagacccccgagagcgagggcaaccccctgctggagcagctggagaagaagtag

SEQ ID NO: 280965 - DNA, 405 bp, Artificial Sequence
  derived and/or modified sequence
atgatgcccggccagatccccgaccccagcgtgaccaccggcagcctgcccggcctgggccccctgaccggcctgcccagcagcgccctgaccgtggaggagctgaagtacgccgacatcagaaacctgggcgccatgatcgcccccctgcacttcctggaggtgaagctgggcaagagaccccagcccgtgaagagcgagctggacgaggaggaggagagaagaaagagaagaagagagaagaacaaggtggccgccgccagatgcagaaacaagaagaaggagagaaccgagttcctgcagagagagagcgagagactggagctgatgaacgccgagctgaagacccagatcgaggagctgaagcaggagagacagcagctgatcctgatgctgaacagatag

SEQ ID NO: 280966 - protein, 352 aa, Artificial Sequence
  derived and/or modified sequence
MFYALAIVCDDFFVPSLEKICERLHLSEDVAGATFMAAGSSTPELFASVIGVFITHGDVGVGTISVSFALQFIYDEQIVWWEGLVLIILYVFYILIMKYNVKMQAFFTVKQKSIANGNPVNSELEAGNDFYDGSYDDPSVPLLGQVKEKPQYGKNPVVMVDEIMSSSPPKFTFPEAGLRIMITNKFGPRTRLRMASRIIINERQRLINSANGVSSKPLQNGRHENIENGNVPVENPEDPQQNQEQQPPPQPPPPEPEPVEADFLSPFSVPEARGDKVKWVFTWPLIFLLCVTIPNCSKPRWEKFFMVTFITATLWIAVFSYIMVWLEQREGKQFQHGCSSVDCETHSQPLTP

SEQ ID NO: 280967 - DNA, 1059 bp, Artificial Sequence
  derived and/or modified sequence
atgttctacgccctggccatcgtgtgcgacgacttcttcgtgcccagcctggagaagatctgcgagagactgcacctgagcgaggacgtggccggcgccaccttcatggccgccggcagcagcacccccgagctgttcgccagcgtgatcggcgtgttcatcacccacggcgacgtgggcgtgggcaccatcagcgtgagcttcgccctgcagttcatctacgacgagcagatcgtgtggtgggagggcctggtgctgatcatcctgtacgtgttctacatcctgatcatgaagtacaacgtgaagatgcaggccttcttcaccgtgaagcagaagagcatcgccaacggcaaccccgtgaacagcgagctggaggccggcaacgacttctacgacggcagctacgacgaccccagcgtgcccctgctgggccaggtgaaggagaagccccagtacggcaagaaccccgtggtgatggtggacgagatcatgagcagcagcccccccaagttcaccttccccgaggccggcctgagaatcatgatcaccaacaagttcggccccagaaccagactgagaatggccagcagaatcatcatcaacgagagacagagactgatcaacagcgccaacggcgtgagcagcaagcccctgcagaacggcagacacgagaacatcgagaacggcaacgtgcccgtggagaaccccgaggacccccagcagaaccaggagcagcagccccccccccagccccccccccccgagcccgagcccgtggaggccgacttcctgagccccttcagcgtgcccgaggccagaggcgacaaggtgaagtgggtgttcacctggcccctgatcttcctgctgtgcgtgaccatccccaactgcagcaagcccagatgggagaagttcttcatggtgaccttcatcaccgccaccctgtggatcgccgtgttcagctacatcatggtgtggctggagcagagagagggcaagcagttccagcacggctgcagcagcgtggactgcgagacccacagccagcccctgaccccctag

SEQ ID NO: 280968 - DNA, 1059 bp, Artificial Sequence
  derived and/or modified sequence
atgttctacgccctggccatcgtatgcgacgacttcttcgtacccagccttgaaaagatctgtgagcggctgcatcttagtgaggatgttgcaggcgccacatttatggccgccggatccagtactcccgaactatttgcgtccgtgattggggtgtttatcacacatggcgatgtgggtgtgggaactattagtgtctcgtttgctttgcagtttatctacgacgagcagattgtatggtgggagggactggtcttgatcattctttacgtgttctacattttgatcatgaaatacaatgttaagatgcaagccttttttacagtgaagcagaagtccatcgcaaatgggaatcctgtcaattcagagttggaggctggaaacgatttttacgacggctcctacgacgatccttcagtaccgcttcttggccaggtcaaggaaaaaccccagtacggtaagaatcctgtagtgatggtggacgagatcatgtctagctcaccacccaagtttacgttccccgaagcaggcctgaggataatgataaccaataaattcgggccccgaacacgactgcggatggcttcaagaattattatcaacgaaaggcagcgccttatcaatagcgccaatggtgtgtcaagtaaacctctgcaaaatggccgccatgagaacattgagaatggcaatgtgcctgtcgaaaaccccgaggatccccagcagaaccaagaacagcaacccccaccccagccaccaccccccgagccagagccagtggaagctgactttctgtccccttttagtgtgcctgaggccagaggcgacaaggtgaaatgggtttttacctggccactcatttttctgctgtgcgtgacgatccccaactgcagcaaacctcggtgggagaaatttttcatggtgactttcatcactgctactctatggatcgccgttttttcctatattatggtctggctggagcagagggaggggaagcagttccagcatggatgctcgagtgtggactgtgaaacccacagccaaccactgacaccttag

SEQ ID NO: 280969 - DNA, 1059 bp, Artificial Sequence
  derived and/or modified sequence
atgttttatgccctggccatcgtgtgtgatgacttctttgtgcccagcctggagaagatctgtgagcggctgcacctgtctgaagatgtggccggggccaccttcatggccgccggcagcagcaccccagagctgtttgccagcgtcatcggggtcttcatcacccatggagatgtgggcgtgggcaccatctctgtgtcctttgccctgcagttcatctatgatgagcagatcgtgtggtgggagggcctggtgctgatcatcctgtatgtgttctacatcctgatcatgaagtacaacgtgaagatgcaggccttcttcaccgtgaagcagaagagcatcgccaacggcaaccctgtgaacagcgagctggaggccggaaatgacttctatgatggcagctatgatgaccccagcgtgcccctgctgggccaggtgaaggagaagccccagtatggcaagaaccctgtggtgatggtggatgagatcatgagcagcagcccccccaagttcaccttccctgaggccggcctgcgcatcatgatcaccaacaagtttggccccaggacccggctgaggatggccagccgcatcatcatcaatgaaaggcagaggctcatcaacagcgccaatggagtgagcagcaagcccctgcagaatggaagacatgagaacattgaaaatggaaatgtgcctgtggagaaccctgaggacccccagcagaaccaggagcagcagcccccaccccagcccccacctcctgagcctgagcctgtggaggccgacttcctgagccccttctctgtgcctgaggcccggggggacaaggtgaagtgggtgttcacctggcccctcatcttcctgctgtgtgtgaccatccccaactgcagcaagccccgctgggagaagttcttcatggtgaccttcatcacagccaccctgtggattgctgtgttctcctacatcatggtgtggctggagcagcgggagggcaagcagttccagcacggctgcagctctgtggactgtgagacccacagccagcccctgaccccctag

SEQ ID NO: 280970 - DNA, 1059 bp, Artificial Sequence
  derived and/or modified sequence
atgttctacgccctggccatcgtgtgcgacgacttcttcgtgccctcactcgaaaaaatatgcgagcgattacatctgtctgaggacgttgccggtgctactttcatggccgccggatccagcaccccagaactctttgccagcgtcattggggtgtttatcacacacggagatgtcggcgtgggcacaatatctgtcagctttgccctacagttcatatacgacgagcagatcgtgtggtgggaaggccttgtgcttataattctgtatgtgttttacattctgatcatgaagtacaacgttaaaatgcaagctttttttactgtgaagcagaaaagcatcgctaacgggaatcccgtcaattcagaactggaggccggcaatgatttctatgatggaagctacgatgatccatctgttcctctgttaggacaggtaaaggagaagccacagtatggaaaaaaccccgttgttatggtggacgaaattatgtcaagcagtccacctaagttcacattcccagaggctggactgcgcatcatgatcaccaacaaattcgggcctcgcacaagattgaggatggcttcccggattatcatcaacgaacgccagcggctgatcaatagtgcaaatggggttagcagcaagccccttcagaatggaaggcatgagaatatcgagaacggaaacgttccagtggaaaacccagaagacccccagcagaatcaagagcagcagccacccccccaaccccccccccccgagcccgagcccgttgaggctgattttctttctccattctcagtacccgaagccagaggagacaaagtaaagtgggtcttcacttggccactgatctttctgttgtgcgtcacaattcctaattgttcaaaaccgcggtgggaaaagttctttatggtcacatttatcactgcaactctgtggatcgccgtgttctcgtacatcatggtctggttggagcaaagggaaggaaaacaattccaacacggctgttcctcagtggactgtgagacacatagtcagccactgacgccatag

SEQ ID NO: 280971 - DNA, 1059 bp, Artificial Sequence
  derived and/or modified sequence
atgttctacgccctggcaatcgtgtgcgacgatttttttgtgccttcgctggaaaagatctgtgagcgcctacacttgagtgaagacgttgccggagccacatttatggctgcgggaagcagcactcccgagctattcgcaagcgtgatcggagtctttattacccacggtgatgtcggggtggggacaatttctgtgtcattcgccctgcagtttatatacgatgaacaaatcgtttggtgggagggactggtactgatcatactgtatgtattttacattctgattatgaaatacaacgttaaaatgcaggcattcttcacagtgaaacagaagtccattgctaacgggaatcctgtgaattccgaattagaagctgggaacgacttctatgacgggagctacgacgacccatcagtgccgttgctagggcaagtcaaagaaaagccccaatatggtaagaatcccgtcgttatggtcgatgaaatcatgtcctcatccccccctaagtttacttttccagaagccggtcttcgtatcatgatcactaacaagttcggcccacgcacacgtctgaggatggcatccagaatcatcataaatgagcggcaacggctgattaattctgcaaacggggtcagttccaaaccgcttcaaaatggcaggcatgagaatatagagaatggcaacgtgccagtggagaacccagaggaccctcagcaaaatcaggagcagcagcctccccctcagcccccaccccctgaacccgagcccgtggaggccgatttcctgtctccattcagcgtgcctgaggctagaggggataaggtgaagtgggtctttacttggccactgattttcctcctttgtgtaacaatacctaactgctcaaagccgcgatgggaaaagttcttcatggtgacattcataaccgcaaccctgtggattgctgtctttagttatatcatggtgtggctcgaacaacgcgagggaaagcaattccagcatgggtgctcatcagtggattgcgaaactcactcgcaacctctcaccccatag

SEQ ID NO: 280972 - DNA, 768 bp, Artificial Sequence
  derived and/or modified sequence
atgctgggcatctggcacaccgtgcccagctgcagaggcgaggacgccaagggcaaggactgctgctggtacgaggccgccctgagagacggcaaccccatcatcgtgtacctgcacggcagcgccgagcacagagccgccagccacagactgaagctggtgaaggtgctgagcgacggcggcttccacgtgctgagcgtggactacagaggcttcggcgacagcaccggcaagcccaccgaggagggcctgaccaccgacgccatctgcgtgtacgagtggaccaaggccagaagcggcatcacccccgtgtgcctgtggggccacagcctgggcaccggcgtggccaccaacgccgccaaggtgctggaggagaagggctgccccgtggacgccatcgtgctggaggcccccttcaccaacatgtgggtggccagcatcaactaccccctgctgaagatctacagaaacatccccggcttcctgagaaccctgatggacgccctgagaaaggacaagatcatcttccccaacgacgagaacgtgaagttcctgagcagccccctgctgatcctgcacggcgaggacgacagaaccgtgcccctggagtacggcaagaagctgtacgagatcgccagaaacgcctacagaaacaaggagagagtgaagatggtgatcttcccccccggcttccagcacaacctgctgtgcaagagccccaccctgctgatcaccgtgagagacttcctgagcaagcagtggagctag

SEQ ID NO: 280973 - DNA, 768 bp, Artificial Sequence
  derived and/or modified sequence
atgctgggcatctggcacacggtgcctagctgccgcggggaggatgctaagggcaaggattgttgctggtacgaggccgctctgagggacgggaaccccatcatcgtgtaccttcacggttcagccgagcacagagctgcatcccaccgattgaaactggtgaaagtgctgtcagatggaggattccacgtgctttcagtcgattaccgtggcttcggcgacagtacaggcaaaccaactgaagaagggctgacaacggacgcgatctgcgtatatgagtggactaaggctcgaagtgggatcacccccgtttgcctctggggccatagcctgggtactggggtggccacaaatgcggctaaggtcctggaagaaaagggctgtccagtagacgctattgtcctggaagctcccttcactaacatgtgggtagctagtattaattatcctctgcttaaaatctatcggaacatccctggctttcttaggactctgatggatgccctcaggaaagacaagatcatatttcccaatgatgagaacgtcaagtttctgagctcacccttgctaattctgcacggtgaagacgaccggaccgttcctctggagtatggaaagaagctgtatgagatcgcccggaacgcctataggaataaagaaagggtgaaaatggtgatctttccccccggttttcaacacaatttgctctgtaagtcacccactctcctcatcacagtaagagatttcctgtctaagcagtggtcctag

SEQ ID NO: 280974 - DNA, 768 bp, Artificial Sequence
  derived and/or modified sequence
atgctgggcatctggcacacagtgcccagctgccgcggggaggatgccaagggcaaggactgctgctggtatgaggccgccctgagagatggcaaccccatcatcgtgtacctgcacggcagcgctgagcaccgggccgccagccaccggctgaagctggtgaaggtgctgagtgatggcggcttccacgtgctgtctgtggactaccggggctttggagacagcacaggcaagcccacagaggagggcctgaccacagatgccatctgtgtgtatgagtggaccaaggcccggagcggcatcacccctgtgtgcctgtggggccacagcctgggcactggagtggccaccaatgctgccaaggtgctggaggagaagggctgccctgtggatgccatcgtgctggaggcccccttcaccaacatgtgggtggccagcatcaactaccccctgctgaagatctacagaaacatccctggcttcctgcggaccctgatggatgccctgaggaaggacaagatcatcttccccaatgatgaaaatgtgaagttcctgagcagccccctgctgatcctgcatggagaagatgacagaacagtgcccctggagtatggcaagaagctgtatgaaattgccagaaatgcctacagaaacaaggagcgggtgaagatggtgatcttccccccaggcttccagcacaacctgctgtgcaagagccccaccctgctgatcaccgtgcgggacttcctgagcaagcagtggagctag

SEQ ID NO: 280975 - DNA, 768 bp, Artificial Sequence
  derived and/or modified sequence
atgctgggcatctggcacaccgtgcccagctgccggggcgaggacgccaaaggcaaagattgttgctggtacgaagccgccctgagagacgggaaccctatcatagtctacctgcatgggagtgccgagcaccgcgccgcctctcacaggctgaagctcgtgaaagttctgagtgatggtgggttccacgtactttcagtggattatagaggctttggcgacagcacaggaaaaccaaccgaggaaggcctgactacggatgctatctgtgtgtatgagtggaccaaggcccgttctgggatcacacctgtttgcctttggggtcacagcctgggcactggcgtcgcgaccaacgcagcaaaagtgttggaggaaaagggttgtccagtcgacgccatcgtgctggaggccccttttacgaacatgtgggtcgccagcattaattatcccctgctcaaaatctatcggaacatcccagggttcttgaggaccctgatggatgccctgcgcaaggacaagattatatttcccaacgacgaaaacgtgaagtttctttcgagccctctgctgatcctgcacggcgaggacgacaggaccgtcccattggagtacggcaagaagctttatgagatcgccagaaatgcatacagaaacaaagaaagagtgaaaatggtcatttttccaccaggcttccaacataacctgctttgtaaaagccctacccttctcattaccgtgcgggactttttgagcaagcaatggagttag

SEQ ID NO: 280976 - DNA, 768 bp, Artificial Sequence
  derived and/or modified sequence
atgcttggcatatggcacaccgtgccttcttgtaggggcgaggacgctaagggaaaggactgttgctggtatgaagccgctctccgagatggtaatcccatcattgtctatcttcacggtagtgctgagcacagggctgccagccacagactgaaactggtaaaagtcttatctgacggcggatttcatgtcttgtctgtcgactacagaggtttcggagattccaccggaaaacctaccgaggaagggctcacaaccgatgccatctgtgtttacgaatggacaaaggccagatcaggcatcacccctgtctgtctgtgggggcactccctggggaccggcgtcgccactaatgccgctaaagttctggaagagaagggctgccccgttgatgccattgtccttgaggcaccctttacgaacatgtgggtcgctagcattaattatcctctgttgaaaatttacagaaacattccagggtttttaagaacattgatggatgccttaagaaaggacaagatcatttttccgaacgatgagaacgttaaattcttgagcagccctctgctgatcctgcatggcgaagacgataggaccgtgccgctggaatacggtaagaagctgtatgagatcgccagaaatgcttaccgcaataaggagcgggtgaagatggttattttcccccctgggtttcagcacaatttgctgtgtaaaagccccacactacttattaccgtccgggatttcctgtccaagcagtggagctag

SEQ ID NO: 280977 - DNA, 1302 bp, Artificial Sequence
  derived and/or modified sequence
atgagctctgatgatcgacacctcggctcaagttgcggctctttcattaagacagagccttcttctccatcctctggcatagacgcgctctctcatcacagcccatccggatcaagcgacgccagtggcggcttcgggttggcccttggcacccacgctaatgggctggatagccctcctatgtttgcgggggccggactggggggcaccccctgtcgcaagtcgtatgaggactgcgccagcggcattatggaagactcagctataaaatgcgagtacatgctaaatgccatccccaaacgtctatgcctcgtttgcggcgacattgcgagtgggtaccactatggggtcgctagctgtgaggcgtgcaaagctttttttaagcggactatccaggggaatattgagtattcttgcccggccaccaacgagtgcgagattaccaaacgtagaaggaaaagttgtcaggcttgccgctttatgaaatgccttaaggtcggaatgctgaaggaaggggttcgcctggacagggtgcgcggaggacgtcagaagtataagaggcgccttgacagtgagtcgtccccgtaccttagcttgcaaatcagccccccagcgaagaagccccttaccaaaattgtaagctacttgctggtcgcagagccggacaaattgtacgcaatgccgccacccggcatgcccgaaggagatattaaggcgctgacgaccctgtgtgatctcgccgacagagagctcgtggttatcattgggtgggccaaacacatcccaggattctcatccctgagtcttggtgaccagatgagcctcctgcagtcagcctggatggaaatattaattttgggcatcgtctaccgaagcctcccttacgacgacaagctggtgtatgcagaggattacattatggacgaagaacatagtcggttggcgggtctcctagaactgtaccgcgccatcctccaattagttcgaaggtataaaaagcttaaagttgaaaaagaggagtttgttactcttaaggctctggccctagctaattctgactctatgtatattgaagatctagaagccgtccagaagctgcaggatctattgcatgaagctctccaggattacgagctgagtcaacgacacgaagaaccctggcgcactggtaaactcctgcttacattaccattgttaagacaaaccgcggccaaagccgtgcagcacttctattcggtgaaactacaggggaaggtgccaatgcacaaactttttcttgaaatgttagaggccaaggtgtag

SEQ ID NO: 280978 - DNA, 1302 bp, Artificial Sequence
  derived and/or modified sequence
atgagcagtgatgacagacacctgggcagcagctgtggcagcttcatcaagacagagcccagcagccccagcagcggcattgatgccctgagccaccacagccccagcggcagcagtgatgccagcggcggcttcggcctggccctgggcacccacgccaacggcctggacagcccccccatgtttgctggagctggcctgggcggcaccccctgcaggaagagctatgaggactgtgccagcggcatcatggaggacagcgccatcaagtgtgagtacatgctgaatgccatccccaagaggctgtgcctggtgtgtggggacatcgccagcggctaccactatggagtggccagctgtgaggcctgcaaggccttcttcaagaggaccatccagggcaacatcgagtacagctgcccagccaccaatgaatgtgagatcaccaagagaagaaggaagagctgccaggcctgccgcttcatgaagtgcctgaaggtgggcatgctgaaggagggcgtgcggctggacagagtgcggggcggccggcagaagtacaagaggcggctggacagcgagagcagcccctacctgagcctgcagatcagccccccagccaagaagcccctgaccaagatcgtgtcctacctgctggtggccgagccagacaagctgtatgccatgcctcctcctggcatgcctgagggggacatcaaggccctgaccaccctgtgtgacctggccgaccgggagctggtggtgatcatcggctgggccaagcacatccctggcttcagcagcctgagcctgggggaccagatgagcctgctgcagagcgcctggatggagatcctgatcctgggcatcgtgtaccgcagcctgccctatgatgacaagctggtgtatgcagaggactacatcatggatgaggagcacagccggctggccggcctgctggagctgtaccgggccatcctgcagctggtgcggcgctacaagaagctgaaggtggagaaggaggagtttgtgaccctgaaggccctggccctggccaacagcgacagcatgtacatcgaggacctggaggccgtgcagaagctgcaggacctgctgcacgaggccctgcaggactatgagctgagccagagacatgaggagccctggaggacaggcaagctgctgctgaccctgcccctgctgcggcagacagctgccaaggctgtgcagcacttctacagcgtgaagctgcagggcaaggtgcccatgcacaagctgttcctggagatgctggaggccaaggtgtag

SEQ ID NO: 280979 - DNA, 1302 bp, Artificial Sequence
  derived and/or modified sequence
atgagcagcgacgaccggcacctgggcagcagctgcggcagcttcatcaagacggagccctcatctcctagcagcggaatagatgccctctcacatcactcgccctctggctcaagtgacgcctccggtggcttcgggctcgcactgggcacccatgccaatggtctggattccccccccatgttcgcgggtgcagggctcggcggcactccatgtcgcaagtcctatgaagattgtgcatctggaattatggaggatagtgcaatcaaatgcgagtatatgctcaatgctatcccaaagagactttgcctggtatgcggggatattgcctctggctaccactacggcgttgccagttgtgaagcttgcaaggccttcttcaaaaggacgatccagggaaatattgaatactcttgccccgccacgaacgagtgtgaaatcacaaagcgccgccgtaaatcctgtcaggcatgccggtttatgaaatgtctaaaggtaggtatgctgaaagaaggcgtaaggttggaccgcgtaaggggcggccgccagaagtataaacggaggctcgattctgagagctctccatacctgagcctccagatcagccccccagcaaagaagcctttgaccaagatcgtgagttatctgctggttgccgagcccgacaagctgtacgcaatgcctccccctgggatgccagagggggacatcaaagccctcacaacgttatgtgacctggccgatagagaactagtggtaataattgggtgggcaaaacacattccagggttcagttcattgtcattgggcgaccagatgtccttactgcagtcagcgtggatggaaattctgattctcggcattgtctacagaagcttgccctacgatgacaagcttgtctatgcagaggactacataatggacgaggagcatagtcgactcgcgggactgctcgaattgtacagagctattctgcagctcgttagacgatataaaaaactgaaggtagagaaagaagagttcgtcacattaaaagctctcgcactggcaaatagtgactcaatgtatatagaagatctcgaggccgtgcagaaactccaggacttattgcacgaggcactccaagattacgagctcagccaacgccatgaggagccctggaggacaggaaaacttctccttacactgccactgctgcgacaaactgccgcgaaggccgtgcagcacttctactcagttaagcttcaagggaaagtgccaatgcataaactatttctcgaaatgttggaagccaaagtgtag

SEQ ID NO: 280980 - DNA, 1302 bp, Artificial Sequence
  derived and/or modified sequence
atgtcatccgacgatcgacatctggggtcctcttgtgggtcatttatcaaaactgaacccagctcaccaagtagcggaattgatgctctttcacaccactcacctagtgggtctagtgatgcctccggaggctttggcctggcgttgggcactcacgccaacggtctggatagcccgccaatgttcgccggtgccggtctgggaggcacgccatgcaggaaatcctacgaggactgcgctagcggtataatggaagattcagctatcaaatgtgagtatatgctcaacgccatccctaagcgcctgtgcctggtctgcggggacatcgccagcggataccactacggggtggcttcatgtgaggcatgcaaggcgttcttcaaaaggacaatccagggaaacattgagtatagctgccctgccacaaacgagtgtgagatcactaagaggcgtcgaaaaagctgtcaggcctgcaggttcatgaagtgtctcaaggttggtatgctgaaagagggagtgagactggacagagtgaggggagggaggcaaaaatacaagaggcgtctggacagcgaatcgagcccctacctgtctctacaaatcagtccccctgccaaaaagccactgaccaagatagtgtcatatctgctcgtagccgagccagacaagctgtacgcaatgccacccccaggcatgcctgaaggtgatatcaaagcactcaccacgttatgcgatctggcagacagggagctggtggtgatcatcggttgggccaaacatatacccggattttcatccctcagtctgggcgatcagatgtctctactgcagtccgcctggatggagatcctgattttaggaatagtgtacagatctttgccctacgatgataagctggtctacgccgaggactacataatggacgaagagcattctagattggccggtctcctggaactttacagagctatactccaacttgtccggcgatacaaaaagctcaaggtggaaaaggaggaatttgtgaccttgaaggccctagcattggctaattcggactcaatgtacattgaggatcttgaagccgtacaaaagctccaggacctcctgcatgaagctttgcaggactatgaactttcacaaagacatgaggaaccctggagaaccggaaagctgctgctcacactgcccctcttgcgccagactgccgctaaggccgtgcagcacttctatagtgtgaaacttcagggtaaggtcccgatgcacaagttatttctggaaatgctagaggccaaggtgtag

SEQ ID NO: 280981 - DNA, 1302 bp, Artificial Sequence
  derived and/or modified sequence
atgagcagcgacgacagacacctgggcagcagctgcggcagcttcatcaagaccgagcccagcagccccagcagcggcatcgacgccctgagccaccacagccccagcggcagcagcgacgccagcggcggcttcggcctggccctgggcacccacgccaacggcctggacagcccccccatgttcgccggcgccggcctgggcggcaccccctgcagaaagagctacgaggactgcgccagcggcatcatggaggacagcgccatcaagtgcgagtacatgctgaacgccatccccaagagactgtgcctggtgtgcggcgacatcgccagcggctaccactacggcgtggccagctgcgaggcctgcaaggccttcttcaagagaaccatccagggcaacatcgagtacagctgccccgccaccaacgagtgcgagatcaccaagagaagaagaaagagctgccaggcctgcagattcatgaagtgcctgaaggtgggcatgctgaaggagggcgtgagactggacagagtgagaggcggcagacagaagtacaagagaagactggacagcgagagcagcccctacctgagcctgcagatcagcccccccgccaagaagcccctgaccaagatcgtgagctacctgctggtggccgagcccgacaagctgtacgccatgcccccccccggcatgcccgagggcgacatcaaggccctgaccaccctgtgcgacctggccgacagagagctggtggtgatcatcggctgggccaagcacatccccggcttcagcagcctgagcctgggcgaccagatgagcctgctgcagagcgcctggatggagatcctgatcctgggcatcgtgtacagaagcctgccctacgacgacaagctggtgtacgccgaggactacatcatggacgaggagcacagcagactggccggcctgctggagctgtacagagccatcctgcagctggtgagaagatacaagaagctgaaggtggagaaggaggagttcgtgaccctgaaggccctggccctggccaacagcgacagcatgtacatcgaggacctggaggccgtgcagaagctgcaggacctgctgcacgaggccctgcaggactacgagctgagccagagacacgaggagccctggagaaccggcaagctgctgctgaccctgcccctgctgagacagaccgccgccaaggccgtgcagcacttctacagcgtgaagctgcagggcaaggtgcccatgcacaagctgttcctggagatgctggaggccaaggtgtag

SEQ ID NO: 280982 - DNA, 1427 bp, Artificial Sequence
  derived and/or modified sequence
tttaggccagaggtgatccagtgatttgggagctgcaggtcacacaggctgctcagagggctgctgaacaggatgtcctcggacgacaggcacctgggctccagctgcggctccttcatcaagactgagccgtccagcccgtcctcgggcatcgatgccctcagccaccacagccccagtggctcgtccgacgccagcggcggctttggcctggccctgggcacccacgccaacggtctggactcgccacccatgtttgcaggcgccgggctgggaggcaccccatgccgcaagagctacgaggactgtgccagcggcatcatggaggactcggccatcaagtgcgagtacatgctcaacgccatccccaagcgcctgtgcctcgtgtgcggggacattgcctctggctaccactacggcgtggcctcctgcgaggcttgcaaggccttcttcaagaggactatccaagggaacattgagtacagctgcccggccaccaacgagtgcgagatcaccaaacggaggcgcaagtcctgccaggcctgccgcttcatgaaatgcctcaaagtggggatgctgaaggaaggtgtgcgccttgatcgagtgcgtggaggccgtcagaaatacaagcgacggctggactcagagagcagcccatacctgagcttacaaatttctccacctgctaaaaagccattgaccaagattgtctcatacctactggtggctgagccggacaagctctatgccatgcctccccctggtatgcctgagggggacatcaaggccctgaccactctctgtgacctggcagaccgagagcttgtggtcatcattggctgggccaagcacatcccaggcttctcaagcctctccctgggggaccagatgagcctgctgcagagtgcctggatggaaatcctcatcctgggcatcgtgtaccgctcgctgccctatgacgacaagctggtgtacgctgaggactacatcatggatgaggagcactcccgcctcgcggggctgctggagctctaccgggccatcctgcagctggtacgcaggtacaagaagctcaaggtggagaaggaggagtttgtgacgctcaaggccctggccctcgccaactccgattccatgtacatcgaggatctagaggctgtccagaagctgcaggacctgctgcacgaggcactgcaggactacgagctgagccagcgccatgaggagccctggaggacgggcaagctgctgctgacactgccgctgctgcggcagacggccgccaaggccgtgcagcacttctatagcgtcaaactgcagggcaaagtgcccatgcacaaactcttcctggagatgctggaggccaaggtgtgatggccccgcacacggaccaatgcccacctacagacagacaaacggacagaccg

SEQ ID NO: 280983 - protein, 1274 aa, Artificial Sequence
  derived and/or modified sequence
MEGDRVKLANPLHFYEARFSNLYVGTNGIISTQDFPRETQYVDYDFPTDFPAIAPFLADIDTSHGRGRVLYREDTSPAVLGLAARYVRAGFPRSARFTPTHAFLATWEQVGAYEEVKRGALPSGELNTFQAVLASDGSDSYALFLYPANGLQFLGTRPKESYNVQLQLPARVGFCRGEADDLKSEGPYFSLTSTEQSVKNLYQLSNLGIPGVWAFHIGSTSPLDNVRPAAVGDLSAAHSSVPLGRSFSHATALESDYNEDNLDYYDVNEEEAEYLPGEPEEALNGHSSIDVSFQSKVDTKPLEESSTLDPHTKEGTSLGEVGGPDLKGQVEPWDERETRSPAPPEVDRDSLAPSWETPPPYPENGSIQPYPDGGPVPSEMDVPPAHPEEEIVLRSYPASGHTTPLSRGTYEVGLEDNIGSNTEVFTYNAANKETCEHNHRQCSRHAFCTDYATGFCCHCQSKFYGNGKHCLPEGAPHRVNGKVSGHLHVGHTPVHFTDVDLHAYIVGNDGRAYTAISHIPQPAAQALLPLTPIGGLFGWLFALEKPGSENGFSLAGAAFTHDMEVTFYPGEETVRITQTAEGLDPENYLSIKTNIQGQVPYVSANFTAHISPYKELYHYSDSTVTSTSSRDYSLTFGAINQTWSYRIHQNITYQVCRHAPRHPSFPTTQQLNVDRVFALYNDEERVLRFAVTNQIGPVKEDSDPTPGNPCYDGSHMCDTTARCHPGTGVDYTCECASGYQGDGRNCVDENECATGFHRCGPNSVCINLPGSYRCECRSGYEFADDRHTCIYVDECSENRCHPAATCYNTPGSFSCRCQPGYYGDGFQCIPDSTSSLTPCEQQQRHAQAQYAYPGARFHIPQCDEQGNFLPLQCHGSTGFCWCVDPDGHEVPGTQTPPGSTPPHCGPSPEPTQRPPTICERWRENLLEHYGGTPRDDQYVPQCDDLGHFIPLQCHGKSDFCWCVDKDGREVQGTRSQPGTTPACIPTVAPPMVRPTPRPDVTPPSVGTFLLYTQGQQIGYLPLNGTRLQKDAAKTLLSLHGSIIVGIDYDCRERMVYWTDVAGRTISRAGLELGAEPETIVNSGLISPEGLAIDHIRRTMYWTDSVLDKIESALLDGSERKVLFYTDLVNPRAIAVDPIRGNLYWTDWNREAPKIETSSLDGENRRILINTDIGLPNGLTFDPFSKLLCWADAGTKKLECTLPDGTGRRVIQNNLKYPFSIVSYADHFYHTDWRRDGVVSVNKHSGQFTDEYLPEQRSHLYGITAVYPYCPTGRK

SEQ ID NO: 280984 - DNA, 3825 bp, Artificial Sequence
  derived and/or modified sequence
atggaaggtgatcgggtgaagctcgccaaccccttacacttttacgaggcccgcttttcaaatctgtacgtgggaactaatgggatcatttctacacaagattttcccagggaaactcagtatgtagactatgacttccctacagacttcccggctattgcccctttcctggctgacatagataccagccatggtagaggtagggttctgtatagagaagacaccagtcccgcagtcctgggcctggctgcgcggtatgttagagctggcttcccccgctctgcgaggtttacccccacccatgctttcctcgctacttgggagcaggtgggggcttacgaggaagtcaagcgcggcgccctgccatctggagaattaaataccttccaggccgtgctggcctctgacggctccgatagctacgcactattcctgtatcccgctaacggcctgcagtttcttggtactcgccctaaagagtcctacaatgttcagctccagctgccagccagggttggcttttgtagaggagaggccgatgatttaaagtctgaggggccttatttcagtctaacaagtacggaacagtcagttaaaaatctttaccaattatcaaacctgggcatcccgggagtttgggctttccatattggatccacatcaccgctggacaatgttcgacccgcggcagtgggcgatctctccgcagcgcactcgtcggtacccctgggtcgcagtttttcccacgcaactgctctggaatctgactataatgaggataacttagactactacgacgtcaacgaagaagaagcggaatatctgcccggagaacccgaggaagccctaaatgggcattctagcattgacgtatccttccaatctaaggtggatactaaacctctcgaggagtctagcacgctcgatccacatactaaggaaggcacgagtctgggcgaggtgggaggaccagatctgaaaggccaggtcgaaccctgggacgagcgcgagacgcggtctcccgctcccccagaagtggatagggactctctagccccttcatgggagactccccctccctatcctgagaatgggtccatccagccttatcctgacgggggaccggtcccatccgaaatggatgtgcctcctgcccaccctgaagaggaaattgtgcttcgctcctatcctgcttcggggcacaccactcctctgagtcgcggaacgtacgaagtgggacttgaggataatatcggatctaacactgaggtatttacttataacgcagccaacaaagagacgtgcgagcacaaccaccggcaatgtagcaggcatgcgttttgtaccgactatgccacagggttctgctgccactgtcagtctaagttctacggaaacggcaaacactgtcttccagagggggccccccaccgagtgaatgggaaagtctccggacacttacatgtgggccatactccagtgcatttcaccgacgtcgacctgcacgcatatatcgtaggcaatgatggccgggcatacacggccatttcccatattccccagccggccgcccaagctttgctccctctaacgcctatcgggggcctgtttggctggcttttcgcgcttgagaagcctggaagtgagaacggtttttcgttagccggcgccgcatttacccacgacatggaagtgacattttacccgggcgaggaaactgtgagaattacccagaccgctgagggattagatccagaaaactaccttagtataaagacaaacatacagggtcaggtgccgtacgtatcagctaatttcactgctcacatctcaccctacaaggagctttaccactatagcgacagcacggtcacctccaccagttcccgcgactactcattgacttttggcgcgattaatcagacctggagttaccgaattcaccagaacattacctatcaggtttgccggcacgcaccccggcaccctagttttcccacaacacagcaattgaacgtagaccgggtgttcgccctttataacgacgaagagagagtgctgaggttcgctgtgacaaaccagatcggccccgtcaaagaggattcagatcctactccagggaacccatgctatgacggatctcatatgtgtgatacgaccgcccggtgtcatccagggacaggcgtagattacacctgcgaatgtgccagcggttatcagggagacggaaggaattgtgttgatgagaacgagtgcgctaccggcttccatcgctgtggccccaactccgtttgtattaacctcccaggatcctaccggtgtgagtgcagatccggctacgaattcgcagatgaccggcacacatgcatatacgtcgatgaatgtagcgaaaatcggtgccacccagctgccacgtgctacaatacacctggctccttttcctgtagatgccagcccgggtactatggcgacggctttcaatgtatccccgattccacgtcctccttgaccccatgtgagcagcagcaacggcacgcccaggctcagtacgcgtacccaggcgcaaggttccacatccctcagtgtgacgaacaggggaactttctgccactccagtgccatgggtcaaccggattctgctggtgtgttgaccccgacggtcatgaagtgcctggcacccaaactccccctggctctacacccccacactgtggcccctcgcctgagccaacgcagcgcccacccaccatctgcgagaggtggcgtgaaaaccttctggaacactacgggggtactccccgggacgatcagtacgtgccgcagtgtgatgatctgggacatttcatccctctgcagtgccatgggaaatcagatttttgctggtgcgttgacaaagatgggagggaagtgcagggtacaagaagccagcctggcacgacgcctgcctgcattcctacagtggccccccctatggtacgaccaaccccccgccctgacgtgactccaccctctgtaggaacattcctactgtatacgcagggccagcagatcggttacctccccctcaatggtacgcggttacagaaagacgcagccaagactctgctgtctctgcatggctctatcatcgtcggcatcgactacgattgtagggaacggatggtctattggaccgatgtagccggtcgcaccatttctcgcgccggactggagctgggcgcggagccggaaacaattgttaattccggactcatctcaccagaaggattggccatcgaccatatacggcgtaccatgtactggactgacagcgtactggataagatagaaagtgccctgcttgacgggtcggaacggaaagtcctgttctatactgatctagttaaccctcgagctatagctgtggatcccattcgcgggaacctctactggaccgactggaaccgggaagccccaaaaatcgaaacaagctcactggatggagagaaccgcagaattcttatcaatacagatatcgggctgcctaatgggctgacatttgatccatttagcaagctactgtgctgggctgacgcggggacaaaaaagctcgaatgcaccttgcccgacggcacgggccgtagagtcatccagaataatctcaagtacccatttagtatagtgagctacgccgaccatttctaccataccgattggcgacgggacggcgtggtttcagtgaataagcattccggacaattcaccgatgaatacctccccgagcaacgctcacatctctacggaataacggcagtatatccatattgcccaactgggcgcaaatag

SEQ ID NO: 280985 - DNA, 3825 bp, Artificial Sequence
  derived and/or modified sequence
atggagggggacagagtgaagctggccaaccccctgcacttctatgaggcccgcttcagcaacctgtatgtgggcaccaacggcatcatcagcacccaggacttcccccgggagacccagtatgtggactatgacttccccacagacttccctgccatcgcccccttcctggccgacatcgacaccagccacggccggggccgggtgctgtaccgggaggacaccagccctgctgtgctgggcctggccgcccgctacgtgcgggccggcttccccaggtctgcccgcttcacccccacccacgccttcctggccacctgggagcaggtgggcgcctatgaggaggtgaagagaggagccctgcccagcggggagctgaacaccttccaggccgtgctggccagtgatggcagtgacagctatgccctcttcctgtacccagccaacggcctgcagttcctgggcacccggcccaaggagagctacaacgtgcagctgcagctgcctgcccgggtgggcttctgccgcggggaggctgatgacctgaagtctgagggcccctacttcagcctgaccagcacagagcagagcgtgaagaacctgtaccagctgagcaacctgggcatccctggggtgtgggccttccacatcggcagcaccagccccctggacaacgtgcggcctgctgctgtgggggacctgtctgctgcccacagctctgtgcccctgggccgctccttcagccacgccacagccctggagagtgactacaatgaagacaacctggactactatgatgtgaatgaggaggaggccgagtacctgcccggggagcctgaggaggccctgaatggccacagcagcattgatgtgtccttccagagcaaggtggacaccaagcccctggaggagagcagcaccctggacccccacaccaaggagggcaccagcctgggggaggtgggcggccctgacctgaagggccaggtggagccctgggatgagcgggagaccaggagccctgcccctcctgaggtggaccgggacagcctggcccccagctgggagaccccaccaccctacccagaaaatggcagcatccagccctacccagatggcggccctgtgcccagcgagatggatgtgcccccagcccaccctgaggaggagatcgtgctgcggagctacccagccagcggccacaccacccccctgagccggggcacctatgaggtgggcctggaggacaacatcggcagcaacacagaggtgttcacctacaatgctgccaacaaggagacctgtgagcacaaccaccggcagtgcagcagacatgccttctgcacagattatgccaccggcttctgctgccactgccagagcaagttctatggaaatggcaagcactgcctgcctgagggcgccccccaccgggtgaatggcaaggtgtctggccacctgcacgtgggccacacccctgtgcacttcacagatgtggacctgcacgcctacatcgtgggcaatgatggccgggcctacacagccatcagccacatcccccagcctgctgcccaggccctgctgcccctgacccccatcggcggcctgtttggctggctgtttgccctggagaagccaggctctgaaaatggcttcagcctggccggggccgccttcacccatgacatggaggtgaccttctacccaggagaggagaccgtgcgcatcacccagacagctgagggcctggaccctgagaactacctgagcatcaagaccaacatccagggccaggtgccctacgtgtctgccaacttcaccgcccacatcagcccctacaaggagctgtaccactacagcgacagcacagtgaccagcaccagcagccgggactacagcctgaccttcggggccatcaaccagacctggagctaccgcatccaccagaacatcacctaccaggtgtgcagacatgcccccaggcaccccagcttccccaccacccagcagctgaatgtggacagagtgtttgccctgtacaatgatgaggagcgggtgctgcgctttgctgtgaccaaccagatcggccctgtgaaggaggacagcgaccccaccccaggcaacccctgctatgatggcagccacatgtgtgacaccacagcccgctgccaccctggcactggagtggactacacctgtgaatgtgccagcggctaccagggagatggcaggaactgtgtggatgaaaatgaatgtgccaccggcttccaccgctgtggccccaacagcgtgtgcatcaacctgcccggcagctaccgctgtgaatgtcgcagcggctatgaatttgctgatgacagacacacctgcatctacgtggatgagtgcagtgaaaatcgctgccaccctgctgccacctgctacaacaccccaggcagcttcagctgccgctgccagcccggctactatggagatggcttccagtgcatcccagacagcaccagcagcctgaccccctgtgagcagcagcagagacatgcccaggcccagtatgcctacccaggggcccgcttccacatcccccagtgtgatgagcagggcaacttcctgcccctgcagtgccacggcagcacaggcttctgctggtgtgtggaccctgatggccacgaggtgcccggcacccagaccccacctggcagcaccccaccccactgcggccccagccctgagcccacccagaggcctcccaccatctgtgagcgctggagggagaacctgctggagcactatggaggcaccccaagagatgaccagtatgtgccccagtgtgatgacctgggccacttcatccccctgcagtgccacggcaagagtgacttctgctggtgtgtggacaaggatggccgggaggtgcagggcaccaggagccagcccggcaccaccccagcctgcatccccaccgtggccccacccatggtgcggcccacccccaggccagatgtgaccccacccagcgtgggcaccttcctgctgtacacccagggccagcagatcggctacctgcccctgaatggcacccggctgcagaaggatgctgccaagaccctgctgagcctgcacggcagcatcatcgtgggcatcgactatgactgccgggagaggatggtgtactggacagatgtggccggccgcaccatcagccgggccggcctggagctgggcgctgagcctgagaccatcgtgaacagcggcctcatcagccctgagggcctggccatcgaccacatccggaggaccatgtactggacagacagcgtgctggacaagattgaaagtgccctgctggatggcagcgagaggaaggtgctcttctacacagacctggtgaacccccgggccatcgctgtggaccccatccggggcaacctgtactggacagactggaaccgggaggcccccaagattgagaccagcagcctggatggagagaacagacgcatcctgatcaacacagacatcggcctgcccaacggcctgacctttgaccccttcagcaagctgctgtgctgggcagatgctggcaccaagaagctggagtgcaccctgcctgatggcactggaagaagagtcatccagaacaacctgaagtaccccttcagcatcgtgtcctatgctgaccacttctaccacacagactggaggagagatggagtggtgtctgtgaacaagcacagcggccagttcacagatgagtacctgcctgagcagaggagccacctgtatggcatcacagctgtgtacccctactgccccactggaaggaagtag

SEQ ID NO: 280986 - DNA, 3825 bp, Artificial Sequence
  derived and/or modified sequence
atggagggcgaccgggtgaagctggccaaccccctgcacttctacgaagccagattcagcaatctgtacgtcggaacaaacgggatcatttccacgcaagactttccacgggaaacacagtacgtggattacgacttcccaaccgactttcccgcgatagccccttttctcgctgatatcgacacgagtcatggtcgtggccgagtactgtatcgtgaagacacgagccctgctgtccttggcttggcagctcggtatgtccgggccgggtttcctagatccgcccgcttcacgccaactcacgccttcttggcaacctgggaacaggtgggtgcttacgaagaagtgaaacggggcgcactcccgagcggagaactgaacaccttccaggccgtgctggccagtgatggcagcgacagttacgctctttttctgtacccagccaacggtctgcagttcctgggtacccggccaaaagagagttacaacgtgcagctgcagcttccggcacgggttgggttctgcagaggggaagccgatgacttgaagagtgaaggaccctacttttcgttgacctccacagaacagtctgtgaaaaacctctatcagctgtccaatctggggattcctggcgtttgggcctttcacattggtagcaccagccccttagacaacgtgagaccagcagctgtcggcgatctcagcgcggcgcatagtagcgtcccccttggacggtcattctctcatgccaccgctctggagtctgattataatgaggacaatctggattactacgacgtgaacgaggaagaagcggagtacctaccaggggagcctgaagaggctctgaatgggcactcctcgatcgacgtgagcttccagagcaaggtagacaccaagcccctggaagaaagctctaccctcgatcctcataccaaggaaggcactagcctgggggaagttggtggacctgatctgaaggggcaggtggagccctgggacgaaagagaaacaaggagccccgcgccccccgaagttgaccgggatagcctggccccctcatgggaaacgccccctccataccccgagaacggctcgattcagccatatcctgatggcggacctgtaccctccgaaatggatgtgccacctgcccatcccgaggaagagatcgtcctgcgctcatacccagcaagcggacacacaacacccctttcccgcggaacatatgaggtgggtctagaggacaatataggttccaatactgaggtcttcacatataatgcagcaaataaagaaacatgcgagcacaaccatcgacagtgcagtagacacgctttctgcactgattatgctaccggtttttgctgtcactgccagtcaaagttttatgggaacgggaagcactgcttacctgagggtgccccacatcgcgtgaatgggaaggtttctggccacttgcacgtgggccatacgcctgtgcattttacagacgtggaccttcacgcctacatcgttgggaacgatggccgcgcctatactgccatatcgcatattccgcaaccagcggcacaggctttgctgcccttgactccaatcggaggtctgttcggctggttgtttgcattggagaaacctggcagtgaaaacggcttcagtttagccggcgctgcattcactcacgatatggaggtgaccttctatcccggggaagagaccgtccgaatcacacagaccgccgagggccttgaccctgagaattacctgtcgattaagactaatatacagggccaggtgccttacgtatcagccaatttcaccgcacacatctccccttataaggagttgtaccactattccgacagcacagtgacctccacgtcctctcgggattattcactcacatttggggccataaatcagacctggtcctataggattcatcaaaacatcacctatcaggtatgtcggcacgcccccaggcatccctcctttcctacaacccagcagttgaatgtggatagggtctttgccctgtataacgatgaagagcgggtgctgagattcgccgtgacaaatcaaatcggccctgtgaaagaagactccgaccctacaccaggaaatccttgctacgatggctcgcatatgtgcgatacaaccgcacggtgtcatcctggaactggtgttgattatacctgcgaatgtgcttcagggtatcagggcgacgggaggaattgcgtggacgagaacgagtgcgcaactggctttcatcgctgcggcccaaactccgtctgcatcaatcttcccgggtcctatcgctgcgagtgcagaagcgggtatgaatttgcggacgatcgtcacacgtgtatttacgtcgatgagtgcagtgagaacagatgccaccccgcagccacctgttataacactcctggcagtttttcatgcagatgccagcccggctattatggggacgggttccagtgcatacctgactcaacttcatccttgacaccctgcgagcaacagcagcgacatgctcaggcgcagtacgcttatccaggggcacggtttcacatccctcagtgtgacgaacagggaaatttcttacccctgcaatgccacggcagtacgggtttttgctggtgcgtggacccagatggacacgaagttccgggcactcagaccccgcctggctcaacacccccacattgcgggccatcaccagaacctactcagcgcccacccaccatctgtgaaagatggcgcgagaatctcctcgaacactatggcgggacacctagggatgaccagtacgtcccccagtgcgatgacctcggccacttcattccgctgcagtgtcatggtaagagtgatttttgctggtgcgttgataaggacggacgtgaagtgcagggtaccaggagtcaaccaggcactacacccgcctgcatccctactgtagcgcctccaatggtgagaccgacgccacggccggatgtgacccctccatctgttggtacatttctactttatacacaaggtcagcaaatcggatatttacctttgaacgggacaaggttgcaaaaagatgccgcaaaaaccctgctttcactgcatgggagcattattgtcggcatagactatgactgcagggaaaggatggtgtattggacagatgtagctgggcgcaccatcagtcgggcaggactcgagctgggggccgaacccgagaccatcgttaacagcggcttaattagtcctgagggactggctattgaccatattaggcgcaccatgtattggacagacagcgtccttgataagattgagagtgcactgcttgatggatccgaaaggaaagtcctcttctacacagacctcgtgaaccctcgcgcaatagccgtcgatccaatccggggcaacctttattggaccgactggaaccgagaagcccccaagatcgaaaccagctcacttgatggagagaaccggagaatactcattaatacagatatcggactgccaaatgggctgacattcgaccctttctctaagctgctgtgctgggcagacgcaggcactaagaagctggagtgtaccctccccgacggcacggggaggcgggtgattcagaataatcttaagtaccctttttccatcgtatcgtatgcagaccatttctatcacacagattggcggcgggatggtgtcgtctccgtcaataaacacagcggacaattcacggatgaatacctgcccgagcagcgttcccatttgtacggcatcaccgctgtgtacccctattgtccaacaggaagaaagtag

SEQ ID NO: 280987 - DNA, 4508 bp, Artificial Sequence
  derived and/or modified sequence
atggagggggaccgggtgaagctggcgaatcccctgcacttctacgaagcccgattcagcaacctctacgtgggcaccaacggcatcatctccactcaggacttccccagggaaacgcagtatgtggactatgatttccccaccgacttcccggccatcgccccttttctggcggacatcgacacgagccacggcagaggccgagtcctgtaccgagaggacacctcccccgcagtgctgggcctggccgcccgctatgtgcgcgctggcttcccgcgctctgcgcgctttacccccacccacgccttcctggccacctgggagcaggtaggcgcttacgaggaggtcaagcgcggggcgctgccctcgggagagctgaacactttccaggcagttttggcatctgatgggtctgatagctacgccctctttctttatcctgccaacggcctgcagttccttggaacccgccccaaagagtcttacaatgtccagcttcagcttccagctcgggtgggcttctgccgaggggaggctgatgatctgaagtcagaaggaccatatttcagcttgactagcactgaacagtctgtgaaaaatctctatcaactaagcaacctggggatccctggagtgtgggctttccatatcggcagcacttccccgttggacaatgtcaggccagctgcagttggagacctttccgctgcccactcttctgttcccctgggacgttccttcagccatgctacagccctggaaagtgactataatgaggacaatttggattactatgatgtgaatgaggaggaagctgaataccttccgggtgaaccagaggaggcattgaatggccacagcagcattgatgtttccttccaatccaaagtggatacaaagcctttagaggaatcttccaccttggatcctcacaccaaagaaggaacatctctgggagaggtagggggcccagatttaaaaggccaagttgagccctgggatgagagagagaccagaagcccagctccaccagaggtagacagagattcactggctccttcctgggaaaccccaccaccgtaccccgaaaacggaagcatccagccctacccagatggagggccagtgccttcggaaatggatgttcccccagctcatcctgaagaagaaattgttcttcgaagttaccctgcttcaggtcacactacacccttaagtcgagggacgtatgaggtgggactggaagacaacataggttccaacaccgaggtcttcacgtataatgctgccaacaaggaaacctgtgaacacaaccacagacaatgctcccggcatgccttctgcacggactatgccactggcttctgctgccactgccaatccaagttttatggaaatgggaagcactgtctgcctgaaggggcacctcaccgagtgaatgggaaagtgagtggccacctccacgtgggccatacacccgtgcacttcactgatgtggacctgcatgcgtatatcgtgggcaatgatggcagagcctacacggccatcagccacatcccacagccagcagcccaggccctcctccccctcacaccaattggaggcctgtttggctggctctttgctttagaaaaacctggctctgagaacggcttcagcctcgcaggtgctgcctttacccatgacatggaagttacattctacccgggagaggagacggttcgtatcactcaaactgctgagggacttgacccagagaactacctgagcattaagaccaacattcaaggccaggtgccttacgtctcagcaaatttcacagcccacatctctccctacaaggagctgtaccactactccgactccactgtgacctctacaagttccagagactactctctgacttttggtgcaatcaaccaaacatggtcctaccgcatccaccagaacatcacttaccaggtgtgcaggcacgcccccagacacccgtccttccccaccacccagcagctgaacgtggaccgggtctttgccttgtataatgacgaagaaagagtgcttagatttgctgtgaccaatcaaattggcccggtcaaagaggattcagaccccactccggggaatccttgctatgatgggagccacatgtgtgacacaacagcacggtgccatccagggacaggtgtagattacacctgtgagtgcgcatctgggtaccagggagatggacggaactgtgtggatgaaaatgaatgtgcaactggctttcatcgctgtggccccaactctgtatgtatcaacttgcctggaagctacaggtgtgagtgccggagtggttatgagtttgcagatgaccggcatacttgcatctatgtagatgaatgctcagaaaacagatgtcaccctgcagctacctgctacaatactcctggttccttctcctgccgttgtcaacccggatattatggggatggatttcagtgcatacctgactccacctcaagcctgacaccctgtgaacaacagcagcgccatgcccaggcccagtatgcctaccctggggcccggttccacatcccccaatgcgacgagcagggcaacttcctgcccctacagtgtcatggcagcactggtttctgctggtgcgtggaccctgatggtcatgaagttcctggtacccagactccacctggctccaccccgcctcactgtggaccatcaccagagcccacccagaggcccccgaccatctgtgagcgctggagggaaaacctgctggagcactacggtggcaccccccgggatgaccagtacgtgccccagtgcgatgacctgggccacttcatccccctgcagtgccacggaaagagcgacttctgctggtgtgtggacaaagatggcagagaggtgcagggcacccgctcccagccaggcaccacccctgcgtgtatacccaccgtcgctccacccatggtccggcccacgccccggccagatgtgacccctccatctgtgggcaccttcctgctctatactcagggccagcagattggctacttacccctcaatggcaccaggcttcagaaggatgcagctaagaccctgctgtctctgcatggctccataatcgtgggaattgattacgactgccgggagaggatggtgtactggacagatgttgctggacggacaatcagccgtgctggtctggaactgggagcagagcctgagacgatcgtgaattcaggtctgataagccctgaaggacttgccatagaccacatccgcagaacaatgtactggacggacagtgtcctggataagatagagagcgccctgctggatggctctgagcgcaaggtcctcttctacacagatctggtgaatccccgtgccatcgctgtggatccaatccgaggcaacttgtactggacagactggaatagagaagctcctaaaattgaaacgtcatctttagatggagaaaacagaagaattctgatcaatacagacattggattgcccaatggcttaacctttgaccctttctctaaactgctctgctgggcagatgcaggaaccaaaaaactggagtgtacactacctgatggaactggacggcgtgtcattcaaaacaacctcaagtaccccttcagcatcgtaagctatgcagatcacttctaccacacagactggaggagggatggtgttgtatcagtaaataaacatagtggccagtttactgatgagtatctcccagaacaacgatctcacctctacgggataactgcagtctacccctactgcccaacaggaagaaagtaagtacagtaatgtaaaggaagacttggagtttacaatcagaacctggaccctaaagaacagtgactgcaaaggcaaagaaagtaaaaaaggaattggccattagacgttcctgagcatccaagatgaacattttgtagtgcaaaaagacttttgtgaaaagctgatacctcaatctttactactgtatttttaaaaatgaaggttgttattgcaagtttaaaaaggtaacagaattttaactgttgcttattaaagcaacttcttgtaaacatttatcattaatatttaaaagatcaaattcattcaactaagaattagagtttaagactctaaacctgatttttgccatggattccttctggccaagaaattaaagcacatgtgatcaatataacaatataatcctaaaccttgacagttggagaagccaatgcagaactgatgggaaaggaccaattatttatagtttcccaacaaaagttctaagattttttacctctgcatcagtgcatttctatttatatcaaaaggtgctaaaatgattcaatttgcattttctgatcctgtagtgcctctatagaagtacccacagaaagtaaagtatcacatttataaataccaaagatgtaacaattttaaaattttctagattactccaataaagtgttttaagttttcctatg

SEQ ID NO: 280988 - DNA, 3825 bp, Artificial Sequence
  derived and/or modified sequence
atggagggagatagggtgaaactcgctaaccctctgcacttctacgaggccaggtttagtaatctttatgtcggcactaatgggatcatatccacccaagatttcccacgagagacccagtatgtcgattatgactttccgacagatttcccagccattgcaccctttttggccgatatcgatacctctcacggacggggtcgtgtcctgtatcgggaagatacctctccagctgtgctgggcttggcagcaagatacgtccgggctggattccctcggtctgctagattcacccccacgcacgcctttctcgcaacctgggaacaggtcggtgcatacgaggaagttaagaggggggctctgcctagcggtgagctgaacacgtttcaggcggtcctcgcatctgatgggagtgattcatacgcactctttctctatccagctaatggattgcagttcttggggacacgacctaaggagtcttacaacgtccagctgcaattgcccgctagagtcggattctgccggggagaggcagacgatctgaagtccgagggcccatatttctcactgacaagcaccgaacagtccgtcaaaaacctctaccagcttagcaacttagggatccccggagtctgggcattccacatcgggtccaccagcccactcgacaatgtgagaccagccgctgttggagacttgagtgccgcacattcatccgtccctctgggcaggtccttttcccatgccactgcactggagagtgattacaacgaagataacttggactactacgatgtgaacgaagaggaggcagaatatttgcccggagagcctgaagaagcgcttaacggtcacagcagcatagacgtgagtttccagtcaaaggtggataccaagccactggaagaatcatccacattagatcctcatactaaggaaggtacatctctgggtgaagttggtggaccagacctgaagggccaagtagagccatgggatgagcgcgagacaagaagtccagcccctcccgaggtggatcgggattccttggcgccaagctgggagacccccccaccttacccagaaaacggctcaatccagccctaccccgatggcggacccgttcccagcgaaatggacgtcccgcctgctcaccccgaagaagaaatagtcctgcgcagctacccagcgtctggtcacactactcccttatctcggggtacctatgaggtaggactggaggataacattggctcaaacacggaggtgtttacctacaatgccgcaaacaaggaaacctgcgagcataaccaccgccagtgttcacgccacgctttttgcacagattacgcgacaggcttctgttgccactgccagagcaagttttatggtaacggcaagcactgtctgcccgagggagccccacacagggttaacggaaaggtttccggccacttgcatgtgggccacacccccgtacacttcactgacgtggacctgcatgcttatatcgtgggcaacgatggacgcgcatatacagccatctctcacatcccccagccggcagctcaggccctcctcccgttgactccaataggtggcttgtttggttggctttttgcccttgaaaagccgggttcagaaaacggcttttcactggccggagcggcatttacgcatgatatggaagtgaccttctaccccggagaggagaccgtccggattacacaaacagctgagggactggatcctgagaattatttgtcaatcaagactaacatccagggccaagtgccttatgtgtccgcgaatttcactgcacacatctccccgtacaaagagttgtatcactactccgatagcacagttacgtcaacctcatctcgagactattccctgacgtttggcgctatcaatcagacctggtcatatcggatccatcagaatattacctatcaggtctgtcgacacgcacccaggcaccctagctttccaacgactcagcaactaaacgtcgaccgggttttcgccctttacaacgacgaggagagggtcctcaggttcgcagtcaccaaccaaatcggccctgtgaaagaagacagtgaccccacacctggaaatccctgttatgatggatcccatatgtgcgacaccaccgctaggtgtcaccccggaacaggcgtggattatacctgcgaatgcgccagtgggtatcagggagacggccgaaactgtgtggacgagaatgaatgtgccacgggcttccataggtgcggtccaaactccgtgtgtattaatctccctggatcatatcgttgcgaatgcaggtccggttacgaatttgctgatgataggcatacctgcatctacgtcgacgaatgttctgagaaccgttgccaccctgctgccacctgctacaacacccccggttctttctcttgtcgatgtcagcctggatactatggtgacgggtttcagtgcatccccgattcaacaagttccctgaccccctgtgagcagcaacaacgacacgcacaggctcagtacgcttaccctggtgctcgtttccatattccacagtgtgatgaacagggaaatttcctgcccctgcagtgccacggttcaaccggattctgttggtgcgtcgatcctgacggccatgaggtgccaggaacacagacccctccagggagcaccccccctcactgcggccctagccccgagcctacacagcgcccacccacgatttgcgagcgctggcgcgagaacttgttagagcactacggtggtacaccaagggatgatcagtatgtcccccaatgcgacgatctcggtcactttatacctctacagtgtcacggtaaaagtgatttctgttggtgtgtggacaaagacggacgcgaagtgcagggcacccgctcacaaccgggaaccacccctgcatgcattccaacagtcgctcccccaatggtacggccaacaccacgccctgacgtcactccaccgtcggtcggaacatttctgctctacacccaaggccagcagatcggatatctgcccctaaacggcacccggcttcagaaagacgctgctaaaaccctgttgagcttgcatggctccataatcgtggggatcgattatgattgtcgggagaggatggtctactggacggatgtcgctggtcggactatttcaagagccggactcgaactaggtgcggagccagagacgatcgttaattccggattgatttctcccgagggtctcgccatcgaccacattaggcggacgatgtattggacggattcggtgcttgacaaaatagagtccgcactcctggatgggtccgagaggaaggttctattctacacagacctcgttaatccaagagccattgccgtggaccctatccgcggtaatttgtactggaccgactggaaccgggaggccccaaagattgaaacctcatctctggatggcgagaaccggagaatcttgattaatacagacattgggctgcccaacggattgaccttcgacccatttagcaaactgttgtgttgggccgatgcaggcaccaagaaattggagtgtacattaccagacgggacgggcaggcgcgtaattcagaataacctgaagtacccattcagtatagtgagctatgctgatcatttttatcatacggattggcggagagacggcgtcgttagtgtgaacaagcactcaggccagttcaccgatgagtacctccctgagcagaggtcgcacctctacgggatcactgccgtttacccctattgccctacagggagaaagtag

SEQ ID NO: 280989 - DNA, 3825 bp, Artificial Sequence
  derived and/or modified sequence
atggagggcgacagagtgaagctggccaaccccctgcacttctacgaggccagattcagcaacctgtacgtgggcaccaacggcatcatcagcacccaggacttccccagagagacccagtacgtggactacgacttccccaccgacttccccgccatcgcccccttcctggccgacatcgacaccagccacggcagaggcagagtgctgtacagagaggacaccagccccgccgtgctgggcctggccgccagatacgtgagagccggcttccccagaagcgccagattcacccccacccacgccttcctggccacctgggagcaggtgggcgcctacgaggaggtgaagagaggcgccctgcccagcggcgagctgaacaccttccaggccgtgctggccagcgacggcagcgacagctacgccctgttcctgtaccccgccaacggcctgcagttcctgggcaccagacccaaggagagctacaacgtgcagctgcagctgcccgccagagtgggcttctgcagaggcgaggccgacgacctgaagagcgagggcccctacttcagcctgaccagcaccgagcagagcgtgaagaacctgtaccagctgagcaacctgggcatccccggcgtgtgggccttccacatcggcagcaccagccccctggacaacgtgagacccgccgccgtgggcgacctgagcgccgcccacagcagcgtgcccctgggcagaagcttcagccacgccaccgccctggagagcgactacaacgaggacaacctggactactacgacgtgaacgaggaggaggccgagtacctgcccggcgagcccgaggaggccctgaacggccacagcagcatcgacgtgagcttccagagcaaggtggacaccaagcccctggaggagagcagcaccctggacccccacaccaaggagggcaccagcctgggcgaggtgggcggccccgacctgaagggccaggtggagccctgggacgagagagagaccagaagccccgccccccccgaggtggacagagacagcctggcccccagctgggagaccccccccccctaccccgagaacggcagcatccagccctaccccgacggcggccccgtgcccagcgagatggacgtgccccccgcccaccccgaggaggagatcgtgctgagaagctaccccgccagcggccacaccacccccctgagcagaggcacctacgaggtgggcctggaggacaacatcggcagcaacaccgaggtgttcacctacaacgccgccaacaaggagacctgcgagcacaaccacagacagtgcagcagacacgccttctgcaccgactacgccaccggcttctgctgccactgccagagcaagttctacggcaacggcaagcactgcctgcccgagggcgccccccacagagtgaacggcaaggtgagcggccacctgcacgtgggccacacccccgtgcacttcaccgacgtggacctgcacgcctacatcgtgggcaacgacggcagagcctacaccgccatcagccacatcccccagcccgccgcccaggccctgctgcccctgacccccatcggcggcctgttcggctggctgttcgccctggagaagcccggcagcgagaacggcttcagcctggccggcgccgccttcacccacgacatggaggtgaccttctaccccggcgaggagaccgtgagaatcacccagaccgccgagggcctggaccccgagaactacctgagcatcaagaccaacatccagggccaggtgccctacgtgagcgccaacttcaccgcccacatcagcccctacaaggagctgtaccactacagcgacagcaccgtgaccagcaccagcagcagagactacagcctgaccttcggcgccatcaaccagacctggagctacagaatccaccagaacatcacctaccaggtgtgcagacacgcccccagacaccccagcttccccaccacccagcagctgaacgtggacagagtgttcgccctgtacaacgacgaggagagagtgctgagattcgccgtgaccaaccagatcggccccgtgaaggaggacagcgaccccacccccggcaacccctgctacgacggcagccacatgtgcgacaccaccgccagatgccaccccggcaccggcgtggactacacctgcgagtgcgccagcggctaccagggcgacggcagaaactgcgtggacgagaacgagtgcgccaccggcttccacagatgcggccccaacagcgtgtgcatcaacctgcccggcagctacagatgcgagtgcagaagcggctacgagttcgccgacgacagacacacctgcatctacgtggacgagtgcagcgagaacagatgccaccccgccgccacctgctacaacacccccggcagcttcagctgcagatgccagcccggctactacggcgacggcttccagtgcatccccgacagcaccagcagcctgaccccctgcgagcagcagcagagacacgcccaggcccagtacgcctaccccggcgccagattccacatcccccagtgcgacgagcagggcaacttcctgcccctgcagtgccacggcagcaccggcttctgctggtgcgtggaccccgacggccacgaggtgcccggcacccagaccccccccggcagcacccccccccactgcggccccagccccgagcccacccagagaccccccaccatctgcgagagatggagagagaacctgctggagcactacggcggcacccccagagacgaccagtacgtgccccagtgcgacgacctgggccacttcatccccctgcagtgccacggcaagagcgacttctgctggtgcgtggacaaggacggcagagaggtgcagggcaccagaagccagcccggcaccacccccgcctgcatccccaccgtggccccccccatggtgagacccacccccagacccgacgtgaccccccccagcgtgggcaccttcctgctgtacacccagggccagcagatcggctacctgcccctgaacggcaccagactgcagaaggacgccgccaagaccctgctgagcctgcacggcagcatcatcgtgggcatcgactacgactgcagagagagaatggtgtactggaccgacgtggccggcagaaccatcagcagagccggcctggagctgggcgccgagcccgagaccatcgtgaacagcggcctgatcagccccgagggcctggccatcgaccacatcagaagaaccatgtactggaccgacagcgtgctggacaagatcgagagcgccctgctggacggcagcgagagaaaggtgctgttctacaccgacctggtgaaccccagagccatcgccgtggaccccatcagaggcaacctgtactggaccgactggaacagagaggcccccaagatcgagaccagcagcctggacggcgagaacagaagaatcctgatcaacaccgacatcggcctgcccaacggcctgaccttcgaccccttcagcaagctgctgtgctgggccgacgccggcaccaagaagctggagtgcaccctgcccgacggcaccggcagaagagtgatccagaacaacctgaagtaccccttcagcatcgtgagctacgccgaccacttctaccacaccgactggagaagagacggcgtggtgagcgtgaacaagcacagcggccagttcaccgacgagtacctgcccgagcagagaagccacctgtacggcatcaccgccgtgtacccctactgccccaccggcagaaagtag

SEQ ID NO: 280990 - DNA, 867 bp, Artificial Sequence
  derived and/or modified sequence
atggctctcacctcgtttttgccggcccccactcagctatcccaggaccagctcgaggccgaagagaaggcgcggtcgcaaaggtcaaggcagacgagtctagtctccagcaggagggagccacctccttatgggtaccgtaagggctggattccacggctgctcgaggactttggtgacggcggtgcttttcctgaaatccatgtcgcacagtatcctcttgacatgggacgcaagaaaaagatgagcaacgccttggccattcaggtcgacagcgagggaaagatcaaatacgatgctatcgcgcgacaggggcagagtaaggacaaggtgatctattcaaagtatacggacctcgtgccaaaagaggtcatgaacgctgacgaccctgatttacaaaggcctgatgaggaagccataaaggagataacagagaaaacccgagttgcgctggagaagtctgtgtctcaaaaagtggccgctgctatgcccgtgcgggccgccgacaaactagccccggcacagtacatccgttatacccctagccaacagggagtcgccttcaacagcggcgccaaacaaagagttatccggatggtggagatgcagaaagatcctatggagccaccccggtttaaaattaacaagaaaattcccagggggccaccgtctcccccggcaccggtgatgcacagccccagtaggaagatgaccgtaaaggaacaacaggaatggaagatccctccgtgtatctctaattggaaaaatgccaagggctatacaatacctctggataagcgcctagcggcagatggccgtgggctccaaaccgtgcacaagaagaagaagaagaaaaaacggaagtag

SEQ ID NO: 280991 - DNA, 558 bp, Artificial Sequence
  derived and/or modified sequence
atggcactcaccagctttctgccggctccaactcagctgagccaggatcagctagaagctgaagagaaggccagatcacagcgcagccggcagacctctctggtctcttcacgtagggaacctcccccgtacggttaccgtaaaggctggattcctcgcctcttggaagactttggcgatgggggcgcatttcctgagattcatgtcgctcaataccccctggacatggggcggaagaaaaagatgtccaatgcactcgctatacaagtcgattccgaggggaagatcaagtatgacgcaatcgctaggcagggacagagcaaggataaggtcatttactcgaaatataccgatttagtccctaaggaagtcatgaatgctgacgaccctgacctacaaaggcccgacgaagaagcaattaaagaaatgactgtcaaggaacagcaggagtggaagattccgccttgcattagtaattggaaaaatgctaaaggttacaccattcctctcgacaagcgtcttgccgcagacgggagggggctacagactgttcattag

SEQ ID NO: 280992 - DNA, 867 bp, Artificial Sequence
  derived and/or modified sequence
atggccctgaccagcttcctgcctgcccccacccagctgagccaggaccagctggaggccgaggagaaggcccggagccagaggagccggcagaccagcctggtgagcagccggcgggagcccccaccctacggctacaggaagggctggatcccccggctgctggaggactttggagatggaggagccttccctgagatccacgtggcccagtaccccctggacatgggcaggaagaagaagatgagcaatgccctggccatccaggtggacagcgagggcaagatcaagtatgatgccatcgcccggcagggccagagcaaggacaaggtgatctacagcaagtacacagacctggtgcccaaggaggtgatgaatgctgatgatcctgacctgcagaggccagatgaggaggccatcaaggagatcacagagaagaccagggtggccctggagaagtctgtgtcccagaaggtggccgccgccatgcctgtgcgggctgctgacaagctggccccagcccagtacatccgctacacccccagccagcagggcgtggccttcaacagcggggccaagcagagggtcatccgcatggtggagatgcagaaggaccccatggagcccccacgcttcaagatcaacaagaagatcccccggggcccccccagccccccagcccctgtgatgcacagccccagcaggaagatgacagtgaaggagcagcaggagtggaagatccccccctgcatcagcaactggaagaatgccaagggctacaccatccccctggacaagaggctggccgcagatggccggggcctgcagacagtgcacaagaagaagaagaagaagaagaggaagtag

SEQ ID NO: 280993 - DNA, 558 bp, Artificial Sequence
  derived and/or modified sequence
atggccctgaccagcttcctgcctgcccccacccagctgagccaggaccagctggaggccgaggagaaggcccggagccagaggagccggcagaccagcctggtgagcagccggcgggagcccccaccctacggctacaggaagggctggatcccccggctgctggaggactttggagatggaggagccttccctgagatccacgtggcccagtaccccctggacatgggcaggaagaagaagatgagcaatgccctggccatccaggtggacagcgagggcaagatcaagtatgatgccatcgcccggcagggccagagcaaggacaaggtgatctacagcaagtacacagacctggtgcccaaggaggtgatgaatgctgatgatcctgacctgcagaggccagatgaggaggccatcaaggagatgacagtgaaggagcagcaggagtggaagatccccccctgcatcagcaactggaagaatgccaagggctacaccatccccctggacaagaggctggccgcagatggccggggcctgcagacagtgcactag

SEQ ID NO: 280994 - DNA, 867 bp, Artificial Sequence
  derived and/or modified sequence
atggccctgaccagcttcctgcccgcccccacccagctgagccaggaccagctggaggcggaggagaaagcccgcagccagaggagccgtcagacctccctcgtatcctctcggagagagcctccgccctacggttaccgaaagggctggattccaagactgttagaagacttcggcgatgggggtgccttcccggaaatccatgttgcacaataccctctcgacatgggtcgtaagaagaaaatgtctaatgctctggccatccaggtagactctgaagggaagattaaatacgatgcaatcgccagacagggtcagtcaaaggacaaggtgatctactccaaatatactgacttagtgccgaaggaagtgatgaatgccgacgatccagatctgcaaagaccagacgaggaagcgattaaggagatcacagagaagacccgtgtcgctttggaaaaaagtgttagtcagaaggttgccgccgccatgccagtacgcgctgctgacaagctcgccccggcccaatacataaggtatacaccctctcagcagggagtcgccttcaattcaggggctaaacagcgagtcattagaatggtggagatgcaaaaggacccaatggagccccccagatttaagattaacaaaaagatacctagaggccctccctcgccccccgcacctgttatgcattccccgtcacgaaagatgactgtgaaggagcagcaggaatggaagatacctccctgtatatccaactggaaaaacgctaaaggctatactattcccctggacaaacgtttggctgcagatgggagaggcttgcagactgtgcacaagaagaagaagaagaagaagagaaagtag

SEQ ID NO: 280995 - DNA, 558 bp, Artificial Sequence
  derived and/or modified sequence
atggccctgaccagcttcctgcccgcccccacccagctgagccaggaccagctggaggccgaggagaaagctcgatcccagcggtctcgccagacatcactggtaagctccaggcgcgagccccctccctatggctatagaaaaggatggatcccccggctgttagaagattttggggatggtggtgcattcccagaaatccatgtggcccaatatcccctggatatgggacgcaagaaaaagatgagcaatgcacttgccatccaggtagattctgagggtaaaataaaatacgacgcaatcgcccgtcagggacagtccaaggacaaagtgatctatagtaagtatacggacctcgtgcctaaggaagtgatgaatgctgatgatcccgatttgcagcggccagatgaggaggccatcaaagagatgaccgtcaaggagcagcaggaatggaaaattccgccctgcatttctaactggaaaaatgccaagggatacacaatacccttggacaagcgcctcgccgccgacggacggggactacagacagttcactag

SEQ ID NO: 280996 - DNA, 893 bp, Artificial Sequence
  derived and/or modified sequence
gctcgcgctggaagaagcggaagaagatggcgctcaccagctttttacctgcacctactcagctatctcaggaccagcttgaggctgaagaaaaggcaagatcccagagatcacggcagacctcactggtctcctcccgaagagaacctcccccgtacggataccggaaaggctggatacctcggttattagaggattttggagatggaggtgcttttccagagatccatgtggcccagtatccactggatatgggacgaaagaaaaaaatgtcgaatgcgctggccattcaggtggattctgaaggaaaaattaaatatgatgcaattgctcgacaaggacagtcaaaagacaaggtcatttatagcaaatacactgacctggttccaaaggaggttatgaatgcagatgatccagacctgcaaaggcccgatgaagaagctattaaagagataacagaaaagacaagagtagccttagaaaaatctgtatcacagaaggtcgccgcagccatgccagttcgagcagctgacaaattggctcctgctcagtatatccgatacacaccatctcagcaaggagtggcattcaactctggagctaaacagagggttattcggatggtagaaatgcagaaagatccaatggagcctccaaggttcaagattaataagaaaattccccggggaccaccttctcctcctgcgcctgtcatgcattctcctagccgaaagatgactgtaaaggaacaacaagagtggaagattcctccttgtatttctaactggaaaaatgcaaagggttatacaattccattagacaaacgtctggctgctgatggaagaggactacagacagtacacaaaaaaaaaaaaaaaaaaaaaaggaaataa

SEQ ID NO: 280997 - DNA, 584 bp, Artificial Sequence
  derived and/or modified sequence
gtcgctcgcgctggaagaagcggaagaagatggcgctcaccagctttttacctgcacctactcagctatctcaggaccagcttgaggctgaagaaaaggcaagatcccagagatcacggcagacctcactggtctcctcccgaagagaacctcccccgtacggataccggaaaggctggatacctcggttattagaggattttggagatggaggtgcttttccagagatccatgtggcccagtatccactggatatgggacgaaagaaaaaaatgtcgaatgcgctggccattcaggtggattctgaaggaaaaattaaatatgatgcaattgctcgacaaggacagtcaaaagacaaggtcatttatagcaaatacactgacctggttccaaaggaggttatgaatgcagatgatccagacctgcaaaggcccgatgaagaagctattaaagagatgactgtaaaggaacaacaagagtggaagattcctccttgtatttctaactggaaaaatgcaaagggttatacaattccattagacaaacgtctggctgctgatggaagaggactacagacagtacac

SEQ ID NO: 280998 - DNA, 867 bp, Artificial Sequence
  derived and/or modified sequence
atggccctgacatctttcctgccagctccgacccagctttctcaagatcagcttgaagcagaagaaaaggcacgatctcagcgctctcggcagacctccctagttagctcacggagggagccccctccgtacgggtatcgtaaagggtggattcctaggcttttagaggacttcggagacggaggcgctttcccagagattcacgtggcccagtaccccctagacatggggaggaaaaagaagatgtcgaatgctcttgccattcaggttgattccgagggcaagataaaatatgatgcaattgccaggcagggccagtccaaggacaaagttatctactccaaatacacagacctggtccccaaggaagtgatgaatgctgacgaccctgacctgcagcgccctgacgaagaagccatcaaggaaattactgagaagacaagagtcgcactcgagaaaagcgtcagtcagaaagtggcagctgccatgcccgtgagagccgcagataagttggcgcctgcacagtacattaggtatactcctagtcagcagggagttgcgttcaacagcggggctaagcaacgggtaattaggatggtggagatgcagaaggatcccatggaacccccacgattcaaaatcaataagaagattccgcgtggcccaccttccccaccggctcctgttatgcacagccccagcaggaaaatgacagtgaaagagcagcaagagtggaaaatccccccttgtatttccaactggaagaatgcaaaggggtacaccattcccctggacaagagactcgcggcagacggccgaggcctccaaaccgtgcacaagaagaagaaaaaaaaaaaacggaagtag

SEQ ID NO: 280999 - DNA, 558 bp, Artificial Sequence
  derived and/or modified sequence
atggcccttacatcctttttacccgcacctacgcagctttctcaagaccaactggaggctgaggaaaaggctaggtcccagaggtcgaggcagacatctctcgtgtctagccggcgtgagccaccaccctatggctataggaaaggctggattcccagattactggaggattttggggatgggggtgccttcccagagattcacgtggcccagtaccccttggatatgggaagaaaaaaaaagatgtcaaatgccttggctattcaggtcgactccgaaggcaagattaagtacgacgctatcgcccgacagggccagtcaaaagataaggtaatttattcaaagtacacagatttggtgcccaaagaggtgatgaatgcagacgaccctgacctccagaggcctgatgaagaggccattaaggaaatgacagtcaaggagcaacaggaatggaaaatccccccatgcattagcaattggaagaatgccaaggggtacactatcccactggataagcgactggcagcggatgggagaggactgcagacagttcattag

SEQ ID NO: 281000 - DNA, 867 bp, Artificial Sequence
  derived and/or modified sequence
atggccctgaccagcttcctgcccgcccccacccagctgagccaggaccagctggaggccgaggagaaggccagaagccagagaagcagacagaccagcctggtgagcagcagaagagagccccccccctacggctacagaaagggctggatccccagactgctggaggacttcggcgacggcggcgccttccccgagatccacgtggcccagtaccccctggacatgggcagaaagaagaagatgagcaacgccctggccatccaggtggacagcgagggcaagatcaagtacgacgccatcgccagacagggccagagcaaggacaaggtgatctacagcaagtacaccgacctggtgcccaaggaggtgatgaacgccgacgaccccgacctgcagagacccgacgaggaggccatcaaggagatcaccgagaagaccagagtggccctggagaagagcgtgagccagaaggtggccgccgccatgcccgtgagagccgccgacaagctggcccccgcccagtacatcagatacacccccagccagcagggcgtggccttcaacagcggcgccaagcagagagtgatcagaatggtggagatgcagaaggaccccatggagccccccagattcaagatcaacaagaagatccccagaggcccccccagcccccccgcccccgtgatgcacagccccagcagaaagatgaccgtgaaggagcagcaggagtggaagatccccccctgcatcagcaactggaagaacgccaagggctacaccatccccctggacaagagactggccgccgacggcagaggcctgcagaccgtgcacaagaagaagaagaagaagaagagaaagtag

SEQ ID NO: 281001 - DNA, 558 bp, Artificial Sequence
  derived and/or modified sequence
atggccctgaccagcttcctgcccgcccccacccagctgagccaggaccagctggaggccgaggagaaggccagaagccagagaagcagacagaccagcctggtgagcagcagaagagagccccccccctacggctacagaaagggctggatccccagactgctggaggacttcggcgacggcggcgccttccccgagatccacgtggcccagtaccccctggacatgggcagaaagaagaagatgagcaacgccctggccatccaggtggacagcgagggcaagatcaagtacgacgccatcgccagacagggccagagcaaggacaaggtgatctacagcaagtacaccgacctggtgcccaaggaggtgatgaacgccgacgaccccgacctgcagagacccgacgaggaggccatcaaggagatgaccgtgaaggagcagcaggagtggaagatccccccctgcatcagcaactggaagaacgccaagggctacaccatccccctggacaagagactggccgccgacggcagaggcctgcagaccgtgcactag

SEQ ID NO: 281002 - protein, 288 aa, Artificial Sequence
  derived and/or modified sequence
MALTSFLPAPTQLSQDQLEAEEKARSQRSRQTSLVSSRREPPPYGYRKGWIPRLLEDFGDGGAFPEIHVAQYPLDMGRKKKMSNALAIQVDSEGKIKYDAIARQGQSKDKVIYSKYTDLVPKEVMNADDPDLQRPDEEAIKEITEKTRVALEKSVSQKVAAAMPVRAADKLAPAQYIRYTPSQQGVAFNSGAKQRVIRMVEMQKDPMEPPRFKINKKIPRGPPSPPAPVMHSPSRKMTVKEQQEWKIPPCISNWKNAKGYTIPLDKRLAADGRGLQTVHKKKKKKKRK

SEQ ID NO: 281003 - protein, 185 aa, Artificial Sequence
  derived and/or modified sequence
MALTSFLPAPTQLSQDQLEAEEKARSQRSRQTSLVSSRREPPPYGYRKGWIPRLLEDFGDGGAFPEIHVAQYPLDMGRKKKMSNALAIQVDSEGKIKYDAIARQGQSKDKVIYSKYTDLVPKEVMNADDPDLQRPDEEAIKEMTVKEQQEWKIPPCISNWKNAKGYTIPLDKRLAADGRGLQTVH

SEQ ID NO: 281004 - protein, 583 aa, Artificial Sequence
  derived and/or modified sequence
MLSESKEGEEKEEVTMDTSENRPENDVPEPPMPIADQVSNDDRPEGSVEDEEKKESSLPKSFKRKISVVSATKGVPAGNSDTEGGQPGRKRRWGASTATTQKKPSISITTESLKSLIPDIKPLAGQEAVVDLHADDSRISEDETERNGDDGTHDKGLKICRTVTQVVPAEGQENGQREEEEEEKEPEAEPPVPPQVSVEVALPPPAEHEVKKVTLGDTLTRRSISQQKSGVSITIDDPVRTAQVPSPPRGKISNIVHISNLVRPFTLGQLKELLGRTGTLVEEAFWIDKIKSHCFVTYSTVEEAVATRTALHGVKWPQSNPKFLCADYAEQDELDYHRGLLVDRPSETKTEEQGIPRPLHPPPPPPVQPPQHPRAEQREQERAVREQWAEREREMERRERTRSEREWDRDKVREGPRSRSRSRDRRRKERAKSKEKKSEKKEKAQEEPPAKLLDDLFRKTKAAPCIYWLPLTDSQIVQKEAERAERAKEREKRRKEQEEEEQKEREKEAERERNRQLEREKRREHSRERDRERERERERDRGDRDRDRERDRERGRERDRRDTKRHSRSRSRSTPVRDRGGRR

SEQ ID NO: 281005 - DNA, 1752 bp, Artificial Sequence
  derived and/or modified sequence
atgctgagcgagagcaaggagggcgaggagaaggaggaggtgaccatggacaccagcgagaacagacccgagaacgacgtgcccgagccccccatgcccatcgccgaccaggtgagcaacgacgacagacccgagggcagcgtggaggacgaggagaagaaggagagcagcctgcccaagagcttcaagagaaagatcagcgtggtgagcgccaccaagggcgtgcccgccggcaacagcgacaccgagggcggccagcccggcagaaagagaagatggggcgccagcaccgccaccacccagaagaagcccagcatcagcatcaccaccgagagcctgaagagcctgatccccgacatcaagcccctggccggccaggaggccgtggtggacctgcacgccgacgacagcagaatcagcgaggacgagaccgagagaaacggcgacgacggcacccacgacaagggcctgaagatctgcagaaccgtgacccaggtggtgcccgccgagggccaggagaacggccagagagaggaggaggaggaggagaaggagcccgaggccgagccccccgtgcccccccaggtgagcgtggaggtggccctgcccccccccgccgagcacgaggtgaagaaggtgaccctgggcgacaccctgaccagaagaagcatcagccagcagaagagcggcgtgagcatcaccatcgacgaccccgtgagaaccgcccaggtgcccagcccccccagaggcaagatcagcaacatcgtgcacatcagcaacctggtgagacccttcaccctgggccagctgaaggagctgctgggcagaaccggcaccctggtggaggaggccttctggatcgacaagatcaagagccactgcttcgtgacctacagcaccgtggaggaggccgtggccaccagaaccgccctgcacggcgtgaagtggccccagagcaaccccaagttcctgtgcgccgactacgccgagcaggacgagctggactaccacagaggcctgctggtggacagacccagcgagaccaagaccgaggagcagggcatccccagacccctgcacccccccccccccccccccgtgcagcccccccagcaccccagagccgagcagagagagcaggagagagccgtgagagagcagtgggccgagagagagagagagatggagagaagagagagaaccagaagcgagagagagtgggacagagacaaggtgagagagggccccagaagcagaagcagaagcagagacagaagaagaaaggagagagccaagagcaaggagaagaagagcgagaagaaggagaaggcccaggaggagccccccgccaagctgctggacgacctgttcagaaagaccaaggccgccccctgcatctactggctgcccctgaccgacagccagatcgtgcagaaggaggccgagagagccgagagagccaaggagagagagaagagaagaaaggagcaggaggaggaggagcagaaggagagagagaaggaggccgagagagagagaaacagacagctggagagagagaagagaagagagcacagcagagagagagacagagagagagagagagagagagagagagacagaggcgacagagacagagacagagagagagacagagagagaggcagagagagagacagaagagacaccaagagacacagcagaagcagaagcagaagcacccccgtgagagacagaggcggcagaagatag

SEQ ID NO: 281006 - DNA, 2563 bp, Artificial Sequence
  derived and/or modified sequence
ctcccctgctgcagcaaggccctcccccatccgcacacacaggctgctgggtaagtggcaagatggctcccctgcatgtctccggctgatcgctgccgctccgccaatacaatagagccagccactaccagcagcctggccctcttcctccttctccagagagaccaatccagccgaactcggggtttgccaaagggataaacagcacttccagggggagaaaaaaaatcatgttatcagaaagcaaagaaggtgaggagaaggaggaagtgaccatggacacaagtgaaaacagacctgaaaatgatgttccagaacctcccatgcctattgcagaccaagtcagcaatgatgaccgcccggagggcagtgttgaagatgaggagaagaaagagagctcgctgcccaaatcattcaagaggaagatctccgttgtctcagctaccaagggggtgccagctggaaacagtgacacagaggggggccagcctggtcggaaacgacgctggggagccagcacagccaccacacagaagaaaccttccatcagtatcaccactgaatcactaaagagcctcatccccgacatcaaacccctggcggggcaggaggctgttgtggatcttcatgctgatgactctcgcatctctgaggatgagacagagcgtaatggcgatgatgggacccatgacaaggggctgaaaatatgccggacagtcactcaggtagtacctgcagagggccaggagaatgggcagagggaagaagaggaagaagagaaggaacctgaagcagaacctcctgtacctccccaggtgtcagtagaggtggccttgcccccacctgcagagcatgaagtaaagaaagtgactttaggagataccttaactcgacgttccattagccagcagaagtccggagtttccattaccattgatgacccagtccgaactgcccaggtgccctccccaccccggggcaagattagcaacattgtccatatctccaatttggtccgtcctttcactttaggccagctaaaggagttgttggggcgcacaggaaccttggtggaagaggccttctggattgacaagatcaaatctcattgctttgtaacgtactcaacagtagaggaagctgttgccacccgcacagctctgcacggggtcaaatggccccagtccaatcccaaattcctttgtgctgactatgccgagcaagatgagctggattatcaccgaggcctcttggtggaccgtccctctgaaactaagacagaggagcagggaataccacggcccctgcaccccccacccccacccccggtccagccaccacagcacccccgggcagagcagcgggagcaggaacgggcagtgcgggaacagtgggcagaacgggaacgggaaatggagcggcgggagcggactcgatcagagcgtgaatgggatcgggacaaagttcgagaagggccccgttcccgatcaaggtcccgtgaccgccgccgcaaggaacgtgcgaagtctaaagaaaagaagagtgagaagaaagagaaagcccaggaggaaccacctgccaagctgctggatgaccttttccgaaagaccaaggcagctccctgcatctattggctcccactgactgacagccagatcgttcagaaagaggcagagcgggccgaacgggccaaggagcgggagaagcggcgaaaggagcaagaagaagaagagcaaaaggagcgggagaaggaagccgagcgggaacggaaccgacagctggagcgagagaaacgtcgggagcacagtcgggagagggacagggagagagagagagaaagggagcgggacaggggggaccgagatcgggatagggaaagggaccgagaacgaggcagggaaagggatcgcagggacaccaagcgccacagcagaagccggagtcggagcacacctgtgcgggaccggggtgggcgccgctagctgggaaaacactagagctgcaggtaccagccactcggccccagggggttatggccacagagggataggcacagtctccaccaccctggagccaagggtctttcacatcacctatccctacatacataccaaatggaaaagtggccatccttttccccccaaacacacccccttaacctatctcttgggacttagcccgaccctccctctcatttcccattaagtctgagaggcaagagctaggttaggcaaggaggtggttggccagagatggggaacagccaggtgccccagtcctctgatttttcctccatcctgcttaccacctccctgggtacttacagccttctcttgggaacagccggggccaggactgggtcacctatgagctgaatcagcatctcctcctgagtcccagggcccctgcagttcccagtctcttctgtcctgcagcccttgcctctttcccacaggttccactttatatccaccttttccttttgttcaatttttatttttattttttttattattaaatgatgtggtctatggaaaaaaaaataaaaatctgacttagtttt

SEQ ID NO: 281007 - DNA, 1752 bp, Artificial Sequence
  derived and/or modified sequence
atgttgtcagagtccaaggagggagaggagaaggaggaggtgaccatggatacgtctgagaatagacccgagaatgacgtacctgagccgccgatgcccattgctgatcaggtctccaatgacgatagaccggaaggcagcgtggaggacgaggaaaagaaagaatccagcttgccgaaaagtttcaagaggaaaatctctgtggtatccgcaacgaaaggtgtccctgcaggcaatagtgacacagaaggcggccaaccaggtcggaagagaaggtggggggccagtacggccaccacccagaagaaaccctcaatttctataaccactgagtctttgaagtctctgattcctgatataaagccgctagccggccaagaggcagttgttgacctacatgctgacgattctcgcatcagcgaagatgaaacggagcggaacggagacgatgggacccacgacaagggccttaaaatctgtcggacggtcacacaggtggtgcctgccgagggccaagaaaatggccagagagaggaggaggaggaggaaaaggagcccgaggctgagcctcctgtaccaccacaggtcagcgttgaggttgccctacctccacctgccgaacatgaggtcaaaaaggtcacacttggagacactcttacgaggcggagtatctcacagcaaaaaagtggcgtctccatcacaatagacgatccagttcgaaccgctcaggtgccatcaccccctcgcggaaagatcagcaacatcgtgcacataagcaatctcgttcgtccattcacactgggacagttaaaagagctgctgggacgtacaggtactctggtggaagaagccttctggattgacaagattaaatctcactgtttcgtaacatacagtacagtggaggaagccgttgcgacgaggacagccctgcacggcgtcaagtggccgcagtccaaccctaaattcttatgcgctgactacgccgagcaagacgagctggattatcaccgcggtctcctagtggatcgcccctccgaaaccaaaacagaggaacagggaatcccgaggcctcttcatcctcctcctccacccccagtccagcctccacagcaccctagggccgaacagcgggagcaggaaagagctgtgagagagcagtgggccgaaagagaaagagaaatggagaggagggaacggaccaggtcggaacgagagtgggatcgcgataaagtacgggaagggcctcgatcgagatccagaagccgcgatcgacgtcggaaggagagagccaagtctaaggaaaaaaagtctgaaaagaaagagaaggcccaggaggaaccaccagcaaaactgctagatgatctttttagaaaaacaaaagctgccccctgtatctattggctccccttaacagatagtcaaatagtgcaaaaggaagctgaacgggcagaacgagccaaagaacgggagaaacggaggaaggagcaggaggaagaagagcagaaagaaagggagaaggaagccgagagagaaaggaaccgccagctcgagcgggagaagcggcgtgagcattccagagaacgggaccgcgagagagaaagggaaagggaaagggatagaggcgaccgggacagggatcgggagagagatagggagcgcggccgggagcgagacaggagagatacaaagaggcacagcaggtctcgatctcgttctaccccggtaagagacagagggggcaggcgctag

SEQ ID NO: 281008 - DNA, 1752 bp, Artificial Sequence
  derived and/or modified sequence
atgctgagtgagtccaaggagggagaggagaaggaggaggtgacaatggatactagcgaaaatcggcctgaaaacgacgtgccagagccgccgatgcctattgcggaccaggtgtccaacgatgatagacccgaaggatccgtcgaagatgaagaaaaaaaagagtcttccctgcccaaatccttcaagcgaaaaatctccgtcgtttccgctacgaagggcgttcccgcaggaaatagcgacaccgagggtggccagccgggccggaagcgcaggtggggcgcttctaccgcaaccacccagaagaagccgtccatctcaataactactgagagcctaaagtcgctcatccccgatatcaaaccgctcgccggacaggaggctgtggtcgatctccatgcggatgactcccggatctcagaagacgagactgagcgaaacggcgatgatgggactcatgacaaagggttgaaaatttgcaggactgttacccaggtcgtgccggccgaaggccaggagaacggccagcgcgaggaagaagaagaggagaaagagccagaagccgagccaccagtgccgcctcaggtatccgttgaggtggctctgcctccgcctgccgaacacgaagtcaagaaggtcaccctaggcgatacccttaccagacgatctatatctcagcagaaatctggagtctccatcaccatcgacgaccctgtgcggactgcacaggtccctagccccccacgtggcaagatttcaaatatcgtgcatatcagcaatttggttcggccattcactctggggcaactaaaggagctgctcgggagaacggggacattggttgaggaagcgttctggattgacaagattaaatcccactgcttcgtgacatactcaacggtggaggaggcagtagccactaggacagccctgcatggggtcaagtggccgcagtcaaatcctaaattcctgtgcgcagattacgctgaacaagacgaactcgactatcatagagggcttctcgtggacaggcccagtgaaactaaaacagaagagcagggaattccccggccgttgcacccccccccccctcccccagtgcagccccctcagcaccctcgggctgaacaacgggagcaggaacgcgccgtccgtgagcagtgggctgagagagaaagggagatggaacgccgggaaaggaccagaagcgagcgagagtgggatagggataaggtccgagagggccccaggtctcgttcccgctcaagggatcgcagacgaaaggagcgcgcgaagtcaaaggaaaagaagtccgaaaaaaaagaaaaggcccaagaggagccgcccgctaagcttctggatgatctctttcgaaaaactaaagccgcaccctgtatctactggctgcccttaactgacagccagatagttcagaaagaagcagaaagagccgagcgggccaaggagagggaaaagagacgcaaggagcaggaggaggaagaacagaaggaaagagagaaagaggctgaacgcgagaggaaccgtcagctggaaagagaaaagagaagggagcactcgagggagcgggaccgagagcgtgagcgtgagcgggaacgtgatcgcggcgacagggacagggacagagaaagggaccgagagcgcggacgtgagcgagacaggcgggacacaaagaggcattcacggtctcgttcacgctcgacgccagtacgggacaggggcggcagacgctag

SEQ ID NO: 281009 - DNA, 1752 bp, Artificial Sequence
  derived and/or modified sequence
atgctgtctgagagcaaggagggggaggagaaggaggaggtgaccatggacaccagcgagaacagaccagaaaatgatgtgcctgagccccccatgcccatcgctgaccaggtgtccaatgatgacaggcctgagggctctgtggaggatgaggagaagaaggagagcagcctgcccaagagcttcaagaggaagatctctgtggtgtctgccaccaagggcgtgcctgctggcaacagcgacacagagggcggccagcccggcaggaagaggcgctggggcgccagcacagccaccacccagaagaagcccagcatcagcatcaccacagagagcctgaagagcctcatcccagacatcaagcccctggccggccaggaggccgtggtggacctgcacgcagatgacagccgcatcagtgaagatgaaacagaaagaaatggagatgatggcacccatgacaagggcctgaagatctgcaggacagtgacccaggtggtgcctgctgagggccaggagaatggccagcgggaggaggaggaggaggagaaggagcctgaggccgagccccctgtgcccccccaggtgtctgtggaggtggccctgcccccacctgctgagcacgaggtgaagaaggtgaccctgggggacaccctgaccaggaggagcatcagccagcagaagtctggagtgtccatcaccattgatgatcctgtgaggacagcccaggtgcccagccccccccggggcaagatcagcaacatcgtgcacatcagcaacctggtgcggcccttcaccctgggccagctgaaggagctgctgggccgcacaggcaccctggtggaggaggccttctggattgacaagatcaagagccactgctttgtgacctacagcacagtggaggaggccgtggccaccaggacagccctgcacggcgtgaagtggccccagagcaaccccaagttcctgtgtgccgactatgcagagcaggatgagctggactaccaccggggcctgctggtggaccggcccagcgagaccaagacagaggagcagggcatcccccggcccctgcaccccccacctcctcctcctgtgcagcccccccagcaccccagggctgagcagcgggagcaggagagagctgtgcgggagcagtgggccgagcgggagcgggagatggagcggcgggagaggaccaggtctgagcgggagtgggaccgggacaaggtgcgggagggccccaggagccgcagccgcagccgggacagaagaaggaaggagcgggccaagagcaaggagaagaagtctgagaagaaggagaaggcccaggaggagcccccagccaagctgctggatgacctcttcaggaagaccaaggccgccccctgcatctactggctgcccctgacagacagccagatcgtgcagaaggaggccgagcgggcagagcgggccaaggagcgggagaagaggaggaaggagcaggaggaggaggagcagaaggagcgggagaaggaggccgagcgggagaggaaccggcagctggagcgggagaagaggcgggagcacagccgggagcgggaccgggagcgggagcgggagcgggagcgggacagaggagaccgggaccgggaccgggagcgggaccgggagcggggccgggagcgggaccggcgggacaccaagaggcacagccgcagccgcagccgcagcacccctgtgcgggaccggggcggcagaagatag

SEQ ID NO: 281010 - DNA, 1752 bp, Artificial Sequence
  derived and/or modified sequence
atgctgagcgagagcaaggagggcgaggagaaggaggaggtgaccatggacacatccgagaacagacccgagaacgatgtgcccgaacccccaatgcctatagccgatcaggtgagcaacgatgaccggcccgagggaagcgtggaagatgaggagaaaaaagaatctagcctcccaaagtcgtttaaacgtaagatctctgtcgtgagcgccaccaagggtgtgcccgccggtaactccgacacagagggcgggcagcccgggcgtaagcgccggtggggagcatcaaccgccaccactcagaagaagcccagcatatctattaccaccgagtctctcaagtcactgatcccagacatcaaacccctagcaggtcaggaagccgtggtggatcttcacgccgacgactcccgcatcagtgaggatgaaaccgagcgaaacggagacgacgggacccatgacaagggcctcaagatctgtcggacggttacccaggtcgtgccagccgaaggccaagagaatggacaacgggaggaggaggaggaagaaaaggagcctgaagcagagcctcccgtgcctcctcaggtgtccgtggaggtagccctgcctccccctgccgagcacgaagtaaagaaagtaaccctgggcgacacgctcactagacgctccatttcccagcagaaatctggggttagtatcacaatcgatgatcctgtcaggaccgcacaagtgccatctccccctcgtggcaaaatttccaacatcgtacacatttcaaacttggtgcgtcccttcaccctgggccaactgaaggaacttctgggcagaacaggaaccctagttgaggaggcattctggatagacaaaatcaaaagtcactgctttgtgacgtactccaccgttgaggaagctgtggccactcggaccgcactgcacggggtaaagtggccacagagcaatccaaaattcctctgtgcagattatgctgagcaagacgagctagattatcacaggggcctgttggtcgaccggccatcagaaacaaaaacagaagagcagggcatacccaggccactccaccctccacccccacctcctgtgcagccccctcaacacccccgggccgaacagcgcgaacaggagagagcagtcagggaacaatgggccgagagagagagagaaatggagaggcgggaacgaacaaggagtgagagagaatgggatcgtgataaggtcagagagggccccagatcacgttctcgtagccgtgaccggagaagaaaggagcgagccaagagcaaggagaaaaaatccgagaagaaggaaaaagcacaggaagaaccaccagccaagttgttggatgatctttttagaaagacaaaggctgctccatgtatctattggctgccattgaccgattcacaaatcgtgcagaaagaggctgagagggctgagcgtgccaaagaaagggagaagaggagaaaggagcaggaggaagaggagcagaaagagagggagaaggaggccgaaagagaaaggaataggcaactggagagggagaagagacgggaacactctcgcgagagggaccgggagcgcgagagagagcgggagcgcgaccggggagacagggacagggatcgggagagggatagagagagaggcagggaacgcgacagacgcgataccaagcgccactcccgctcgcgaagcaggagcactcctgtgcgcgatcggggaggacgccggtag

SEQ ID NO: 281011 - DNA, 2738 bp, Artificial Sequence
  derived and/or modified sequence
aagtggcaagatggctcccctgcatgtctccggctgatcgctgccgctccgccaatacaatagagccagccactaccagcagcctggccctcttcctccttctccagagagaccaatccagccgaactcggggtttgccgtgaggacttaacgcttatctcttaaaagccagatctgttttagcctccccgcaccaccaccacctccccttccatttaccattttttggatccccggttgctacatctcaattttctctctctggatcgggtggctggggaggaggtggtgggatcttggaacaaggaaggtgtggttttttttctttattttttttaggattttttttgtttggtttttgttatttcttccattccagaaagggataaacagcacttccagggggagaaaaaaaatcatgttatcagaaagcaaagaaggtgaggagaaggaggaagtgaccatggacacaagtgaaaacagacctgaaaatgatgttccagaacctcccatgcctattgcagaccaagtcagcaatgatgaccgcccggagggcagtgttgaagatgaggagaagaaagagagctcgctgcccaaatcattcaagaggaagatctccgttgtctcagctaccaagggggtgccagctggaaacagtgacacagaggggggccagcctggtcggaaacgacgctggggagccagcacagccaccacacagaagaaaccttccatcagtatcaccactgaatcactaaagagcctcatccccgacatcaaacccctggcggggcaggaggctgttgtggatcttcatgctgatgactctcgcatctctgaggatgagacagagcgtaatggcgatgatgggacccatgacaaggggctgaaaatatgccggacagtcactcaggtagtacctgcagagggccaggagaatgggcagagggaagaagaggaagaagagaaggaacctgaagcagaacctcctgtacctccccaggtgtcagtagaggtggccttgcccccacctgcagagcatgaagtaaagaaagtgactttaggagataccttaactcgacgttccattagccagcagaagtccggagtttccattaccattgatgacccagtccgaactgcccaggtgccctccccaccccggggcaagattagcaacattgtccatatctccaatttggtccgtcctttcactttaggccagctaaaggagttgttggggcgcacaggaaccttggtggaagaggccttctggattgacaagatcaaatctcattgctttgtaacgtactcaacagtagaggaagctgttgccacccgcacagctctgcacggggtcaaatggccccagtccaatcccaaattcctttgtgctgactatgccgagcaagatgagctggattatcaccgaggcctcttggtggaccgtccctctgaaactaagacagaggagcagggaataccacggcccctgcaccccccacccccacccccggtccagccaccacagcacccccgggcagagcagcgggagcaggaacgggcagtgcgggaacagtgggcagaacgggaacgggaaatggagcggcgggagcggactcgatcagagcgtgaatgggatcgggacaaagttcgagaagggccccgttcccgatcaaggtcccgtgaccgccgccgcaaggaacgtgcgaagtctaaagaaaagaagagtgagaagaaagagaaagcccaggaggaaccacctgccaagctgctggatgaccttttccgaaagaccaaggcagctccctgcatctattggctcccactgactgacagccagatcgttcagaaagaggcagagcgggccgaacgggccaaggagcgggagaagcggcgaaaggagcaagaagaagaagagcaaaaggagcgggagaaggaagccgagcgggaacggaaccgacagctggagcgagagaaacgtcgggagcacagtcgggagagggacagggagagagagagagaaagggagcgggacaggggggaccgagatcgggatagggaaagggaccgagaacgaggcagggaaagggatcgcagggacaccaagcgccacagcagaagccggagtcggagcacacctgtgcgggaccggggtgggcgccgctagctgggaaaacactagagctgcaggtaccagccactcggccccagggggttatggccacagagggataggcacagtctccaccaccctggagccaagggtctttcacatcacctatccctacatacataccaaatggaaaagtggccatccttttccccccaaacacacccccttaacctatctcttgggacttagcccgaccctccctctcatttcccattaagtctgagaggcaagagctaggttaggcaaggaggtggttggccagagatggggaacagccaggtgccccagtcctctgatttttcctccatcctgcttaccacctccctgggtacttacagccttctcttgggaacagccggggccaggactgggtcacctatgagctgaatcagcatctcctcctgagtcccagggcccctgcagttcccagtctcttctgtcctgcagcccttgcctctttcccacaggttccactttatatccaccttttccttttgttcaatttttatttttattttttttattattaaatgatgtggtctatggaaaaaaaaataaaaat

SEQ ID NO: 281012 - DNA, 1752 bp, Artificial Sequence
  derived and/or modified sequence
atgctgagcgagagcaaggagggcgaggagaaggaggaggtgaccatggacacaagcgagaataggcccgagaacgacgtgcccgagcccccgatgcccatcgccgatcaggtaagcaacgacgaccggcctgagggatctgttgaggatgaggaaaaaaaagagagctccctacctaaatctttcaagaggaagatttctgtcgtatcagcaaccaagggcgtacctgctggcaatagcgacaccgagggcggccaacctggccgtaagaggcgatggggcgcgtcaaccgccaccacacagaagaaaccctcaatctccatcaccacagaaagtctcaaatctctcatcccggatataaagccgctcgcaggtcaggaggccgtggtggaccttcatgctgacgattcacgaatttctgaggacgagacagagcgaaacggggacgatggaacacatgacaagggtctcaaaatctgcagaacagttactcaggtggtaccggctgagggccaggagaatggacagagggaggaagaagaggaagagaaggaacctgaggctgaacctcctgtacctccccaggtgtctgtcgaggtggcccttcccccccctgccgagcacgaggtcaagaaggtgacactgggggacactttgacccgaaggagtattagtcagcagaaatctggagtttctatcaccattgacgaccccgtgagaaccgctcaggtcccatctccacccaggggaaagatctcaaatatagtacacataagtaaccttgtcagacctttcacacttggtcagctgaaggagctgcttggaaggacaggaaccctggtggaggaagccttctggattgataaaataaaatcgcactgttttgtgacttactccactgtggaggaggcggtagctacaaggacagctctgcacggtgtgaaatggcctcagagcaatccgaagtttttatgtgctgattatgccgagcaagatgagctggactaccatagggggctcctggtcgaccgaccgtctgaaacaaagactgaggagcagggtatcccacgcccacttcacccacctcctcccccacctgtgcagcccccacagcacccacgtgccgagcaaagagaacaggaacgcgccgtcagagagcaatgggcggagagggagagagagatggaacggcgcgagaggacacggagcgagcgtgagtgggaccgcgataaagttcgagagggaccacgcagtcggagtagatcgcgggataggcggcggaaagaaagagcaaaatccaaggagaagaagtccgagaaaaaagaaaaggcacaagaggagccacctgcaaagctcctcgacgatctgttccggaagaccaaagctgctccctgtatctattggcttccgctgacagatagccagatcgtgcagaaggaagccgagagggccgagagagctaaggaacgggaaaagagacgtaaagaacaagaagaggaggaacagaaggagcgcgaaaaagaagccgaacgagaacgtaatcggcagttagaacgcgagaaacgaagagagcactctcgagaacgggaccgtgaacgcgaaagagagagggagagggacagaggcgacagagaccgggaccgggagcgggaccgggagcggggcagggaacgcgatcgtcgtgacactaagcgccactctcggtccaggtcgagaagtactcccgtgagagatcgcggaggccggcgctag

SEQ ID NO: 281013 - DNA, 1752 bp, Artificial Sequence
  derived and/or modified sequence
atgctcagcgagtctaaagaaggcgaggaaaaggaggaagtaacgatggataccagtgagaacaggcctgagaatgatgtccctgagcctcctatgcctattgctgaccaggtgtccaacgacgatcgcccagaaggttctgttgaggacgaggaaaaaaaagaatcgtccctgccaaagtcgtttaagaggaaaatcagcgttgtgagtgccaccaagggagtgcccgcagggaactctgatacggagggtggtcagccgggtcgtaaaaggcgctggggcgcatctaccgccactacacagaagaagccgtcaatctcaattaccacggagagtctgaagtcactgatcccagatattaagcccctagcaggccaggaggccgttgttgacctgcacgctgatgatagtagaatcagcgaggacgagactgagagaaacggcgacgacggcacccatgacaaaggtctgaagatatgtagaacggttacccaggtggtgccggcagagggccaggagaatggccaacgcgaggaagaagaggaggaaaaagaaccagaagccgagcccccagttcccccacaggtgagcgtcgaggtggccttgcccccacctgcagagcatgaggtcaagaaagtaaccttgggagatacactcacccgaagaagcatttcccaacagaaatcaggcgtttccatcacgatcgatgacccggtccggaccgcacaagtcccctctcccccaaggggcaaaattagcaacatcgtccacatctcaaacttagtcaggccttttaccctaggccagctgaaggaattgctgggacgcacgggaacacttgtggaagaggcattttggatcgataagataaaaagccactgctttgtcacttattctacagtggaggaggccgtagcgacacggaccgccttacacggcgtcaagtggccccagtctaaccccaagtttctgtgcgcggactatgctgaacaggacgagctcgactatcataggggccttctggttgacagacccagcgagaccaagacagaagagcaagggatcccccgacccctgcatcccccacccccacccccagtacagcctcctcagcatcctagagctgagcagcgcgagcaagagagagctgtgagagagcaatgggctgaacgggagcgcgaaatggagcggagagaacggactcgctccgagagagaatgggatcgcgataaggtacgcgagggccctcgaagccggtccagatctcgcgataggcggagaaaagagagggctaagtccaaggagaaaaaatccgaaaaaaaggaaaaggcacaggaggaacccccagccaagctgctggacgatctcttcagaaagacaaaggctgctccatgcatctattggctgccccttaccgacagccaaatcgtacaaaaagaggccgagcgcgcagagagggccaaagaaagggaaaagaggaggaaggagcaggaagaggaggagcagaaggagagggagaaagaggctgagcgcgaacgaaatcggcagctcgagcgggagaagcgtcgcgaacactcccgcgaacgggaccgggaacgagaacgggagcgggaaagggatagaggcgaccgagatcgggatcgggaaagggacagagaaaggggtagagaacgggataggcgggataccaagcgccatagtcgcagcaggtccaggtctacacccgtcagagatcgtggtgggaggcgctag

SEQ ID NO: 281014 - DNA, 1752 bp, Artificial Sequence
  derived and/or modified sequence
atgctctctgagtccaaagaaggcgaagagaaggaggaggtaacaatggacacatctgagaatagaccggagaacgacgtccccgagccacctatgcccatcgcagaccaggtatctaatgacgatagaccagagggtagtgtagaagatgaggaaaagaaggaaagttctcttcctaagtccttcaagagaaaaatatcagtcgtaagcgcaacgaagggggtgcccgcaggaaactccgacaccgagggcggacagcccggtagaaagagaagatggggcgcatcaactgcgactacacagaaaaagccatccatatctattaccactgagtcactgaagagcctaattcctgacattaagccattggcaggccaggaggccgtggtggacctccacgccgatgactcaagaatttcagaggatgagactgagagaaatggtgacgatgggacacatgacaaggggctgaaaatctgtcgtacagtgacacaggtggtgccagccgagggccaggaaaatgggcagcgtgaggaggaggaagaagaaaaggaacctgaggcagaacccccagtgccccctcaggtgtcagtggaggtggcactgcctcccccagccgaacatgaagttaaaaaggtcacattaggagacaccctgactcgcaggagcatttcccagcaaaagagcggtgtgtcaataactattgacgaccccgttcgtactgcccaggtcccttccccaccgcgtggaaaaatcagcaatatcgttcacattagcaatcttgtcaggccatttactctcggccagctcaaagagctgctgggtagaactggaactcttgttgaagaagccttctggatcgacaagataaagtcacactgcttcgtgacctatagcaccgtcgaggaagcggtagccaccaggacagctctgcatggcgtaaaatggcctcagagcaacccaaaatttttatgcgcagattacgccgagcaggatgaactggattatcatcggggtctcctggtggacagaccgtccgagacaaaaacggaggagcagggaatccctcggcctctgcacccacctccccctcctcctgtgcagccaccgcaacaccctcgggcagagcagcgcgagcaggagagagccgtgcgcgagcagtgggctgagcgtgagcgagaaatggagcgcagagaacggaccaggagcgagagagaatgggatcgggacaaagttagggagggaccaaggagccgttcccgctcacgagaccgacgtaggaaagaacgcgcaaagagtaaggagaagaagagcgagaagaaagagaaagcacaggaggaaccgcctgcaaaactacttgacgatttgttccgcaagaccaaggccgctccttgcatatactggttgccactgaccgatagccagattgtccagaaagaggcggagcgagccgagagagcaaaggagcgcgagaaaagaagaaaggagcaggaggaagaggaacagaaggaacgcgaaaaagaagcagagcgcgaacggaacaggcagctggagagggagaaacggcgtgaacattccagggaacgggatagggagcgtgagcgcgaacgggaacgtgatcgcggagacagagatagggatcgcgagcgcgatagggaacgtggccgagaaagggatagacgcgatacgaaaaggcattctcggtcccggagcagatcgactccagtgagggatagaggcggaagacgttag

SEQ ID NO: 281015 - DNA, 417 bp, Artificial Sequence
  derived and/or modified sequence
gcagagagaggcactttgcaccacagacagatagcaagaagggaaagacagagagtgagaaaaaagaggagtcagtcgctcctggggaagggagagagtgagactgggagaaagagaagcacagaaagtgtgtgtaaaacggagtaaagaaagaaaaaaaaaaaactacccttaaagcacatttaaaaaaaaaaaaaactctggcaattcaagaaagaaacaggctacgtttaaagagcatagagacaatgaaaggctaaagaaaattttaaaatctctgccacagtctcataggtgcttggaaatgaaagtagaactgcctgtctttaacggactctgacagagagggtgaaggggaaccagagcgcacaagggaactgactcaggaggcagagaagatgggcatcctcagcgtag

SEQ ID NO: 281016 - DNA, 2669 bp, Artificial Sequence
  derived and/or modified sequence
gcagaagcctatgagttgattaattctaacaactggatactgtggtttagggcttggaagatgaaaaggaggcctctgagaatgaaacagacatggaagaccccagagaaatccagactgattcttggcgtaaacggggagagagcgaggaaccgtcatctcctcagtccctgtgtcatctagtggccccagggcacgagcggtctggctgcgagacccctgtcagcgtggactccatccccctggagtgggaccacacaggcgacgtggggggctcctcctctcacgaagaggacgaggagggcccatactacagcgcactgtcagatgtagaaatccctgaaaatcctgaggcatatcttaaaatgaccacaaaaactttgaaagcgtcttctggtaaatccatttcggatggccactcgtggcatgttcccgacagcccttcctgtcccgagcatcactacaagcaaatggaaggtgacaggaatgttccacctgttccccctgcgtccagcaccccttataaaccaccctatggaaagctactattacctccaggcacggatggtggcaaagaaggcccgcgagtcctgaatggcaacccacagcaggaagacgggggactggccggtatcacagagcagcagtcaggtgccttcgacagatgggagatgattcaagcacaggagcttcacaataagctcaaaataaaacaaaatttgcaacagctgaactctgatatcagcgccatcactacttggctgaaaaaaactgaagcagagctggaaatgttaaagatggcaaagcctccctctgatatccaggaaatagaactgagagtgaagagactgcaggagatactgaaagcctttgacacttacaaggcattagtggtctctgtcaacgtgagcagcaaggaatttctgcaaaccgagagccccgaatccacagagctccaaagtagactccgccagctgagcctgctctgggaagcagcacagggcgcagtggacagctggagagggggcttacgacagtcgctcatgcagtgccagggctctaagacacggccgcgctctgatgtgttgttttttaaggacttccaccagttgagtcaaaatctgctgctgtggttagcgagtgccaagaaccggaggcagaaggctcatgtcaccgatccaaaggcagacccccgggctctcctagagtgtcggagggaactaatgcaactggaaaaggagctggtagaacgtcaacctcaagtggacatgttacaggagatttcaaacagccttctcattaagggacatggagaagactgtattgaagctgaagaaaaggtgcatgttattgagaagaaactcaaacagttacgggagcaagtgtcccaagatttaatggccttgcagggaacccagaacccagcctcacccctgcccagcttcgacgaggtagactcgggggaccagcctcctgcaacatccgtgccagctccccgagcaaagcagttcagagcagtgagaactacagaaggcgaggaggagacagagagcagggtccccggcagcacacggccacagcgctccttcctctcaagggtggtccgggcagccctacccctgcagctgctcctcctgctgctgctgctcctggcctgcctgctgccctcctccgaagaagactacagctgcactcaggccaacaactttgcccggtccttttaccccatgctgaggtacaccaatgggccaccccccacatagagggcatagctggccacagtgctacaccacctgcctgattgccaagggtgcccagcacgtggccccagaccaatctgagtgacttagtgttggcaaggtcccgggacctgtgcagacttcttctgggcttacccagcacgggctccctggagcccagggcagctttcagattgtgttcctccccaggagcagggaacctgtgtggcaggtgccccgggtattttggcagaactagttgattagtttagggatctctggaaatgtcagtttcctgaagagccaagcactttgtgaattctggtttgtttgtaaaacagcattattataatgtaggtatggtcaatgagcagtggtgtccatcacatatattatagaagcaagcgaggacattccaccctagaaatggttcagaaactcataggcacccttagctgatggaaacaatcaatcatatttaatacgcttagaatcagttttactccaatcagctggcaattttgagctgccggttatacaccaaaatgttctgttcagtacctagctctgctcttttatattgctttaaatttttaaagaaattgtattgcatggatgtggttatttgtgcatattttttaacaatgcccaatctgtatgaataatgtaaacttcgatttttttttaaaaaaattagattttagctggagcttttgactaatgtaaagtaaatgccaaactaccgacttgatagggatgtttttgtaagttaattttctaagactttttcacatccaaagtgatgctttgctttgggttttaactgtttggccacggcgggggtgggggcggggggttggtacagaaacttgaagctgtttgtgatatgtacaactcagatgtttctcattaaaaaacaaaattagccag

SEQ ID NO: 281017 - DNA, 2169 bp, Artificial Sequence
  derived and/or modified sequence
cagatactgattgccacgattacacacctgctaccatccacagaagcctccagctacgagatggataaaaggctggtcgtgtctctacttctgtgcctcctggactggattatggccctgcccctgaaaactcttctgcaacctttccatgccaccggagccgaaagcgacaagaccgaaaagtctgtgcttaactgcatttataaggttcttcacgggtgtgtttatggcgcacaatgtttttcaaacccgagatatttccccatgtctttgtcggatcttgcgagcgtggactatgacccctttatgcatttagaaagtctgaaagagcccgagccgttgcacagccctgacagtgagcggtcaagcaagctgcagcccgtgaccgaagttaagacgcagatgcagcatggcttgatctctatcgctgctcggactgtcatcacacatctggtgaatcacctcggtcactacccaatgtcaggaggcccggcaatgctgacctcccaagtctgcgaaaaccatgataaccattactcagaatccaccgaactcagtcctgaattattcgagtcccccaacatccagttctttgttcttaataataccaccttagtaagctgtattcagatccgctcagaggaaaatatgcccggcgggggcctctccgccggacttgcatccgcaaatagtaatgtgcgaattatcgttcgagacctctcgggcaagtactcatgggattctgctatcctgtacgggccgcctccggtttctggcctttcagagcccacgtcctttatgttgtccttgtcacaccaggagaaaccagaagagcccccgaccagtaacgagtgcctcgaggacattacggtcaaggatggcctttcgctgcaattcaagcggtttagagagacggtcccgacgtgggataccatcagggatgaagaggatgttctggacgagcttttgcaatacttgggcgtcaccagtcctgaatgtctccagcgcactgggatcagtcttaacatacctgcaccacagccggtgtgcataagtgagaaacaggaaaatgatgtgatcaacgcaatcctgaagcagcacacagaagagaaagagtttgtggagaaacattttaacgacctgaatatgaaagccgtggagcaggatgagcccatcccacagaaaccacagagcgccttttattattgcagactcttgctctccatcctggggatgaatagctgggacaaaagacgctcctttcatctactgaaaaaaaatgaaaaactgctgagagaacttcgcaatctcgacagccgccaatgccgggagacgcacaagatcgctgtgttttatgtcgccgaaggccaggaggataagcacagtattctgacaaacaccggcggctcccaggcgtatgaagacttcgtagccggtttagggtgggaagttaacctgactaatcactgtggctttatgggcggcctgcagaagaataaatctacgggtctgacgaccccctattttgcaacgtctactgtggaggtcatatttcatgttagcaccagaatgcccagcgatagcgatgactccctgaccaagaagctgcggcatcttggcaatgacgaagtccacatcgtgtggtcagagcacacccgagactatcggagggggataattcctacagaattcggtgacgtgctgatcgttatctatccgatgaagaatcacatgttcagcatccagattatgaaaaaacctgaggtacctttcttcggccctctctttgacggtgcgatcgtcaatgggaaagtgctgccgataatggtccgagctaccgcgataaacgcctcaagggctcttaaaagcttgattcccctctatcagaacttctacgaagagagggcccggtacctccagactatagtgcaacaccacctggagcccactacattcgaagattttgctgcccaggtttttagcccggccccctatcatcacctgccctctgatgccgtcgggtcttacccagagatattaccaagcgagacacccaccgccacacaagtagacggggccgacctggcaagccctatgagccccaggactagtaaatcccggatgtccatgaagcttcgccggagttcgggaagcgccaataagtcctag

SEQ ID NO: 281018 - DNA, 2169 bp, Artificial Sequence
  derived and/or modified sequence
cagatcctgattgccaccatcacccacctgctgcccagcacagaggccagcagctatgagatggacaagaggctggtggtgtccctgctgctgtgcctgctggactggatcatggccctgcccctgaagaccctgctgcagcccttccacgccaccggggctgagagtgacaagacagagaagtctgtgctgaactgcatctacaaggtgctgcacggctgtgtgtatggagcccagtgcttcagcaacccccgctacttccccatgagcctgagtgacctggcctctgtggactatgaccccttcatgcacctggagagcctgaaggagcctgagcccctgcacagcccagattctgagaggagcagcaagctgcagcctgtgacagaggtgaagacccagatgcagcacggcctcatcagcattgctgccaggacagtcatcacccacctggtgaaccacctgggccactaccccatgtctgggggccctgccatgctgaccagccaggtgtgtgaaaatcatgacaaccactacagcgagagcacagagctgagccctgagctgtttgagagccccaacatccagttctttgtgctgaacaacaccaccctggtgtcctgcatccagatccgctctgaggagaacatgcctgggggcggcctgtctgctggcctggccagcgccaacagcaatgtgcgcatcatcgtgcgggacctgagcggcaagtacagctgggacagcgccatcctgtatggccccccacctgtgtctggcctgtctgagcccaccagcttcatgctgagcctgagccaccaggagaagccagaggagccccccaccagcaatgaatgtctggaggacatcaccgtgaaggatggcctgagcctgcagttcaagcgcttccgggagaccgtgcccacctgggacaccatcagagatgaggaggatgtgctggatgagctgctgcagtacctgggcgtgaccagccctgagtgcctgcagaggacaggcatcagcctgaacatcccagccccccagcctgtgtgcatcagcgagaagcaggagaatgatgtgatcaatgccatcctgaagcagcacacagaggagaaggagtttgtggagaagcacttcaatgacctgaacatgaaggctgtggagcaggatgagcccatcccccagaagccccagagcgccttctactactgccgcctgctgctgagcatcctgggcatgaacagctgggacaagaggaggagcttccacctgctgaagaagaatgagaagctgctgcgggagctgaggaacctggacagccggcagtgccgggagacccacaagattgctgtgttctacgtggccgagggccaggaggacaagcacagcatcctgaccaacacaggaggcagccaggcctatgaggactttgtggccggcctgggctgggaggtgaacctgaccaaccactgcggcttcatgggcggcctgcagaagaacaagagcacaggcctgaccaccccctactttgccaccagcacagtggaggtgatcttccacgtgtccaccaggatgcccagcgacagtgatgacagcctgaccaagaagctgcggcacctgggcaatgatgaggtgcacatcgtgtggagcgagcacacccgggactaccgccggggcatcatccccacagaatttggagatgtgctgattgtcatctaccccatgaagaaccacatgttcagcatccagatcatgaagaagccagaggtgcccttcttcggccccctgtttgatggagccatcgtgaatggcaaggtgctgcccatcatggtgcgggccacagccatcaatgccagccgggccctgaagagcctcatccccctgtaccagaacttctatgaggagcgggcccgctacctgcagaccatcgtgcagcaccacctggagcccaccacctttgaagattttgctgcccaggtgttcagccctgccccctaccaccacctgcccagtgatgctgtgggcagctacccagagatcctgcccagcgagacccccacagccacccaggtggatggagctgacctggccagccccatgagccccaggaccagcaagagcaggatgtccatgaagctgcggcgcagcagcggcagcgccaacaagagctag

SEQ ID NO: 281019 - DNA, 2169 bp, Artificial Sequence
  derived and/or modified sequence
cagatcctgatcgccaccatcacccacctgctgcccagcaccgaggcatcgtcctacgagatggacaaacggctggtggtctctctattactatgcttgctcgactggatcatggctctgcctctgaagaccttgctccagccgttccatgcaacaggggcagaatcagacaagacagaaaagagcgttttaaattgtatttataaggttctacacggctgcgtgtatggagctcagtgcttttcgaatcctcgctactttccgatgagcttgagtgatctggcaagcgtggactatgatcccttcatgcaccttgagtccttgaaggaaccagagcctctacactcacctgacagcgagagatcctctaagcttcaaccggtgacagaggtgaagacccaaatgcagcacggactcatatccatcgccgcccggaccgtaatcacccatttggtaaaccacttaggacactaccccatgtctggtgggcccgctatgttgacctctcaggtctgtgagaaccacgataaccactactctgagagtacagagctgagccctgaactctttgaaagtcccaatatccaattctttgtcttgaataacacaaccctggtctcctgtattcaaatccggtcagaggagaacatgcccggcggcggcctttctgccgggttggcctcagccaacagcaacgtacgtatcatcgtccgagacctctctggtaaatactcctgggactcagccatcctgtatggcccgccacccgtttccgggctctcagagcctacctcttttatgcttagcctgtcacaccaggagaagccggaagaaccgccaacaagtaatgaatgtctggaagacatcacggtaaaggacggactgtccctccaatttaaaagatttagagaaacagttcccacctgggacactatccgcgacgaggaagacgtgcttgacgagctgctccagtatctgggtgtgacgtctccggagtgtttgcaaagaacaggaatctccttaaacatccctgcaccccagcccgtgtgcatatccgagaagcaagaaaatgacgtgatcaacgctatccttaagcagcatactgaggaaaaggaatttgtcgaaaagcattttaacgatctgaatatgaaagcagtggaacaggatgagccaataccccaaaagccacaaagcgccttctactattgcaggttgctcttgagcattttaggcatgaacagctgggataaacggagaagctttcacttactcaagaagaatgaaaagctactgcgggaactgcgaaatctggatagccgccaatgccgtgaaacgcacaaaattgcggttttctatgtagcagagggccaggaagataaacactcaattctgaccaataccggtggttctcaggcatatgaagactttgtggcagggctgggttgggaagttaatctcaccaatcattgtggtttcatgggcggattacagaagaacaaatctacaggcctgaccacaccctacttcgcaacgtcgacagtggaggtgatctttcatgtgagcactagaatgccatctgatagcgacgattctctgaccaagaaactgaggcaccttggcaacgacgaggtccacatcgtgtggtcagaacacacccgggactaccgccgcggcatcattccaacggagttcggagacgttttaatagtgatttatcccatgaagaatcacatgtttagcatccaaatcatgaaaaagccagaggtgccctttttcgggccactcttcgatggcgctattgtcaacggcaaggttctgccaattatggtgcgtgcaaccgctatcaatgctagccgggctctcaagagtctgattcccctctaccagaacttttacgaggagagagcaaggtacctgcagaccattgtccaacaccaccttgagcctaccacattcgaggattttgcggctcaggtcttttcccctgccccatatcatcatctgccctccgacgctgttggatcctaccccgagattcttccttcagagacccccaccgccacacaggtggatggagcagatctggcatctccaatgtccccccgcacttctaagtctcggatgtccatgaaactgcgacgttcgagcggcagcgcgaacaagtcctag

SEQ ID NO: 281020 - DNA, 2169 bp, Artificial Sequence
  derived and/or modified sequence
cagatcctcattgctacaatcacccatctgctgcctagcacagaggcctcaagctacgaaatggataagagactcgtcgtgtccctgttactgtgcctcctggattggatcatggctcttcccttgaagaccctcttacagccatttcatgcaactggagccgagtcggataaaaccgaaaagtctgtgctaaattgtatttataaggtgctgcacggttgtgtgtacggggctcagtgttttagcaacccaaggtatttcccaatgagtctgtctgacctggcgtctgttgattacgacccatttatgcacttagagagtctcaaagaacctgaacccttgcacagtccagacagtgaaagatccagcaagctccaaccagtgaccgaagtcaagacgcagatgcagcatgggttaatctcgattgccgctcggacggtcatcacccatctggtcaatcacctcggacactatcccatgagcggcggtcctgcaatgctgacctcccaagtttgcgaaaaccacgataatcattactccgagtctaccgagctgagcccagagctgtttgagagcccaaacatacagttctttgtcttgaataacacgactctggtcagctgcatccagatccggtcagaggagaatatgcccggtggtgggttgagtgccggactcgccagtgctaatagtaacgtgaggatcattgtgcgtgacctaagcggaaagtatagctgggattccgctatcctgtatggcccacctccagtgagcgggttatcagaacctacttctttcatgctgtcactgtcgcaccaggagaaaccagaggagccacctacctctaatgaatgcttagaggacatcaccgtgaaagacggtctgagcctccagttcaagaggttccgtgaaacggttccaacttgggacaccattagggatgaagaggatgtcctggatgaactcctacagtacctcggagtcacgtcccctgagtgcctccaaaggactggtatctctctgaacatccctgccccacagccggtgtgtataagcgagaaacaggaaaacgacgtgataaatgcgattcttaaacagcacactgaagagaaagagttcgttgagaagcacttcaatgacctgaatatgaaagcggtggaacaagatgaaccgatccctcagaaaccccagtccgcgttttactactgtcgcttgcttctgagcattcttggcatgaactcgtgggataagcgccgaagcttccatctgctcaagaagaatgaaaagctcttgcgcgaactgcggaacctggactctcggcagtgtcgggagacccataagatcgctgtgttttacgtggcagaagggcaagaggacaagcacagcatcctaacgaacactggcggttctcaggcttatgaagattttgtcgcgggattggggtgggaggtcaacctgacaaatcattgcggattcatgggagggttacagaagaataagtccacaggactaactactccttatttcgctacatcaaccgtcgaggttatttttcacgtatctacccgtatgcccagcgactccgacgactctctgactaaaaagctgagacacctcggcaatgacgaggtccacatagtgtggtccgagcacaccagggattatcggaggggaattataccaaccgaattcggcgatgttctgatcgttatctatcccatgaagaaccatatgttcagcattcaaattatgaagaagcctgaagttccgtttttcggcccacttttcgacggcgcaatcgtgaacggcaaggtgctccccattatggtcagggctacagccatcaacgccagtcgcgcactgaagagcttaatccccctgtatcagaatttctacgaagagcgcgctaggtacctccagacaatcgtccagcatcatctcgagcctactactttcgaggatttcgccgcacaggtgttctcaccagcaccctaccaccacctgcctagtgatgctgtcggatcttatcctgagatcctcccctcagagacgcccacagcaacccaagtcgacggggcagacctggctagcccaatgagccctcgaacatctaagtcacgtatgtccatgaagctgagacgctcctccggaagtgcgaataagtcatag

SEQ ID NO: 281021 - DNA, 3354 bp, Artificial Sequence
  derived and/or modified sequence
cagatcctaatagctaccatcacccatcttttaccaagtacagaggcttcatcttatgaaatggacaagaggttggtagtatctttacttctctgccttctggactggatcatggccttacctctaaagacactgctccaaccatttcatgctacgggagcagaaagcgataaaacagaaaaatctgttctcaattgcatttataaggttttacatgggtgtgtttatggagctcagtgttttagcaatccaaggtattttcccatgagcctctctgatttggcatctgtagattatgatccttttatgcatttggaaagtctgaaagagcctgagcctctgcactctcctgactcagaacgatcttctaaactccagccagtaacagaagtgaaaactcaaatgcagcatggattaatctctatagcagcccgcactgttattacacatctggtaaatcacctgggccattatccaatgagcggtggtcctgctatgctaacaagtcaggtgtgtgaaaatcacgacaatcattacagtgaaagtactgaactttctcctgaactctttgagagtccaaatatccagttctttgtgttaaataatacaaccttagtgtcctgtatccagatcagatcagaagagaatatgcctggaggaggtttatctgctggccttgcatcagccaattcaaatgtcagaatcatagtacgtgatctctctggaaaatattcatgggattctgctatactgtatggcccacctcctgtaagtggcttgtcagaacctacatctttcatgctttcattgtctcaccaagagaagccagaagagcctccgacatctaatgaatgcttagaagatataaccgtaaaagatggactttctctccagtttaaaagatttagagaaactgtaccaacttgggatacaataagagatgaagaagatgttcttgatgagctcttgcagtatttgggtgttactagtcctgaatgcttacagagaactggaatctcacttaatattcctgctccacaacctgtgtgcatttctgaaaaacaagaaaatgatgttattaatgctatccttaagcaacatacagaagaaaaagaatttgttgagaagcactttaatgacttaaacatgaaagctgtggaacaagatgaaccaatacctcaaaaacctcagtcagcattttattattgcagattgcttcttagtatattgggaatgaattcctgggacaaacggaggagctttcatctcctgaagaaaaatgaaaagctacttagagaacttaggaacttggattcaaggcagtgccgagagacacacaagattgcagtattttatgttgctgaaggacaagaagacaaacactccattctcaccaatacaggaggaagtcaagcatatgaagattttgtagctggtcttggttgggaggtaaatcttacaaaccattgtggttttatgggaggactacaaaaaaacaaaagcactggattgaccactccatattttgctacctctacagtagaggtaatatttcacgtgtcaacaagaatgccttctgattctgatgattctttgaccaaaaaattgagacatttgggaaatgatgaagtgcacattgtttggtcagagcatactagagactacaggagaggaattattcccacagaatttggtgatgtccttattgtaatatatccaatgaaaaatcacatgttcagtattcagataatgaaaaaaccagaggttcccttctttggtcccctttttgatggtgctattgtgaatggaaaggttctacccattatggttagagcaacagctataaatgcaagccgtgctctgaaatctctgattccattgtatcaaaacttctatgaggagagagcacgatacctgcaaacaattgtccagcaccacttagaaccaacaacatttgaagattttgcagcacaggttttttctccagctccctaccaccatttaccatctgatgccgttggctcctacccagagattctacccagtgaaactcccacagcaacgcaggtagatggggctgacctggcctctccaatgtctcctcgaactagcaaaagccgcatgtccatgaagctgcgtcgttcctctggctcagccaataaatcctaaggagacaagcagcccagcagtgatcagcagtagccaccttagcacgaacatagggttaaccctttcaggccttcatgtctgccataacatgcatgtttcttcctgtacatttatttgagaaaacactggatttaaataattttaaataatttgtagcttaatattaaagatttaagttatttattgtttcattttttttcccacaatccaagctgccatattttgagggcagggggagttttattctacaccctttaccttcctagataattatgtctaagtagttttatctttaatttcatggttaactgtgagccaaaatacaattggacaattagtctcattatttattgtgccccattgcaactttatggttcaataaatatataattttttacaaatgtaaaattttacatttaagcatttgtaaagttacagcaaaagatgtacctgttaatacacagaatgtgtacagattatttgttatgacaataaaacactcaaaataaatggtctttagcatctcaaattccaactgaaatcattttagtattaactcttcttcccaaagcaatgtctcatttcttggctgtgcaggtgatgccatgttatatccaataactagaaaaatcactgtgctgaacttttatgtttagcttccaagtatttttctaatgttttgcatttcaagtggtatcactgttaaatgccatttgttttcagattgtggccttttattattggctgctagatcctggtgtttctatgttcttttttaagcaccaaaaagaagatggggaagaaaagaaggaaaattttctgatataaatatgttgttcaaattatgagtattatttaaaaaagaaaaaggaacataacccaggagtctaagttaaatctaatattgttaatactgaacttgcaggtccaggttggtatacattccaccctctagaagtattttcttacagtagataagctgctcacattttgttttgaatgggcatctcctgaggaaatgtagcatgacattggtactaactgcatgtgtaaatacatcatactggcaaaccgtaaaatataaattatgtatcatcattcatgtagtatctataatttgtaacagtgggggggaaagatgacatggtatttaataatacaataaaaatattcttatcacttcct

SEQ ID NO: 281022 - DNA, 2169 bp, Artificial Sequence
  derived and/or modified sequence
cagatcctgatcgccaccatcacccacctgctgcccagcaccgaggccagcagctacgagatggacaagagactggtggtgagcctgctgctgtgcctgctggactggatcatggccctgcccctgaagaccctgctgcagcccttccacgccaccggcgccgagagcgacaagaccgagaagagcgtgctgaactgcatctacaaggtgctgcacggctgcgtgtacggcgcccagtgcttcagcaaccccagatacttccccatgagcctgagcgacctggccagcgtggactacgaccccttcatgcacctggagagcctgaaggagcccgagcccctgcacagccccgacagcgagagaagcagcaagctgcagcccgtgaccgaggtgaagacccagatgcagcacggcctgatcagcatcgccgccagaaccgtgatcacccacctggtgaaccacctgggccactaccccatgagcggcggccccgccatgctgaccagccaggtgtgcgagaaccacgacaaccactacagcgagagcaccgagctgagccccgagctgttcgagagccccaacatccagttcttcgtgctgaacaacaccaccctggtgagctgcatccagatcagaagcgaggagaacatgcccggcggcggcctgagcgccggcctggccagcgccaacagcaacgtgagaatcatcgtgagagacctgagcggcaagtacagctgggacagcgccatcctgtacggccccccccccgtgagcggcctgagcgagcccaccagcttcatgctgagcctgagccaccaggagaagcccgaggagccccccaccagcaacgagtgcctggaggacatcaccgtgaaggacggcctgagcctgcagttcaagagattcagagagaccgtgcccacctgggacaccatcagagacgaggaggacgtgctggacgagctgctgcagtacctgggcgtgaccagccccgagtgcctgcagagaaccggcatcagcctgaacatccccgccccccagcccgtgtgcatcagcgagaagcaggagaacgacgtgatcaacgccatcctgaagcagcacaccgaggagaaggagttcgtggagaagcacttcaacgacctgaacatgaaggccgtggagcaggacgagcccatcccccagaagccccagagcgccttctactactgcagactgctgctgagcatcctgggcatgaacagctgggacaagagaagaagcttccacctgctgaagaagaacgagaagctgctgagagagctgagaaacctggacagcagacagtgcagagagacccacaagatcgccgtgttctacgtggccgagggccaggaggacaagcacagcatcctgaccaacaccggcggcagccaggcctacgaggacttcgtggccggcctgggctgggaggtgaacctgaccaaccactgcggcttcatgggcggcctgcagaagaacaagagcaccggcctgaccaccccctacttcgccaccagcaccgtggaggtgatcttccacgtgagcaccagaatgcccagcgacagcgacgacagcctgaccaagaagctgagacacctgggcaacgacgaggtgcacatcgtgtggagcgagcacaccagagactacagaagaggcatcatccccaccgagttcggcgacgtgctgatcgtgatctaccccatgaagaaccacatgttcagcatccagatcatgaagaagcccgaggtgcccttcttcggccccctgttcgacggcgccatcgtgaacggcaaggtgctgcccatcatggtgagagccaccgccatcaacgccagcagagccctgaagagcctgatccccctgtaccagaacttctacgaggagagagccagatacctgcagaccatcgtgcagcaccacctggagcccaccaccttcgaggacttcgccgcccaggtgttcagccccgccccctaccaccacctgcccagcgacgccgtgggcagctaccccgagatcctgcccagcgagacccccaccgccacccaggtggacggcgccgacctggccagccccatgagccccagaaccagcaagagcagaatgagcatgaagctgagaagaagcagcggcagcgccaacaagagctag

SEQ ID NO: 281023 - DNA, 2024 bp, Artificial Sequence
  derived and/or modified sequence
atgagatcgtccctattgacgtcgacagacagaagccgcgtccagtgagaaggaaagaacggccgctatagccctatcggctgctacaacaccaaaacgcatccacctaactggctgacgctacaccttggtctttccgggtccttgcacgcttcgctccaactcctgcagagctgagccggaggggaatccggaagggacacgctgaacaggaacagaaatgaataaaagtcgctggcagagtagaagacgacatgggagaagaagccaccagcagaacccttggttcagactccgtgattctgaagacaggtctgactcccgggcagcacagcccgctcacgattccggccacggtgatgacgagtctccgtcaacctcgtctggcacagctgggacctcctctgtgccagagctacctgggttttactttgaccctgaaaagaaacgctacttccgcttgctccctggacataacaactgcaaccccctgacgaaagagagcatccggcagaaggagatggagagcaagagactgcggctgctccaggaagaagacagacggaaaaagattgccaggatgggatttaatgcatcttccatgctacgaaaaagccagctgggttttctcaacgtcaccaattactgccatttagcccacgagctgcgtctcagctgcatggagaggaaaaaggtccagattcgaagcatggatccctccgccttggcaagcgaccgatttaacctcatactggcagataccaacagtgaccggctcttcacagtgaacgatgttaaagttggaggctccaagtatggtatcatcaacctgcaaagtctgaagacccctacgctcaaggtgttcatgcacgaaaacctctacttcaccaaccggaaggtgaattcggtgtgctgggcctcgctgaatcacttggattcccacattctgctatgcctcatgggactcgcagagactccaggctgtgccaccctgctcccagcatcactgttcgtcaatagtcacccaggaatagaccggcctggcatgctctgcagtttccggatccctggtgcctggtcctgtgcctggtccctgaatatccaagcaaataactgcttcagtacaggcttgtctcggcgggtcctgttgaccaacgtggtgacgggacaccggcagtcctttgggaccaacagtgatgtcttggcccagcagtttgctctcatggctcctctgctgtttaatggctgccgctctggggaaatctttgccattgatctgcgttgtggaaatcaaggcaagggatggaaggccacccgcctgtttcatgattcagcagtgacctctgtgcggatcctccaagatgagcaatacctgatggcttcagacatggctggaaagatcaagctgtgggacctgaggaccacgaagtgcgtaaggcagtacgaaggccacgtgaatgagtacgcctacctgcccctgcatgtgcacgaggaagaaggaatcctggtggcagtgggccaggactgctacacgagaatctggagcctccacgatgcccgcctactgagaaccataccctccccgtaccctgcctccaaggccgacattcccagtgtggccttctcgtcgcggctggggggctcccggggcgcgccggggctgctcatggctgtcgggcaggacctttactgttactcctacagctaattctgcagggcacagcccagagccatgtggatttgacttacgggagtaaagcgtaactttttactgcatctaatgagggtgttttaagtgacactcagtgtacacagatcccatcctctggctgctaggagagaagtgctgaatgttccgtgtggagatgctcaggaaagttatttgagttaaattgctggctgagagagcttggaagtccttttcataaaaggtacctctttccttttcttattgaattcttagaacttagttaaccctccctgccttttcttaacaaaaaggacttttctaaggactgaagatt

SEQ ID NO: 281024 - protein, 140 aa, Artificial Sequence
  derived and/or modified sequence
MEQNPPQQQRLALHNPLPKAKPGTHLPQGPSSRTHPEPLAGRHFNLAPLGRRRVQSQWASTRGGHKERPTVMLFPFRNLGSPTQVISKPESKEEHAIYTADLAMGTRAASTGKSKSPCQTLGGRALKENPVDLPATEQKE

SEQ ID NO: 281025 - protein, 416 aa, Artificial Sequence
  derived and/or modified sequence
MATPLVAGPAALRFAAAASWQVVRGRCVEHFPRVLEFLRSLRAVAPGLVRYRHHERLCMGLKAKTKQDLRKILEAQETFYQQVKQLSEAPVDLASKLQELEQEYGEPFLAAMEKLLFEYLCQLEKALPTPQAQQLQDVLSWMQPGVSITSSLAWRQYGVDMGWLLPECSVTDSVNLAEPMEQNPPQQQRLALHNPLPKAKPGTHLPQGPSSRTHPEPLAGRHFNLAPLGRRRVQSQWASTRGGHKERPTVMLFPFRNLGSPTQVISKPESKEEHAIYTADLAMGTRAASTGKSKSPCQTLGGRALKENPVDLPATEQKENCLDCYMDPLRLSLLPPRARKPVCPPSLCSSVITIGDLVLDSDEEENGQGEGKESLENYQKTKFDTLIPTLCEYLPPSGHGAIPVSSCDCRDSSRPL

SEQ ID NO: 281026 - DNA, 1251 bp, Artificial Sequence
  derived and/or modified sequence
atggccacccccctggtggccggccccgccgccctgagattcgccgccgccgccagctggcaggtggtgagaggcagatgcgtggagcacttccccagagtgctggagttcctgagaagcctgagagccgtggcccccggcctggtgagatacagacaccacgagagactgtgcatgggcctgaaggccaagaccaagcaggacctgagaaagatcctggaggcccaggagaccttctaccagcaggtgaagcagctgagcgaggcccccgtggacctggccagcaagctgcaggagctggagcaggagtacggcgagcccttcctggccgccatggagaagctgctgttcgagtacctgtgccagctggagaaggccctgcccaccccccaggcccagcagctgcaggacgtgctgagctggatgcagcccggcgtgagcatcaccagcagcctggcctggagacagtacggcgtggacatgggctggctgctgcccgagtgcagcgtgaccgacagcgtgaacctggccgagcccatggagcagaaccccccccagcagcagagactggccctgcacaaccccctgcccaaggccaagcccggcacccacctgccccagggccccagcagcagaacccaccccgagcccctggccggcagacacttcaacctggcccccctgggcagaagaagagtgcagagccagtgggccagcaccagaggcggccacaaggagagacccaccgtgatgctgttccccttcagaaacctgggcagccccacccaggtgatcagcaagcccgagagcaaggaggagcacgccatctacaccgccgacctggccatgggcaccagagccgccagcaccggcaagagcaagagcccctgccagaccctgggcggcagagccctgaaggagaaccccgtggacctgcccgccaccgagcagaaggagaactgcctggactgctacatggaccccctgagactgagcctgctgccccccagagccagaaagcccgtgtgcccccccagcctgtgcagcagcgtgatcaccatcggcgacctggtgctggacagcgacgaggaggagaacggccagggcgagggcaaggagagcctggagaactaccagaagaccaagttcgacaccctgatccccaccctgtgcgagtacctgccccccagcggccacggcgccatccccgtgagcagctgcgactgcagagacagcagcagacccctgtag

SEQ ID NO: 281027 - DNA, 1251 bp, Artificial Sequence
  derived and/or modified sequence
atggctacccccctcgtagcaggacctgctgctttgcgcttcgcagccgccgcctcttggcaagtggtccggggaaggtgtgtggagcactttccaagggttcttgaatttctacgttcgctgcgagccgtcgcccctggacttgtccgttaccgccatcatgaaagactatgcatggggctcaaggctaagaccaagcaagacttgcgaaaaattctggaggcacaggagaccttctaccaacaagtgaagcagctttctgaagcacctgtcgatcttgcctccaagctgcaggaactggaacaggagtatggagagccatttttagctgccatggagaaactcttgttcgagtacctctgccagctggaaaaagcattacccacccctcaggctcagcaacttcaggatgtgctcagctggatgcaacccggcgtgtcgataacttcaagccttgcctggagacaatacggagtggatatgggatggctcttgcctgagtgtagcgtgacggatagtgtgaaccttgccgagcctatggagcagaatccaccccagcagcagagattggcgctgcacaaccctctccctaaagccaagcccgggacacatctcccacaaggcccctcttcgaggacacatccagagccattagctggccggcattttaatctcgcccctctcggaagaaggcgcgtgcaaagccaatgggcgagcacccggggaggtcacaaggagaggccaacagtgatgctatttccttttaggaacctggggtcccctacccaggtcatctcaaaacccgaatcaaaagaggaacacgcaatttataccgcggacttggcaatggggaccagggctgccagtactgggaagagtaaatccccgtgccaaacactgggaggccgcgctctcaaggagaatcctgtggacctgcccgctactgaacagaaagaaaattgcctggactgctacatggaccctcttcggctgagtcttttgccaccgagagctcgcaagcccgtttgcccccccagcctgtgtagctcagtgatcactatcggtgacctggtgctggattccgatgaagaggagaatggccagggcgaagggaaggagtccctagaaaattatcagaagactaaattcgacactctcataccaactttgtgcgagtacctgccaccttccggtcacggagcaatcccagtgagcagctgcgattgccgggactcaagcagacccctgtag

SEQ ID NO: 281028 - DNA, 1251 bp, Artificial Sequence
  derived and/or modified sequence
atggccacccccctggtggccggccctgctgccctgcgctttgctgctgctgcctcctggcaggtggtgcggggccgctgtgtggagcacttcccccgggtgctggagttcctgcggagcctgcgggctgtggcccctggcctggtgcgctaccgccaccacgagcggctgtgcatgggcctgaaggccaagaccaagcaggacctgaggaagatcctggaggcccaggagaccttctaccagcaggtgaagcagctgtctgaggcccctgtggacctggccagcaagctgcaggagctggagcaggagtatggagagcccttcctggccgccatggagaagctgctgtttgagtacctgtgccagctggagaaggccctgcccaccccccaggcccagcagctgcaggatgtgctgtcctggatgcagcccggggtgtccatcaccagcagcctggcctggaggcagtatggagtggacatgggctggctgctgcctgaatgttctgtgacagattctgtgaacctggccgagcccatggagcagaaccccccccagcagcagaggctggccctgcacaaccccctgcccaaggccaagccaggcacccacctgccccagggccccagcagcaggacccaccctgagcccctggccggccgccacttcaacctggcccccctgggcagaagaagagtgcagagccagtgggccagcacccggggcggccacaaggagcggcccaccgtgatgctgttccccttcaggaacctgggcagccccacccaggtgatcagcaagccagagagcaaggaggagcacgccatctacacagctgacctggccatgggcaccagggctgccagcacaggcaagagcaagagcccctgccagaccctgggcggccgggccctgaaggaaaatcctgtggacctgcctgccacagagcagaaggagaactgcctggactgctacatggaccccctgcggctgagcctgctgcccccccgggccaggaagcctgtgtgcccccccagcctgtgcagcagcgtcatcaccatcggggacctggtgctggacagtgatgaggaggagaatggccagggcgagggcaaggagagcctggagaactaccagaagaccaagtttgacaccctcatccccaccctgtgtgagtacctgcccccatctggccatggagccatccctgtgagcagctgtgactgccgggacagcagccggcccctgtag

SEQ ID NO: 281029 - DNA, 1251 bp, Artificial Sequence
  derived and/or modified sequence
atggccacccccctggtggccggccccgccgccctgcggttcgccgcagcagccagctggcaggttgtcagaggaaggtgtgtggagcactttcctagagtgctcgagttcctgcggtcactgcgggctgtcgcgccaggccttgtcaggtaccgacaccacgaaaggctgtgtatgggcctcaaagccaaaaccaaacaggacctacggaagatcctggaagcccaggagacgttctatcagcaggttaagcagttatctgaggctccagtagacctcgcttccaagctccaggaactggaacaggaatacggcgaaccctttctcgcagcaatggaaaagcttttatttgagtatttgtgtcagctcgaaaaagccttgccgactccgcaggctcagcagttgcaagatgtgttaagctggatgcagcctggggtctccatcacctcgtctctcgcttggcggcaatatggagtggacatggggtggctgcttcctgaatgtagcgttaccgattcagtcaacctcgccgagccgatggaacagaaccctcctcaacagcagaggctggctttgcacaaccccctgccgaaggctaagcctggcacccatttgccccagggcccctcttctcgaacacaccccgagccgctcgccggacgacacttcaacctcgctccactgggacggcggcgggtgcagagccaatgggcctctaccagggggggtcacaaagaacgccccactgtgatgctttttccattcaggaatctgggctccccaactcaagtgatctcaaaacctgagtcgaaagaagaacatgccatttacaccgccgacttggctatggggaccagggccgcctccaccggcaagagtaaatctccttgtcaaactctcggagggcgagctttaaaggaaaacccggtagacctgcccgcaacagaacaaaaagagaattgcttagattgttatatggatccgttgcgcctctctttgctacccccgagggcccggaaacctgtctgtcccccatcactttgctccagcgtaatcacaatcggcgatctggtactggactccgatgaagaggagaatggccaaggggagggaaaggaatccctggaaaactatcaaaaaactaagtttgatactctgataccaacactttgtgagtacctgccaccgtctggccatggggccatacctgtgagcagttgcgattgcagagactcaagcagacccctatag

SEQ ID NO: 281030 - DNA, 1251 bp, Artificial Sequence
  derived and/or modified sequence
atggctacaccgttagtggctgggcctgcagccctgcgctttgccgcagccgcatcctggcaggtcgtgaggggcagatgtgtggaacacttccccagggttctggaattcctgcggtccctccgcgctgtcgctcccggtctggttcgttacaggcatcatgagcggctgtgtatggggctaaaagctaagactaaacaggacctgaggaagatattagaagcccaagaaaccttttatcaacaggtgaagcaactatcagaggcgcctgtagacctagcctctaaactgcaagagctagaacaggagtacggagagcctttcctggctgccatggagaagttgttgtttgaatacctatgtcagctggagaaggccttacccaccccccaagcccagcagctccaggatgtgctgtcatggatgcagccaggggtgtccatcacatcatccctggcttggcgccagtacggagtggatatgggctggctgctacctgagtgtagtgtcaccgactccgtgaatctggccgagcccatggagcagaatccaccgcagcagcagcggctcgccctgcataatccccttcctaaggccaaaccagggacgcacctgccccaggggccttctagcaggacacatcctgagccacttgcagggagacattttaaccttgctcccctcgggaggcgccgtgtgcagtcccagtgggcgtccaccagagggggacataaggagcgacctacagtgatgttattcccattccgcaacttgggcagccctactcaagtgatttccaagccagagtcaaaagaggaacacgccatttataccgccgacctggccatgggaacccgcgcagcctccacagggaagtcaaagagcccctgccaaaccctgggaggcagggcactcaaagaaaacccggtggacctgcccgctaccgaacagaaggagaactgtctggattgctatatggatcccttacgactgtctttgttaccccctcgagcacgcaagcctgtctgtccaccgtctctgtgtagcagtgtgatcacgattggggacctggtcttggactctgatgaagaggagaatggtcagggcgaggggaaagaatctctggagaattatcagaaaacaaaattcgatactctgatacccacactgtgcgagtatctgccaccatctgggcacggggcaattcccgtttcctcgtgtgactgcagggactcctcccggcctctctag

SEQ ID NO: 281031 - DNA, 1861 bp, Artificial Sequence
  derived and/or modified sequence
cgagacagcggcgacgtttaaagctgagcgacccagtgccactggagacggtcagcttctccactcaggctcctccagcccgagccagaagaccccctcccccagaattctgggggccgatggaagggagccgagtcagatcgcgaggtacccagagccgacagaccggagcgacagggagttgccagaagccccgcccctaggagtgatcggaaagcctcacccatccgggtgaggaacccggagggaccgcctccgggcggagcccgccgaccatggctacgcccctggtggcgggtcccgcagctctacgcttcgccgccgcggctagctggcaggttgtgcgcggacgctgcgtggaacattttccgcgagtactggagtttctgcgatctctgcgcgctgttgcccctggcttggttcgctaccggcaccacgaacgcctttgtatgggcctaaaggccaaggtggtggtggagctgatcctgcagggccggccttgggcccaagtcctgaaagccctgaatcaccactttccagaatctggacctatagtgcgggatcccaaggctacaaagcaggatctgaggaagattttggaggcacaggaaactttttaccagcaggtgaagcagctgtcagaggctcctgtggatttggcctcgaagctgcagagtgctctgttactgactcagtgaacctggctgagcccatggaacagaatcctcctcagcaacaaagactagcactccacaatcccctgccaaaagccaagcctggcacacatcttcctcagggaccatcttcaaggacgcacccagaacctctagctggccgacacttcaatctggcccctctaggccgacgaagagttcagtcccaatgggcctccactaggggaggccataaggagcgccccacagtcatgctgtttccctttaggaatctcggctcaccaacccaggtcatatctaagcctgagagcaaggaagaacatgcgatatacacagcagacctagccatgggcacaagagcagcctccactgggaagtctaagagtccatgccagaccctggggggaagggctctgaaggagaacccagttgacttgcctgccacagagcaaaaggagtgagtggaacagagttgcttcttactaggagcacattctttgcctgccttcccttcatcctatcctctttgcttgctctcacctcaggaattgcttggattgctacatggaccccctgagactatcattattacctcctagggccaggaagccaggtaggtagtctgagtcaggattggatcaacagcctcctctcttggggactctcaagagcctgtgttcatctagaagtagtagtttgattctggtttccctcctacagtgtgtcctccgtctctgtgcagctccgtcattaccataggggacttggttttagactctgatgaggaagaaaatggccagggggaaggaaaggtgagtgggaaggagcagaaagctgggaaaggggatgggtagaacaagactgagaaatccacatgcttcagaattcagagggttcagggaatggtttcggatagtaggctctccctgctcccttctctacaggaatctctggaaaactatcagaagacaaagtttgacaccttgatacccactctctgtgaatacctacccccttctggccacggtgccatacctgtttcttcctgtgactgtagagacagttctagacctttgtgatagaactaaaatgctctctgtactctagtctcctgcctcctcagctctgcaagtagtttagtaggaatgaagtggaagtccaggcttggattgcctaactacactgct

SEQ ID NO: 281032 - DNA, 1674 bp, Artificial Sequence
  derived and/or modified sequence
agacagcggcgacgtttaaagctgagcgacccagtgccactggagacggtcagcttctccactcaggctcctccagcccgagccagaagaccccctcccccagaattctgggggccgatggaagggagccgagtcagatcgcgaggtacccagagccgacagaccggagcgacagggagttgccagaagccccgcccctaggagtgatcggaaagcctcacccatccgggtgaggaacccggagggaccgcctccgggcggagcccgccgaccatggctacgcccctggtggcgggtcccgcagctctacgcttcgccgccgcggctagctggcaggttgtgcgcggacgctgcgtggaacattttccgcgagtactggagtttctgcgatctctgcgcgctgttgcccctggcttggttcgctaccggcaccacgaacgcctttgtatgggcctaaaggccaagacaaagcaggatctgaggaagattttggaggcacaggaaactttttaccagcaggtgaagcagctgtcagaggctcctgtggatttggcctcgaagctgcaggaacttgaacaagagtatggggaaccctttctggctgccatggaaaagctgctttttgagtacttgtgtcagctggagaaagcactgcctacaccgcaggcacagcagcttcaggatgtgctgagttggatgcagcctggagtctctatcacctcttctcttgcctggagacaatatggtgtggacatggggtggctgcttccagagtgctctgttactgactcagtgaacctggctgagcccatggaacagaatcctcctcagcaacaaagactagcactccacaatcccctgccaaaagccaagcctggcacacatcttcctcagggaccatcttcaaggacgcacccagaacctctagctggccgacacttcaatctggcccctctaggccgacgaagagttcagtcccaatgggcctccactaggggaggccataaggagcgccccacagtcatgctgtttccctttaggaatctcggctcaccaacccaggtcatatctaagcctgagagcaaggaagaacatgcgatatacacagcagacctagccatgggcacaagagcagcctccactgggaagtctaagagtccatgccagaccctggggggaagggctctgaaggagaacccagttgacttgcctgccacagagcaaaaggagaattgcttggattgctacatggaccccctgagactatcattattacctcctagggccaggaagccagtgtgtcctccgtctctgtgcagctccgtcattaccataggggacttggttttagactctgatgaggaagaaaatggccagggggaaggaaaggaatctctggaaaactatcagaagacaaagtttgacaccttgatacccactctctgtgaatacctacccccttctggccacggtgccatacctgtttcttcctgtgactgtagagacagttctagacctttgtgatagaactaaaatgctctctgtactctagtctcctgcctcctcagctctgcaagtagtttagtaggaatgaagtggaagtccaggcttggattgcctaactacactgctaaaaatatttgtaatccttaataattaaactttggatttgtt

SEQ ID NO: 281033 - protein, 230 aa, Artificial Sequence
  derived and/or modified sequence
MEKGPVRAPAEKPRGARCSNGFPERDPPRPGPSRPAEKPPRPEAKSAQPADGWKGERPRSEEDNELNLPNLAAAYSSILSSLGENPQRQGLLKTPWRAASAMQFFTKGYQETISDVLNDAIFDEDHDEMVIVKDIDMFSMCEHHLVPFVGKVHIGYLPNKQVLGLSKLARIVEIYSRRLQVQERLTKQIAVAITEALRPAGVGVVVEATKSNKYNKGLSYFLLATFLWQY

SEQ ID NO: 281034 - protein, 233 aa, Artificial Sequence
  derived and/or modified sequence
MEKGPVRAPAEKPRGARCSNGFPERDPPRPGPSRPAEKPPRPEAKSAQPADGWKGERPRSEEDNELNLPNLAAAYSSILSSLGENPQRQGLLKTPWRAASAMQFFTKGYQETISDVLNDAIFDEDHDEMVIVKDIDMFSMCEHHLVPFVGKVHIGYLPNKQVLGLSKLARIVEIYSRRLQVQERLTKQIAVAITEALRPAGVGVVVEATKSNKYNKGLSPLLSSCHLFVAILK

SEQ ID NO: 281035 - DNA, 693 bp, Artificial Sequence
  derived and/or modified sequence
atggagaagggccccgtgagagcccccgccgagaagcccagaggcgccagatgcagcaacggcttccccgagagagacccccccagacccggccccagcagacccgccgagaagccccccagacccgaggccaagagcgcccagcccgccgacggctggaagggcgagagacccagaagcgaggaggacaacgagctgaacctgcccaacctggccgccgcctacagcagcatcctgagcagcctgggcgagaacccccagagacagggcctgctgaagaccccctggagagccgccagcgccatgcagttcttcaccaagggctaccaggagaccatcagcgacgtgctgaacgacgccatcttcgacgaggaccacgacgagatggtgatcgtgaaggacatcgacatgttcagcatgtgcgagcaccacctggtgcccttcgtgggcaaggtgcacatcggctacctgcccaacaagcaggtgctgggcctgagcaagctggccagaatcgtggagatctacagcagaagactgcaggtgcaggagagactgaccaagcagatcgccgtggccatcaccgaggccctgagacccgccggcgtgggcgtggtggtggaggccaccaagagcaacaagtacaacaagggcctgagctacttcctgctggccaccttcctgtggcagtactag

SEQ ID NO: 281036 - DNA, 702 bp, Artificial Sequence
  derived and/or modified sequence
atggagaagggccccgtgagagcccccgccgagaagcccagaggcgccagatgcagcaacggcttccccgagagagacccccccagacccggccccagcagacccgccgagaagccccccagacccgaggccaagagcgcccagcccgccgacggctggaagggcgagagacccagaagcgaggaggacaacgagctgaacctgcccaacctggccgccgcctacagcagcatcctgagcagcctgggcgagaacccccagagacagggcctgctgaagaccccctggagagccgccagcgccatgcagttcttcaccaagggctaccaggagaccatcagcgacgtgctgaacgacgccatcttcgacgaggaccacgacgagatggtgatcgtgaaggacatcgacatgttcagcatgtgcgagcaccacctggtgcccttcgtgggcaaggtgcacatcggctacctgcccaacaagcaggtgctgggcctgagcaagctggccagaatcgtggagatctacagcagaagactgcaggtgcaggagagactgaccaagcagatcgccgtggccatcaccgaggccctgagacccgccggcgtgggcgtggtggtggaggccaccaagagcaacaagtacaacaagggcctgagccccctgctgagcagctgccacctgttcgtggccatcctgaagtag

SEQ ID NO: 281037 - DNA, 693 bp, Artificial Sequence
  derived and/or modified sequence
atggagaagggccccgtccgggcccctgctgaaaaaccacggggcgctcgctgctccaacggcttccctgagagagaccccccacgccccggcccttctaggccagccgagaaacccccaaggcccgaagctaagtccgcacagccggccgacggttggaagggtgagcgccctagatcagaggaggataatgagttgaatttgcccaatctcgcagccgcctactcatctattctgtcatccctgggtgagaatccccagcgacagggcttgctcaagactccctggcgagccgcgtccgctatgcagtttttcacgaaaggttaccaggagaccatcagtgatgttttgaatgacgccattttcgatgaggatcacgacgagatggttatcgtcaaagacatcgacatgtttagcatgtgcgagcaccacctggttccattcgtaggcaaggtccacataggatacctgcctaataagcaggtgctgggtctgtcaaaattggccagaatagtagaaatctactctaggaggctgcaggtccaagaaagactcaccaaacagatcgcggtggctattacagaggcgctgcgtccagccggcgtgggtgtggtggtggaggctactaaatccaataaatataacaagggattatcctatttcctgttggccacattcctatggcagtattag

SEQ ID NO: 281038 - DNA, 702 bp, Artificial Sequence
  derived and/or modified sequence
atggagaaaggccctgtgagggcaccagcggaaaagccaagaggagctcggtgctctaatggctttccagagagagaccccccgagaccaggcccatcgagaccagctgagaagcctcctcggccagaggcgaaatcagcccagcctgctgatggctggaagggagagcgaccgcgctccgaggaggataacgaactcaatctgccaaatctggctgcggcttactccagcattttgtcatcacttggtgaaaatcctcaacgacaggggcttctgaagactccatggagggccgccagtgcgatgcaattctttactaaagggtaccaggagacaattagtgacgttctgaatgacgccatctttgacgaggatcatgacgagatggtgatcgtgaaagatatagatatgttcagtatgtgcgaacaccacttggtgccttttgtcggcaaggtgcacattggatatctacctaacaaacaggttcttggactgtctaaactggcacgcatagtggaaatctactcaaggcgcctgcaagtacaagagcggctgaccaagcagatcgccgtagcaatcactgaggcgttgagaccggccggcgtgggagttgttgtggaagccactaaatctaacaagtataacaaaggactgagccccctgttgtcatcttgccatctgtttgtcgcgatcttaaaatag

SEQ ID NO: 281039 - DNA, 693 bp, Artificial Sequence
  derived and/or modified sequence
atggagaagggccctgtgcgggccccagctgagaagcccaggggggcccgctgcagcaatggcttccctgagcgggaccccccccggcccggccccagcaggcctgctgagaagccacccaggcctgaggccaagagcgcccagcctgcagatggctggaagggggagcggcccaggtctgaggaggacaatgagctgaacctgcccaacctggccgccgcctacagcagcatcctgagcagcctgggggagaacccccagaggcagggcctgctgaagaccccctggagggctgccagcgccatgcagttcttcaccaagggctaccaggagaccatcagtgatgtgctgaatgatgccatctttgatgaggaccatgatgagatggtgattgtgaaggacatcgacatgttctccatgtgtgagcaccacctggtgccctttgtgggcaaggtgcacatcggctacctgcccaacaagcaggtgctgggcctgagcaagctggccagaattgtggagatctacagccggcggctgcaggtgcaggagcggctgaccaagcagattgctgtggccatcacagaggccctgcggcctgctggggtgggcgtggtggtggaggccaccaagagcaacaagtacaacaagggcctgagctacttcctgctggccaccttcctgtggcagtactag

SEQ ID NO: 281040 - DNA, 702 bp, Artificial Sequence
  derived and/or modified sequence
atggagaagggccctgtgcgggccccagctgagaagcccaggggggcccgctgcagcaatggcttccctgagcgggaccccccccggcccggccccagcaggcctgctgagaagccacccaggcctgaggccaagagcgcccagcctgcagatggctggaagggggagcggcccaggtctgaggaggacaatgagctgaacctgcccaacctggccgccgcctacagcagcatcctgagcagcctgggggagaacccccagaggcagggcctgctgaagaccccctggagggctgccagcgccatgcagttcttcaccaagggctaccaggagaccatcagtgatgtgctgaatgatgccatctttgatgaggaccatgatgagatggtgattgtgaaggacatcgacatgttctccatgtgtgagcaccacctggtgccctttgtgggcaaggtgcacatcggctacctgcccaacaagcaggtgctgggcctgagcaagctggccagaattgtggagatctacagccggcggctgcaggtgcaggagcggctgaccaagcagattgctgtggccatcacagaggccctgcggcctgctggggtgggcgtggtggtggaggccaccaagagcaacaagtacaacaagggcctgagccccctgctgagcagctgccacctgtttgtggccatcctgaagtag

SEQ ID NO: 281041 - DNA, 693 bp, Artificial Sequence
  derived and/or modified sequence
atggagaagggccccgtgcgggcccccgccgagaagccccggggcgcccgatgttctaacggctttccggagagagatccccctcggccaggaccgagtaggcctgctgagaaaccaccccgacctgaagccaagtccgcgcaaccagcagatggctggaagggggaaaggccaagatctgaagaggataacgagctgaacttgcccaatctggcggcagcctactctagcatcctgagctcattgggagaaaacccccagagacagggtttgttgaagactccctggcgagctgccagcgctatgcagttcttcactaagggttatcaggagactatctcggacgtgctgaacgatgctatcttcgatgaggatcacgacgagatggtcatcgtaaaagatatcgacatgttctccatgtgtgagcatcatctggtgccattcgtcggcaaagtgcacatcggatatcttcccaataagcaagtgctcggcctctccaagcttgcccgcattgtggaaatctattccaggcggcttcaggttcaagaaagactgacaaagcagatcgcagttgctattactgaagccctccgtccagctggtgtgggagttgttgtggaagccactaaaagtaacaagtacaataaagggctaagttatttcctgctcgctacctttctgtggcagtattag

SEQ ID NO: 281042 - DNA, 702 bp, Artificial Sequence
  derived and/or modified sequence
atggagaagggccccgtgcgggcccccgccgagaagccccggggcgccaggtgctccaatggattcccggagagagacccacctcggcctggcccatctaggcctgcagaaaaacccccccgcccagaggctaagtccgctcagccagcggatggatggaaaggagaacgacctcgatccgaagaggacaacgagctaaatctgccaaatctggctgccgcctatagctccattctctccagcctaggggaaaaccctcagcgccaggggttgcttaagactccctggcgagcagccagtgctatgcaattctttaccaagggctatcaagaaactatatccgacgttctgaatgatgccatcttcgacgaagaccatgacgaaatggtcattgtgaaggacatagacatgttttccatgtgcgagcaccatctcgttccctttgtgggcaaggtgcatatcggctacctccctaacaaacaagtgctcggtctctctaaactcgcccggatagttgagatttatagccggagattgcaggtccaggagcgcctaaccaagcagatcgcagtggcgatcaccgaagccctaagacctgccggcgtaggagtagtggtggaggcgaccaagtcaaataaatataacaagggcctttcgcctttgctgtcttcttgccatctgttcgtcgcaatactgaagtag

SEQ ID NO: 281043 - DNA, 846 bp, Artificial Sequence
  derived and/or modified sequence
cgctcccggctcggagtgtgatctaagcaggttgcgtaccttcctcaggtgactccggccacagcccattgtccgcggccaccggcggagtttagccgcagacctcgaagcgccccggggtccttcccgaacggcagcggctgcggcgggtccatggagaagggccctgtgcgggcaccggcggagaagccgcggggcgccaggtgcagcaatgggttccccgagcgggatccgccgcggcccgggcccagcaggccggcggagaagcccccgcggcccgaggccaagagcgcgcagcccgcggacggctggaagggcgagcggccccgcagcgaggaggataacgagctgaacctccctaacctggcagccgcctactcgtccatcctgagctcgctgggcgagaacccccagcggcaagggctgctcaagacgccctggagggcggcctcggccatgcagttcttcaccaagggctaccaggagaccatctcagatgtcctaaacgatgctatatttgatgaagatcatgatgagatggtgattgtgaaggacatagacatgttttccatgtgtgagcatcacttggttccatttgttggaaaggtccatattggttatcttcctaacaagcaagtccttggcctcagcaaacttgcgaggattgtagaaatctatagtagaagactacaagttcaggagcgccttacaaaacaaattgctgtagcaatcacggaagccttgcggcctgctggagtcggggtagtggttgaagcaacgaagtcaaataaatataataaagggttgagctactttcttcttgccacctttttgtggcaatattaa

SEQ ID NO: 281044 - DNA, 1897 bp, Artificial Sequence
  derived and/or modified sequence
ctcggagtgtgatctaagcaggttgcgtaccttcctcaggtgactccggccacagcccattgtccgcggccaccggcggagtttagccgcagacctcgaagcgccccggggtccttcccgaacggcagcggctgcggcgggtccatggagaagggccctgtgcgggcaccggcggagaagccgcggggcgccaggtgcagcaatgggttccccgagcgggatccgccgcggcccgggcccagcaggccggcggagaagcccccgcggcccgaggccaagagcgcgcagcccgcggacggctggaagggcgagcggccccgcagcgaggaggataacgagctgaacctccctaacctggcagccgcctactcgtccatcctgagctcgctgggcgagaacccccagcggcaagggctgctcaagacgccctggagggcggcctcggccatgcagttcttcaccaagggctaccaggagaccatctcagatgtcctaaacgatgctatatttgatgaagatcatgatgagatggtgattgtgaaggacatagacatgttttccatgtgtgagcatcacttggttccatttgttggaaaggtccatattggttatcttcctaacaagcaagtccttggcctcagcaaacttgcgaggattgtagaaatctatagtagaagactacaagttcaggagcgccttacaaaacaaattgctgtagcaatcacggaagccttgcggcctgctggagtcggggtagtggttgaagcaacgaagtcaaataaatataataaagggttgagccctctactttcttcttgccacctttttgtggcaatattaaagtgaactgctaatagtgtctgcagaaccatagcttccacgcacctgaacgagcacagaatgaactgacggtggaagacattatgagctgtgtccaacgttttaaccaaagcgtatcgtaccaacgatctgtgaaaatgcactggaagcttctggtcccggtttcctttgtggtctatgtgggtcttgtcctcattgtaactccgtatagatggtataggtattttaatcctggaagctgttgccttattaatgattatcttaaaatttcctccattggggcagcgtgggccaaattaaaacaaacaaaaccgcaactcctccacagaaacacaaacacagttattccatgaagtttagtatttggttgacatagtgctcttcaaattcatcccattaccctaaaagtaataactttgatgcttgctttaactttagtcccatctctgccactttgatgctatttgggttatgatggggcaagatggcagaggtattgggtttttttgtttttttccattcctctctacttctgtttcctagctttttctttctggagtttaagtacagtgatggttggcttgagtacctttttaaatctagcccagtataaacattagcctgcttaatatttagacatttataggtagaattctgagcactcaactcatgtttggcattttaaagtaaaaacaagtgtgacttcgaggaccaaagaaattgtcagctatacatttatctttatgaactcatttatattcctttttaatgactcgttgttctaacatttcctagaagtgttcttataaaggtctaatgtatccacaggctgttgtcttattagtaaatgcaaagtaatgactttgtctgttttactctagtctttagtacttcaaaattaccttttcatatccatgatcttgagtccatttgggggatttttaagaatttgatgtatttcaatacactgttcaaaattaaattgtttaattttatgtatgagtatgtatgttcctgaaggtggtcctatttaaattattaaactattgtaactttg

SEQ ID NO: 281045 - DNA, 693 bp, Artificial Sequence
  derived and/or modified sequence
atggaaaagggccctgtgcgggctccagccgagaaacctaggggggctagatgtagcaacggttttcctgaaagggacccccctcgtccagggcctagccgcccagcagagaaaccacctcgacctgaggccaaaagtgcacaacctgctgatggttggaagggcgaacgccctcgcagcgaggaagacaacgagctgaatttgccaaatttggctgccgcatactccagtatcttgagcagcctcggcgaaaacccacagaggcaagggctcctgaaaaccccctggcgggctgcctccgccatgcagttcttcacaaaggggtaccaggagaccatcagtgacgtgctaaatgacgcgattttcgacgaggaccacgacgagatggtgatcgttaaggatatagacatgttctccatgtgcgagcatcatctcgtcccattcgtgggtaaagttcacatcggatacctgcctaacaaacaagttctgggcctttccaagctggcacgcatcgtcgagatttactctagaagactgcaggtgcaggaacggctcacaaaacaaatagccgttgcaatcaccgaggctctgcggccagctggggtgggggtggttgtggaggcaacaaagtctaacaagtacaataaagggctatcctacttcttactcgccacctttctgtggcagtattag

SEQ ID NO: 281046 - DNA, 702 bp, Artificial Sequence
  derived and/or modified sequence
atggagaaaggcccagtgagagcccctgctgagaaaccaaggggcgctcgctgcagcaatggcttccccgagagggaccctcctcgaccaggcccttcccggcctgccgaaaaacccccaagaccggaggccaaaagtgcccaacccgcagatggttggaagggcgagcggcctcgatcagaggaggacaatgagctcaacttaccaaatttggccgctgcctactcaagtatcttgagttccttgggcgaaaatccccaacgccaaggcttactcaaaaccccatggagggctgcttcagctatgcagtttttcaccaaaggttaccaggaaactataagtgacgtcctgaatgatgccattttcgatgaagaccacgatgagatggtaatcgtgaaggatattgacatgttctctatgtgcgaacaccacctggttcccttcgtggggaaggtccacatcggctatctgccaaacaagcaggttctcgggttgtcaaagcttgccagaatcgtggagatctactcgagaagactacaggtccaggagaggcttacaaaacagatagccgtggccataactgaggccctccggccagctggagttggcgttgttgtggaagcgaccaaatcaaacaagtataacaagggcctatcccccctgttatccagctgccacttatttgtggctatcctgaagtag

SEQ ID NO: 281047 - DNA, 693 bp, Artificial Sequence
  derived and/or modified sequence
atggaaaagggacctgtgcgcgcccccgcagaaaaaccaaggggcgccagatgcagcaatggcttccctgaacgcgaccccccccgccccggccctagtaggccggcggagaagcccccaagacctgaagcgaagtccgcgcagcctgccgacggatggaaaggggaacggccacggagcgaagaggacaacgaactgaacctgcctaatctcgcagcagcatattcatctattctgagcagtctgggagaaaacccccagcgccaggggcttctgaagacgccatggagggcagcctccgcgatgcagttttttacaaaggggtatcaggagactatctccgacgttctcaatgacgctatttttgatgaagaccacgacgagatggtgatcgtgaaagacattgacatgttttccatgtgcgagcatcatctggtgccattcgttgggaaggtgcacattggttatctaccaaacaagcaagttctgggcctgtcgaagttagccaggattgtggaaatttattcacgtaggctccaagtccaagagcgactgactaaacagattgccgtcgcgatcaccgaggctctgaggccagccggcgtaggagtggtagtggaggcaaccaagtcaaataaatacaataaagggctgtcatacttcctgctggcaacctttttgtggcagtattag

SEQ ID NO: 281048 - DNA, 702 bp, Artificial Sequence
  derived and/or modified sequence
atggagaaggggccggtccgggcccctgctgaaaagccacgcggagctaggtgttccaatggctttcccgagagggacccgccaagacccggaccctctcgacctgctgagaagcctccaaggccagaagccaaaagcgctcagccagctgatgggtggaaaggcgagaggccccgtagcgaagaagataatgagctgaacttacctaacttggccgccgcatatagttctatcctgtctagccttggagagaatccccagagacaggggttattgaaaaccccttggcgggcagccagcgcaatgcagttctttacgaagggatatcaggagaccattagtgacgtccttaatgacgcaatttttgacgaagatcacgacgaaatggtgatagtgaaggacattgatatgttcagcatgtgtgagcaccacttggtgcctttcgtaggcaaggtgcacatcggttatctcccgaataaacaagtcttgggcttatctaaactggcgaggatcgtagagatatattccagaagactgcaggttcaagagcgccttacgaaacaaatcgctgtggctataacagaagcattaagacctgccggcgtaggagtggtagtcgaagccacaaaatcaaataagtacaataaaggactgtcaccacttctgtcttcatgtcatctgtttgtagctatcctcaaatag

SEQ ID NO: 281049 - DNA, 693 bp, Artificial Sequence
  derived and/or modified sequence
atggaaaagggtcccgtccgcgctcccgcagagaagccccgaggcgctcgatgtagtaacggttttccagaaagagatcctccccgaccgggtccatcccggcctgcagaaaaacctccccgtcctgaggctaagtccgcacaacccgcagacggctggaaaggggagcgtccccggtccgaagaagataacgagctaaatctgccaaatctggccgccgcttacagttctatcctctccagtttaggcgaaaacccccagaggcagggtctgctgaaaacaccctggagggcggctagcgcaatgcagtttttcaccaaggggtatcaggaaaccatttccgacgtgctgaatgatgctatatttgatgaagaccacgacgaaatggtgattgtcaaggatatagacatgttttctatgtgcgagcaccatctggtcccttttgttggcaaggtacacattggttatctgcccaacaagcaagtccttggcctgtctaagctcgctagaatcgttgaaatttactccaggcgtctgcaagttcaggagcgactcacaaaacagatagctgttgcaatcaccgaggcgttaaggcccgcaggtgtcggtgtagttgtggaagctacgaaatcaaataaatacaacaagggcctctcatatttcttgctcgctacttttttgtggcaatattag

SEQ ID NO: 281050 - DNA, 702 bp, Artificial Sequence
  derived and/or modified sequence
atggaaaagggtccagtgagagctccagccgagaaaccacggggcgcccggtgcagtaatggatttcccgaacgcgatccaccgcggcctggcccatcaagaccggcagaaaagccacctcgtccggaagctaagagcgcccagcctgccgatggctggaaaggagagcgaccacggtctgaagaagacaatgaactgaacctgcccaatcttgccgccgcctattcatctatcttgagctctctgggtgagaatccccaacggcagggcctgctgaaaacaccatggcgagccgctagtgctatgcagtttttcactaagggctatcaagaaaccatcagcgacgtcctcaacgatgcgatctttgatgaagaccacgacgaaatggtgatcgtgaaagatattgacatgttctccatgtgcgagcaccacctcgtgccctttgtcggaaaggttcacatcggatacttgcctaataaacaggtgctgggcttaagtaagcttgcccgcatagtcgagatatattcaagaaggctccaagtccaagaaaggttaaccaaacaaatcgctgtggctatcaccgaagcactccgtcctgccggtgttggagttgttgttgaggccactaagagtaataaatacaataaaggactctctcccttactttcctcatgtcacttgtttgttgccattttgaaatag

SEQ ID NO: 281051 - RNA, 693 nt, Artificial Sequence
  derived and/or modified sequence
auggaaaagggaccugugcgcgcccccgcagaaaaaccaaggggcgccagaugcagcaauggcuucccugaacgcgaccccccccgccccggcccuaguaggccggcggagaagcccccaagaccugaagcgaaguccgcgcagccugccgacggauggaaaggggaacggccacggagcgaagaggacaacgaacugaaccugccuaaucucgcagcagcauauucaucuauucugagcagucugggagaaaacccccagcgccaggggcuucugaagacgccauggagggcagccuccgcgaugcaguuuuuuacaaagggguaucaggagacuaucuccgacguucucaaugacgcuauuuuugaugaagaccacgacgagauggugaucgugaaagacauugacauguuuuccaugugcgagcaucaucuggugccauucguugggaaggugcacauugguuaucuaccaaacaagcaaguucugggccugucgaaguuagccaggauuguggaaauuuauucacguaggcuccaaguccaagagcgacugacuaaacagauugccgucgcgaucaccgaggcucugaggccagccggcguaggagugguaguggaggcaaccaagucaaauaaauacaauaaagggcugucauacuuccugcuggcaaccuuuuuguggcaguauuag

SEQ ID NO: 281052 - RNA, 702 nt, Artificial Sequence
  derived and/or modified sequence
auggagaaggggccgguccgggccccugcugaaaagccacgcggagcuagguguuccaauggcuuucccgagagggacccgccaagacccggacccucucgaccugcugagaagccuccaaggccagaagccaaaagcgcucagccagcugauggguggaaaggcgagaggccccguagcgaagaagauaaugagcugaacuuaccuaacuuggccgccgcauauaguucuauccugucuagccuuggagagaauccccagagacagggguuauugaaaaccccuuggcgggcagccagcgcaaugcaguucuuuacgaagggauaucaggagaccauuagugacguccuuaaugacgcaauuuuugacgaagaucacgacgaaauggugauagugaaggacauugauauguucagcaugugugagcaccacuuggugccuuucguaggcaaggugcacaucgguuaucucccgaauaaacaagucuugggcuuaucuaaacuggcgaggaucguagagauauauuccagaagacugcagguucaagagcgccuuacgaaacaaaucgcuguggcuauaacagaagcauuaagaccugccggcguaggagugguagucgaagccacaaaaucaaauaaguacaauaaaggacugucaccacuucugucuucaugucaucuguuuguagcuauccucaaauag

SEQ ID NO: 281053 - RNA, 693 nt, Artificial Sequence
  derived and/or modified sequence
auggaaaagggucccguccgcgcucccgcagagaagccccgaggcgcucgauguaguaacgguuuuccagaaagagauccuccccgaccggguccaucccggccugcagaaaaaccuccccguccugaggcuaaguccgcacaacccgcagacggcuggaaaggggagcguccccgguccgaagaagauaacgagcuaaaucugccaaaucuggccgccgcuuacaguucuauccucuccaguuuaggcgaaaacccccagaggcagggucugcugaaaacacccuggagggcggcuagcgcaaugcaguuuuucaccaagggguaucaggaaaccauuuccgacgugcugaaugaugcuauauuugaugaagaccacgacgaaauggugauugucaaggauauagacauguuuucuaugugcgagcaccaucuggucccuuuuguuggcaagguacacauugguuaucugcccaacaagcaaguccuuggccugucuaagcucgcuagaaucguugaaauuuacuccaggcgucugcaaguucaggagcgacucacaaaacagauagcuguugcaaucaccgaggcguuaaggcccgcaggugucgguguaguuguggaagcuacgaaaucaaauaaauacaacaagggccucucauauuucuugcucgcuacuuuuuuguggcaauauuag

SEQ ID NO: 281054 - RNA, 702 nt, Artificial Sequence
  derived and/or modified sequence
auggaaaaggguccagugagagcuccagccgagaaaccacggggcgcccggugcaguaauggauuucccgaacgcgauccaccgcggccuggcccaucaagaccggcagaaaagccaccucguccggaagcuaagagcgcccagccugccgauggcuggaaaggagagcgaccacggucugaagaagacaaugaacugaaccugcccaaucuugccgccgccuauucaucuaucuugagcucucugggugagaauccccaacggcagggccugcugaaaacaccauggcgagccgcuagugcuaugcaguuuuucacuaagggcuaucaagaaaccaucagcgacguccucaacgaugcgaucuuugaugaagaccacgacgaaauggugaucgugaaagauauugacauguucuccaugugcgagcaccaccucgugcccuuugucggaaagguucacaucggauacuugccuaauaaacaggugcugggcuuaaguaagcuugcccgcauagucgagauauauucaagaaggcuccaaguccaagaaagguuaaccaaacaaaucgcuguggcuaucaccgaagcacuccguccugccgguguuggaguuguuguugaggccacuaagaguaauaaauacaauaaaggacucucucccuuacuuuccucaugucacuuguuuguugccauuuugaaauag

SEQ ID NO: 281055 - protein, 1453 aa, Artificial Sequence
  derived and/or modified sequence
MIKCLSVEVQAKLRSGLAISSLGQCVEELALNSIDAEAKCVAVRVNMETFQVQVIDNGFGMGSDDVEKVGNRYFTSKCHSVQDLENPRFYGFRGEALANIADMASAVEISSKKNRTMKTFVKLFQSGKALKACEADVTRASAGTTVTVYNLFYQLPVRRKCMDPRLEFEKVRQRIEALSLMHPSISFSLRNDVSGSMVLQLPKTKDVCSRFCQIYGLGKSQKLREISFKYKEFELSGYISSEAHYNKNMQFLFVNKRLVLRTKLHKLIDFLLRKESIICKPKNGPTSRQMNSSLRHRSTPELYGIYVINVQCQFCEYDVCMEPAKTLIEFQNWDTLLFCIQEGVKMFLKQEKLFVELSGEDIKEFSEDNGFSLFDATLQKRVTSDERSNFQEACNNILDSYEMFNLQSKAVKRKTTAENVNTQSSRDSEATRKNTNDAFLYIYESGGPGHSKMTEPSLQNKDSSCSESKMLEQETIVASEAGENEKHKKSFLEHSSLENPCGTSLEMFLSPFQTPCHFEESGQDLEIWKESTTVNGMAANILKNNRIQNQPKRFKDATEVGCQPLPFATTLWGVHSAQTEKEKKKESSNCGRRNVFSYGRVKLCSTGFITHVVQNEKTKSTETEHSFKNYVRPGPTRAQETFGNRTRHSVETPDIKDLASTLSKESGQLPNKKNCRTNISYGLENEPTATYTMFSAFQEGSKKSQTDCILSDTSPSFPWYRHVSNDSRKTDKLIGFSKPIVRKKLSLSSQLGSLEKFKRQYGKVENPLDTEVEESNGVTTNLSLQVEPDILLKDKNRLENSDVCKITTMEHSDSDSSCQPASHILNSEKFPFSKDEDCLEQQMPSLRESPMTLKELSLFNRKPLDLEKSSESLASKLSRLKGSERETQTMGMMSRFNELPNSDSSRKDSKLCSVLTQDFCMLFNNKHEKTENGVIPTSDSATQDNSFNKNSKTHSNSNTTENCVISETPLVLPYNNSKVTGKDSDVLIRASEQQIGSLDSPSGMLMNPVEDATGDQNGICFQSEESKARACSETEESNTCCSDWQRHFDVALGRMVYVNKMTGLSTFIAPTEDIQAACTKDLTTVAVDVVLENGSQYRCQPFRSDLVLPFLPRARAERTVMRQDNRDTVDDTVSSESLQSLFSEWDNPVFARYPEVAVDVSSGQAESLAVKIHNILYPYRFTKGMIHSMQVLQQVDNKFIACLMSTKTEENGEAGGNLLVLVDQHAAHERIRLEQLIIDSYEKQQAQGSGRKKLLSSTLIPPLEITVTEEQRRLLWCYHKNLEDLGLEFVFPDTSDSLVLVGKVPLCFVEREANELRRGRSTVTKSIVEEFIREQLELLQTTGGIQGTLPLTVQKVLASQACHGAIKFNDGLSLQESCRLIEALSSCQLPFQCAHGRPSMLPLADIDHLEQEKQIKPNLTKLRKMAQAWRLFGKAECDTRQSLQQSMPPCEPP

SEQ ID NO: 281056 - protein, 391 aa, Artificial Sequence
  derived and/or modified sequence
MVYVNKMTGLSTFIAPTEDIQAACTKDLTTVAVDVVLENGSQYRCQPFRSDLVLPFLPRARAERTVMRQDNRDTVDDTVSSESLQSLFSEWDNPVFARYPEVAVDVSSGQAESLAVKIHNILYPYRFTKGMIHSMQVLQQVDNKFIACLMSTKTEENGEAGGNLLVLVDQHAAHERIRLEQLIIDSYEKQQAQGSGRKKLLSSTLIPPLEITVTEEQRRLLWCYHKNLEDLGLEFVFPDTSDSLVLVGKVPLCFVEREANELRRGRSTVTKSIVELLQTTGGIQGTLPLTVQKVLASQACHGAIKFNDGLSLQESCRLIEALSSCQLPFQCAHGRPSMLPLADIDHLEQEKQIKPNLTKLRKMAQAWRLFGKAECDTRQSLQQSMPPCEPP

SEQ ID NO: 281057 - protein, 106 aa, Artificial Sequence
  derived and/or modified sequence
MIKCLSVEVQAKLRSGLAISSLGQCVEELALNSIDAEAKCVAVRVNMETFQVQVIDNGFGMGSDDVEKVGNRYFTSKCHSVQDLENPRFYGFRGEALANIADMASA

SEQ ID NO: 281058 - DNA, 4362 bp, Artificial Sequence
  derived and/or modified sequence
atgatcaagtgcctgagcgtggaggtgcaggccaagctgagaagcggcctggccatcagcagcctgggccagtgcgtggaggagctggccctgaacagcatcgacgccgaggccaagtgcgtggccgtgagagtgaacatggagaccttccaggtgcaggtgatcgacaacggcttcggcatgggcagcgacgacgtggagaaggtgggcaacagatacttcaccagcaagtgccacagcgtgcaggacctggagaaccccagattctacggcttcagaggcgaggccctggccaacatcgccgacatggccagcgccgtggagatcagcagcaagaagaacagaaccatgaagaccttcgtgaagctgttccagagcggcaaggccctgaaggcctgcgaggccgacgtgaccagagccagcgccggcaccaccgtgaccgtgtacaacctgttctaccagctgcccgtgagaagaaagtgcatggaccccagactggagttcgagaaggtgagacagagaatcgaggccctgagcctgatgcaccccagcatcagcttcagcctgagaaacgacgtgagcggcagcatggtgctgcagctgcccaagaccaaggacgtgtgcagcagattctgccagatctacggcctgggcaagagccagaagctgagagagatcagcttcaagtacaaggagttcgagctgagcggctacatcagcagcgaggcccactacaacaagaacatgcagttcctgttcgtgaacaagagactggtgctgagaaccaagctgcacaagctgatcgacttcctgctgagaaaggagagcatcatctgcaagcccaagaacggccccaccagcagacagatgaacagcagcctgagacacagaagcacccccgagctgtacggcatctacgtgatcaacgtgcagtgccagttctgcgagtacgacgtgtgcatggagcccgccaagaccctgatcgagttccagaactgggacaccctgctgttctgcatccaggagggcgtgaagatgttcctgaagcaggagaagctgttcgtggagctgagcggcgaggacatcaaggagttcagcgaggacaacggcttcagcctgttcgacgccaccctgcagaagagagtgaccagcgacgagagaagcaacttccaggaggcctgcaacaacatcctggacagctacgagatgttcaacctgcagagcaaggccgtgaagagaaagaccaccgccgagaacgtgaacacccagagcagcagagacagcgaggccaccagaaagaacaccaacgacgccttcctgtacatctacgagagcggcggccccggccacagcaagatgaccgagcccagcctgcagaacaaggacagcagctgcagcgagagcaagatgctggagcaggagaccatcgtggccagcgaggccggcgagaacgagaagcacaagaagagcttcctggagcacagcagcctggagaacccctgcggcaccagcctggagatgttcctgagccccttccagaccccctgccacttcgaggagagcggccaggacctggagatctggaaggagagcaccaccgtgaacggcatggccgccaacatcctgaagaacaacagaatccagaaccagcccaagagattcaaggacgccaccgaggtgggctgccagcccctgcccttcgccaccaccctgtggggcgtgcacagcgcccagaccgagaaggagaagaagaaggagagcagcaactgcggcagaagaaacgtgttcagctacggcagagtgaagctgtgcagcaccggcttcatcacccacgtggtgcagaacgagaagaccaagagcaccgagaccgagcacagcttcaagaactacgtgagacccggccccaccagagcccaggagaccttcggcaacagaaccagacacagcgtggagacccccgacatcaaggacctggccagcaccctgagcaaggagagcggccagctgcccaacaagaagaactgcagaaccaacatcagctacggcctggagaacgagcccaccgccacctacaccatgttcagcgccttccaggagggcagcaagaagagccagaccgactgcatcctgagcgacaccagccccagcttcccctggtacagacacgtgagcaacgacagcagaaagaccgacaagctgatcggcttcagcaagcccatcgtgagaaagaagctgagcctgagcagccagctgggcagcctggagaagttcaagagacagtacggcaaggtggagaaccccctggacaccgaggtggaggagagcaacggcgtgaccaccaacctgagcctgcaggtggagcccgacatcctgctgaaggacaagaacagactggagaacagcgacgtgtgcaagatcaccaccatggagcacagcgacagcgacagcagctgccagcccgccagccacatcctgaacagcgagaagttccccttcagcaaggacgaggactgcctggagcagcagatgcccagcctgagagagagccccatgaccctgaaggagctgagcctgttcaacagaaagcccctggacctggagaagagcagcgagagcctggccagcaagctgagcagactgaagggcagcgagagagagacccagaccatgggcatgatgagcagattcaacgagctgcccaacagcgacagcagcagaaaggacagcaagctgtgcagcgtgctgacccaggacttctgcatgctgttcaacaacaagcacgagaagaccgagaacggcgtgatccccaccagcgacagcgccacccaggacaacagcttcaacaagaacagcaagacccacagcaacagcaacaccaccgagaactgcgtgatcagcgagacccccctggtgctgccctacaacaacagcaaggtgaccggcaaggacagcgacgtgctgatcagagccagcgagcagcagatcggcagcctggacagccccagcggcatgctgatgaaccccgtggaggacgccaccggcgaccagaacggcatctgcttccagagcgaggagagcaaggccagagcctgcagcgagaccgaggagagcaacacctgctgcagcgactggcagagacacttcgacgtggccctgggcagaatggtgtacgtgaacaagatgaccggcctgagcaccttcatcgcccccaccgaggacatccaggccgcctgcaccaaggacctgaccaccgtggccgtggacgtggtgctggagaacggcagccagtacagatgccagcccttcagaagcgacctggtgctgcccttcctgcccagagccagagccgagagaaccgtgatgagacaggacaacagagacaccgtggacgacaccgtgagcagcgagagcctgcagagcctgttcagcgagtgggacaaccccgtgttcgccagataccccgaggtggccgtggacgtgagcagcggccaggccgagagcctggccgtgaagatccacaacatcctgtacccctacagattcaccaagggcatgatccacagcatgcaggtgctgcagcaggtggacaacaagttcatcgcctgcctgatgagcaccaagaccgaggagaacggcgaggccggcggcaacctgctggtgctggtggaccagcacgccgcccacgagagaatcagactggagcagctgatcatcgacagctacgagaagcagcaggcccagggcagcggcagaaagaagctgctgagcagcaccctgatcccccccctggagatcaccgtgaccgaggagcagagaagactgctgtggtgctaccacaagaacctggaggacctgggcctggagttcgtgttccccgacaccagcgacagcctggtgctggtgggcaaggtgcccctgtgcttcgtggagagagaggccaacgagctgagaagaggcagaagcaccgtgaccaagagcatcgtggaggagttcatcagagagcagctggagctgctgcagaccaccggcggcatccagggcaccctgcccctgaccgtgcagaaggtgctggccagccaggcctgccacggcgccatcaagttcaacgacggcctgagcctgcaggagagctgcagactgatcgaggccctgagcagctgccagctgcccttccagtgcgcccacggcagacccagcatgctgcccctggccgacatcgaccacctggagcaggagaagcagatcaagcccaacctgaccaagctgagaaagatggcccaggcctggagactgttcggcaaggccgagtgcgacaccagacagagcctgcagcagagcatgcccccctgcgagcccccctag

SEQ ID NO: 281059 - DNA, 1176 bp, Artificial Sequence
  derived and/or modified sequence
atggtgtacgtgaacaagatgaccggcctgagcaccttcatcgcccccaccgaggacatccaggccgcctgcaccaaggacctgaccaccgtggccgtggacgtggtgctggagaacggcagccagtacagatgccagcccttcagaagcgacctggtgctgcccttcctgcccagagccagagccgagagaaccgtgatgagacaggacaacagagacaccgtggacgacaccgtgagcagcgagagcctgcagagcctgttcagcgagtgggacaaccccgtgttcgccagataccccgaggtggccgtggacgtgagcagcggccaggccgagagcctggccgtgaagatccacaacatcctgtacccctacagattcaccaagggcatgatccacagcatgcaggtgctgcagcaggtggacaacaagttcatcgcctgcctgatgagcaccaagaccgaggagaacggcgaggccggcggcaacctgctggtgctggtggaccagcacgccgcccacgagagaatcagactggagcagctgatcatcgacagctacgagaagcagcaggcccagggcagcggcagaaagaagctgctgagcagcaccctgatcccccccctggagatcaccgtgaccgaggagcagagaagactgctgtggtgctaccacaagaacctggaggacctgggcctggagttcgtgttccccgacaccagcgacagcctggtgctggtgggcaaggtgcccctgtgcttcgtggagagagaggccaacgagctgagaagaggcagaagcaccgtgaccaagagcatcgtggagctgctgcagaccaccggcggcatccagggcaccctgcccctgaccgtgcagaaggtgctggccagccaggcctgccacggcgccatcaagttcaacgacggcctgagcctgcaggagagctgcagactgatcgaggccctgagcagctgccagctgcccttccagtgcgcccacggcagacccagcatgctgcccctggccgacatcgaccacctggagcaggagaagcagatcaagcccaacctgaccaagctgagaaagatggcccaggcctggagactgttcggcaaggccgagtgcgacaccagacagagcctgcagcagagcatgcccccctgcgagcccccctag

SEQ ID NO: 281060 - DNA, 4362 bp, Artificial Sequence
  derived and/or modified sequence
atgattaaatgcctctccgtggaggtccaagcaaagttgcggtccggcctggcaatatccagcctaggtcagtgtgtggaggagttggctctcaacagtatcgacgccgaagccaaatgcgtggcggttcgggtgaatatggaaacgttccaggttcaggtgatcgacaatgggttcggtatgggttcagatgatgtagagaaagtggggaataggtatttcactagtaaatgccactctgtgcaagacttggaaaaccctcggttttatggcttcagaggcgaagccttagcgaatatagctgacatggctagcgccgtcgagatcagctctaagaaaaatcgcactatgaagacatttgtgaagctcttccaatctggaaaggccttgaaggcctgcgaggccgatgttactcgcgccagcgccgggactaccgtgacagtatataacctattttaccagctgcccgtcagacggaagtgtatggatccccgactggagttcgagaaggtgagacagcggattgaggcacttagcctcatgcacccaagcataagcttttccttgagaaatgacgttagcgggagtatggtgctgcagctgccaaaaacgaaggatgtatgctcccgcttttgccagatctatggcttaggtaaatctcagaaactcagagaaattagttttaagtataaagaattcgaactgtccggatacattagttcagaggcacactataataaaaacatgcaattcctgttcgtaaataaacggcttgttctccggacaaaactgcataagcttattgattttctgctgcgaaaagagagcattatttgcaagcccaagaacggccctactagcagacaaatgaactcttcactcagacaccggagtactccagagctttacgggatctatgtgatcaatgtgcagtgtcaattctgcgagtacgatgtctgtatggagcccgccaagactctgattgaatttcagaattgggacacgctgctattttgtatccaggaaggggtgaaaatgtttcttaagcaggagaaactgtttgtggagctctcaggagaagatatcaaagaattctctgaagataacggtttttctctgttcgatgcgacattgcagaagcgagtcacttccgacgagcgctcaaattttcaggaagcgtgtaataatatcctggactcttatgaaatgttcaacctccagagtaaggccgtcaagcgtaagaccacagcagagaacgtgaatactcagtcgtctcgcgattctgaggccacccgcaagaatacaaatgacgctttcctgtacatttacgaaagcggaggccctggacactctaagatgacagaaccaagtttacagaataaggactcttcttgcagtgaaagtaaaatgctcgagcaggaaactatcgtagcctcagaggccggagagaacgaaaagcacaagaaatcctttctagagcattcttcacttgaaaatccatgtgggacttctttagagatgttcctgtcgcctttccaaactccgtgccactttgaggaaagtgggcaagatttggaaatctggaaggaatccacaaccgtgaatggcatggctgccaacattctgaaaaataataggatccaaaatcagcctaaaaggtttaaggatgctacagaggttggctgccagccattacccttcgcaacaacactttggggggtgcattcagctcagaccgagaaagagaaaaaaaaagagtcctctaattgtggccgacgaaacgtattcagttacggacgcgtgaaattatgctccacagggtttatcacacacgtcgttcagaatgagaagaccaagtccaccgagactgaacactccttcaaaaactacgtcagaccaggaccgactcgcgctcaggaaacatttggcaacagaacaagacattccgtagagacaccagatattaaggacctggcttccactctttccaaagaatccggacaactgcctaataagaagaactgtcgtacaaacatttcgtatggactggagaacgagcccactgctacctacacaatgttctctgccttccaggaagggagcaagaaatcacagactgactgcatcctttcagatactagtccaagttttccatggtaccgccatgtctccaatgatagccggaagaccgacaaactgatcggattttcaaaacctatcgtgcggaaaaaactcagcctgagttcccaactgggttctttagaaaaatttaaaaggcaatacggcaaggtcgagaaccctttggataccgaggtggaggagtctaatggagttaccaccaacctgagcctgcaggttgagcctgacatactgctgaaggacaaaaatcgcctggagaattccgatgtgtgtaagattactacaatggagcactccgactccgatagctcttgccaacctgcttcgcacattctgaattcggaaaagtttccattttcaaaagacgaagattgtcttgagcagcaaatgcccagcctgcgcgaaagtcccatgaccctgaaagagttgtcgctttttaatcgtaaaccactggatctggagaagagtagcgaatctctggcttctaagttatctcgtctgaaggggagtgagcgggagacgcagacaatgggtatgatgtcacgttttaacgagctccctaattctgatagttccaggaaggattctaaactttgttctgttctgacccaagatttctgcatgttgtttaataataagcacgagaaaacagaaaatggggttatcccaactagtgatagtgccacccaggataactcttttaataagaattctaaaacacatagcaatagtaatacaaccgagaactgcgtgatatcggagactcccctcgttctcccttacaataattccaaggttactggtaaagactccgatgtgctgattcgcgcgagcgaacagcagatcggttctctggactcccctagcgggatgttgatgaatccagtggaagatgcaaccggcgatcaaaatggcatttgtttccaatccgaggaatccaaagcacgagcctgctctgaaacagaggaatctaacacctgctgtagtgattggcagcggcactttgatgtggcactgggtcgaatggtgtacgtcaataaaatgaccggtttgtctaccttcattgcccccactgaggacatccaggcagcatgcactaaggacctgacaactgtggcagtggatgtcgtgttagaaaatggtagccaataccggtgtcaaccttttcgatctgatctggtactccccttccttcctagggcacgggcagaacgcaccgtgatgagacaggacaatcgggacacagtggatgatactgtatcctctgagagtctgcaatccctgttctccgaatgggacaacccggtgttcgcccggtatccggaggtcgctgtagatgtaagtagcggtcaagctgagtctctcgccgtcaagattcacaatattttatacccttaccgtttcactaaagggatgattcacagcatgcaagtgttgcagcaggttgataataagtttatcgcatgtttgatgagtacaaagactgaggagaacggggaggctgggggcaacctgctggtgctcgtcgatcagcacgccgcccacgagagaattcggttggagcagctcatcatcgattcgtatgaaaagcaacaggcccagggatccgggcgaaagaaactgctcagtagtaccctcatcccaccactagagataacagtgacagaggaacagagaaggctcctatggtgttaccacaaaaatctcgaggatctgggcctggagttcgtattccctgatacatccgattcactggtgcttgtaggcaaggttcctctgtgctttgtcgagcgcgaggccaatgagctgagaagggggcgctcaactgtcacgaaaagcatcgtggaggaatttatcagagagcagctggagctgttgcagaccactggggggatccaggggacactacccctgactgtacagaaggtgcttgcctctcaggcctgccacggtgcaattaaattcaatgacggactgtctttgcaggaatcgtgtaggttaatcgaggctctctctagttgtcagctgccattccagtgcgcccacggtagaccatctatgctgcccttggctgacatagatcacttggagcaggagaagcaaataaaacccaacctaacgaaactaagaaagatggcccaggcatggcgcctctttgggaaggctgagtgcgacactcgccagagtctacaacagtcaatgcccccatgcgaacccccatag

SEQ ID NO: 281061 - DNA, 1176 bp, Artificial Sequence
  derived and/or modified sequence
atggtatacgtaaataagatgacaggtctgtccacatttatcgcccccacagaagatatccaggctgcctgcaccaaggacctgaccactgtggcggtcgatgtggtcctagaaaatggatcgcagtaccgctgtcagcccttccggtctgatctggtgctcccatttctgccacgggcccgggcagagcgcacagtgatgcggcaggataatcgcgatactgtggacgataccgtatccagcgaatcgctccaatccctcttctccgagtgggacaatcctgtctttgccagatacccggaggtagcagtcgacgtcagctccggccaggcagagagcctggcagtgaagatccacaatattttgtacccctacaggttcaccaagggtatgattcattccatgcaggtgctgcagcaggttgacaataagtttatcgcctgtctaatgagcaccaagaccgaagagaacggagaggccggcggcaacctattagtactagtggaccagcatgccgctcacgagcgaattaggctggaacagctcattatagattcttatgaaaagcagcaggcacaaggcagcggacgtaagaagctcctttccagtaccctgatcccgccacttgagatcacggtaactgaggagcagcggaggctcttgtggtgttatcataagaatctcgaagatctgggtttggagttcgtgttcccggatacttctgatagcctggtgctggtcgggaaggtcccgctgtgctttgtcgagcgcgaggcgaatgaattgcgccgggggaggtccacagttacaaagagtatcgtcgaactactccagaccacaggtgggattcagggcaccttgcctctgacggtacagaaggtcttggcaagtcaggcttgccatggagctatcaaattcaacgacggtttgtccctgcaggagtcttgtcggctgatagaggccctctcttcctgtcagctgcctttccagtgcgctcatggccggccgagcatgctgcctttggccgatatcgatcatctcgaacaggagaagcaaataaaaccaaaccttaccaagctgaggaaaatggcccaggcctggcgattgtttggcaaagctgagtgcgatacacgacagtcactgcagcagtccatgcccccttgtgagccaccatag

SEQ ID NO: 281062 - DNA, 4362 bp, Artificial Sequence
  derived and/or modified sequence
atgatcaaatgcctgagcgtggaggtgcaggccaagctgcgctctgggctagccatcagttctttaggtcaatgcgtagaagagctggcgttaaactccatagacgcagaagcaaagtgtgtcgccgttagagttaacatggaaaccttccaggtccaggtcatcgataatggctttggtatggggtctgatgatgtggagaaggtgggaaaccgttattttacgtccaagtgccactcagtacaggatctggaaaatccaaggttttacggattcaggggtgaggcactagcaaacattgcagacatggccagtgcagtggaaatctcatccaagaagaatagaaccatgaaaacattcgtaaaactgttccaaagcggcaaagctcttaaagcctgcgaagccgacgtgactcgcgcctctgcagggaccacagtgactgtgtataacctgttctaccagctgccagttcgacgtaaatgcatggaccctagactcgagtttgaaaaggtcaggcagcgtattgaggctttgagcctcatgcaccccagcatttccttctcattgagaaacgatgtcagcggctcgatggtgttgcagttgcctaagactaaggacgtgtgttcacgcttttgccagatttatggcctggggaaaagtcagaagcttcgggagattagttttaaatataaagaatttgaattaagcggatatatcagtagcgaggcacactataacaaaaacatgcagttcttgttcgttaacaagagactagtgttgcgcactaaattgcacaagctcatagattttctgctgcgtaaggaatccataatctgcaagccaaaaaacggcccaacaagcaggcagatgaactcttccctccgccacagaagcactccggagctgtacgggatctacgtaattaacgtgcaatgccaattttgtgagtatgacgtgtgtatggagcctgccaagacattaattgaatttcaaaactgggatactctgctgttttgtattcaggagggcgtgaagatgtttctgaaacaagagaagctcttcgtggaactctcgggagaggacatcaaggaattctccgaggataacgggttctccttgttcgacgcgactctgcaaaaaagagtgacaagcgatgaaaggagtaacttccaggaggcctgtaataacattctggactcttacgagatgtttaacctgcagagcaaggcagtaaagcgtaaaaccacggccgagaatgtgaacacccagagtagtcgggacagcgaggccacgcgcaagaacacgaacgacgcttttttgtacatttatgaaagtggcgggcctggacactccaaaatgactgagccatcactgcagaacaaggattccagctgtagtgagagtaaaatgcttgagcaggaaaccattgtggcttccgaggctggtgaaaacgaaaagcacaagaagagctttcttgagcactcatctctggagaatccttgcggaacctctctggagatgttcttaagccccttccagacgccctgccattttgaagagagtggtcaggacctggagatctggaaagagtcgacaaccgtcaacgggatggcggccaatattttgaagaacaacagaattcagaaccaacccaagaggttcaaggacgctacagaggtcggttgccagcccctccctttcgctaccaccctgtggggggtccatagcgcccaaacagaaaaagaaaagaaaaaggagtcctctaactgcggaaggagaaacgtcttctcctacggccgggtgaaactttgctccacaggattcatcacacacgttgtccagaacgagaaaaccaagtccactgagacggagcattcttttaagaattatgttaggccgggtccaactcgcgcccaggaaacatttggaaaccggactcggcacagcgtggagacacccgatataaaggatctcgcctccacgctttctaaagagtctggccagctgccaaacaagaaaaactgccgcacaaacataagctacgggctcgagaacgagcccaccgcaacgtacaccatgttctcagccttccaggaagggtcaaagaaatcacaaacggactgcattctgtcagatacatccccctcgtttccatggtatcgccacgtgtccaacgattcccgaaaaaccgacaagctgatcggatttagcaagccaatcgtccggaagaaactgagcctctcaagtcagctgggctcactcgagaaattcaaaagacaatacggcaaggtggagaacccactggacactgaggtcgaggaatcgaacggggttactactaatctatccctccaggtagagcccgacattctcctcaaagacaaaaatcggctggagaacagtgatgtatgcaaaataacaacgatggagcattctgactcagattcttcgtgccaacccgcttcacacatcttgaattcggaaaaatttccattctcaaaggacgaggactgcctggagcagcaaatgccatcccttcgtgagtcgccgatgacgcttaaggagctttctctctttaacagaaaacctcttgacctagagaagtccagcgaaagtcttgcttcgaagctctctcgcctgaaggggagcgaaagagagacccagaccatggggatgatgtcacgattcaacgaactaccgaatagcgattcaagtcggaaagacagcaaattgtgctcagtacttactcaggatttttgcatgctattcaataataaacacgaaaagacagaaaatggggtcattccaaccagcgactcagctacccaggacaattcatttaacaagaactccaagacacatagcaactccaataccaccgaaaattgcgtcatcagtgaaacgccgttagtattgccctataataattctaaggtcacgggcaaggacagtgacgtattgatcagagctagtgagcaacagatcgggtccctggactcacccagcgggatgttgatgaaccctgtagaagatgcgacaggagaccagaacggcatttgcttccaaagcgaggagagtaaggccagagcctgctctgagaccgaagaaagtaacacttgttgttctgactggcaacgccacttcgacgtagctctcggcaggatggtctacgtcaataaaatgactggattgagcacttttattgctcctaccgaagatattcaggccgcctgcactaaggatctcactacggtcgcggtggatgtggttttggaaaatggttcccagtaccgctgtcagccattccgcagcgacctggtgctgccttttctcccacgagcgcgagcagagagaacagtaatgagacaggacaaccgagacaccgtggacgacacagtatcctccgaatcgttacagtcattattttcagagtgggataaccccgtcttcgcacggtacccggaagttgctgttgatgtgtcctccggccaggctgagagccttgcggttaagatccataacattctgtatccttataggttcaccaaagggatgatacactctatgcaggtgctccaacaggtggacaataagttcatagcatgcctaatgtcgactaagacagaagaaaacggcgaggcggggggcaacctgttggtgctggtggaccagcatgcagcccacgaacggattagattagaacagctgatcatcgactcctatgaaaagcagcaggcacagggcagtggcaggaaaaagctcctgtctagcactctgataccccctctggaaatcaccgtgactgaagagcaacgacgtttgctgtggtgctaccacaagaacctggaagacctgggattggagtttgtctttcccgacactagtgactcactggttttggttggcaaggtccctctttgttttgtggagcgggaggcaaatgaactgcgacggggacgaagcacagtgactaagagtatcgtagaagaatttatcagggagcagctggaactgttacaaacaacgggagggatccagggcacactccccctgaccgtgcagaaggttctggcttcacaagcttgtcacggagctatcaagttcaatgacggcctctccctccaggagtcctgcagactgattgaagctctgtctagctgccagctgccctttcagtgtgctcacggtaggccttccatgctgccactcgccgacattgatcatctggagcaggagaagcagatcaaaccgaatctgaccaaactccgaaagatggcacaggcatggcgtctcttcggcaaggcagagtgcgacacgcgccagtccctccaacaatcaatgcctccttgtgaaccgccttag

SEQ ID NO: 281063 - DNA, 4362 bp, Artificial Sequence
  derived and/or modified sequence
atgatcaagtgcctgtctgtggaggtgcaggccaagctgcggagcggcctggccatcagcagcctgggccagtgtgtggaggagctggccctgaacagcattgatgctgaggccaagtgtgtggccgtgcgggtgaacatggagaccttccaggtgcaggtgattgacaatggatttggcatgggcagtgatgatgtggagaaggtgggcaaccgctacttcaccagcaagtgccacagcgtgcaggacctggagaacccccgcttctacggcttccggggggaggccctggccaacattgctgacatggccagcgctgtggagatcagcagcaagaagaacagaaccatgaagacctttgtgaagctgttccagagcggcaaggccctgaaggcctgtgaggctgatgtgacccgggccagcgctggcaccaccgtgacagtgtacaacctcttctaccagctgcctgtgcggaggaagtgcatggacccccggctggagtttgagaaggtgcggcagagaattgaggccctgagcctgatgcaccccagcatctccttcagcctgagaaatgatgtgtctggctccatggtgctgcagctgcccaagaccaaggatgtgtgcagccgcttctgccagatctacggcctgggcaagagccagaagctgcgggagatctccttcaagtacaaggagtttgagctgagcggctacatcagcagcgaggcccactacaacaagaacatgcagttcctgtttgtgaacaagaggctggtgctgcggaccaagctgcacaagctgattgacttcctgctgaggaaggagagcatcatctgcaagcccaagaatggccccaccagccggcagatgaacagcagcctgcggcacaggagcaccccagagctgtatggcatctacgtgatcaacgtgcagtgccagttctgtgaatatgatgtgtgcatggagcccgccaagaccctcatcgagttccagaactgggacaccctgctcttctgcatccaggagggcgtgaagatgttcctgaagcaggagaagctgtttgtggagctgagcggggaggacatcaaggagttctctgaagataatggcttcagcctgtttgatgccaccctgcagaagagggtgaccagtgatgagaggagcaacttccaggaggcctgcaacaacatcctggacagctatgagatgttcaacctgcagagcaaggctgtgaagaggaagaccacagcagaaaatgtgaacacccagagcagccgggacagcgaggccaccaggaagaacaccaatgatgccttcctgtacatctatgaaagtggcggccctggccacagcaagatgacagagcccagcctgcagaacaaggacagcagctgcagcgagagcaagatgctggagcaggagaccatcgtggccagcgaggccggagaaaatgagaagcacaagaagagcttcctggagcacagcagcctggagaacccctgtggcaccagcctggagatgttcctgagccccttccagaccccctgccactttgaggagagcggccaggacctggagatctggaaggagagcaccaccgtgaatggcatggccgccaacatcctgaagaacaaccgcatccagaaccagcccaagcgcttcaaggatgccacagaggtgggctgccagcccctgccctttgccaccaccctgtggggcgtgcacagcgcccagacagagaaggagaagaagaaggagagcagcaactgtggcagaagaaatgtgttctcctatggccgggtgaagctgtgcagcacaggcttcatcacccacgtggtgcagaatgagaagaccaagagcacagaaacagagcacagcttcaagaactacgtgcggcccggccccacccgggcccaggagaccttcggcaacagaaccaggcacagcgtggagaccccagacatcaaggacctggccagcaccctgagcaaggagagcggccagctgcccaacaagaagaactgcaggaccaacatctcctatggcctggagaatgagcccacagccacctacaccatgttttctgccttccaggagggcagcaagaagagccagacagactgcatcctgagtgacaccagccccagcttcccctggtaccgccacgtgtccaatgacagcaggaagacagacaagctgattggcttcagcaagcccatcgtgaggaagaagctgagcctgagcagccagctgggcagcctggagaagttcaagaggcagtatggcaaggtggagaaccccctggacacagaggtggaggagagcaatggagtgaccaccaacctgagcctgcaggtggagccagacatcctgctgaaggacaagaaccggctggagaacagtgatgtgtgcaagatcaccaccatggagcacagcgacagcgacagcagctgccagcctgccagccacatcctgaacagcgagaagttccccttcagcaaggatgaggactgcctggagcagcagatgcccagcctgcgggagagccccatgaccctgaaggagctgagcctcttcaacaggaagcccctggacctggagaagagcagcgagagcctggccagcaagctgagccggctgaagggcagcgagcgggagacccagaccatgggcatgatgagccgcttcaatgagctgcccaacagcgacagcagcaggaaggacagcaagctgtgcagcgtgctgacccaggacttctgcatgctgttcaacaacaagcatgagaagacagaaaatggagtcatccccaccagtgacagcgccacccaggacaacagcttcaacaagaacagcaagacccacagcaacagcaacaccacagagaactgtgtgatcagcgagacccccctggtgctgccctacaacaacagcaaggtgacaggcaaggacagtgatgtgctgatccgggccagcgagcagcagatcggcagcctggacagccccagcggcatgctgatgaaccctgtggaggatgccactggagaccagaatggcatctgcttccagagcgaggagagcaaggcccgggcctgcagcgagacagaggagagcaacacctgctgcagcgactggcagaggcactttgatgtggccctgggccgcatggtgtatgtgaacaagatgacaggcctgagcaccttcatcgcccccacagaggacatccaggccgcctgcaccaaggacctgaccaccgtggccgtggatgtggtgctggagaatggcagccagtaccgctgccagcccttcagaagtgacctggtgctgcccttcctgccccgggcccgggcagagaggacagtgatgaggcaggacaacagagacacagtggatgacacagtgtcctctgagagcctgcagagcctcttcagcgagtgggacaaccctgtgtttgcccgctacccagaggtggccgtggatgtgagcagcggccaggccgagagcctggccgtgaagatccacaacatcctgtacccctaccgcttcaccaagggcatgatccacagcatgcaggtgctgcagcaggtggacaacaagttcatcgcctgcctgatgagcaccaagacagaggagaatggagaggccggcggcaacctgctggtgctggtggaccagcacgccgcccacgagcgcatccggctggagcagctgatcatcgacagctatgagaagcagcaggcccagggcagcggcaggaagaagctgctgagcagcaccctcatcccccccctggagatcaccgtgacagaggagcagaggcggctgctgtggtgctaccacaagaacctggaggacctgggcctggagtttgtgtttcctgacaccagtgacagcctggtgctggtgggcaaggtgcccctgtgctttgtggagcgggaggccaatgagctgcggcggggccgcagcacagtgaccaagagcatcgtggaggagttcatccgggagcagctggagctgctgcagaccaccggcggcatccagggcaccctgcccctgactgtgcagaaggtgctggccagccaggcctgccacggggccatcaagttcaatgatggcctgagcctgcaggagagctgccgcctgattgaggccctgagcagctgccagctgcccttccagtgtgcccacggccggcccagcatgctgcccctggccgacatcgaccacctggagcaggagaagcagatcaagcccaacctgaccaagctgaggaagatggcccaggcctggaggctgtttgggaaggccgagtgtgacacccggcagagcctgcagcagagcatgccaccctgtgagcccccatag

SEQ ID NO: 281064 - DNA, 1176 bp, Artificial Sequence
  derived and/or modified sequence
atggtgtatgtgaacaagatgacaggcctgagcaccttcatcgcccccacagaggacatccaggccgcctgcaccaaggacctgaccaccgtggccgtggatgtggtgctggagaatggcagccagtaccgctgccagcccttcagaagtgacctggtgctgcccttcctgccccgggcccgggcagagaggacagtgatgaggcaggacaacagagacacagtggatgacacagtgtcctctgagagcctgcagagcctcttcagcgagtgggacaaccctgtgtttgcccgctacccagaggtggccgtggatgtgagcagcggccaggccgagagcctggccgtgaagatccacaacatcctgtacccctaccgcttcaccaagggcatgatccacagcatgcaggtgctgcagcaggtggacaacaagttcatcgcctgcctgatgagcaccaagacagaggagaatggagaggccggcggcaacctgctggtgctggtggaccagcacgccgcccacgagcgcatccggctggagcagctgatcatcgacagctatgagaagcagcaggcccagggcagcggcaggaagaagctgctgagcagcaccctcatcccccccctggagatcaccgtgacagaggagcagaggcggctgctgtggtgctaccacaagaacctggaggacctgggcctggagtttgtgtttcctgacaccagtgacagcctggtgctggtgggcaaggtgcccctgtgctttgtggagcgggaggccaatgagctgcggcggggccgcagcacagtgaccaagagcatcgtggagctgctgcagaccaccggcggcatccagggcaccctgcccctgactgtgcagaaggtgctggccagccaggcctgccacggggccatcaagttcaatgatggcctgagcctgcaggagagctgccgcctgattgaggccctgagcagctgccagctgcccttccagtgtgcccacggccggcccagcatgctgcccctggccgacatcgaccacctggagcaggagaagcagatcaagcccaacctgaccaagctgaggaagatggcccaggcctggaggctgtttgggaaggccgagtgtgacacccggcagagcctgcagcagagcatgccaccctgtgagcccccatag

SEQ ID NO: 281065 - DNA, 4362 bp, Artificial Sequence
  derived and/or modified sequence
atgatcaagtgcctgagcgtggaggtgcaggccaagctgcggagcgggcttgctatttcctccttaggtcaatgtgtcgaggagctcgcgctgaatagcattgacgctgaagccaagtgcgttgccgtgagagtgaacatggagacgtttcaggtgcaggtcatcgacaatggtttcggcatgggaagcgatgatgtagaaaaggtcgggaatcgatatttcaccagtaagtgtcattcagtccaagatctggagaatcctaggttttacgggttcagaggggaagctctggctaatattgcagacatggcttcagccgtggaaatctcgagcaagaaaaacagaacaatgaagacctttgtgaagctgttccagtcgggcaaggccctgaaagcgtgcgaggccgatgtcactcgcgcctccgccgggacaaccgtcactgtttataacctgttctaccaactgcctgtgcgccgaaagtgcatggacccccgtttggagttcgagaaggttcgtcagcgtattgaggccctgtcactgatgcatccatcgatctccttcagcttgaggaatgatgtgtctggatctatggtgctccagctgccaaagaccaaggacgtctgcagtagattctgtcagatctatggcctgggaaaatcacagaaactcagggagatttcgtttaagtataaggagttcgagctgtcgggctatataagcagcgaagcacattacaacaaaaacatgcagtttttatttgtgaacaagagattagtcttgaggaccaagctgcataaactgatcgactttcttctgaggaaagagtccataatatgcaagcctaaaaacgggcccaccagccggcagatgaactcatccttaaggcatcgctcaaccccagaactatacggaatatacgtcataaatgtgcagtgccaattttgcgaatatgatgtgtgtatggagcctgccaagacactcatcgaattccagaactgggacacattactgttctgcattcaggagggcgtaaagatgttcctcaaacaggaaaaactttttgtggagctcagtggggaagacattaaggaattttctgaggataatggttttagtctgttcgatgccaccctgcagaaacgggtcacgtcagatgagagatcaaacttccaggaggcctgtaataacatactggactcatatgaaatgttcaatctgcagagcaaggccgttaagagaaaaactactgcagagaacgtgaatacccagagctccagggactcagaagcgacacgcaaaaacaccaacgacgcatttctgtatatttacgaatccggagggcccggtcactctaaaatgacagagcccagtctacagaataaagactcatcttgttccgaatccaagatgctggagcaggagactatcgtggccagcgaggctggagagaatgagaagcataagaagtcatttcttgaacacagttccttggagaatccttgcgggacatctttggaaatgtttctgagcccatttcagacgccttgtcattttgaagaatccgggcaggacctcgagatctggaaagagtctacgaccgtcaacggtatggccgcgaatatcctaaaaaacaataggatacaaaaccaacccaagagattcaaggatgcgactgaggtaggctgccagccccttccctttgcaaccactttatggggcgtgcatagtgctcagaccgaaaaggagaagaagaaggagtcctccaattgcggcaggcgtaatgtcttctcttacggcagagtgaaactttgcagcactggattcattactcacgtagttcagaacgagaaaactaagtctacggagacagagcattcctttaagaactatgtccggcctggccctactcgggcccaggaaaccttcggaaaccgtactcgccactccgttgaaaccccggatataaaggatctggcaagcacactgtctaaagagtcagggcagttgccaaataaaaagaattgccgtacaaacatctcttacggcctcgaaaacgaacctacagcaacttatacaatgttttccgcattccaggaaggttccaaaaagagtcagaccgattgtattctgagcgatacaagtccttctttcccttggtacaggcacgtatctaatgattctcgcaaaaccgataagctgataggtttcagcaagccgatcgtgaggaagaagctgtctctgagctcccaattagggagcctggagaaattcaaacggcagtatggcaaggtagaaaatccccttgacacggaagtagaggaaagcaatggtgtgacaactaatctgagcttacaagtggagccagatatactgctgaaggacaaaaataggctggagaattccgatgtgtgtaaaatcactaccatggagcacagcgactctgacagttcgtgccagcctgcatctcatattctgaatagcgaaaagttccctttctcaaaggacgaagactgtttagaacagcagatgcctagcctccgggagagtcctatgacactcaaggaactgagtctgtttaatcgcaaaccactggacttggaaaagagcagcgaatcactcgcaagcaaactgtcgagacttaaagggagtgagagagaaacccaaacgatgggcatgatgagtcggtttaacgagctgccgaatagcgattcctccagaaaggatagcaaactgtgcagtgttttaacacaagatttttgcatgctgtttaacaataaacacgagaaaacagagaacggggtaatacctaccagtgacagcgccacgcaggacaattcatttaacaagaattctaaaacgcactcaaactctaatacaaccgaaaattgtgtgatctccgaaacaccgctagtgctgccctacaacaactccaaggtcactggaaaagactcagacgtgcttattcgcgcctcagaacagcaaattgggagcctcgattctccatccggaatgctcatgaatccagtggaggatgcgaccggtgatcagaatggcatctgcttccagtctgaagaatccaaggccagagcatgctcagaaactgaggagagcaacacatgttgtagcgactggcaaaggcacttcgacgtggccctgggaaggatggtgtatgtgaataagatgaccggacttagtacatttattgctcctaccgaagacatccaggccgcctgcacgaaagacctgaccacagtggccgtcgatgttgtgctcgagaacggctcacaataccggtgccagcccttcaggagcgatctggtgcttcctttcctgcctagggcgcgggccgaaagaaccgttatgaggcaggacaacagggacacggttgacgacacggtatcttccgagtccctccaatcactcttctcagagtgggacaacccagtattcgctcggtatccagaagtggccgtggacgtgagcagcgggcaggctgaatcccttgctgtgaagatccataatattctctacccgtatcggtttactaagggaatgatccacagtatgcaagtgttgcaacaggtggataataagttcatcgcatgccttatgtccactaaaacggaagagaatggagaggccgggggaaatctgctggtgctcgtggatcaacacgccgcgcacgagagaatccgcttagagcagttaataattgacagctatgagaaacagcaggcccagggatctggccgtaagaagctcctttcaagcacccttattcctcctctggagatcactgttaccgaagagcagaggcgcctgctgtggtgctaccataaaaacttagaagacctgggcctggagttcgttttcccagacacatccgattctttagtcctggtggggaaggttccattgtgtttcgttgagcgtgaagcaaacgagctgaggagaggtcgaagtacagttacaaaaagcatcgtggaagaatttattcgggaacagctcgagctcctgcagacaaccggcggtattcagggcactctcccactgaccgtacagaaagtgcttgctagtcaagcgtgtcacggtgctataaagttcaacgatggcctgagcttacaggagagctgcaggctgatcgaggcacttagctcctgtcaactcccctttcagtgcgcccacggacggcccagtatgctgccgctcgccgacatcgaccatctcgagcaggaaaagcagatcaaacctaatctcaccaagctcaggaaaatggctcaagcctggaggctctttggcaaagcagaatgtgacacacgccagtctctgcagcagtcaatgcctccctgtgaaccaccttag

SEQ ID NO: 281066 - DNA, 1176 bp, Artificial Sequence
  derived and/or modified sequence
atggtgtacgtgaacaagatgaccggcctgagcaccttcatcgccccaactgaggatattcaggcagcctgtactaaagacttgacaacagtggccgtcgacgtcgttctggagaacggatcacagtaccgatgccagccttttaggtccgaccttgtgctgccattcctgccccgcgcccgtgccgagcgaactgttatgaggcaggacaaccgagataccgtcgacgacaccgtatcttccgaatccctgcagtccctcttttctgagtgggataaccccgtgttcgcaagatatcctgaggtagccgtagacgtgagtagcggccaggctgagtcactggctgttaaaatccacaatatcctgtacccttacagatttacaaaaggtatgatccatagtatgcaggtattgcagcaagtggataataaattcatagcctgcctcatgagtacaaaaacagaagaaaacggcgaagcaggcggcaacttgctggtgctggtcgatcagcacgccgctcacgagcgaattcgcctagagcaactgatcattgactcatatgaaaaacagcaggcacagggttccggtcggaagaagttactcagcagcacactgatccctcctctggagatcacagtcacggaagagcagcgcaggctcctctggtgttatcataaaaacttagaagatcttggcctggaatttgtctttcccgacacctctgacagcttggttcttgtgggaaaggtgccgctgtgttttgtggaacgtgaggccaacgagctccgcaggggacgcagcactgtaaccaaaagcattgttgaacttttgcagacgaccggtgggatccaaggaacactgccacttacggtccagaaggtcctggcgagtcaggcttgccacggtgcaatcaaattcaatgacggtctttcgttgcaggaatcgtgccgcttgattgaggccctttcatcttgtcagctccctttccagtgcgctcatggacgccccagtatgttgcctctggctgatattgatcatctagagcaggagaaacagatcaaaccaaacctgactaaactccgtaaaatggcacaagcctggaggctgttcggcaaagcagagtgcgatacgcggcaatcactgcaacagagcatgccgccctgcgagcccccctag

SEQ ID NO: 281067 - DNA, 4362 bp, Artificial Sequence
  derived and/or modified sequence
atgatcaagtgcctgagcgtggaggtgcaggccaagctgcggagcggcctggctatcagtagcctaggccagtgcgtggaagagttggctttaaatagtatagacgccgaggccaagtgtgtggcagtgcgcgtcaatatggaaacgttccaagtccaggtcatagacaatggctttggcatgggttccgatgatgtggaaaaggttgggaatcgatactttacatccaagtgtcatagcgtacaggacttggagaaccctcgcttttatggtttcaggggggaggccctcgctaacattgccgacatggctagcgccgttgaaatttccagcaagaaaaaccgaacaatgaaaaccttcgtcaaactgttccaaagtggaaaagccctgaaggcatgcgaggctgacgtgacccgagcatcggcaggcaccaccgtaaccgtgtacaatctattctatcagcttccagttcgacgcaagtgtatggatccacgcctggaattcgagaaggtgcggcagcggatcgaagccctgagtctgatgcatccctccatttctttctccctccgtaatgatgtttctggatctatggtactccaactccctaaaacaaaggatgtttgtagccgattctgccaaatctacggcctgggcaagtcccaaaagcttagagagatcagttttaagtacaaggagttcgaactctctggctacatttcatctgaagcccactataacaagaatatgcaatttctgtttgtaaataaaagacttgtgctgcggacgaagttgcataagcttatcgacttcttacttcgaaaggaatcaatcatctgtaaacccaaaaatggccccacttcgagacagatgaactcatccctccgccacagaagtacccccgaactgtacggcatctacgtcattaacgtgcaatgtcaattttgcgaatatgacgtttgcatggaacccgcaaagacgttgatcgagtttcagaactgggataccctcctcttttgtatccaagaaggtgtgaagatgttcttgaaacaggaaaaactgtttgtagagctgtcaggggaggatatcaaggaattttctgaagacaacgggttcagtctgttcgacgcaaccttgcagaagcgcgtgacctctgatgagcgctccaactttcaggaggcttgcaataatattctggacagctacgagatgttcaacctccaaagcaaggcggttaagaggaagactacagccgagaatgtcaacacacagagcagccgcgacagcgaggcaacccgcaagaataccaacgatgccttcttatatatttacgagagcggggggcctggccactctaagatgacagaaccctccttacaaaacaaggatagttcttgcagcgagtcaaagatgctggagcaggaaacaatcgtggctagtgaggctggagagaatgaaaagcacaagaagagcttcctggaacacagcagtctggaaaacccctgtggcacttctctcgaaatgttcctcagcccctttcagacaccatgccatttcgaggagtctggacaggatttagagatctggaaagaaagtaccaccgtgaacggcatggccgccaacattctgaagaataatcggattcagaaccagcccaaaagatttaaggacgcaaccgaggtgggatgccagcccctccctttcgccactacactctggggcgtccatagcgctcaaacagagaaagagaagaagaaggagagttccaactgtggtcgtcggaatgtcttcagctacggaagggtgaaactgtgcagtactggcttcataactcatgtggttcagaacgaaaagacaaagagcacagaaactgagcactcgtttaagaattacgtaaggccaggcccaactagggcccaggagacgttcggtaatcggacccgacatagtgttgagaccccggatatcaaagacctggcaagtactctctccaaagaaagtggccagctgcccaataaaaaaaactgtaggacaaacataagttatgggctggaaaacgagccgacagccacttataccatgtttagtgccttccaggaaggctccaaaaaaagccaaaccgattgcatccttagcgatacctctccatcattcccatggtacaggcatgtcagcaacgacagccgaaaaactgacaaactgatcggctttagtaaacctatcgtaagaaagaaactcagcctttcctcacagctgggtagcctggagaagttcaagaggcagtacggaaaggtcgagaaccccctcgatacggaggtggaggagtccaatggcgtgacgaccaacctctcgttacaagtggaaccagatatactcctgaaagataaaaacaggttggaaaattccgacgtctgtaagataaccacgatggagcactctgattcggactcttcgtgccaacctgccagccacatcttaaactccgagaagttccccttttcaaaggacgaagactgcctggaacagcagatgccctctttaagagaatctccgatgactctgaaagaactttccctcttcaaccgaaagcccctcgatctggaaaagtcttcagaatcgctggcgtccaaattgtctcgcctgaaaggttccgaacgcgagacccagactatgggcatgatgtctcgcttcaatgagctgcctaactccgactctagcaggaaggactctaaactgtgcagcgtgttgacccaagacttctgcatgctcttcaacaacaaacacgaaaagacggagaatggtgtaatccctaccagcgattcggccacgcaagacaactcattcaataagaattcaaaaacacactccaatagcaacacgacagaaaactgtgttatcagcgagacccctctagtacttccatacaataacagcaaagtcaccggaaaggactccgacgtgctgatccgcgcttcagagcagcagatcgggagcttggattctccatccggaatgctgatgaatccagtggaggatgcgactggcgatcagaatggcatttgtttccaaagcgaggagagcaaagcaagagcttgcagtgaaactgaagaatccaacacgtgttgcagtgattggcaacggcacttcgatgtcgctttgggacgtatggtgtatgttaacaagatgaccgggctatctacatttatcgcaccaactgaagatatccaagcagcgtgcacaaaggacttgacaacagtggcagtggacgtggtgctggagaatggcagtcaataccgctgtcagccctttcgatctgacttggtgctaccctttctgccgcgagccagagcggagagaacggtgatgagacaggataaccgggataccgtcgatgatactgtttcctccgagtctctgcaaagtttattctctgaatgggacaatcccgtgtttgctcgatatcctgaagtggcagttgatgtgagctccgggcaggctgaatcccttgccgtcaaaatacacaacattttgtatccgtaccggttcacaaaaggaatgattcattcgatgcaggtgttacagcaggtggataataaatttattgcctgtctgatgtccacaaagacagaagagaatggagaggcagggggcaatctactggtcctggtggatcaacacgccgcccacgagaggattcggctggagcagctcattattgacagttacgaaaagcagcaagcacagggttcaggtcgtaaaaagcttttgagtagcactctcatccccccccttgagattaccgttacagaggagcaaaggagactgctgtggtgttatcataaaaatcttgaagacctcggcctggagttcgtcttccctgacacaagcgatagtttggtgctggtgggcaaggttcctctgtgctttgtggagcgcgaagctaacgagctcaggcgtgggagatcaacggttacaaaaagcattgtggaggaattcatccgggaacaactggagctgctccaaaccactggtggcatacagggaaccctacccctcactgtgcaaaaggtgttggcctcccaggcctgtcacggtgccattaaatttaacgacggcctgtccctccaggaatcctgtaggctgatcgaggctctcagctcatgtcagctgcctttccaatgcgcccacggtcggccctctatgctgcccctcgccgatatcgatcacctggagcaggagaagcagataaagcctaacctgactaagctgcgtaaaatggcccaggcttggaggctcttcggcaaagcagagtgcgatactcgacagtccctgcaacagagtatgccaccgtgtgagcccccatag

SEQ ID NO: 281068 - DNA, 7896 bp, Artificial Sequence
  derived and/or modified sequence
aacaactggtgcgcatgcgcactggtgtctcgcggcctggcgcgccccctccgaagcgcatgctcgtgggcacgcacgagcctcaagatccaaggtgcgcgcgtcggcgtccgaggcggttggtgtcggagaatttgttaagcgggactccaggcaattatttccagtcagagaaggaaaccagtgcctggcattctcaccatctttctacctaccatgatcaagtgcttgtcagttgaagtacaagccaaattgcgttctggtttggccataagctccttgggccaatgtgttgaggaacttgccctcaacagtattgatgctgaagcaaaatgtgtggctgtcagggtgaatatggaaaccttccaagttcaagtgatagacaatggatttgggatggggagtgatgatgtagagaaagtgggaaatcgttatttcaccagtaaatgccactcggtacaggacttggagaatccaaggttttatggtttccgaggagaggccttggcaaatattgctgacatggccagtgctgtggaaatttcgtccaagaaaaacaggacaatgaaaacttttgtgaaactgtttcagagtggaaaagccctgaaagcttgtgaagctgatgtgactagagcaagcgctgggactactgtaacagtgtataacctattttaccagcttcctgtaaggaggaaatgcatggaccctagactggagtttgagaaggttaggcagagaatagaagctctctcactcatgcacccttccatttctttctctttgagaaatgatgtttctggttccatggttcttcagctccctaaaaccaaagacgtatgttcccgattttgtcaaatttatggattgggaaagtcccaaaagctaagagaaataagttttaaatataaagagtttgagcttagtggctatatcagctctgaagcacattacaacaagaatatgcagtttttgtttgtgaacaaaagactagttttaaggacaaagctacataaactcattgactttttattaaggaaagaaagtattatatgcaagccaaagaatggtcccaccagtaggcaaatgaattcaagtcttcggcaccggtctaccccagaactctatggcatatatgtaattaatgtgcagtgccaattctgtgagtatgatgtgtgcatggagccagccaaaactctgattgaatttcagaactgggacactctcttgttttgcattcaggaaggagtgaaaatgtttttaaagcaagaaaaattatttgtggaattatcaggtgaggatattaaggaatttagtgaagataatggttttagtttatttgatgctactcttcagaagcgtgtgacttccgatgagaggagcaatttccaggaagcatgtaataatattttagattcctatgagatgtttaatttgcagtcaaaagctgtgaaaagaaaaactactgcagaaaacgtaaacacacagagttctagggattcagaagctaccagaaaaaatacaaatgatgcatttttgtacatttatgaatcaggtggtccaggccatagcaaaatgacagagccatctttacaaaacaaagacagctcttgctcagaatcaaagatgttagaacaagagacaattgtagcatcagaagctggagaaaatgagaaacataaaaaatctttcctggaacatagctctttagaaaatccgtgtggaaccagtttagaaatgtttttaagcccttttcagacaccatgtcactttgaggagagtgggcaggatctagaaatatggaaagaaagtactactgttaatggcatggctgccaacatcttgaaaaataatagaattcagaatcaaccaaagagatttaaagatgctactgaagtgggatgccagcctctgccttttgcaacaacattatggggagtacatagtgctcagacagagaaagagaaaaaaaaagaatctagcaattgtggaagaagaaatgtttttagttatgggcgagttaaattatgttccactggctttataactcatgtagtacaaaatgaaaaaactaaatcaactgaaacagaacattcatttaaaaattatgttagacctggtcccacacgtgcccaagaaacatttggaaatagaacacgtcattcagttgaaactccagacatcaaagatttagccagcactttaagtaaagaatctggtcaattgcccaacaaaaaaaattgcagaacgaatataagttatgggctagagaatgaacctacagcaacttatacaatgttttctgcttttcaggaaggtagcaaaaaatcacaaacagattgcatattatctgatacatccccctctttcccctggtatagacacgtttccaatgatagtaggaaaacagataaattaattggtttctccaaaccaatcgtccgtaagaagctaagcttgagttcacagctaggatctttagagaagtttaagaggcaatatgggaaggttgaaaatcctctggatacagaagtagaggaaagtaatggagtcactaccaatctcagtcttcaagttgaacctgacattctgctgaaggacaagaaccgcttagagaactctgatgtttgtaaaatcactactatggagcatagtgattcagatagtagttgtcaaccagcaagccacatccttaactcagagaagtttccattctccaaggatgaagattgtttagaacaacagatgcctagtttgagagaaagtcctatgaccctgaaggagttatctctctttaatagaaaacctttggaccttgagaagtcatctgaatcactagcctctaaattatccagactgaagggttccgaaagagaaactcaaacaatggggatgatgagtcgttttaatgaacttccaaattcagattccagtaggaaagacagcaagttgtgcagtgtgttaacacaagatttttgtatgttatttaacaacaagcatgaaaaaacagagaatggtgtcatcccaacatcagattctgccacacaggataattcctttaataaaaatagtaaaacacattctaacagcaatacaacagagaactgtgtgatatcagaaactcctttggtattgccctataataattctaaagttaccggtaaagattcagatgttcttatcagagcctcagaacaacagataggaagtcttgactctcccagtggaatgttaatgaatccggtagaagatgccacaggtgaccaaaatggaatttgttttcagagtgaggaatctaaagcaagagcttgttctgaaactgaagagtcaaacacgtgttgttcagattggcagcggcatttcgatgtagccctgggaagaatggtttatgtcaacaaaatgactggactcagcacattcattgccccaactgaggacattcaggctgcttgtactaaagacctgacaactgtggctgtggatgttgtacttgagaatgggtctcagtacaggtgtcaaccttttagaagcgaccttgttcttcctttccttccgagagctcgagcagagaggactgtgatgagacaggataacagagatactgtggatgatactgttagtagcgaatcgcttcagtctttgttctcagaatgggacaatccagtatttgcccgttatccagaggttgctgttgatgtaagcagtggccaggctgagagcttagcagttaaaattcacaacatcttgtatccctatcgtttcaccaaaggaatgattcattcaatgcaggttctccagcaagtagataacaagtttattgcctgtttgatgagcactaagactgaagagaatggcgaggcaggtgggaacctgctcgtgctggtggatcagcacgctgcccatgagcgtatacgtctggagcagcttatcattgattcctacgagaagcaacaggcacaaggctctggtcggaaaaaattactgtcttctactctaattcctccgctagagataacagtgacagaggaacaaaggagactcttatggtgttaccacaaaaatctggaagatctgggccttgaatttgtatttccagacactagtgattctctggtccttgtgggaaaagtaccactatgttttgtggaaagagaagccaatgaacttcggagaggaagatctactgtgaccaagagtattgtggaggaatttatccgagaacaactggagctactccagaccaccggaggcatccaagggacattgccactgactgtccagaaggtgttggcatcccaagcctgccatggggccattaagtttaatgatggcctgagcttacaggaaagttgccgccttattgaagctctgtcctcatgccagctgccattccagtgtgctcacgggagaccttctatgctgccgttagctgacatagaccacttggaacaggaaaaacagattaaacccaacctcactaaacttcgcaaaatggcccaggcctggcgtctctttggaaaagcagagtgtgatacaaggcagagcctgcagcaatccatgcctccctgtgagccaccatgagaacagaatcactggtctaaaaggaacaaagggatgttcactgtatgcctctgagcagagagcagcagcagcaggtaccagcacggccctgactgaatcagcccagtgtccctgagcagcttagacagcagggctctctgtatcagtctttcttgagcagatgattcccctagttgagtagccagatgaaattcaagcctaaagacaattcattcatttgcatccatgggcacagaaggttgctatatagtatctaccttttgctacttatttaatgataaaatttaatgacagtttgattggttgcttggtttgttatttgaagggtgtgatttttgtttttgtacagttttttttcaagcttcacatttgcgtgtatctaattcagctgatgctcaagtccaaggggtagtctgccttcccaggctgcccccagggtttctgcactggtcccctcttttcccttcagtcttcttcacttccctatgctgctgcttcatgtgctacatctcagacttaaagagtttctctactacagtgaaaacattctctagggtctttcatcaggcctttagttattttagggataaaaactattgataaaaaggacaaggatagaacagagaaaatttaaagtcctgttccgggttttttgttatgttttctttaaaaactcagagactgatgttcaatatcccaaaccagtaaaatggtgaaaatactatgagcttgttttttaaaatatgattttttttggtactttataaagtatctctttatgtgaaagcaattgtcatatcaaaacacagcatacatacgttcaacctaaccaaatatctttacactttttctttcaggagacaagggttctttgggtccctttcaaacggtatcttggtgttattacattatgcctatctattgcccttataatatcacttgggaccaggactgatcgttctgcaaatgcttgttatgccattctcaatctatttttcccgcaccttttcacatgatttgtggttaataggactcaacagactaaaattgcatagtagaaaaaaaatgcaaaaagccagctggtaatgtttattgcaactggggtgctatacaattagtaagatgatgcaatgagaatttctacttttgtatttcctgaccagcctgctcaaagtggcttttatatcaattgaatgattttcctcattttttaatacaggaaaccaattcgtgctcatggaagaaaagttcctttgccagcagccttgaagtgaatcttacaggagcaatgaaagtattgcattcattagcgtctgccccagagaaggttcagagaaaaccttcacttgttttcaaggggatccttgtagatttacgtaattggaatcctgaagaacaggccctactgtctaaaaaatggcttttattcttctaaatacatataaacggatgttttatagatgggaagacatgaccttagaaaggagagagttttcagaggatttgccaggctgtcaggggctctgcctccaggcccagtgtggcagtgtggcctcagggcctccgcctccctgcttgagggctgcatggaggccaactgtcctgggagttgtaaaaatcttttaaggccagaccaatttgagggattttaaaaagtgtctcagtgcctcttatgatttcagaaggttttgctatatgtaatcccaactactgttttcttgagagtagcagaggattagaaaaagtcctccataaattatgtaaccggccttcctgactagcctgactcaagcaatgtaagagataattattctgttttcataatttataagtgtgggggcatgcctcagcataaaaacaacctattagggaaaaatatctaatagattacctttatcgcctgttagggttttatgttgtttttaactcagatgccataagaacaaagatacatgtaatttataatagtaatcattaatacctatattgtgctttaaggtttacaaaataatttttctcatactttatcttagtttagtttcttgacagtccatgaggtaaggtggtagctttatcaccattttacaaagtgggaaacgaaggttcctcttaggaacctagttgtcacctttgtataataaaacttcgaagctcggagctgttaactggtttgctgaaggcttagctgtaagagccagaattcagacccaggtctgagtgacttcaaactgcacagtccttcccattattacccatatgctatcccttatatttttaatttattaggaattcattcatttataaacttggtgattcacctttattagattctggtcgctgaaggctttagtaacttcagagtaaaacttgagagatgagatgtaaaatgcagccattcttgagagttcctttttctgtaacattcatcaacacttcattgagaagtgaaggttcctatggctgtctctaccttcaagaggcttagctttagtcactgagaaagacaaggaaactaatgatagaatatagtagcttcttctggcgttaggtatcacagagtcacagctagttacagctagccctttattattgaaagaagaggagctagcagtcccactatcagaattaagactagagatggtaataggagctagtatcagaaaagcttaaggcaaagcataaagtgtaggctagaatgaagctggagaatggggagggggcttgggtaacatccagaacctggctggggacctggaactacatgagatgtaagaatggagaggttctagcagtcagaggtcaggtacaaatgaacagctgggatctgcgcatggcagacagtgaaaaaacccaggcaagcaaaatggtcagagcagaaaggggcccaaggccacgttcttgagatgtggagggggctgaggaagccacgccaagtaaggacagatgcagctcagcagttcctagcgagccctgacaagccagctcagctgaagcttcgggtgggagccagtcatggcacagtggagtgaaggaagagcagtttcaggcacccaaaacctgacccccacgacctgttttccacctgaagagccacccattccatccaaacccttggcaaaagtctgctaacagagagaaccggccagtatgctggccagtcgcgatcatgcctgtctttaccctctaagctgaagctgctcatcaacggtgagatggcaaaaaggtgggtccagaagaggggaaaagaagggagtctgtgaaaacaaaatgctgaagaatctgcatcaaataaacccttccttccttcctttttccttc

SEQ ID NO: 281069 - DNA, 7872 bp, Artificial Sequence
  derived and/or modified sequence
aacaactggtgcgcatgcgcactggtgtctcgcggcctggcgcgccccctccgaagcgcatgctcgtgggcacgcacgagcctcaagatccaaggtgcgcgcgtcggcgtccgaggcggttggtgtcggagaatttgttaagcgggactccaggcaattatttccagtcagagaaggaaaccagtgcctggcattctcaccatctttctacctaccatgatcaagtgcttgtcagttgaagtacaagccaaattgcgttctggtttggccataagctccttgggccaatgtgttgaggaacttgccctcaacagtattgatgctgaagcaaaatgtgtggctgtcagggtgaatatggaaaccttccaagttcaagtgatagacaatggatttgggatggggagtgatgatgtagagaaagtgggaaatcgttatttcaccagtaaatgccactcggtacaggacttggagaatccaaggttttatggtttccgaggagaggccttggcaaatattgctgacatggccagtgctgtggaaatttcgtccaagaaaaacaggacaatgaaaacttttgtgaaactgtttcagagtggaaaagccctgaaagcttgtgaagctgatgtgactagagcaagcgctgggactactgtaacagtgtataacctattttaccagcttcctgtaaggaggaaatgcatggaccctagactggagtttgagaaggttaggcagagaatagaagctctctcactcatgcacccttccatttctttctctttgagaaatgatgtttctggttccatggttcttcagctccctaaaaccaaagacgtatgttcccgattttgtcaaatttatggattgggaaagtcccaaaagctaagagaaataagttttaaatataaagagtttgagcttagtggctatatcagctctgaagcacattacaacaagaatatgcagtttttgtttgtgaacaaaagactagttttaaggacaaagctacataaactcattgactttttattaaggaaagaaagtattatatgcaagccaaagaatggtcccaccagtaggcaaatgaattcaagtcttcggcaccggtctaccccagaactctatggcatatatgtaattaatgtgcagtgccaattctgtgagtatgatgtgtgcatggagccagccaaaactctgattgaatttcagaactgggacactctcttgttttgcattcaggaaggagtgaaaatgtttttaaagcaagaaaaattatttgtggaattatcaggtgaggatattaaggaatttagtgaagataatggttttagtttatttgatgctactcttcagaagcgtgtgacttccgatgagaggagcaatttccaggaagcatgtaataatattttagattcctatgagatgtttaatttgcagtcaaaagctgtgaaaagaaaaactactgcagaaaacgtaaacacacagagttctagggattcagaagctaccagaaaaaatacaaatgatgcatttttgtacatttatgaatcaggtggtccaggccatagcaaaatgacagagccatctttacaaaacaaagacagctcttgctcagaatcaaagatgttagaacaagagacaattgtagcatcagaagctggagaaaatgagaaacataaaaaatctttcctggaacatagctctttagaaaatccgtgtggaaccagtttagaaatgtttttaagcccttttcagacaccatgtcactttgaggagagtgggcaggatctagaaatatggaaagaaagtactactgttaatggcatggctgccaacatcttgaaaaataatagaattcagaatcaaccaaagagatttaaagatgctactgaagtgggatgccagcctctgccttttgcaacaacattatggggagtacatagtgctcagacagagaaagagaaaaaaaaagaatctagcaattgtggaagaagaaatgtttttagttatgggcgagttaaattatgttccactggctttataactcatgtagtacaaaatgaaaaaactaaatcaactgaaacagaacattcatttaaaaattatgttagacctggtcccacacgtgcccaagaaacatttggaaatagaacacgtcattcagttgaaactccagacatcaaagatttagccagcactttaagtaaagaatctggtcaattgcccaacaaaaaaaattgcagaacgaatataagttatgggctagagaatgaacctacagcaacttatacaatgttttctgcttttcaggaaggtagcaaaaaatcacaaacagattgcatattatctgatacatccccctctttcccctggtatagacacgtttccaatgatagtaggaaaacagataaattaattggtttctccaaaccaatcgtccgtaagaagctaagcttgagttcacagctaggatctttagagaagtttaagaggcaatatgggaaggttgaaaatcctctggatacagaagtagaggaaagtaatggagtcactaccaatctcagtcttcaagttgaacctgacattctgctgaaggacaagaaccgcttagagaactctgatgtttgtaaaatcactactatggagcatagtgattcagatagtagttgtcaaccagcaagccacatccttaactcagagaagtttccattctccaaggatgaagattgtttagaacaacagatgcctagtttgagagaaagtcctatgaccctgaaggagttatctctctttaatagaaaacctttggaccttgagaagtcatctgaatcactagcctctaaattatccagactgaagggttccgaaagagaaactcaaacaatggggatgatgagtcgttttaatgaacttccaaattcagattccagtaggaaagacagcaagttgtgcagtgtgttaacacaagatttttgtatgttatttaacaacaagcatgaaaaaacagagaatggtgtcatcccaacatcagattctgccacacaggataattcctttaataaaaatagtaaaacacattctaacagcaatacaacagagaactgtgtgatatcagaaactcctttggtattgccctataataattctaaagttaccggtaaagattcagatgttcttatcagagcctcagaacaacagataggaagtcttgactctcccagtggaatgttaatgaatccggtagaagatgccacaggtgaccaaaatggaatttgttttcagagtgaggaatctaaagcaagagcttgttctgaaactgaagagtcaaacacgtgttgttcagattggcagcggcatttcgatgtagccctgggaagaatggtttatgtcaacaaaatgactggactcagcacattcattgccccaactgaggacattcaggctgcttgtactaaagacctgacaactgtggctgtggatgttgtacttgagaatgggtctcagtacaggtgtcaaccttttagaagcgaccttgttcttcctttccttccgagagctcgagcagagaggactgtgatgagacaggataacagagatactgtggatgatactgttagtagcgaatcgcttcagtctttgttctcagaatgggacaatccagtatttgcccgttatccagaggttgctgttgatgtaagcagtggccaggctgagagcttagcagttaaaattcacaacatcttgtatccctatcgtttcaccaaaggaatgattcattcaatgcaggttctccagcaagtagataacaagtttattgcctgtttgatgagcactaagactgaagagaatggcgaggcaggtgggaacctgctcgtgctggtggatcagcacgctgcccatgagcgtatacgtctggagcagcttatcattgattcctacgagaagcaacaggcacaaggctctggtcggaaaaaattactgtcttctactctaattcctccgctagagataacagtgacagaggaacaaaggagactcttatggtgttaccacaaaaatctggaagatctgggccttgaatttgtatttccagacactagtgattctctggtccttgtgggaaaagtaccactatgttttgtggaaagagaagccaatgaacttcggagaggaagatctactgtgaccaagagtattgtggagctactccagaccaccggaggcatccaagggacattgccactgactgtccagaaggtgttggcatcccaagcctgccatggggccattaagtttaatgatggcctgagcttacaggaaagttgccgccttattgaagctctgtcctcatgccagctgccattccagtgtgctcacgggagaccttctatgctgccgttagctgacatagaccacttggaacaggaaaaacagattaaacccaacctcactaaacttcgcaaaatggcccaggcctggcgtctctttggaaaagcagagtgtgatacaaggcagagcctgcagcaatccatgcctccctgtgagccaccatgagaacagaatcactggtctaaaaggaacaaagggatgttcactgtatgcctctgagcagagagcagcagcagcaggtaccagcacggccctgactgaatcagcccagtgtccctgagcagcttagacagcagggctctctgtatcagtctttcttgagcagatgattcccctagttgagtagccagatgaaattcaagcctaaagacaattcattcatttgcatccatgggcacagaaggttgctatatagtatctaccttttgctacttatttaatgataaaatttaatgacagtttgattggttgcttggtttgttatttgaagggtgtgatttttgtttttgtacagttttttttcaagcttcacatttgcgtgtatctaattcagctgatgctcaagtccaaggggtagtctgccttcccaggctgcccccagggtttctgcactggtcccctcttttcccttcagtcttcttcacttccctatgctgctgcttcatgtgctacatctcagacttaaagagtttctctactacagtgaaaacattctctagggtctttcatcaggcctttagttattttagggataaaaactattgataaaaaggacaaggatagaacagagaaaatttaaagtcctgttccgggttttttgttatgttttctttaaaaactcagagactgatgttcaatatcccaaaccagtaaaatggtgaaaatactatgagcttgttttttaaaatatgattttttttggtactttataaagtatctctttatgtgaaagcaattgtcatatcaaaacacagcatacatacgttcaacctaaccaaatatctttacactttttctttcaggagacaagggttctttgggtccctttcaaacggtatcttggtgttattacattatgcctatctattgcccttataatatcacttgggaccaggactgatcgttctgcaaatgcttgttatgccattctcaatctatttttcccgcaccttttcacatgatttgtggttaataggactcaacagactaaaattgcatagtagaaaaaaaatgcaaaaagccagctggtaatgtttattgcaactggggtgctatacaattagtaagatgatgcaatgagaatttctacttttgtatttcctgaccagcctgctcaaagtggcttttatatcaattgaatgattttcctcattttttaatacaggaaaccaattcgtgctcatggaagaaaagttcctttgccagcagccttgaagtgaatcttacaggagcaatgaaagtattgcattcattagcgtctgccccagagaaggttcagagaaaaccttcacttgttttcaaggggatccttgtagatttacgtaattggaatcctgaagaacaggccctactgtctaaaaaatggcttttattcttctaaatacatataaacggatgttttatagatgggaagacatgaccttagaaaggagagagttttcagaggatttgccaggctgtcaggggctctgcctccaggcccagtgtggcagtgtggcctcagggcctccgcctccctgcttgagggctgcatggaggccaactgtcctgggagttgtaaaaatcttttaaggccagaccaatttgagggattttaaaaagtgtctcagtgcctcttatgatttcagaaggttttgctatatgtaatcccaactactgttttcttgagagtagcagaggattagaaaaagtcctccataaattatgtaaccggccttcctgactagcctgactcaagcaatgtaagagataattattctgttttcataatttataagtgtgggggcatgcctcagcataaaaacaacctattagggaaaaatatctaatagattacctttatcgcctgttagggttttatgttgtttttaactcagatgccataagaacaaagatacatgtaatttataatagtaatcattaatacctatattgtgctttaaggtttacaaaataatttttctcatactttatcttagtttagtttcttgacagtccatgaggtaaggtggtagctttatcaccattttacaaagtgggaaacgaaggttcctcttaggaacctagttgtcacctttgtataataaaacttcgaagctcggagctgttaactggtttgctgaaggcttagctgtaagagccagaattcagacccaggtctgagtgacttcaaactgcacagtccttcccattattacccatatgctatcccttatatttttaatttattaggaattcattcatttataaacttggtgattcacctttattagattctggtcgctgaaggctttagtaacttcagagtaaaacttgagagatgagatgtaaaatgcagccattcttgagagttcctttttctgtaacattcatcaacacttcattgagaagtgaaggttcctatggctgtctctaccttcaagaggcttagctttagtcactgagaaagacaaggaaactaatgatagaatatagtagcttcttctggcgttaggtatcacagagtcacagctagttacagctagccctttattattgaaagaagaggagctagcagtcccactatcagaattaagactagagatggtaataggagctagtatcagaaaagcttaaggcaaagcataaagtgtaggctagaatgaagctggagaatggggagggggcttgggtaacatccagaacctggctggggacctggaactacatgagatgtaagaatggagaggttctagcagtcagaggtcaggtacaaatgaacagctgggatctgcgcatggcagacagtgaaaaaacccaggcaagcaaaatggtcagagcagaaaggggcccaaggccacgttcttgagatgtggagggggctgaggaagccacgccaagtaaggacagatgcagctcagcagttcctagcgagccctgacaagccagctcagctgaagcttcgggtgggagccagtcatggcacagtggagtgaaggaagagcagtttcaggcacccaaaacctgacccccacgacctgttttccacctgaagagccacccattccatccaaacccttggcaaaagtctgctaacagagagaaccggccagtatgctggccagtcgcgatcatgcctgtctttaccctctaagctgaagctgctcatcaacggtgagatggcaaaaaggtgggtccagaagaggggaaaagaagggagtctgtgaaaacaaaatgctgaagaatctgcatcaaataaacccttccttccttcctttttccttc

SEQ ID NO: 281070 - DNA, 4491 bp, Artificial Sequence
  derived and/or modified sequence
ccagtgcctggcattctcaccatctttctacctaccatgatcaagtgcttgtcagttgaagtacaagccaaattgcgttctggtttggccataagctccttgggccaatgtgttgaggaacttgccctcaacagtattgatgctgaagcaaaatgtgtggctgtcagggtgaatatggaaaccttccaagttcaagtgatagacaatggatttgggatggggagtgatgatgtagagaaagtgggaaatcgttatttcaccagtaaatgccactcggtacaggacttggagaatccaaggttttatggtttccgaggagaggccttggcaaatattgctgacatggccagtgctgtggaaatttcgtccaagaaaaacaggacaatgaaaacttttgtgaaactgtttcagagtggaaaagccctgaaagcttgtgaagctgatgtgactagagcaagcgctgggactactgtaacagtgtataacctattttaccagcttcctgtaaggaggaaatgcatggaccctagactggagtttgagaaggttaggcagagaatagaagctctctcactcatgcacccttccatttctttctctttgagaaatgatgtttctggttccatggttcttcagctccctaaaaccaaagacgtatgttcccgattttgtcaaatttatggattgggaaagtcccaaaagctaagagaaataagttttaaatataaagagtttgagcttagtggctatatcagctctgaagcacattacaacaagaatatgcagtttttgtttgtgaacaaaagactagttttaaggacaaagctacataaactcattgactttttattaaggaaagaaagtattatatgcaagccaaagaatggtcccaccagtaggcaaatgaattcaagtcttcggcaccggtctaccccagaactctatggcatatatgtaattaatgtgcagtgccaattctgtgagtatgatgtgtgcatggagccagccaaaactctgattgaatttcagaactgggacactctcttgttttgcattcaggaaggagtgaaaatgtttttaaagcaagaaaaattatttgtggaattatcaggtgaggatattaaggaatttagtgaagataatggttttagtttatttgatgctactcttcagaagcgtgtgacttccgatgagaggagcaatttccaggaagcatgtaataatattttagattcctatgagatgtttaatttgcagtcaaaagctgtgaaaagaaaaactactgcagaaaacgtaaacacacagagttctagggattcagaagctaccagaaaaaatacaaatgatgcatttttgtacatttatgaatcaggtggtccaggccatagcaaaatgacagagccatctttacaaaacaaagacagctcttgctcagaatcaaagatgttagaacaagagacaattgtagcatcagaagctggagaaaatgagaaacataaaaaatctttcctggaacatagctctttagaaaatccgtgtggaaccagtttagaaatgtttttaagcccttttcagacaccatgtcactttgaggagagtgggcaggatctagaaatatggaaagaaagtactactgttaatggcatggctgccaacatcttgaaaaataatagaattcagaatcaaccaaagagatttaaagatgctactgaagtgggatgccagcctctgccttttgcaacaacattatggggagtacatagtgctcagacagagaaagagaaaaaaaaagaatctagcaattgtggaagaagaaatgtttttagttatgggcgagttaaattatgttccactggctttataactcatgtagtacaaaatgaaaaaactaaatcaactgaaacagaacattcatttaaaaattatgttagacctggtcccacacgtgcccaagaaacatttggaaatagaacacgtcattcagttgaaactccagacatcaaagatttagccagcactttaagtaaagaatctggtcaattgcccaacaaaaaaaattgcagaacgaatataagttatgggctagagaatgaacctacagcaacttatacaatgttttctgcttttcaggaaggtagcaaaaaatcacaaacagattgcatattatctgatacatccccctctttcccctggtatagacacgtttccaatgatagtaggaaaacagataaattaattggtttctccaaaccaatcgtccgtaagaagctaagcttgagttcacagctaggatctttagagaagtttaagaggcaatatgggaaggttgaaaatcctctggatacagaagtagaggaaagtaatggagtcactaccaatctcagtcttcaagttgaacctgacattctgctgaaggacaagaaccgcttagagaactctgatgtttgtaaaatcactactatggagcatagtgattcagatagtagttgtcaaccagcaagccacatccttaactcagagaagtttccattctccaaggatgaagattgtttagaacaacagatgcctagtttgagagaaagtcctatgaccctgaaggagttatctctctttaatagaaaacctttggaccttgagaagtcatctgaatcactagcctctaaattatccagactgaagggttccgaaagagaaactcaaacaatggggatgatgagtcgttttaatgaacttccaaattcagattccagtaggaaagacagcaagttgtgcagtgtgttaacacaagatttttgtatgttatttaacaacaagcatgaaaaaacagagaatggtgtcatcccaacatcagattctgccacacaggataattcctttaataaaaatagtaaaacacattctaacagcaatacaacagagaactgtgtgatatcagaaactcctttggtattgccctataataattctaaagttaccggtaaagattcagatgttcttatcagagcctcagaacaacagataggaagtcttgactctcccagtggaatgttaatgaatccggtagaagatgccacaggtgaccaaaatggaatttgttttcagagtgaggaatctaaagcaagagcttgttctgaaactgaagagtcaaacacgtgttgttcagattggcagcggcatttcgatgtagccctgggaagaatggtttatgtcaacaaaatgactggactcagcacattcattgccccaactgaggacattcaggctgcttgtactaaagacctgacaactgtggctgtggatgttgtacttgagaatgggtctcagtacaggtgtcaaccttttagaagcgaccttgttcttcctttccttccgagagctcgagcagagaggactgtgatgagacaggataacagagatactgtggatgatactgttagtagcgaatcgcttcagtctttgttctcagaatgggacaatccagtatttgcccgttatccagaggttgctgttgatgtaagcagtggccaggctgagagcttagcagttaaaattcacaacatcttgtatccctatcgtttcaccaaaggaatgattcattcaatgcaggttctccagcaagtagataacaagtttattgcctgtttgatgagcactaagactgaagagaatggcgaggcaggtgggaacctgctcgtgctggtggatcagcacgctgcccatgagcgtatacgtctggagcagcttatcattgattcctacgagaagcaacaggcacaaggctctggtcggaaaaaattactgtcttctactctaattcctccgctagagataacagtgacagaggaacaaaggagactcttatggtgttaccacaaaaatctggaagatctgggccttgaatttgtatttccagacactagtgattctctggtccttgtgggaaaagtaccactatgttttgtggaaagagaagccaatgaacttcggagaggaagatctactgtgaccaagagtattgtggaggaatttatccgagaacaactggagctactccagaccaccggaggcatccaagggacattgccactgactgtccagaaggtgttggcatcccaagcctgccatggggccattaagtttaatgatggcctgagcttacaggaaagttgccgccttattgaagctctgtcctcatgccagctgccattccagtgtgctcacgggagaccttctatgctgccgttagctgacatagaccacttggaacaggaaaaacagattaaacccaacctcactaaacttcgcaaaatggcccaggcctggcgtctctttggaaaagcagagtgtgatacaaggcagagcctgcagcaatccatgcctccctgtgagccaccatgagaacagaatcactggtctaaaaggaacaaagggatgttcactgtatgcctctgagcagagagcagcagcagcaggtaccagcacggccctgac

SEQ ID NO: 281071 - DNA, 4362 bp, Artificial Sequence
  derived and/or modified sequence
atgatcaagtgcttatccgtcgaggtccaggcgaaactgcgatccggactggccattagcagcttgggacagtgcgttgaagagctcgccttgaactctattgacgcagaagctaaatgcgtggccgtgcgagtgaatatggagacgtttcaagttcaggttattgataacgggttcggcatgggctcagacgacgtggaaaaagtgggaaacaggtattttaccagtaagtgccattcagtacaagatctcgagaacccacgcttttacggctttcgtggtgaagccctggccaacatcgctgacatggcttccgctgttgagatctcctcaaaaaagaatcgcactatgaagacgttcgtgaagctgttccaatctgggaaggctctaaaagcatgtgaagcagacgtgactcgcgcttcagcgggaacgaccgtcaccgtgtataatttgttttatcagctacccgttcggagaaagtgcatggatccaagactggaatttgagaaagtacgccaacggatagaagctctttccttgatgcatcctagtataagcttctcactgcggaacgacgtttcaggaagtatggtccttcagctccccaagacgaaagatgtatgttcccggttttgtcaaatctacggcctgggaaaatctcaaaagttacgcgaaatatcgttcaaatacaaggaatttgagctgagtggttacatcagtagcgaagctcactataacaagaacatgcagtttctatttgttaataagaggctagtccttaggaccaaacttcacaaacttatagatttcctgttgcggaaagagtcgattatttgcaaacccaagaacggacccacctctcggcaaatgaatagcagcctgcggcaccggtccacacccgagctgtacggcatctatgtcatcaacgttcaatgccagttttgcgaatacgatgtgtgcatggagcccgctaagacattaattgagtttcaaaactgggacacacttctgttttgtattcaagagggcgtgaagatgttcctgaagcaagaaaagctctttgtggaactgtccggggaagacatcaaggagttctctgaggacaacggctttagcctcttcgatgccactctccaaaagcgagtcacatccgatgaaagaagcaattttcaggaggcctgcaacaatatcttggattcttacgagatgttcaacctgcaaagcaaggccgtgaagagaaagacaaccgctgagaacgtgaacacgcaatctagccgcgacagcgaagccacccgtaaaaacaccaatgacgccttcctctacatttacgagtccggcggaccgggtcacagcaaaatgaccgaaccttcattacagaataaggattcgtcctgctccgaaagcaagatgctggaacaggagaccatcgtcgcatccgaagcgggtgagaacgaaaagcacaaaaagtctttcttggaacactcctcccttgaaaatccttgcgggacttccttggagatgtttctctctcctttccaaacaccttgtcatttcgaagaaagtggacaggatttagagatctggaaagagagtaccacagtcaacggaatggcagccaacattctgaaaaataacaggatacaaaaccagccaaagagattcaaagacgcgacagaggtggggtgtcagccattaccatttgcaaccaccctctggggagttcactcagcccaaaccgaaaaagaaaagaaaaaggaatcaagcaactgtgggaggcgcaatgttttctcctacggccgagtgaaactgtgttcaaccgggtttatcacacacgtggtgcagaatgagaagaccaaatccaccgaaacagagcatagttttaaaaattacgtacgaccagggccaacccgagcgcaagaaacctttggaaataggacgcgccacagcgtcgagactccggacattaaagatctagcatccaccctgtctaaagagtcaggccaactacctaataaaaaaaattgccggacaaatatctcatacgggctggaaaacgaacctacagctacctacactatgttttccgcctttcaggagggaagcaagaagtctcaaacagattgtatcctgtccgacacaagcccgtctttcccatggtatcggcatgtgagtaatgatagcaggaaaactgataagctgatcggtttcagcaaaccaattgttaggaagaagctgagcctcagcagtcagttagggagcttggaaaaattcaagagacagtacgggaaggtggagaatccactcgacacggaggtcgaagaatcaaatggcgttaccaccaacctaagcctccaggtggagcctgacatcctgttaaaagataagaatcgcttagagaactccgatgtctgtaagataactacaatggaacattccgactccgattccagttgtcaaccggcttctcacatccttaattcagaaaagttcccgtttagcaaggatgaagattgcctcgaacagcagatgccaagtctgcgcgagagccctatgacactcaaagaactgagcctttttaacaggaagccactcgatctggagaagagctctgagtcacttgcgtctaagcttagccgcctcaaggggtcagaaagagaaacacaaacgatggggatgatgtctagattcaatgagttaccaaattcagatagtagtcggaaggattctaaactgtgtagcgtgttaacacaagatttctgtatgctcttcaataataagcacgagaaaaccgagaacggcgtgatcccgacatctgatagcgccacacaggacaactctttcaataaaaatagtaaaacgcactccaactctaatactacggaaaattgcgtgatttcggagacgccactggtgctgccttacaacaatagcaaagtcacgggcaaggactccgacgttctgattagagctagtgaacagcaaattggtagcttggacagcccgtccggaatgttgatgaatcccgtggaggacgcaacaggcgaccagaatggaatatgcttccagtcagaagaatccaaggcgagagcatgcagcgaaactgaggagtccaatacctgttgcagcgattggcagcgccacttcgacgtggcattaggcagaatggtgtacgtaaacaagatgaccgggctgtccacattcatagctcctactgaagacatccaagccgcttgtacgaaggatctgactactgttgcagtggacgtagttctggagaacggctcccagtataggtgccagccctttaggtcagatcttgtcctgccttttttgccacgcgcacgagctgagcgtactgtgatgcggcaagacaacagggacacagtggacgacacggtcagcagcgaatcgctgcagagcctattcagcgagtgggacaacccagtgttcgcaaggtaccccgaggtggcagtggatgtctcgtcaggtcaagcagaaagcctggccgttaagatccataacattctttacccgtataggttcaccaaaggcatgattcacagcatgcaagttctccagcaggtggacaacaagttcatcgcctgtctcatgagcaccaaaaccgaagagaatggggaggccggaggtaatctgctggttctggtggatcagcacgcagcccatgagcgcatacggttggaacagttgatcattgattcctatgaaaagcagcaagcacaaggttccggaaggaagaagctgctcagctcaacactaatacccccactagaaattactgttaccgaggaacagaggagactgctctggtgttatcacaagaacctggaggatctcggcttggagtttgttttcccggacacatccgattctctggttttagtaggaaaagttccactctgcttcgtggagagggaagccaatgagcttagacgtggcaggtctactgtgactaagtctatcgtggaagagttcatccgtgaacagctggagctgttacaaactactgggggaatccagggaactctgccactcactgttcagaaggttctcgcgagtcaagcttgtcacggcgcaattaaatttaacgatggactctccttgcaggaatcatgccggcttatcgaggctctgtcgtcctgtcagctgccgtttcagtgcgcacacgggcgacccagcatgcttcctctggcagacattgatcacctcgagcaggagaaacagattaagcccaacctgaccaagctgaggaagatggcccaggcttggagactgttcggtaaggcagagtgcgatacccgccagagcctgcagcagagcatgccgccttgtgaaccgccttag

SEQ ID NO: 281072 - DNA, 1176 bp, Artificial Sequence
  derived and/or modified sequence
atggtgtacgttaacaaaatgaccgggctgagtacatttatcgcacctacagaggacatccaggccgcttgcaccaaagatttgacaactgtggccgtggatgtggtcctggagaatgggagtcagtatcggtgtcaaccttttcgtagcgacctcgtgctccctttcttgcctagggccagggctgaacgtactgtgatgcgccaggataaccgagatactgtagatgacaccgtgtcctcggagagccttcagagtctattctccgaatgggataatcctgtgttcgctaggtaccccgaggtcgcagtcgacgtgagctcaggccaggcagaaagcctagcggttaaaatacacaatattctatacccgtataggttcaccaagggcatgatacactccatgcaggtattgcagcaggtggacaataagtttattgcgtgtcttatgtcaacaaaaaccgaggaaaatggggaggcgggaggcaatctcctggtcctcgtcgatcagcacgcagcccatgagagaatacggctggagcagcttattatcgactcgtatgagaaacagcaggcacaaggaagcggaagaaagaagctgctgagctccacgttgatccctcctctcgagatcactgtaacagaagaacagcgcaggctgctctggtgctatcacaaaaacctggaggacctgggccttgagtttgtatttccggacacaagcgatagcctggtgctcgttggtaaagtccccttatgctttgttgaacgcgaggccaatgaactgcggaggggtagatcgaccgtcactaaaagcattgtcgagttgctacagactactggaggtatccaaggaaccttgcccctgacggtgcagaaagtgttggcttcccaggcttgtcacggcgctatcaaattcaatgatgggctgagcctgcaggagtcatgcaggctaatagaggccctttcctcttgccaattgcccttccaatgtgcccacggcagaccctctatgctcccactggcggacatagaccatctagagcaagagaagcagattaaacctaaccttaccaaattacgcaaaatggcccaggcttggagactattcggtaaagccgaatgcgatacaaggcagagtctgcaacaatccatgcctccctgcgagcctccttag

SEQ ID NO: 281073 - DNA, 4362 bp, Artificial Sequence
  derived and/or modified sequence
atgatcaaatgtctctcagtggaggtccaggccaagctgagatccggtttggccatttcttcccttgggcagtgcgtcgaggaactcgcattgaactcaatcgacgcagaggctaagtgtgtggccgtacgggtcaacatggagacatttcaggttcaggtcatcgataacggcttcgggatgggatccgacgacgtcgagaaggtaggcaaccggtattttacatcaaaatgtcattccgtccaggacctggagaatcccaggttttatggttttcgaggagaagcactggcaaatatcgccgatatggcatcagccgtcgagatatcttctaagaaaaaccgtacaatgaaaacgttcgtcaaattatttcagtcaggtaaggccttgaaggcctgcgaggccgatgtcacaagagcctcagccggtacaactgtgaccgtgtacaacctgttttaccaactgccagtgaggagaaaatgcatggatccaaggctggagttcgaaaaggtgcgacaacggatagaggccttatctctgatgcacccgtctatatctttttcgttaaggaatgatgtttctggctcgatggtgctccagctccccaagaccaaggatgtgtgctcccgtttctgtcaaatctacggtttgggtaaatcacagaagctgcgcgaaatcagcttcaagtataaggaattcgagttgtcagggtacatttcatccgaggctcattacaacaaaaatatgcagtttctatttgtgaacaaacgcctcgttttacgaaccaagcttcataagttaattgacttcctcctgagaaaggagtccataatctgtaagcccaagaacggtccaacttcaaggcagatgaacagttccctccgtcatcgcagtacccccgagctctatggaatatatgtaatcaacgtgcagtgccagttttgtgagtacgacgtgtgtatggaacccgcaaaaaccctcatcgagttccagaactgggacacactcctgttttgcattcaggaaggagtaaagatgttccttaaacaggaaaagctgtttgtggagctgtctggagaagacattaaagaattttcagaagacaatggttttagtctgtttgacgccacactccaaaagcgcgtgacaagtgatgaacgctctaatttccaggaagcctgcaataacattcttgactcttatgagatgttcaacctccagtccaaggctgttaagagaaagacgacagccgagaatgttaatacgcaatcgtcacgtgattccgaagctaccagaaagaacaccaacgacgcatttctctacatatatgaaagcggcggaccaggtcactccaaaatgactgagccaagtctgcagaataaagactctagctgttccgagagcaaaatgctggagcaagagactatcgtggcatctgaagctggggaaaacgagaaacacaagaaatcgtttcttgaacatagctcactcgagaacccttgcggcacaagtttagagatgtttctgtccccattccagaccccctgccacttcgaggaatcagggcaggatttggagatttggaaagagtcgacaactgtgaatggtatggccgctaatatcctgaaaaataaccgcatacagaaccagcccaagcgctttaaggacgccacagaagtgggctgccagccattaccatttgccacaacgctatggggggttcattctgcacagaccgagaaggaaaagaagaaggagagtagcaactgcgggagaaggaacgtttttagctacggcagggtaaagctgtgtagcactggtttcattacgcatgtggtgcagaatgaaaagacaaagtcaacagaaacagagcatagcttcaagaactatgttagaccaggacccacaagagcccaggaaacatttgggaatagaacacgtcactctgtcgagactcccgacataaaggatttggcctccaccctaagtaaagaaagtggccagctcccaaacaagaagaactgtcgcacgaatatctcctacggtctggagaacgagcccacagcgacatacaccatgttctcagctttccaagagggtagcaagaaatcgcagactgactgcattctgtccgatacaagtcctagttttccctggtaccgccacgtgagtaacgactctcgaaagaccgacaaattaattgggttcagtaagcccattgttaggaaaaagttgtcactgtcatcacaattaggaagtctggagaaatttaagaggcaatacggaaaggtggagaacccacttgacacggaggtggaggaatccaacggtgtcactacaaacctgagcctccaagtcgagcctgacatactgctcaaagacaaaaatcgcctggaaaactctgatgtatgtaaaataacaacaatggagcactcagactctgatagttcctgccagcctgcatcacacattctgaacagtgaaaagttcccattctcgaaggatgaggactgcctggaacagcagatgcctagcctgagagagagccccatgaccctgaaagaactgagcctgtttaacagaaagccactggatctggaaaaaagttccgagtcactggccagcaaattgtctaggcttaagggaagtgagcgcgagacacagacaatggggatgatgagcagatttaatgagttgcccaattccgactcctcacggaaggattcaaaattgtgctccgtcctgacccaggacttctgtatgctgttcaataataaacacgagaaaaccgagaatggggtgatcccaacttccgatagcgccactcaagacaattcctttaacaagaatagcaaaacccactccaactccaatacaaccgagaactgtgtaataagtgaaacacctctcgtcctgccctataacaacagtaaagtaacaggcaaggattctgacgttctgattagagcctccgagcagcagatcggatccttggattcgccaagtgggatgctcatgaaccctgtggaggacgccacgggagaccagaacgggatctgctttcaaagcgaggagagtaaggcgagagcttgcagcgagaccgaggaaagtaacacgtgttgctccgactggcagagacactttgatgtagccctgggcagaatggtctacgtaaacaaaatgaccgggctgtcaaccttcatcgccccaaccgaggatatccaagccgcatgcacgaaggacctgaccactgtggcggtcgatgtggtcctcgagaatggatcacagtatcgttgccagcctttccgtagtgatctcgtactgccattcctgcctcgtgctcgcgctgagcggacagttatgagacaggataatcgggacaccgtagacgacaccgtgtcctctgagtcattacagagcctgttttccgagtgggacaaccccgtctttgctaggtatcccgaggtggcggttgacgtttcttccggccaggcagaatcactggcggtcaaaatccacaacatcctttacccctaccgcttcaccaagggcatgatccattccatgcaggtcttacagcaggtggataataaattcattgcctgcctgatgtccactaagaccgaggagaatggagaggccggaggaaatcttctcgtattagtagaccagcacgctgcccacgaacgcattcgtctggagcagcttatcattgattcctatgagaaacagcaggcccagggttccggaaggaagaagttactttcttcgactcttatcccccctcttgagattactgtcacagaggaacagcgacggctgttgtggtgttatcataaaaaccttgaggacctgggcctcgaatttgtgttcccagacacatccgacagcctggtgctggtggggaaagtgccattatgcttcgttgaacgcgaggcgaacgagctgcgcagaggacgctcaacagtgacaaagtcaatcgtggaggagttcatacgcgagcagctggagctattgcagacaactggaggcattcaaggtacgttaccgctgaccgtccagaaagtcctggcttcgcaggcctgccatggcgcaatcaagtttaatgatggcctatccctgcaggagtcctgtcggctcattgaggctctgtccagctgtcagctgccattccagtgcgcacatggaagaccatccatgttgcctctggcagacatcgaccacctcgaacaggaaaaacagatcaaaccaaacttaactaagttgcgcaagatggcacaggcttggaggcttttcggcaaggcagagtgcgacaccaggcagtcccttcaacaatctatgcccccttgtgagcctccttag

SEQ ID NO: 281074 - protein, 198 aa, Artificial Sequence
  derived and/or modified sequence
MNPVEDATGDQNGICFQSEESKARACSETEESNTCCSDWQRHFDVALGRMVYVNKMTGLSTFIAPTEDIQAACTKDLTTVAVDVVLENGSQYRCQPFRSDLVLPFLPRARAERTVMRQDNRDTVDDTVSSESLQSLFSEWDNPVFARYPEVLQQVDNKFIACLMSTKTEENGEAAELMMLQDPCCRQSREDENHEFSL

SEQ ID NO: 281075 - DNA, 597 bp, Artificial Sequence
  derived and/or modified sequence
atgaaccccgtggaggacgccaccggcgaccagaacggcatctgcttccagagcgaggagagcaaggccagagcctgcagcgagaccgaggagagcaacacctgctgcagcgactggcagagacacttcgacgtggccctgggcagaatggtgtacgtgaacaagatgaccggcctgagcaccttcatcgcccccaccgaggacatccaggccgcctgcaccaaggacctgaccaccgtggccgtggacgtggtgctggagaacggcagccagtacagatgccagcccttcagaagcgacctggtgctgcccttcctgcccagagccagagccgagagaaccgtgatgagacaggacaacagagacaccgtggacgacaccgtgagcagcgagagcctgcagagcctgttcagcgagtgggacaaccccgtgttcgccagataccccgaggtgctgcagcaggtggacaacaagttcatcgcctgcctgatgagcaccaagaccgaggagaacggcgaggccgccgagctgatgatgctgcaggacccctgctgcagacagagcagagaggacgagaaccacgagttcagcctgtag

SEQ ID NO: 281076 - DNA, 597 bp, Artificial Sequence
  derived and/or modified sequence
atgaaccctgtggaagatgcaactggcgatcagaatgggatttgtttccagagcgaggagtctaaggcccgcgcatgtagtgagaccgaggagagcaacacttgctgttctgactggcaaagacactttgacgtagctctcggacggatggtctacgtgaacaagatgactggcctcagcaccttcatcgcacccaccgaagacatccaggccgcatgcaccaaggatctgacgacagttgcggtggatgtagtcctggagaatggttcacaataccgatgtcagccctttcgaagcgatctagtgctgccatttttgcctagggctcgggccgagcgcacagtcatgcgccaggacaatagggacacggttgatgataccgtctcttccgagtcactacagagtctattctcagagtgggacaaccctgttttcgcccggtatccagaggtgcttcagcaggttgacaataagtttattgcctgtctgatgtcaaccaaaaccgaggaaaacggagaggcagccgaactcatgatgttgcaggatccatgctgccggcagagcagagaagacgagaaccacgagttctcactgtag

SEQ ID NO: 281077 - DNA, 597 bp, Artificial Sequence
  derived and/or modified sequence
atgaaccctgtggaggatgccaccggggaccagaatggcatctgcttccagagcgaggagagcaaggcccgggcctgcagcgagacagaggagagcaacacctgctgcagcgactggcagaggcactttgatgtggccctgggccgcatggtgtatgtgaacaagatgacaggcctgagcaccttcatcgcccccacagaggacatccaggccgcctgcaccaaggacctgaccaccgtggccgtggatgtggtgctggagaatggcagccagtaccgctgccagcccttcagaagtgacctggtgctgcccttcctgccccgggcccgggcagagaggacagtgatgaggcaggacaacagagacacagtggatgacacagtgagcagcgagagcctgcagagcctcttcagcgagtgggacaaccctgtgtttgcccgctacccagaggtgctgcagcaggtggacaacaagttcatcgcctgcctgatgagcaccaagacagaggagaatggagaggccgctgagctgatgatgctgcaggacccctgctgccggcagagccgggaggatgagaaccacgagttcagcctgtag

SEQ ID NO: 281078 - DNA, 597 bp, Artificial Sequence
  derived and/or modified sequence
atgaaccccgtggaggacgccaccggcgaccagaacggcatctgcttccagtccgaagaaagcaaagctagagcgtgttctgagactgaggagagcaatacatgctgctccgattggcagcgacattttgatgttgccttaggaagaatggtttatgtaaacaaaatgacaggtttgtctaccttcatcgcgccgaccgaggacatccaagcggcttgcactaaagatttgaccactgtcgcggtggatgtggtcctggagaacggctctcagtaccgctgtcaaccctttagatcggaccttgtccttccattcttacccagagcccgggccgaacgaaccgtgatgcgtcaagataatcgcgacacggtcgacgatactgtcagctcagagtcactacaatctttgttttctgaatgggataaccccgtatttgccagataccctgaagtgttgcagcaggtggacaacaagttcatcgcctgcttgatgtcgactaaaaccgaggagaacggcgaggccgctgagttgatgatgctccaagatccttgctgtaggcaatcccgcgaggacgaaaatcacgagtttagcctttag

SEQ ID NO: 281079 - DNA, 1119 bp, Artificial Sequence
  derived and/or modified sequence
atgaatccggtagaagatgccacaggtgaccaaaatggaatttgttttcagagtgaggaatctaaagcaagagcttgttctgaaactgaagagtcaaacacgtgttgttcagattggcagcggcatttcgatgtagccctgggaagaatggtttatgtcaacaaaatgactggactcagcacattcattgccccaactgaggacattcaggctgcttgtactaaagacctgacaactgtggctgtggatgttgtacttgagaatgggtctcagtacaggtgtcaaccttttagaagcgaccttgttcttcctttccttccgagagctcgagcagagaggactgtgatgagacaggataacagagatactgtggatgatactgttagtagcgaatcgcttcagtctttgttctcagaatgggacaatccagtatttgcccgttatccagaggttctccagcaagtagataacaagtttattgcctgtttgatgagcactaagactgaagagaatggcgaggcagctgagttgatgatgttgcaggacccgtgttgcaggcagagcagagaggatgaaaatcatgagttcagtctttgaaatgctccagaagagatgtcaaggtggccaggcacggtggctcacgcctgtaatcccagcactttgggaggccgaggtgggaacctgctcgtgctggtggatcagcacgctgcccatgagcgtatacgtctggagcagcttatcattgattcctacgagaagcaacaggcacaaggctctggtcggaaaaaattactgtcttctactctaattcctccgctagagataacagtgacagaggaacaaaggagactcttatggtgttaccacaaaaatctggaagatctgggccttgaatttgtatttccagacactagtgattctctggtccttgtgggaaaagtaccactatgttttgtggaaagagaagccaatgaacttcggagaggaagatctactgtgaccaagagtattgtggaggaatttatccgagaacaactggagctactccagaccaccggaggcatccaagggacattgccactgactgtccagaaggtgttggcatcccaagcctgccat

SEQ ID NO: 281080 - DNA, 597 bp, Artificial Sequence
  derived and/or modified sequence
atgaaccctgtggaggacgctaccggggatcagaacggaatttgttttcagtcagaggagtccaaggcgagagcttgcagtgagactgaggaaagcaacacgtgttgcagcgactggcaacgacattttgatgtggcgttagggaggatggtctacgtaaataaaatgactggactctccacctttattgcccctactgaggacatacaggcagcatgtaccaaggatctgaccacggtcgcagtggacgttgtcctggaaaacggatctcagtaccgatgtcagccattccggagtgatcttgttttaccctttctgcctagagccagggctgagaggaccgtgatgcggcaggataacagagatacggtggacgacaccgtatcctctgagtccctccagtcactcttttctgagtgggataacccagtgtttgcaaggtacccagaagtgcttcagcaggttgataacaaattcatcgcttgcctgatgtcaaccaaaactgaggagaatggggaagccgctgaattgatgatgctccaagatccgtgttgccgccagagtagggaggatgagaatcatgagttctccctgtag

SEQ ID NO: 281081 - protein, 219 aa, Artificial Sequence
  derived and/or modified sequence
MEYLSALNPSDLLRSVSNISSEFGRRVWTSAPPPQRPFRVCDHKRTIRKGLTAATRQELLAKALETLLLNGVLTLVLEEDGTAVDSEDFFQLLEDDTCLMVLQSGQSWSPTRSGVLSYGLGRERPKHSKDIARFTFDVYKQNPRDLFGSLNVKATFYGLYSMSCDFQGLGPKKVLRELLRWTSTLLQGLGHMLLGISSTLRHAVEGAEQWQQKGRLHSY

SEQ ID NO: 281082 - DNA, 660 bp, Artificial Sequence
  derived and/or modified sequence
atggagtacctgagcgccctgaaccccagcgacctgctgagaagcgtgagcaacatcagcagcgagttcggcagaagagtgtggaccagcgccccccccccccagagacccttcagagtgtgcgaccacaagagaaccatcagaaagggcctgaccgccgccaccagacaggagctgctggccaaggccctggagaccctgctgctgaacggcgtgctgaccctggtgctggaggaggacggcaccgccgtggacagcgaggacttcttccagctgctggaggacgacacctgcctgatggtgctgcagagcggccagagctggagccccaccagaagcggcgtgctgagctacggcctgggcagagagagacccaagcacagcaaggacatcgccagattcaccttcgacgtgtacaagcagaaccccagagacctgttcggcagcctgaacgtgaaggccaccttctacggcctgtacagcatgagctgcgacttccagggcctgggccccaagaaggtgctgagagagctgctgagatggaccagcaccctgctgcagggcctgggccacatgctgctgggcatcagcagcaccctgagacacgccgtggagggcgccgagcagtggcagcagaagggcagactgcacagctactag

SEQ ID NO: 281083 - DNA, 660 bp, Artificial Sequence
  derived and/or modified sequence
atggagtatctctccgcccttaatcccagtgacctgttaagaagtgtgagcaacatcagttccgagttcggcaggagggtgtggacttctgccccccccccccagcggccctttcgagtctgtgaccacaagcggaccattcgcaaaggactcacagctgccacacggcaggaattgctggcaaaagctttggagactctgctgctcaacggagtgctgacgctggtgttagaggaggatggaacagcggtggactctgaggattttttccagctcctcgaggacgacacgtgcctgatggttctccagagcggtcagagttggtctcccacacgctccggtgttctcagctacggacttggacgcgagaggccaaaacatagtaaagacatcgccagatttacattcgatgtgtacaagcagaacccccgtgacctgttcggctcactgaatgttaaagcgactttttacggactctacagcatgagttgcgatttccagggccttggtcctaagaaggttctccgcgagctcctgcgttggaccagcactctactgcagggcctaggccacatgctgctcggcatctcaagcaccctgaggcatgctgtggaaggcgcggaacaatggcagcaaaagggacgcctgcattcgtattag

SEQ ID NO: 281084 - DNA, 660 bp, Artificial Sequence
  derived and/or modified sequence
atggaatacctttctgcgctaaatccttctgatcttctccggtcagtttccaacatttctagcgagttcgggaggcgcgtgtggaccagtgcgcccccgccacaaaggcccttccgtgtgtgtgatcacaaaaggactattcgaaaaggcctcaccgcagctacacgccaggaattactagctaaagccttggagacattgctcctcaatggggttctcactctcgtgctcgaagaggatgggactgccgtcgatagtgaggacttttttcaactgcttgaggacgatacttgcttgatggtacttcagtccggtcagagctggagtccaaccaggtccggagttttgtcctacggcctggggcgcgagcggcccaagcactcgaaggatatcgcaaggtttaccttcgatgtttataaacaaaatccccgggatctctttgggagcctaaatgttaaggctactttctatggactttacagcatgagctgcgactttcaagggctgggccccaagaaggtattgagggaattactccggtggacttcaacgttgttgcaggggctgggccatatgctgttaggaatttcgtccaccctgagacatgcagtggagggtgctgagcagtggcagcagaagggtcggcttcatagttactag

SEQ ID NO: 281085 - DNA, 660 bp, Artificial Sequence
  derived and/or modified sequence
atggaatacctgagcgctctgaatccgtccgatttgctccggtctgtctctaatatctcttcagagttcggccgacgtgtctggacttctgctcccccaccacagaggccttttagagtctgcgatcacaagcggaccatccgaaaagggctaacagcagccacaaggcaggagctgctggctaaggctctagagacacttctgctgaatggagttctcaccttggtgcttgaggaagatggaacagcagtcgacagcgaagacttctttcagttgctagaggatgacacctgtctcatggttctgcagtccgggcagtcctggagccccacaagatccggagttctgtcatacggactgggccgtgaacggcccaaacattctaaggacatcgccaggttcacatttgacgtgtacaagcagaatcccagggatctctttggatctctaaacgtcaaggccacgttttacggactgtactcgatgagttgtgacttccaaggtctcggcccgaagaaggtattgcgcgagctcctgaggtggacatccactcttttgcagggacttggacatatgctactggggataagctctacgctcagacatgccgtggaaggagcggagcagtggcagcaaaaaggccgacttcacagttattag

SEQ ID NO: 281086 - DNA, 660 bp, Artificial Sequence
  derived and/or modified sequence
atggagtatctgtctgcactgaacccctctgatctgctgaggtcggtctccaacattagctcagaatttggcaggcgggtctggacgtccgctcccccgccccaaagaccatttagagtgtgtgaccataagagaacaattcggaaaggcctaaccgcggcaacccgccaggagctgctcgctaaagccctggaaacactactcttaaatggcgtgttaaccctggtgttagaggaggacggaaccgcagttgacagcgaggacttcttccaactactggaagatgatacctgcctgatggtcctgcagtcaggccagtcatggtctcccactaggagcggcgtcctgagctatggtttgggtcgagagcgtccaaagcattctaaggacatcgccagatttacttttgacgtctacaaacagaatcctagggacctgtttggttccctaaatgtgaaagctaccttttacggcctgtacagcatgagttgcgacttccaggggctggggcctaaaaaagtattgcgggagttgttgaggtggacctctaccctgttacagggcctcggtcacatgttgcttggcatttcctccactctccggcacgccgttgaaggagcagagcagtggcagcagaagggcagactacacagttactag

SEQ ID NO: 281087 - DNA, 660 bp, Artificial Sequence
  derived and/or modified sequence
atggagtacctgagcgccctgaaccccagcgacctgctgcggtctgtgagcaacatcagcagcgagtttggaagaagagtgtggaccagcgcccccccaccccagaggcccttccgggtgtgtgaccacaagaggaccatcaggaagggcctgacagctgccacccggcaggagctgctggccaaggccctggagaccctgctgctgaatggagtgctgaccctggtgctggaggaggatggaacagctgtggacagcgaggacttcttccagctgctggaggatgacacctgcctgatggtgctgcagagcggccagagctggagccccaccaggtctggagtgctgtcctatggcctgggccgggagcggcccaagcacagcaaggacatcgcccgcttcacctttgatgtgtacaagcagaacccccgggacctgtttggcagcctgaatgtgaaggccaccttctacggcctgtacagcatgagctgtgacttccagggcctgggccccaagaaggtgctgcgggagctgctgcgctggaccagcaccctgctgcagggcctgggccacatgctgctgggcatcagcagcaccctgcggcatgctgtggagggcgctgagcagtggcagcagaagggccgcctgcacagctactag

SEQ ID NO: 281088 - DNA, 660 bp, Artificial Sequence
  derived and/or modified sequence
atggagtacctgagcgccctgaaccccagcgacctgctgcggagcgtgagtaacatcagctcagaatttggcagacgggtatggacatcagcgcctccaccccagagaccatttcgagtgtgcgaccacaagcggacaattaggaaaggactcaccgcagctaccagacaagagctgctggccaaggcccttgagactctcctgctgaatggcgttttgacactggtccttgaagaagacgggacagcagtcgattctgaagacttctttcagctgttggaggacgacacgtgcttaatggtgctccagtcagggcagtcatggtctcctacaagaagtggggtgctgtcatatgggctgggaagggagaggcccaaacatagtaaagacatcgccaggttcacattcgacgtgtacaagcagaacccaagggatctcttcgggagtttgaacgtaaaggctaccttctatggcctgtacagtatgagttgcgatttccagggtctgggacccaagaaagtcctgcgtgagcttcttagatggacaagtacactgttgcaaggcttaggtcatatgctgctgggcattagcagtacattacgacatgccgtcgaaggagccgaacagtggcagcagaaggggcggctgcattcttattag

SEQ ID NO: 281089 - DNA, 660 bp, Artificial Sequence
  derived and/or modified sequence
atggagtacctgagcgccctgaaccccagcgacctgctgcggagcgtctccaacatctcatctgagtttggtcggcgtgtctggaccagcgcccctcctccgcagaggccattccgcgtttgcgatcataaacgcacaattcggaaaggtttaacagcggccactcgccaggaactgcttgctaaggctcttgagactctgttgttgaatggcgtgctgaccctagtgcttgaggaggacggtactgcagtcgacagtgaagacttttttcaactgctcgaagacgatacgtgcctcatggtgctgcagtctggtcagagctggagccccacccggtctggggtgttgtcctacggcctggggagagaacgccccaagcactccaaggacatcgcgcgctttactttcgatgtttacaagcaaaatcccagggacctttttggcagcctgaatgtcaaagctaccttctatggcttgtacagtatgagctgcgacttccagggacttggaccgaagaaagtcctgcgggagcttctgagatggacgtcaacattgctacagggccttggacacatgcttctcgggatttccagcactttaagacacgctgtagaaggggctgagcagtggcagcaaaaaggcaggttgcattcttattag

SEQ ID NO: 281090 - DNA, 660 bp, Artificial Sequence
  derived and/or modified sequence
atggagtacctgagcgccctgaaccccagcgacctgctgcggagcgtcagcaatattagtagtgaatttggcagaagggtatggacatcagcacctccgcctcagaggcccttccgcgtatgcgaccataagcgtacaattcgaaagggcctgactgctgctacccggcaggagttactagccaaggcactcgaaactctcctgttaaacggtgtccttacactggtgttagaagaagatggtacagcggtagacagcgaggatttcttccaactccttgaagacgacacatgtctcatggtgctgcagagcggtcagagctggtcaccaacacggtctggggtgctgtcctatggccttggccgggagagacctaaacacagcaaagacatcgctagattcacatttgacgtctacaaacaaaaccctcgcgatctctttggcagcctgaacgttaaagcaactttttacgggctatactcaatgagctgtgatttccagggactgggcccaaagaaggtcttacgggagctcttacgctggaccagcacattgctccagggtctgggacacatgctgctcggtatcagctctacactcaggcacgctgtggaaggcgcagaacagtggcagcagaaaggccggctgcactcttattag

SEQ ID NO: 281091 - DNA, 660 bp, Artificial Sequence
  derived and/or modified sequence
atggagtacctgagcgccctgaaccccagcgacctgctgcggagcgtgtctaacatctcctcagaatttgggcgtcgcgtctggaccagcgcccccccccctcagagaccatttcgagtgtgtgaccataaacgcacaatcaggaagggcctgactgccgctaccagacaagagctgctggctaaggccctcgaaacacttcttctgaacggcgtgctgacattggtgctggaggaggacggcactgctgtggacagcgaggatttcttccaacttctggaggacgatacttgtttaatggttctgcagagcggacagtcctggtctcctactcggtctggagtgctgtcctacgggttaggtcgggagagaccaaaacattctaaagacatcgcgagattcacattcgatgtgtataaacagaatcctcgggatttgtttggatcactgaatgtcaaggcaactttctatggtctgtattctatgtcttgcgatttccagggtctggggcccaaaaaggtgctaagggagctcctccgttggacctcaacccttttgcagggactggggcacatgctgctcggcatatcctcgactcttcgacatgctgtggaaggtgctgagcagtggcagcaaaaggggcgcctgcattcttattag

SEQ ID NO: 281092 - DNA, 660 bp, Artificial Sequence
  derived and/or modified sequence
atggaatatttatcagcgcttaacccatcagacttattaaggtccgtgtcaaacatctcctctgagttcggaagaagagtgtggacatctgccccacctcctcaacggccatttcgcgtatgtgatcataagcgtacaatccgcaagggtctgacggctgccacccgacaggagttgctggcaaaagctctggaaaccttacttctgaacggcgtcctaacattggtactggaagaagatggaacagccgtggactcggaggatttcttccaactgctcgaggatgatacctgtttgatggtgctgcagtccggccagtcttggtctccaactcgatcaggggttctaagctatggcttaggtagggagcggcctaaacactccaaagatatcgccagatttacttttgacgtctacaagcaaaacccaagggatttgtttgggagccttaatgtcaaagcaactttttacggtctttatagcatgagttgtgacttccagggtctgggacctaaaaaggtgctgagggagctcctcagatggacatccaccttacttcaggggcttggccatatgcttctgggcattagctctacgctccgccacgctgtggagggggctgagcagtggcagcagaaaggtcgcctgcatagttactag

SEQ ID NO: 281093 - DNA, 660 bp, Artificial Sequence
  derived and/or modified sequence
atggaatacctcagtgcacttaatccttccgatctgcttagatcagtgagtaatatctcttccgaattcgggcgacgggtctggacatctgctcccccaccacagcggccttttagagtgtgtgatcacaagcgtaccataagaaaaggccttacagctgctacacgccaggagctgctcgccaaagccttggagactctgctcctgaacggtgtcctcacattggtcctggaagaggatggcacagctgtggactcagaagatttttttcaactcctcgaggatgacacatgtctcatggtcttgcagtccggacaatcctggtcacctacacgatctggggttttgagttatgggctggggcgtgaacgccctaaacactcgaaggacatcgcgagatttacttttgacgtgtacaaacaaaatcccagagatctattcgggtccctcaacgttaaggcaacattctacgggctctattcaatgtcttgcgacttccagggactagggcctaagaaggtgctgcgagaactcctgagatggaccagcacactgctgcagggattaggccacatgttgctggggattagctctactctccgtcatgcagtggagggcgcagaacagtggcagcagaaaggtaggttgcacagttattag

SEQ ID NO: 281094 - DNA, 660 bp, Artificial Sequence
  derived and/or modified sequence
atggagtatctttctgcattaaatcctagcgacttgttgcggagtgtgtcgaatatatccagtgaattcgggagacgagtatggaccagtgcgccacccccacagcggccatttcgagtctgtgaccataagagaaccatccggaagggcttgactgccgcaacacgacaggaactgctggccaaagcgctcgagactctgctgttgaacggcgtccttaccctagtgttggaagaggatggtacagctgtggactctgaagatttcttccagttactggaggatgacacatgtttgatggttctgcagtcaggacagtcctggagtccaacccgcagtggcgttttgagctatgggcttggtcgagagaggcccaagcacagtaaggacattgcaagattcacttttgacgtctacaagcaaaacccacgtgaccttttcgggtcgttgaacgtgaaagctacattttacggcctatattcaatgagctgtgattttcagggcctagggccaaaaaaggttctgcgggaattgctgcgctggacaagcactcttttgcaggggcttggacacatgctactggggatctcgagtacactgcgtcacgccgtcgagggtgctgaacagtggcagcagaagggcagactgcattcatactag

SEQ ID NO: 281095 - DNA, 660 bp, Artificial Sequence
  derived and/or modified sequence
atggagtacctgagcgctctaaatccatctgatctgcttcgcagcgtgtctaatatttctagtgaattcggcaggcgtgtttggacatctgcccctccgcctcagcgacctttcagagtttgtgaccacaagcggacaattagaaaggggcttacggctgctacacgacaagaactgctggcaaaagcactggaaaccctgcttctcaatggagttctaacactagtgctggaggaagatggcaccgcagtagattcagaggacttttttcagcttctggaggatgatacctgcctgatggtccttcaatccgggcagtcttggtcacctacccgatcaggcgttctttcttatggcctgggaagggaacgcccaaaacattctaaggacatcgctaggttcactttcgatgtgtacaaacaaaatccacgggatctctttggatcgttgaatgtcaaagcaaccttctacgggctgtattcaatgagttgcgacttccagggtcttggaccaaaaaaggtgttgagggaactgttacgatggacctccacgctgttgcagggtctcggccatatgctgcttggcatctctagcaccctgcggcatgccgtagagggcgctgaacagtggcagcagaaagggagattgcattcgtattag

SEQ ID NO: 281096 - DNA, 2294 bp, Artificial Sequence
  derived and/or modified sequence
gccagcgctgcgaccgcctgcagaaggttgactgcgtggtagggggcccagagcaagccgaaggcaagcacgatggcgctcaccagccggcccacccgcgccccgtgccgcccggagccccagcgggcgccccgcagccgtgccagcgtcacgctgtagcagccgagcatcagcccgaaaggaagcacgaaagcggtcagagtctccaggctcaggtgggcggcggcgtggaccggcgacgggtggcacagctggcatacgcggtccctccacaggtggcggtagacggcggccgggacggcgagcaacagggcggccagccagaccgccagcagcaggcggcgggccagggccgggctgcgcagccgaggcgccaggaaggggcgggtgactgcgaggcagcgctgcaggctgagcaggccggtgagcagcacgctggcgtacatgctgagcgcgcacacgtagtacaccgccttgcagcccgcctggcccagcggccaggcctgccgggtcaggaaggccacaaagagcggcgtgagcagcagcaccgcgccgtcggccagcgccaggtgcagcacaagcgtggccgccagcggtcgcccccgtgcaggccgccagcccgccaagctccacaccacgaagccgttgccaggcagccccagcagcgccgccagcagcaggaaggctgtgcctgtggcccgcgaagtcttccagctcagcagtgtctcgttccctgggggacggtagcagaccgacatccttctgggcctacaggacacagaaaaaaagtggggaagctgggggaccctacaaggatccttggcaggaaagcagggattgtgttcatttgagggtttcactgtcagtgagagtctcagcttccatgcaactgtccatcacggctgcaactgaaatcagagctgggacacagcgcaccagaagctaaagtcttgatgccatcaaaggacatccctgccccattcacatctctgtcacgtccactaatcggcaaaaggagaaaagtgagagaagatgacctaagtgtgactgcagcaggcagctctggaaaatgaagccagagcagtgagccagcccctcctccgaccaaggaggaaggaaagagcagccccagcacaggagagaaccacccagcccagaagttccagggaaggaactctccggtccaccatggagtacctctcagctctgaaccccagtgacttactcaggtcagtatctaatataagctcggagtttggacggagggtctggacctcagctccaccaccccagcgacctttccgtgtctgtgatcacaagcggaccatccggaaaggcctgacagctgccacccgccaggagctgctagccaaagcattggagaccctactgctgaatggagtgctaaccctggtgctagaggaggatggaactgcagtggacagtgaggacttcttccagctgctggaggatgacacgtgcctgatggtgttgcagtctggtcagagctggagccctacaaggagtggagtgctgtcatatggcctgggacgggagaggcccaagcacagcaaggacatcgcccgattcacctttgacgtgtacaagcaaaaccctcgagacctctttggcagcctgaatgtcaaagccacattctacgggctctactctatgagttgtgactttcaaggacttggcccaaagaaagtactcagggagctccttcgttggacctccacactgctgcaaggcctgggccatatgttgctgggaatttcctccacccttcgtcatgcagtggagggggctgagcagtggcagcagaagggccgcctccattcctactaaggggctctgagcttctgcccccagaatcattccaaccgacccactgcaaagactatgacagcatcaaatttcaggacctgcagacagtacaggctagataacccacccaatttccccactgtcctctgatcccctcgtgacagaacctttcagcataacgcctcacatcccaagtctatacccttacctgaagaatgctgttctttcctagccacctttctggcctcccacttgccctgaaaggccaagatcaagatgtcccccaggcatcttgatcccagcctgactgctgctacatctaatcccctaccaatgcctcctgtccctaaactccccagcatactgatgacagccctctctgactttaccttgagatctgtcttcatacccttcccctcaaactaacaaaaacatttccaataaaaatatcaaatatttaccactaa

SEQ ID NO: 281097 - DNA, 2409 bp, Artificial Sequence
  derived and/or modified sequence
ttgactgcgtggtagggggcccagagcaagccgaaggcaagcacgatggcgctcaccagccggcccacccgcgccccgtgccgcccggagccccagcgggcgccccgcagccgtgccagcgtcacgctgtagcagccgagcatcagcccgaaaggaagcacgaaagcggtcagagtctccaggctcaggtgggcggcggcgtggaccggcgacgggtggcacagctggcatacgcggtccctccacaggtggcggtagacggcggccgggacggcgagcaacagggcggccagccagaccgccagcagcaggcggcgggccagggccgggctgcgcagccgaggcgccaggaaggggcgggtgactgcgaggcagcgctgcaggctgagcaggccggtgagcagcacgctggcgtacatgctgagcgcgcacacgtagtacaccgccttgcagcccgcctggcccagcggccaggcctgccgggtcaggaaggccacaaagagcggcgtgagcagcagcaccgcgccgtcggccagcgccaggtgcagcacaagcgtggccgccagcggtcgcccccgtgcaggccgccagcccgccaagctccacaccacgaagccgttgccaggcagccccagcagcgccgccagcagcaggaaggctgtgcctgtggcccgcgaagtcttccagctcagcagtgtctcgttccctgggggacggtagcagaccgacatccttctgggcctacagcctgcctcttttctgcctgggagtcctgacttccacgaggacccagaccccacctcaaacacaactccttcttggaacccagatcccctgctcccagtcagttgacctgccccactcctggcctccttcccagagctcagtggacacagaaaaaaagtggggaagctgggggaccctacaaggatccttggcaggaaagcagggattgtgttcatttgagggtttcactgtcagtgagagtctcagcttccatgcaactgtccatcacggctgcaactgaaatcagagctgggacacagcgcaccagaagctaaagtcttgatgccatcaaaggacatccctgccccattcacatctctgtcacgtccactaatcggcaaaaggagaaaagtgagagaagatgacctaagtgtgactgcagcaggcagctctggaaaatgaagccagagcagtgagccagcccctcctccgaccaaggaggaaggaaagagcagccccagcacaggagagaaccacccagcccagaagttccagggaaggaactctccggtccaccatggagtacctctcagctctgaaccccagtgacttactcaggtcagtatctaatataagctcggagtttggacggagggtctggacctcagctccaccaccccagcgacctttccgtgtctgtgatcacaagcggaccatccggaaaggcctgacagctgccacccgccaggagctgctagccaaagcattggagaccctactgctgaatggagtgctaaccctggtgctagaggaggatggaactgcagtggacagtgaggacttcttccagctgctggaggatgacacgtgcctgatggtgttgcagtctggtcagagctggagccctacaaggagtggagtgctgtcatatggcctgggacgggagaggcccaagcacagcaaggacatcgcccgattcacctttgacgtgtacaagcaaaaccctcgagacctctttggcagcctgaatgtcaaagccacattctacgggctctactctatgagttgtgactttcaaggacttggcccaaagaaagtactcagggagctccttcgttggacctccacactgctgcaaggcctgggccatatgttgctgggaatttcctccacccttcgtcatgcagtggagggggctgagcagtggcagcagaagggccgcctccattcctactaaggggctctgagcttctgcccccagaatcattccaaccgacccactgcaaagactatgacagcatcaaatttcaggacctgcagacagtacaggctagataacccacccaatttccccactgtcctctgatcccctcgtgacagaacctttcagcataacgcctcacatcccaagtctatacccttacctgaagaatgctgttctttcctagccacctttctggcctcccacttgccctgaaaggccaagatcaagatgtcccccaggcatcttgatcccagcctgactgctgctacatctaatcccctaccaatgcctcctgtccctaaactccccagcatactgatgacagccctctctgactttaccttgagatctgtcttcatacccttcccctcaaactaacaaaaacatttccaataaaaatatcaaatatttaccactaa

SEQ ID NO: 281098 - DNA, 3826 bp, Artificial Sequence
  derived and/or modified sequence
agcttcgccaaggccccttccggtggagccagcgctgcgaccgcctgcagaaggttgactgcgtggtagggggcccagagcaagccgaaggcaagcacgatggcgctcaccagccggcccacccgcgccccgtgccgcccggagccccagcgggcgccccgcagccgtgccagcgtcacgctgtagcagccgagcatcagcccgaaaggaagcacgaaagcggtcagagtctccaggctcaggtgggcggcggcgtggaccggcgacgggtggcacagctggcatacgcggtccctccacaggtggcggtagacggcggccgggacggcgagcaacagggcggccagccagaccgccagcagcaggcggcgggccagggccgggctgcgcagccgaggcgccaggaaggggcgggtgactgcgaggcagcgctgcaggctgagcaggccggtgagcagcacgctggcgtacatgctgagcgcgcacacgtagtacaccgccttgcagcccgcctggcccagcggccaggcctgccgggtcaggaaggccacaaagagcggcgtgagcagcagcaccgcgccgtcggccagcgccaggtgcagcacaagcgtggccgccagcggtcgcccccgtgcaggccgccagcccgccaagctccacaccacgaagccgttgccaggcagccccagcagcgccgccagcagcaggaaggctgtgcctgtggcccgcgaagtcttccagctcagcagtgtctcgttccctgggggacggtagcagaccgacatccttctgggcctacaggtgggtggaaggcgccacagagggcgttcaggggtggggcaaaaccccacctgtgatgcccgatgagaaggtgccatgcctcctccttacttccctgcagcctgcctcttttctgcctgggagtcctgacttccacgaggacccagaccccacctcaaacacaactccttcttggaacccagatcccctgctcccagtcagttgacctgccccactcctggcctccttcccagagctcagtggtaaacaggcataaagtcatcaccccaggctgtcactatctctaccaccactcctctagtctggcccctccttctttgtccagccccattctagcacatctgggcaaaactggatggtggggtgtaaagggacgtgcacagatctacttaccaagctgggagcaagcaggattgggggcctggagaagctgaaaggttaagcagcagtaggcgaggtgcctactcctgtcctgtgcctatcacatttgcagaggtgacccaaacaactcagtcccccacctgccttatccttgcctgtttccagtctcctggtccggctgagcccctggcctcctacctcctcccacctcttgcctcaggccctgccccagtcactccaccctcagggctctcaccgggctgtcaatgacagcttttccatgtaaggcatggtgctaggttccaggaggaacaggggatgcatggaggcataatggttagggagtcatgacacacaaccatgaagaggccccattaccaggctgcaccaggatacaagacaagaaaggaaaggatgagtagggacatactaagaagcagccctctcctcttggaaaagtcaagcaaaacttggaaatgaagagatttgaggggggcctggcagatggatagagctgggggaagggaaaagaaaggcctctgctcaagtaacagccagaacttgaggttgcttggggagggcaccaggagcactgtcttagtttgggttcttccaaagcagagcttgagctaagggcttgggtacaggtgatcctgtattcttgagctaagggcttgggtacaggtgatcctgtatttgggaggttaactcaggaagtgagggcataaggtaaaacaagagagaggaaagccattaagagtatgttaagtcccttcagtaggccttgggaacctctgagaaaagtatagattgcccaagacaaaagactggcagggtgatcagtccaaagcatttattaggagaatgtacttaatgagtgggctacagcgtatcctcacaacagacagtgagagagagttgttctacctgggtatatccaaaacaagggggtcagggtatggagtttacgagggttcaaggtatttggttcagggccagggccagtttttttcagtgttttgggcaacaacctgaataccttttcaaggctctggcttgggctcaagcctgcaggggaaatgcaactggccaggtcacagggcaatcaagttactctgtgtttctttgtcaggacacagaaaaaaagtggggaagctgggggaccctacaaggatccttggcaggaaagcagggattgtgttcatttgagggtttcactgtcagtgagagtctcagcttccatgcaactgtccatcacggctgcaactgaaatcagagctgggacacagcgcaccagaagctaaagtcttgatgccatcaaaggacatccctgccccattcacatctctgtcacgtccactaatcggcaaaaggagaaaagtgagagaagatgacctaagtgtgactgcagcaggcagctctggaaaatgaagccagagcagtgagccagcccctcctccgaccaaggaggaaggaaagagcagccccagcacaggagagaaccacccagcccagaagttccagggaaggaactctccggtccaccatggagtacctctcagctctgaaccccagtgacttactcaggtcagtatctaatataagctcggagtttggacggagggtctggacctcagctccaccaccccagcgacctttccgtgtctgtgatcacaagcggaccatccggaaaggcctgacagctgccacccgccaggagctgctagccaaagcattggagaccctactgctgaatggagtgctaaccctggtgctagaggaggatggaactgcagtggacagtgaggacttcttccagctgctggaggatgacacgtgcctgatggtgttgcagtctggtcagagctggagccctacaaggagtggagtgctgtcatatggcctgggacgggagaggcccaagcacagcaaggacatcgcccgattcacctttgacgtgtacaagcaaaaccctcgagacctctttggcagcctgaatgtcaaagccacattctacgggctctactctatgagttgtgactttcaaggacttggcccaaagaaagtactcagggagctccttcgttggacctccacactgctgcaaggcctgggccatatgttgctgggaatttcctccacccttcgtcatgcagtggagggggctgagcagtggcagcagaagggccgcctccattcctactaaggggctctgagcttctgcccccagaatcattccaaccgacccactgcaaagactatgacagcatcaaatttcaggacctgcagacagtacaggctagataacccacccaatttccccactgtcctctgatcccctcgtgacagaacctttcagcataacgcctcacatcccaagtctatacccttacctgaagaatgctgttctttcctagccacctttctggcctcccacttgccctgaaaggccaagatcaagatgtcccccaggcatcttgatcccagcctgactgctgctacatctaatcccctaccaatgcctcctgtccctaaactccccagcatactgatgacagccctctctgactttaccttgagatctgtcttcatacccttcccctcaaactaacaaaaacatttccaataaaaatatcaaatattt

SEQ ID NO: 281099 - DNA, 1602 bp, Artificial Sequence
  derived and/or modified sequence
gagccactcataaactgcagcttctcagagcctgagagccagaaaccgtccccagaaattccctccatagaaataaaaaaacaccagaagtcacatttcatccttttacatggttcccatctaccctcacaacacatgtcatcaccaaagacacacatacaagctccaatggcttttgccaggcaattcttcctccaggaccccatctggcccctccctcatccctccccttggactttgcccttcttactggccaggcaggggggccagagtccaggcttgactcattcccaccttgtcctgggctgagatcccaggtttgtaacagaaaacaccactaaagccccagcacaggagagaaccacccagcccagaagttccagggaaggaactctccggtccaccatggagtacctctcagctctgaaccccagtgacttactcaggtcagtatctaatataagctcggagtttggacggagggtctggacctcagctccaccaccccagcgacctttccgtgtctgtgatcacaagcggaccatccggaaaggcctgacagctgccacccgccaggagctgctagccaaagcattggagaccctactgctgaatggagtgctaaccctggtgctagaggaggatggaactgcagtggacagtgaggacttcttccagctgctggaggatgacacgtgcctgatggtgttgcagtctggtcagagctggagccctacaaggagtggagtgctgtcatatggcctgggacgggagaggcccaagcacagcaaggacatcgcccgattcacctttgacgtgtacaagcaaaaccctcgagacctctttggcagcctgaatgtcaaagccacattctacgggctctactctatgagttgtgactttcaaggacttggcccaaagaaagtactcagggagctccttcgttggacctccacactgctgcaaggcctgggccatatgttgctgggaatttcctccacccttcgtcatgcagtggagggggctgagcagtggcagcagaagggccgcctccattcctactaaggggctctgagcttctgcccccagaatcattccaaccgacccactgcaaagactatgacagcatcaaatttcaggacctgcagacagtacaggctagataacccacccaatttccccactgtcctctgatcccctcgtgacagaacctttcagcataacgcctcacatcccaagtctatacccttacctgaagaatgctgttctttcctagccacctttctggcctcccacttgccctgaaaggccaagatcaagatgtcccccaggcatcttgatcccagcctgactgctgctacatctaatcccctaccaatgcctcctgtccctaaactccccagcatactgatgacagccctctctgactttaccttgagatctgtcttcatacccttcccctcaaactaacaaaaacatttccaataaaaatatcaaatatttaccactaagacttctgactccaatttaaaccaggaaagggatggggtggataccccattttgccctcccccatcaacacccagtcccagatccaaagcc

SEQ ID NO: 281100 - protein, 45 aa, Artificial Sequence
  derived and/or modified sequence
MTALRLLQRMKRDWMHTGRRPSGLCGAALLVAARMHDFRRTVKEV

SEQ ID NO: 281101 - protein, 14 aa, Artificial Sequence
  derived and/or modified sequence
MTALRLLQRMKRDW

SEQ ID NO: 281102 - protein, 135 aa, Artificial Sequence
  derived and/or modified sequence
MTALRLLQRMKRDWMHTGRRPSGLCGAALLVAARMHDFRRTVKEVISVVKVCESTLRKRLTEFEDTPTSQLTIDEFMKIDLEEECDPPPIEEGGQTEAREPPQASSWEGPSTTRRRSQLWHGCPGCGRGGFTLCP

SEQ ID NO: 281103 - protein, 184 aa, Artificial Sequence
  derived and/or modified sequence
MTALRLLQRMKRDWMHTGRRPSGLCGAALLVAARMHDFRRTVKEVISVVKVCESTLRKRLTEFEDTPTSQLTIDEFMKIDLEEECDPPSYTAGQRKLRMKQLEQVLSKKLEEVEGEISSYQDAIEIELENSPPSRREGRRRPESLPRPLRGKAPVPLVGGLSSGMAAPDVAEGASPCVLRRGWP

SEQ ID NO: 281104 - protein, 237 aa, Artificial Sequence
  derived and/or modified sequence
MTALRLLQRMKRDWMHTGRRPSGLCGAALLVAARMHDFRRTVKEVISVVKVCESTLRKRLTEFEDTPTSQLTIDEFMKIDLEEECDPPSYTAGQRKLRMKQLEQVLSKKLEEVEGEISSYQDAIEIELENSRPKAKGGLASLAKDGSTEDTASSLCGEEDTEDEELEAAASHLNKDLYRELLGGAPGSSEAAGSPEWGGRPPALGSLLDPLPTAASLGISDSIRECISSQSSDPSEF

SEQ ID NO: 281105 - protein, 155 aa, Artificial Sequence
  derived and/or modified sequence
MTALRLLQRMKRDWMHTGRRPSGLCGAALLVAARMHDFRRTVKEVISVVKVCESTLRKRLTEFEDTPTSQLTIDEFMKIDLEEECDPPSYTAGQRKLRMKQLEQVLSKKLEEVEGEISSYQDAIEIELENSRPKAKGGLASLAKDGSTEDTASSL

SEQ ID NO: 281106 - DNA, 408 bp, Artificial Sequence
  derived and/or modified sequence
atgacagctctgcgcctgttacagaggatgaaacgagactggatgcatactggacgacgaccatctggcctctgtggagctgcactactcgtggctgcccgcatgcacgacttcaggagaaccgttaaggaggttatctctgtggtaaaagtatgtgagagcaccctgaggaaacggttgactgagttcgaagataccccgacgagccagttgacaattgatgagtttatgaaaattgacctcgaagaggaatgtgacccaccacccatcgaggagggggggcagacggaagctagggaacccccccaagccagctcctgggaaggcccatctactactcgacggagatctcagctctggcatggatgtcctgggtgcggccgcggagggtttacattatgcccatag

SEQ ID NO: 281107 - DNA, 555 bp, Artificial Sequence
  derived and/or modified sequence
atgactgccctgaggttgcttcagcggatgaaacgcgattggatgcacaccggcagacggccttccgggctgtgcggtgccgccctactggttgccgcaagaatgcacgacttccgaaggacagttaaagaagtcatctcagtagtcaaagtctgtgagtccacattgcggaagcggcttactgagtttgaagacactccgaccagccaacttaccattgacgaatttatgaagatcgatctcgaagaggagtgtgaccctcctagctacacagccggtcaacggaagctccggatgaaacaattggaacaggttctctcgaaaaagctggaggaggtggagggagagatcagctcatatcaggatgccatcgaaattgagctggaaaacagtccacccagtcgacgggagggaaggagacgcccagagtcactgccaaggccactgcgcggtaaggcaccggtgccactggtcggaggactgtcctctggtatggccgccccggatgtcgctgagggcgcctccccttgcgtgctcagaagagggtggccctag

SEQ ID NO: 281108 - DNA, 1422 bp, Artificial Sequence
  derived and/or modified sequence
atgacagccctgcggctcttacagcgcatgaagcgggattggatgcacacagggagacggcccagtggcctgtgcggcgccgcattgcttgtggctgcccgaatgcatgattttagacgcaccgttaaagaggttatctcagtcgttaaggtgtgcgagagtaccctgagaaaaagactcacagaattcgaggacacacctacctcccagttaacaatagacgagttcatgaaaattgacctggaagaggagtgcgacccccccagttacaccgcgggccaacgaaagctgcggatgaagcagctggagcaggtgttatcaaagaaattggaagaggttgaaggagagatcagcagctatcaggacgcaatcgaaattgaattagagaactctcggccaaaagccaagggcgggttggcatctctagctaaggatgggagtaccgaggacaccgctagttctctgtgcggcgaggaggacaccgaggatgaggagctggaagcagctgcctctcacttgaacaaggacctgtaccgagagctcctgggcggcgcacccggttcttctgaggctgccggcagccccgaatggggtggtaggccgcctgccctcgggtctttactggaccccctccccactgcagcgtctctagggatatctgattcaatcagagagtgtatctcctcacagagctccgacccaaaggacgcatctggcgacggtgaactggacctgtctgggatagatgacctggaaattgatagatatatcctcaacgagagcgaggcccgcgtgaaggctgagctttggatgcgagagaatgccgagtatcttagagagcagcgagaaaaagaggcccgaattgccaaggagaaggagctaggaatctacaaggagcacaagcccaaaaagagctgcaaaaggcgagagcccattcaggcaagcaccgccagagaggcaattgagaaaatgcttgaacagaagaagatctcatcaaagattaactactctgtgctccgcggactgtcaagtgctggaggcggaagcccacaccgagaggacgcccagccagagcactccgcaagcgcgcgcaagctgtcacggagacggacccccgcttcgcgttcaggtgcagacccggtgacttcagtgggaaagcgcctcaggcccctggtgtctacccagcctgcgaagaaagttgccacaggcgaagcccttttgcccagcagcccgacactgggagctgaacccgctaggccacaggccgtgcttgttgagagtggccccgtgagttaccacgctgacgaagaagccgatgaggaggaaccagacgaagaagatggcgaaccatgcgtgtcggcattacagatgatgggtagcaatgattatgggtgcgacggcgatgaggatgacggatactag

SEQ ID NO: 281109 - DNA, 714 bp, Artificial Sequence
  derived and/or modified sequence
atgacggccctgcgtcttctccagagaatgaaacgggattggatgcacaccggtagacgcccctccggactctgcggagctgccttgttagtggccgcaaggatgcacgacttccggaggacagtaaaagaagtcatctccgtcgttaaggtgtgcgagtctactcttagaaagcggctgaccgaattcgaagatactccaacctcgcagctcactatcgacgagtttatgaagatagacttggaggaggagtgcgaccctccctcttacacggctggacaacgcaagttgcgcatgaagcagctggaacaggtgctgtccaagaagcttgaagaggtggaaggagagatctcgagctaccaggatgccatcgagatcgagttggagaatagccggccgaaagccaaggggggcctggcctctctggctaaggacgggtcaaccgaggataccgccagctcgctctgcggggaggaagacacagaagacgaggaacttgaggctgcagcgagccacctaaataaggatctgtacagggagttgctgggcggagcaccggggagtagcgaagcggccgggtctcccgagtggggtggcaggcctccggcactgggctctctgttggatcccctcccaacggccgcctcgctgggaatttccgactcaatccgagaatgtatctcatcccagtccagtgacccaagcgagttctag

SEQ ID NO: 281110 - DNA, 138 bp, Artificial Sequence
  derived and/or modified sequence
atgacggcgctgagacttctgcagagaatgaagagggactggatgcatacgggacgcaggccgtctggactatgcggggcagccctgttagttgctgcaaggatgcacgactttcgccggactgtcaaggaagtgtag

SEQ ID NO: 281111 - DNA, 468 bp, Artificial Sequence
  derived and/or modified sequence
atgactgccctgcgcttgcttcagcggatgaagcgggattggatgcatacaggaaggcggccgtcaggcctgtgcggagccgccctcctcgtggcagcccggatgcatgacttcagacggaccgtcaaagaagtgatttctgtcgtgaaagtgtgtgagtccaccctgagaaagcgcctgacagaatttgaagacacccctactagtcagttgacaattgatgagttcatgaagatcgacctcgaagaagagtgcgatccaccttcttacacagctgggcagagaaaactccggatgaagcagctggagcaagtgttgtccaagaaacttgaagaggtggagggcgagatcagcagctaccaagatgctattgagatagagctcgaaaactccagaccgaaagccaagggcggtctggccagcctggcaaaggatggctctacagaagatacagcatctagtctatag

SEQ ID NO: 281112 - DNA, 408 bp, Artificial Sequence
  derived and/or modified sequence
atgacagccctgcggctgctgcagaggatgaagagggactggatgcacactggaagaagacccagcggcctgtgtggggccgccctgctggtggccgccaggatgcatgacttcagaagaacagtgaaggaggtgatctctgtggtgaaggtgtgtgagagcaccctgaggaagaggctgacagaatttgaggacacccccaccagccagctgaccattgatgagttcatgaagattgacctggaggaggagtgtgaccccccacccatcgaggagggcggccagacagaggcccgggagcccccccaggccagctcctgggagggccccagcaccaccaggagaagaagccagctgtggcacggctgccccggctgcggccggggcggcttcaccctgtgcccctag

SEQ ID NO: 281113 - DNA, 555 bp, Artificial Sequence
  derived and/or modified sequence
atgacagccctgcggctgctgcagaggatgaagagggactggatgcacactggaagaagacccagcggcctgtgtggggccgccctgctggtggccgccaggatgcatgacttcagaagaacagtgaaggaggtgatctctgtggtgaaggtgtgtgagagcaccctgaggaagaggctgacagaatttgaggacacccccaccagccagctgaccattgatgagttcatgaagattgacctggaggaggagtgtgaccccccatcctacacagctggccagaggaagctgaggatgaagcagctggagcaggtgctgagcaagaagctggaggaggtggagggggagatcagcagctaccaggatgccatcgagattgagctggagaacagcccccccagcagaagagagggcagaagaagacctgagagcctgccccggcccctgcggggcaaggcccctgtgcccctggtgggcggcctgagcagcggcatggccgccccagatgtggccgagggcgccagcccctgtgtgctgcggcggggctggccctag

SEQ ID NO: 281114 - DNA, 1422 bp, Artificial Sequence
  derived and/or modified sequence
atgacagccctgcggctgctgcagaggatgaagagggactggatgcacactggaagaagacccagcggcctgtgtggggccgccctgctggtggccgccaggatgcatgacttcagaagaacagtgaaggaggtgatctctgtggtgaaggtgtgtgagagcaccctgaggaagaggctgacagaatttgaggacacccccaccagccagctgaccattgatgagttcatgaagattgacctggaggaggagtgtgaccccccatcctacacagctggccagaggaagctgaggatgaagcagctggagcaggtgctgagcaagaagctggaggaggtggagggggagatcagcagctaccaggatgccatcgagattgagctggagaacagccggcccaaggccaagggcggcctggccagcctggccaaggatggcagcacagaggacacagccagcagcctgtgtggggaggaggacacagaagatgaggagctggaggccgccgccagccacctgaacaaggacctgtaccgggagctgctgggcggggcccctggcagcagcgaggccgccggcagccctgagtggggcggccggcccccagccctgggcagcctgctggaccccctgcccacagctgccagcctgggcatcagtgacagcatccgggagtgcatcagcagccagagcagtgaccccaaggatgccagcggagatggagagctggacctgagcggcattgatgacctggagattgaccgctacatcctgaatgaaagtgaggcccgggtgaaggccgagctgtggatgagagaaaatgctgagtacctgcgggagcagcgggagaaggaggcccgcatcgccaaggagaaggagctgggcatctacaaggagcacaagcccaagaagagctgcaagaggcgggagcccatccaggccagcacagcccgggaggccatcgagaagatgctggagcagaagaagatcagcagcaagatcaactacagcgtgctgcggggcctgagcagcgctgggggcggcagcccccacagagaagatgcccagcctgagcacagcgccagcgccaggaagctgagcagaagaaggaccccagccagccgcagcggggctgaccctgtgacctctgtgggcaagaggctgcggcccctggtgtccacccagcctgccaagaaggtggccaccggggaggccctgctgcccagcagccccaccctgggcgctgagcccgcccggccccaggccgtgctggtggagagcggccctgtgtcctaccacgcagatgaggaggctgatgaggaggagccagatgaggaggatggagagccctgtgtgtctgccctgcagatgatgggcagcaatgactatggctgtgatggagatgaagatgatggctactag

SEQ ID NO: 281115 - DNA, 714 bp, Artificial Sequence
  derived and/or modified sequence
atgacagccctgcggctgctgcagaggatgaagagggactggatgcacactggaagaagacccagcggcctgtgtggggccgccctgctggtggccgccaggatgcatgacttcagaagaacagtgaaggaggtgatctctgtggtgaaggtgtgtgagagcaccctgaggaagaggctgacagaatttgaggacacccccaccagccagctgaccattgatgagttcatgaagattgacctggaggaggagtgtgaccccccatcctacacagctggccagaggaagctgaggatgaagcagctggagcaggtgctgagcaagaagctggaggaggtggagggggagatcagcagctaccaggatgccatcgagattgagctggagaacagccggcccaaggccaagggcggcctggccagcctggccaaggatggcagcacagaggacacagccagcagcctgtgtggggaggaggacacagaagatgaggagctggaggccgccgccagccacctgaacaaggacctgtaccgggagctgctgggcggggcccctggcagcagcgaggccgccggcagccctgagtggggcggccggcccccagccctgggcagcctgctggaccccctgcccacagctgccagcctgggcatcagtgacagcatccgggagtgcatcagcagccagagcagtgaccccagcgagttctag

SEQ ID NO: 281116 - DNA, 138 bp, Artificial Sequence
  derived and/or modified sequence
atgacagccctgcggctgctgcagaggatgaagagggactggatgcacactggaagaagacccagcggcctgtgtggggccgccctgctggtggccgccaggatgcatgacttcagaagaacagtgaaggaggtgtag

SEQ ID NO: 281117 - DNA, 468 bp, Artificial Sequence
  derived and/or modified sequence
atgacagccctgcggctgctgcagaggatgaagagggactggatgcacactggaagaagacccagcggcctgtgtggggccgccctgctggtggccgccaggatgcatgacttcagaagaacagtgaaggaggtgatctctgtggtgaaggtgtgtgagagcaccctgaggaagaggctgacagaatttgaggacacccccaccagccagctgaccattgatgagttcatgaagattgacctggaggaggagtgtgaccccccatcctacacagctggccagaggaagctgaggatgaagcagctggagcaggtgctgagcaagaagctggaggaggtggagggggagatcagcagctaccaggatgccatcgagattgagctggagaacagccggcccaaggccaagggcggcctggccagcctggccaaggatggcagcacagaggacacagccagcagcctgtag

SEQ ID NO: 281118 - DNA, 408 bp, Artificial Sequence
  derived and/or modified sequence
atgaccgccctgcggctgctgcagcggatgaagcgggactggatgcataccggacgtcgaccatccggattgtgcggagccgctctgttagttgccgctaggatgcacgatttccggagaacagtcaaggaagtcatctcggtggtaaaggtttgtgaatccacactgcgaaagcggctgaccgagtttgaggacacgcctacaagtcagctcaccatcgacgaatttatgaagatcgatctggaagaggaatgtgaccccccacctatcgaggaaggagggcagacagaggcaagggaacctccacaggctagtagctgggaggggcctagcacgactcgccgacggtcccaactgtggcacggatgccccggctgcgggagggggggatttacactgtgcccatag

SEQ ID NO: 281119 - DNA, 555 bp, Artificial Sequence
  derived and/or modified sequence
atgaccgccctgcggctgctgcagcggatgaagcgggactggatgcatacagggaggagacccagcggcctctgtggcgctgccttgctggtggctgccagaatgcacgattttaggaggaccgttaaggaagtgatctccgtggttaaagtctgtgaatctactctgcggaaacgcctgacggaattcgaagacacccctacatctcagctgacaatcgacgagttcatgaaaattgatctggaagaagaatgcgaccctccaagctacacagcagggcagcgtaagctgcgaatgaagcaactcgaacaagtgctgtcgaagaagctggaagaagtagagggtgagataagctcttatcaggatgccatcgagattgagctcgagaattccccccctagtagacgggagggaagaagacggcccgaaagcctgccccggccattgcgtggcaaggcccccgtccccttggtgggcggccttagctcaggcatggctgctccagatgtcgcggaaggagcctcaccctgcgtcctgcgaaggggttggccgtag

SEQ ID NO: 281120 - DNA, 1422 bp, Artificial Sequence
  derived and/or modified sequence
atgaccgccctgcggctgctgcagcggatgaagcgggactggatgcatacaggcagaaggccgtcaggcttgtgcggagccgccctgctggtcgcagcccggatgcacgactttcggcgcaccgtcaaagaggtgatttcagtcgtaaaggtgtgcgagagcactctgcgcaagaggctcacggagttcgaggacacacctacttcacagctaacgatcgacgagttcatgaagatcgaccttgaggaggagtgcgatcctccatcatacacagccggacaacggaaactgagaatgaaacagttggaacaggtgttgagtaagaaattggaagaggtcgagggcgagatcagctcctaccaagatgcaatcgaaattgaattggaaaacagcaggcctaaggccaagggaggcctcgcctcactggcaaaggatgggtcaacagaggatacagcttcttctctctgtggtgaggaagataccgaggacgaggagttagaagccgccgcatctcaccttaataaagatttgtacagagaactcctcggtggggcacctgggtcttccgaagccgctgggagtccagaatggggcggtagaccgcctgcgttgggaagcctgctagacccccttcctactgcagcatcactcgggattagtgattcgattcgagaatgtatcagctctcagtcttcagatccaaaggacgcaagcggagacggagagctggacctgtctggcattgatgatctcgagattgatcgctacatattgaatgaaagtgaggctcgcgtgaaagccgagctgtggatgcgcgagaacgcagaatatctccgggagcagagagaaaaagaggcaaggatcgcaaaggaaaaggaactggggatttataaggagcacaaacccaagaagtcctgcaaacggcgggagcctatacaagcttcgactgcgcgcgaagcaattgaaaagatgctggagcagaagaagatcagttctaagatcaattattcagtgttgcgggggctgagctctgcagggggagggtctccccatcgtgaggatgcccagcccgagcattccgctagtgctagaaaactatcccggagacgcacaccagcatccaggtccggggccgatcctgtaaccagcgtgggtaagcggttacgaccactggtgtccacccagcccgctaagaaagtggccaccggcgaagcactgctcccgtccagtccaactctcggcgctgagcccgcccggccccaggccgttttagtagagtccgggccagtgtcataccacgccgatgaagaggccgacgaggaagaacccgacgaagaagatggggagccatgtgtaagtgcactgcagatgatggggtcgaatgattatgggtgtgatggtgacgaggatgatggctattag

SEQ ID NO: 281121 - DNA, 714 bp, Artificial Sequence
  derived and/or modified sequence
atgaccgccctgcggctgctgcagcggatgaagcgggactggatgcatacaggccgcaggccttccggtctctgcggtgccgcactgcttgtcgcagcccggatgcacgacttcagacggaccgtcaaagaagtgataagtgtcgtgaaggtctgtgagagcacccttcggaagaggctgacggagttcgaagacaccccaacttcacagctgacgatcgacgaatttatgaagattgacctcgaggaagaatgcgacccaccctcctacacagctggtcaacggaaattgaggatgaagcagcttgaacaggtgctgagcaaaaagctggaagaagtcgagggtgagatcagttcctatcaggatgccattgagatagagctagagaattcgcgccctaaggcaaaaggtggtctagcctcattggccaaggatgggagcacggaggacactgctagctcactttgcggagaagaggacactgaggacgaagagctggaagcagccgcatcccacctcaataaagacctctatcgtgaactgctgggtggtgctcctgggtcgtcagaagctgccggctcaccagagtggggcggccgcccaccagctttgggaagtctgcttgatccactgccaacggcggcatcgcttggaataagtgatagtatccgtgagtgcatcagtagccaaagcagcgacccgtctgaattctag

SEQ ID NO: 281122 - DNA, 138 bp, Artificial Sequence
  derived and/or modified sequence
atgaccgccctgcggctgctgcagcggatgaagcgggactggatgcacacgggccggcgcccatcgggtctttgtggggccgcacttctcgttgcggctcgcatgcacgatttcagaaggacagttaaggaggtgtag

SEQ ID NO: 281123 - DNA, 468 bp, Artificial Sequence
  derived and/or modified sequence
atgaccgccctgcggctgctgcagcggatgaagcgggactggatgcacacggggaggagacctagtggactgtgtggcgctgccctccttgtggccgctagaatgcatgactttcggcggacagtcaaggaagtgattagcgtcgtaaaagtctgcgagtctaccctccgtaagcggctgaccgagttcgaggacacccccacctcgcagctgacgatcgacgagttcatgaagattgatctggaagaggagtgtgaccccccttcttatacagcagggcagcgaaaactgaggatgaaacaacttgaacaagtcctctctaaaaaattagaggaggtggaaggtgagatttcgtcttatcaggatgcgattgaaatcgaactcgagaattctagacccaaggcaaagggaggacttgccagtctggctaaggacggctcaacagaggacacagcttcgagtctttag

SEQ ID NO: 281124 - DNA, 408 bp, Artificial Sequence
  derived and/or modified sequence
atgacggccctacggttactgcaacgcatgaaaagggattggatgcacaccggacgcaggccctcaggactgtgcggggcagcattgctggtggccgctagaatgcacgacttccgaaggacggtaaaggaggtgatctcggtggtcaaggtctgcgaatctacgctgagaaaacgactgaccgagttcgaggatactcccacctcacagttgacgatcgacgagttcatgaaaattgatttggaggaggaatgcgaccctccgccaatcgaagagggaggtcagactgaagccagggagcccccacaagcctcctcctgggaaggtccatcaactactcgccgacgtagtcaactgtggcacggctgtcctgggtgtgggaggggtggctttactctgtgcccttag

SEQ ID NO: 281125 - DNA, 555 bp, Artificial Sequence
  derived and/or modified sequence
atgacagcccttagactcttacagagaatgaagcgggactggatgcataccggaagacggccatccgggttgtgtggagcagcccttctggttgcagcccgtatgcatgacttccgaagaaccgtgaaagaggtgatatcagttgtaaaggtttgcgagagcaccctccgcaaaaggctaaccgagttcgaggacaccccgacatcccagcttaccatcgacgaattcatgaaaatagatctggaggaagagtgcgatccacccagttataccgctgggcagaggaaactccggatgaaacagctggaacaggtcctgtctaagaagctcgaggaggttgaaggtgaaatcagtagctaccaggacgcaatagagatcgagcttgagaactctcccccttctcggagggagggaaggcggaggcccgagtcgctgcccagaccattgcggggtaaagcccctgtgccactcgtgggtggcctgagctctggcatggctgcgcctgacgttgctgagggggctagtccttgcgtactccggagaggctggccttag

SEQ ID NO: 281126 - DNA, 1422 bp, Artificial Sequence
  derived and/or modified sequence
atgacagccttacgcttacttcaacggatgaaacgggattggatgcatacagggagaagaccatctgggctttgtggggctgctcttttggttgctgctcgcatgcatgattttcgcagaaccgtaaaggaggtgatatcagtcgtgaaagtgtgtgaaagcacccttcgcaagcgtctgacagaattcgaagataccccaacctcacagttgactatcgacgaatttatgaagattgatctggaggaggagtgtgatccacccagctacaccgcgggacaaaggaagctgaggatgaagcaactggagcaagtcctgtccaaaaagctggaggaagtcgaaggagagatctctagctaccaggacgcgattgaaatcgagctagagaacagccgcccaaaggctaaagggggattggccagcttagcgaaggatgggtcaaccgaggatactgcttccagcctatgcggcgaagaggatacagaggacgaggaactagaggctgctgcgagtcatcttaataaagacctgtaccgagagcttcttgggggagcaccgggatctagcgaggctgccggatccccagaatggggcggtcggcctccggctctcggatctctgcttgatcctttgcctaccgcagcttccttagggatcagcgacagtatccgggagtgcatttcatctcagtcatcagaccctaaagatgccagcggagatggtgagttggatctttccggtatcgatgacctggagatagaccgctatatattaaatgagagtgaagccagggtgaaggctgaactatggatgagagagaatgccgagtatctgagggaacagcgcgaaaaggaagcacgtatagctaaggaaaaagaactggggatctacaaggaacacaaacctaagaagagttgcaaacggagggagcccattcaagccagcacagctcgagaggccattgagaaaatgctcgagcaaaaaaaaatttccagcaagatcaattactccgtgctgcggggactatcttcggcaggcggaggctcgccacatcgtgaggacgcgcagccggaacacagcgcaagtgccagaaagttaagcagacgtagaaccccagcttccagatccggtgcagatccagtgactagcgtggggaagcggctcagaccgctcgtttcaacccagccggctaagaaggtggcaaccggggaggcccttcttccctccagccctaccctgggcgcagaaccagccagaccccaggctgtattggtggaatccgggcctgtaagctaccacgctgacgaagaggcagatgaagaggagccggacgaggaagatggggagccttgcgtgtcggccctacagatgatgggctctaacgattacggatgtgatggcgacgaggatgacggatattag

SEQ ID NO: 281127 - DNA, 714 bp, Artificial Sequence
  derived and/or modified sequence
atgacagcactgaggttgcttcagcggatgaaaagagattggatgcacacaggcaggcgcccttctgggctgtgcggggctgccttgctggtcgcagctagaatgcacgatttccgtcggaccgtgaaggaagtgatctctgtcgtgaaagtttgcgagagtaccctaaggaagcgtttgactgaatttgaggatacccctacgagccaactcaccatagacgagtttatgaaaatcgatctcgaggaagaatgcgaccccccttcttacactgcaggccagcggaagttaaggatgaagcagctagaacaggtgctcagcaaaaaacttgaagaggtagaaggcgaaatcagctcctatcaggacgccattgagatcgagctggaaaattctcgccctaaggccaagggagggttagcaagtttggcaaaagatggatcgaccgaggatactgcctctagtctatgtggggaggaagacacggaggatgaggagctagaagccgcagcgagccatctaaacaaagacctctaccgggagttattagggggagctccaggttcttctgaggcagctggatcccccgaatgggggggtagacctccagctttagggtccctattggaccctctaccaactgcagcaagcttgggaatctctgattcaattagagaatgcatctcttctcaatccagcgaccctagtgaattctag

SEQ ID NO: 281128 - DNA, 138 bp, Artificial Sequence
  derived and/or modified sequence
atgaccgcccttcgcctgctacagcggatgaagcgcgattggatgcacacaggacggaggcccagcggactctgcggcgcagccctgctagtagctgccaggatgcatgattttaggcgaaccgtaaaggaagtatag

SEQ ID NO: 281129 - DNA, 468 bp, Artificial Sequence
  derived and/or modified sequence
atgacggccctgcgccttctccagagaatgaagcgggactggatgcataccgggagacgcccatccggtctgtgtggcgcagctctactcgtagcagccaggatgcatgattttcggagaacagtgaaggaggtgatctctgttgtgaaagtgtgtgaaagcaccctgagaaaacgcctgaccgagttcgaggacacccccaccagccagcttactatcgacgagttcatgaaaattgatctggaggaggaatgcgacccaccaagttataccgcgggacagaggaaactgcgcatgaagcaactcgagcaggtgctcagcaagaaacttgaggaagttgagggtgagatctcttcataccaggacgcaatagaaatcgaactggaaaacagtaggccgaaggccaaggggggtctggcgtctcttgccaaagacggatcgaccgaagacaccgcctcctcattgtag

SEQ ID NO: 281130 - DNA, 408 bp, Artificial Sequence
  derived and/or modified sequence
atgaccgccctgagactgctgcagagaatgaagagagactggatgcacaccggcagaagacccagcggcctgtgcggcgccgccctgctggtggccgccagaatgcacgacttcagaagaaccgtgaaggaggtgatcagcgtggtgaaggtgtgcgagagcaccctgagaaagagactgaccgagttcgaggacacccccaccagccagctgaccatcgacgagttcatgaagatcgacctggaggaggagtgcgaccccccccccatcgaggagggcggccagaccgaggccagagagcccccccaggccagcagctgggagggccccagcaccaccagaagaagaagccagctgtggcacggctgccccggctgcggcagaggcggcttcaccctgtgcccctag

SEQ ID NO: 281131 - DNA, 555 bp, Artificial Sequence
  derived and/or modified sequence
atgaccgccctgagactgctgcagagaatgaagagagactggatgcacaccggcagaagacccagcggcctgtgcggcgccgccctgctggtggccgccagaatgcacgacttcagaagaaccgtgaaggaggtgatcagcgtggtgaaggtgtgcgagagcaccctgagaaagagactgaccgagttcgaggacacccccaccagccagctgaccatcgacgagttcatgaagatcgacctggaggaggagtgcgacccccccagctacaccgccggccagagaaagctgagaatgaagcagctggagcaggtgctgagcaagaagctggaggaggtggagggcgagatcagcagctaccaggacgccatcgagatcgagctggagaacagcccccccagcagaagagagggcagaagaagacccgagagcctgcccagacccctgagaggcaaggcccccgtgcccctggtgggcggcctgagcagcggcatggccgcccccgacgtggccgagggcgccagcccctgcgtgctgagaagaggctggccctag

SEQ ID NO: 281132 - DNA, 1422 bp, Artificial Sequence
  derived and/or modified sequence
atgaccgccctgagactgctgcagagaatgaagagagactggatgcacaccggcagaagacccagcggcctgtgcggcgccgccctgctggtggccgccagaatgcacgacttcagaagaaccgtgaaggaggtgatcagcgtggtgaaggtgtgcgagagcaccctgagaaagagactgaccgagttcgaggacacccccaccagccagctgaccatcgacgagttcatgaagatcgacctggaggaggagtgcgacccccccagctacaccgccggccagagaaagctgagaatgaagcagctggagcaggtgctgagcaagaagctggaggaggtggagggcgagatcagcagctaccaggacgccatcgagatcgagctggagaacagcagacccaaggccaagggcggcctggccagcctggccaaggacggcagcaccgaggacaccgccagcagcctgtgcggcgaggaggacaccgaggacgaggagctggaggccgccgccagccacctgaacaaggacctgtacagagagctgctgggcggcgcccccggcagcagcgaggccgccggcagccccgagtggggcggcagaccccccgccctgggcagcctgctggaccccctgcccaccgccgccagcctgggcatcagcgacagcatcagagagtgcatcagcagccagagcagcgaccccaaggacgccagcggcgacggcgagctggacctgagcggcatcgacgacctggagatcgacagatacatcctgaacgagagcgaggccagagtgaaggccgagctgtggatgagagagaacgccgagtacctgagagagcagagagagaaggaggccagaatcgccaaggagaaggagctgggcatctacaaggagcacaagcccaagaagagctgcaagagaagagagcccatccaggccagcaccgccagagaggccatcgagaagatgctggagcagaagaagatcagcagcaagatcaactacagcgtgctgagaggcctgagcagcgccggcggcggcagcccccacagagaggacgcccagcccgagcacagcgccagcgccagaaagctgagcagaagaagaacccccgccagcagaagcggcgccgaccccgtgaccagcgtgggcaagagactgagacccctggtgagcacccagcccgccaagaaggtggccaccggcgaggccctgctgcccagcagccccaccctgggcgccgagcccgccagaccccaggccgtgctggtggagagcggccccgtgagctaccacgccgacgaggaggccgacgaggaggagcccgacgaggaggacggcgagccctgcgtgagcgccctgcagatgatgggcagcaacgactacggctgcgacggcgacgaggacgacggctactag

SEQ ID NO: 281133 - DNA, 714 bp, Artificial Sequence
  derived and/or modified sequence
atgaccgccctgagactgctgcagagaatgaagagagactggatgcacaccggcagaagacccagcggcctgtgcggcgccgccctgctggtggccgccagaatgcacgacttcagaagaaccgtgaaggaggtgatcagcgtggtgaaggtgtgcgagagcaccctgagaaagagactgaccgagttcgaggacacccccaccagccagctgaccatcgacgagttcatgaagatcgacctggaggaggagtgcgacccccccagctacaccgccggccagagaaagctgagaatgaagcagctggagcaggtgctgagcaagaagctggaggaggtggagggcgagatcagcagctaccaggacgccatcgagatcgagctggagaacagcagacccaaggccaagggcggcctggccagcctggccaaggacggcagcaccgaggacaccgccagcagcctgtgcggcgaggaggacaccgaggacgaggagctggaggccgccgccagccacctgaacaaggacctgtacagagagctgctgggcggcgcccccggcagcagcgaggccgccggcagccccgagtggggcggcagaccccccgccctgggcagcctgctggaccccctgcccaccgccgccagcctgggcatcagcgacagcatcagagagtgcatcagcagccagagcagcgaccccagcgagttctag

SEQ ID NO: 281134 - DNA, 138 bp, Artificial Sequence
  derived and/or modified sequence
atgaccgccctgagactgctgcagagaatgaagagagactggatgcacaccggcagaagacccagcggcctgtgcggcgccgccctgctggtggccgccagaatgcacgacttcagaagaaccgtgaaggaggtgtag

SEQ ID NO: 281135 - DNA, 468 bp, Artificial Sequence
  derived and/or modified sequence
atgaccgccctgagactgctgcagagaatgaagagagactggatgcacaccggcagaagacccagcggcctgtgcggcgccgccctgctggtggccgccagaatgcacgacttcagaagaaccgtgaaggaggtgatcagcgtggtgaaggtgtgcgagagcaccctgagaaagagactgaccgagttcgaggacacccccaccagccagctgaccatcgacgagttcatgaagatcgacctggaggaggagtgcgacccccccagctacaccgccggccagagaaagctgagaatgaagcagctggagcaggtgctgagcaagaagctggaggaggtggagggcgagatcagcagctaccaggacgccatcgagatcgagctggagaacagcagacccaaggccaagggcggcctggccagcctggccaaggacggcagcaccgaggacaccgccagcagcctgtag

SEQ ID NO: 281136 - protein, 318 aa, Artificial Sequence
  derived and/or modified sequence
MPKRGKKGAVAEDGDELRTEPEAKKSKTAAKKNDKEAAGEGPALYEDPPDQKTSPSGKPATLKICSWNVDGLRAWIKKKGLDWVKEEAPDILCLQETKCSENKLPAELQELPGLSHQYWSAPSDKEGYSGVGLLSRQCPLKVSYGIGDEEHDQEGRVIVAEFDSFVLVTAYVPNAGRGLVRLEYRQRWDEAFRKFLKGLASRKPLVLCGDLNVAHEEIDLRNPKGNKKNAGFTPQERQGFGELLQAVPLADSFRHLYPNTPYAYTFWTYMMNARSKNVGWRLDYFLLSHSLLPALCDSKIRSKALGSDHCPITLYLAL

SEQ ID NO: 281137 - protein, 263 aa, Artificial Sequence
  derived and/or modified sequence
MPKRGKKGAVAEDGDELRTEPEAKKSKTAAKKNDKEAAGEGPALYEDPPDQKTSPSGKPATLKICSWNVDGLRAWIKKKGLDWVKEEAPDILCLQETKCSENKLPAELQELPGLSHQYWSAPSDKEGYSGVGLLSRQCPLKVSYGIGDEEHDQEGRVIVAEFDSFVLVTAYVPNAGRGLVRLEYRQRWDEAFRKFLKGLASRKPLVLCGDLNVAHEEIDLRNPKGNKKNAGFTPQERQGFGELLQAVPLADSFRHLYPNTPYA

SEQ ID NO: 281138 - protein, 174 aa, Artificial Sequence
  derived and/or modified sequence
MPKRGKKGAVAEDGDELRTEPEAKKSKTAAKKNDKEAAGEGPALYEDPPDQKTSPSGKPATLKICSWNVDGLRAWIKKKGLDWVKEEAPDILCLQETKCSENKLPAELQELPGLSHQYWSAPSDKEGYSGVGLLSRQCPLKVSYGIGDEEHDQEGRVIVAEFDSFVLVTAYVPN

SEQ ID NO: 281139 - protein, 108 aa, Artificial Sequence
  derived and/or modified sequence
MPKRGKKGAVAEDGDELRTEPEAKKSKTAAKKNDKEAAGEGPALYEDPPDQKTSPSGKPATLKICSWNVDGLRAWIKKKGLDWVKEEAPDILCLQETKCSENKLPAEL

SEQ ID NO: 281140 - protein, 146 aa, Artificial Sequence
  derived and/or modified sequence
MPKRGKKGAVAEDGDELRTEPEAKKSKTAAKKNDKEAAGEGPALYEDPPDQKTSPSGKPATLKICSWNVDGLRAWIKKKGLDWVKEEAPDILCLQETKCSENKLPAELQELPGLSHQYWSAPSDKEGYSGVGLLSRQCPLKVSYGI

SEQ ID NO: 281141 - DNA, 957 bp, Artificial Sequence
  derived and/or modified sequence
atgccaaagcgcggaaaaaaaggtgctgtggccgaggatggagatgagcttcgaactgaacctgaagccaagaagtcaaagactgctgcgaagaagaacgacaaagaagccgcaggtgagggccccgccctttacgaagatccccccgaccagaaaacctctccatctggaaagcctgccacactgaaaatttgttcctggaatgtggacggcctccgcgcctggattaaaaagaagggactggattgggtgaaggaggaggctcccgatatcttgtgtttacaggaaactaaatgcagcgaaaacaagttgcctgcggagctccaggagctaccggggctcagccaccagtattggagcgcccccagcgacaaagaaggctatagtggggtcgggctcctgtcacggcagtgtcccttaaaagtgtcttacggcatcggcgacgaggagcatgatcaggaaggtcgggtaattgtcgcggagtttgatagcttcgtgctggtgactgcctacgtgcctaatgccgggaggggtctagttaggttagagtatagacagagatgggatgaagcgtttaggaaatttctgaaaggcctcgcctcacggaaacctttggtgctgtgtggggatctgaacgtggctcacgaagagatcgaccttcggaatcccaagggaaataaaaaaaacgcaggcttcactccacaagaacggcagggatttggagagctgctgcaggccgtaccgttggcagactccttccgacacctctatcccaataccccttatgcttacaccttttggacttatatgatgaacgcaaggtccaagaatgtgggttggcgcctggattactttcttctgtcccactccctgctgcccgctctttgcgacagcaagatccggagtaaggcactgggtagcgatcactgtcccattaccctatacctcgctctctag

SEQ ID NO: 281142 - DNA, 792 bp, Artificial Sequence
  derived and/or modified sequence
atgccaaaaaggggaaagaaaggagccgttgctgaggacggtgacgaactgcggactgagccggaggccaagaaatcgaagaccgccgctaaaaaaaacgacaaggaagctgctggggaggggccggctttgtatgaagacccccccgatcagaaaactagtcccagcgggaagcccgcaaccctgaagatttgctcatggaatgtggacggcctcagagcttggatcaaaaaaaagggcctagactgggtgaaagaggaggcacctgacatactgtgtctgcaggaaacaaagtgttcagagaacaagctcccggcagaattgcaggaacttccaggtctgagtcaccagtattggagcgctccttccgacaaagagggttactccggagtcggcctactgtccaggcagtgtccgctgaaggtttcctatggcataggcgatgaggagcacgaccaagaggggcgcgttatcgtggcagaatttgattcttttgtcctcgtgaccgcctatgtgcctaatgctggacggggcctcgtgaggcttgagtatcggcagcggtgggatgaggctttcagaaaatttctgaaggggttggcctccaggaagccactggtcctgtgcggagacctgaacgtagcacacgaggagatcgatctcagaaatcccaaaggcaacaagaagaatgcaggcttcaccccacaggagcggcagggctttggtgagttgctccaggccgtgccacttgcagacagctttcggcacctttatcctaacacgccatacgcctag

SEQ ID NO: 281143 - DNA, 957 bp, Artificial Sequence
  derived and/or modified sequence
atgccaaaacgcggtaagaagggggcagtcgccgaagacggagatgagcttcgcacagagcctgaagcgaaaaaaagcaaaaccgcagcgaagaagaacgataaggaggcagccggagaaggaccagcgttgtatgaggatcctccagatcagaaaaccagccctagcggcaaaccagcgacgctcaagatctgttcctggaatgtggacggtcttagggcctggataaaaaagaagggcttggattgggtcaaagaagaggctcctgacatcctgtgcctgcaagaaactaagtgctccgagaataaattacctgccgagttgcaagagctgcccgggctgtctcaccagtattggtcagcaccaagcgacaaggaaggatattccggtgtcggcctcctctcaagacaatgtcctctcaaggtcagttacggtattggcgacgaggagcacgaccaggagggtcgagtcattgtggccgaattcgattcctttgtacttgtgacagcatacgtcccaaatgctgggcgcggacttgtccgcctcgagtaccgccagcggtgggatgaggcttttaggaagtttttgaaggggcttgcctctcggaagccccttgtgctgtgcggggacctgaatgtggcacacgaagagatagatctgcgaaatcccaagggcaacaagaagaacgcgggttttacaccccaggagcggcagggctttggggagttgcttcaagctgtcccactggccgactcttttaggcacctgtatcctaacactccatacgcctataccttctggacatatatgatgaacgcaagatccaaaaacgtaggatggcggctggattatttcttattgtctcatagtctgctgccggcactgtgtgactcaaagatcagaagcaaggcacttggtagtgatcactgcccaattacactgtatctagccctgtag

SEQ ID NO: 281144 - DNA, 525 bp, Artificial Sequence
  derived and/or modified sequence
atgccaaaaaggggcaagaaaggtgccgtggcagaagacggagatgagctacgaaccgaaccagaagccaaaaagtctaagacggccgcgaaaaagaatgacaaagaggccgctggcgaaggacctgccttgtatgaggatcctcccgaccagaaaacctccccatctggcaaacccgcgaccctcaaaatctgttcttggaatgtggatggcttgcgagcttggattaagaagaaagggctggactgggtgaaagaagaagcccccgatattctttgtcttcaagaaaccaaatgctctgaaaacaagctcccagcggagttgcaggagttgcctgggcttagccaccagtactggtctgctccgagcgacaaggaaggctacagtggagtaggactgctgagccgtcagtgtccactgaaggtgtcatatggaatcggcgacgaagaacatgaccaagagggtcgagtcatagtagcggaattcgatagcttcgtgctcgtaaccgcttacgtcccaaattag

SEQ ID NO: 281145 - DNA, 327 bp, Artificial Sequence
  derived and/or modified sequence
atgcccaagagggggaagaaaggtgcagttgcagaagatggggatgagctgcggaccgaacccgaggccaagaagtcgaaaaccgcggcaaagaagaatgataaggaggccgcgggtgaaggtcccgcactgtacgaggatccaccagatcagaaaacaagcccatccggcaagcccgctacactcaagatctgcagctggaatgtggacggcctgagggcttggattaaaaaaaaaggtcttgactgggtcaaagaagaggcacccgatatactatgtctgcaggagaccaagtgttctgagaacaagttgcctgcggagttgtag

SEQ ID NO: 281146 - DNA, 441 bp, Artificial Sequence
  derived and/or modified sequence
atgcccaagagagggaagaagggcgcagtcgccgaagacggggatgagcttagaactgagcccgaggccaaaaaatcaaaaactgcagcaaaaaagaatgacaaggaagctgctggcgaagggcctgctctctatgaggaccctcccgatcagaaaacaagtcctagcggaaaaccggcaactttaaagatttgcagctggaatgttgacggacttcgtgcatggataaaaaaaaagggcctggactgggtcaaagaggaggcacccgacattctgtgccttcaagagacaaaatgctctgagaataagctcccagcagagctgcaggaactccctggcttgtcccatcagtactggagcgctccatctgataaggaagggtacagcggagtgggcctgctcagtcgccagtgtcccctgaaggtctcttacggcatttag

SEQ ID NO: 281147 - DNA, 957 bp, Artificial Sequence
  derived and/or modified sequence
atgcccaagaggggcaagaagggagctgtggccgaggatggagatgagctgaggacagagcctgaggccaagaagagcaagacagctgccaagaagaatgacaaggaggccgccggggagggccctgccctgtatgaggaccccccagaccagaagaccagccccagcggcaagccagccaccctgaagatctgctcctggaatgtggatggcctgcgggcctggatcaagaagaagggcctggactgggtgaaggaggaggccccagacatcctgtgcctgcaggagaccaagtgcagcgagaacaagctgcctgctgagctgcaggagctgcccggcctgagccaccagtactggagcgcccccagcgacaaggagggctacagcggcgtgggcctgctgagccggcagtgccccctgaaggtgtcctatggaattggagatgaggagcatgaccaggagggccgggtcatcgtggccgagtttgacagctttgtgctggtgacagcctacgtgcccaatgccggccggggcctggtgcggctggagtaccggcagcgctgggatgaggccttcaggaagttcctgaagggcctggccagcaggaagcccctggtgctgtgtggggacctgaatgtggcccacgaggagattgacctgaggaaccccaagggcaacaagaagaatgccggcttcaccccccaggagcggcagggctttggagagctgctgcaggccgtgcccctggccgacagcttccgccacctgtaccccaacaccccctatgcctacaccttctggacctacatgatgaatgcccggagcaagaatgtgggctggaggctggactacttcctgctgagccacagcctgctgcctgccctgtgtgacagcaagatccgcagcaaggccctgggcagtgaccactgccccatcaccctgtacctggccctgtag

SEQ ID NO: 281148 - DNA, 792 bp, Artificial Sequence
  derived and/or modified sequence
atgcccaagaggggcaagaagggagctgtggccgaggatggagatgagctgaggacagagcctgaggccaagaagagcaagacagctgccaagaagaatgacaaggaggccgccggggagggccctgccctgtatgaggaccccccagaccagaagaccagccccagcggcaagccagccaccctgaagatctgctcctggaatgtggatggcctgcgggcctggatcaagaagaagggcctggactgggtgaaggaggaggccccagacatcctgtgcctgcaggagaccaagtgcagcgagaacaagctgcctgctgagctgcaggagctgcccggcctgagccaccagtactggagcgcccccagcgacaaggagggctacagcggcgtgggcctgctgagccggcagtgccccctgaaggtgtcctatggaattggagatgaggagcatgaccaggagggccgggtcatcgtggccgagtttgacagctttgtgctggtgacagcctacgtgcccaatgccggccggggcctggtgcggctggagtaccggcagcgctgggatgaggccttcaggaagttcctgaagggcctggccagcaggaagcccctggtgctgtgtggggacctgaatgtggcccacgaggagattgacctgaggaaccccaagggcaacaagaagaatgccggcttcaccccccaggagcggcagggctttggagagctgctgcaggccgtgcccctggccgacagcttccgccacctgtaccccaacaccccctatgcctag

SEQ ID NO: 281149 - DNA, 525 bp, Artificial Sequence
  derived and/or modified sequence
atgcccaagaggggcaagaagggagctgtggccgaggatggagatgagctgaggacagagcctgaggccaagaagagcaagacagctgccaagaagaatgacaaggaggccgccggggagggccctgccctgtatgaggaccccccagaccagaagaccagccccagcggcaagccagccaccctgaagatctgctcctggaatgtggatggcctgcgggcctggatcaagaagaagggcctggactgggtgaaggaggaggccccagacatcctgtgcctgcaggagaccaagtgcagcgagaacaagctgcctgctgagctgcaggagctgcccggcctgagccaccagtactggagcgcccccagcgacaaggagggctacagcggcgtgggcctgctgagccggcagtgccccctgaaggtgtcctatggaattggagatgaggagcatgaccaggagggccgggtcatcgtggccgagtttgacagctttgtgctggtgacagcctacgtgcccaactag

SEQ ID NO: 281150 - DNA, 327 bp, Artificial Sequence
  derived and/or modified sequence
atgcccaagaggggcaagaagggagctgtggccgaggatggagatgagctgaggacagagcctgaggccaagaagagcaagacagctgccaagaagaatgacaaggaggccgccggggagggccctgccctgtatgaggaccccccagaccagaagaccagccccagcggcaagccagccaccctgaagatctgctcctggaatgtggatggcctgcgggcctggatcaagaagaagggcctggactgggtgaaggaggaggccccagacatcctgtgcctgcaggagaccaagtgcagcgagaacaagctgcctgctgagctgtag

SEQ ID NO: 281151 - DNA, 441 bp, Artificial Sequence
  derived and/or modified sequence
atgcccaagaggggcaagaagggagctgtggccgaggatggagatgagctgaggacagagcctgaggccaagaagagcaagacagctgccaagaagaatgacaaggaggccgccggggagggccctgccctgtatgaggaccccccagaccagaagaccagccccagcggcaagccagccaccctgaagatctgctcctggaatgtggatggcctgcgggcctggatcaagaagaagggcctggactgggtgaaggaggaggccccagacatcctgtgcctgcaggagaccaagtgcagcgagaacaagctgcctgctgagctgcaggagctgcccggcctgagccaccagtactggagcgcccccagcgacaaggagggctacagcggcgtgggcctgctgagccggcagtgccccctgaaggtgtcctatggcatctag

SEQ ID NO: 281152 - DNA, 957 bp, Artificial Sequence
  derived and/or modified sequence
atgcccaagcggggcaagaagggcgccgtggccgaggacggcgacgagctccgcactgaacccgaagcaaaaaaaagcaagacggccgctaagaagaacgataaagaagccgccggagagggtcccgcactctacgaggatccgccagaccagaaaacgtctccttccgggaagccagctaccctgaaaatttgttcgtggaatgttgacggcctccgcgcctggatcaagaagaagggcctggattgggttaaggaagaggctcctgacatcctctgtctccaggaaacgaaatgctcagagaataaactccctgccgaattgcaggagctcccaggtttatctcaccagtactggtctgccccttccgacaaggaagggtattctggggttgggctgctctcccggcaatgccctctgaaagtttcttatggtattggagatgaagagcatgaccaggagggccgggtcattgtggccgaattcgactccttcgtacttgtgacagcttacgtgcctaacgccggccgcggcctggttcgacttgagtacaggcagagatgggacgaggctttcaggaagttcttgaaaggactggcctcgcgtaaaccactggtattgtgtggcgatctgaatgtagctcatgaggaaattgatctccgaaatcctaagggcaataagaaaaacgccggatttaccccccaggaaagacaagggttcggagagctcctgcaggctgtacctctggcggactcgttcagacacctctatcccaataccccatacgcgtatacgttctggacgtatatgatgaatgctagatctaaaaatgtggggtggagacttgactattttctcctcagccacagcctattgcccgccctgtgtgactcgaagatccgcagcaaggccttggggtcggaccactgtcctattactctgtacctggctctttag

SEQ ID NO: 281153 - DNA, 792 bp, Artificial Sequence
  derived and/or modified sequence
atgcccaagcggggcaagaagggcgccgtggccgaggacggcgacgagttgcgcaccgagccggaggctaagaagagtaaaaccgctgcaaagaagaatgacaaggaggccgcaggggagggccctgccttatatgaggacccccccgaccagaagaccagcccttctggaaaacctgctacactgaagatttgctcatggaacgtagacggccttcgggcatggattaaaaagaagggactagattgggtgaaggaggaggcccctgatatcctgtgtttgcaggagacgaaatgcagcgagaataagctaccagctgagctccaggaactgccgggcctatcacatcaatattggtccgcgccttcggataaggaggggtacagcggcgtcggcctcttgtctagacaatgcccgcttaaggtctcatacgggatcggggacgaggaacacgatcaagagggacgggtgattgtagcggagttcgatagctttgtcctggtgacagcctatgttccaaatgccggcaggggactggtgcgactggagtatcgccaacggtgggatgaggccttccgaaagtttctcaaaggtttggccagtcgcaagcctttagttctctgtggcgatttaaatgtggctcatgaggagattgatctgagaaaccccaagggaaataagaaaaacgccggtttcacaccacaggagcgacagggcttcggggagctcctccaggctgtgcccttggccgactccttccgacacttatacccaaatacgccttacgcctag

SEQ ID NO: 281154 - DNA, 957 bp, Artificial Sequence
  derived and/or modified sequence
atgcccaagcggggcaagaagggcgccgtggccgaggacggcgacgagctgaggactgaacctgaggctaagaaatctaaaaccgccgccaagaaaaatgacaaagaggccgccggggaaggaccagcactgtacgaggacccacctgatcaaaaaacttcaccgagtggtaagccagccaccctgaagatctgctcttggaacgtggatgggctgcgagcgtggatcaaaaaaaaggggctggattgggtcaaggaggaagcacctgatatcctttgcttgcaagagaccaaatgcagtgagaataagctgccagccgagttgcaggagctgcctggcctgtcgcatcagtactggtctgcaccatctgacaaggaaggttattctggtgtgggcttactgagcaggcaatgccctttgaaagtgagttatggtatcggcgatgaggagcacgaccaggaggggagagtgattgtggccgaattcgacagttttgtcttggtgaccgcttacgtgccaaacgcgggaagggggttggtgcgtttggaatatcgccagagatgggatgaagcgttccggaagtttctgaaggggctcgcttcaagaaagcccttggtgctgtgcggtgacctaaacgttgcacacgaagaaattgatctgcgcaaccccaagggcaacaagaaaaacgctgggtttacaccgcaggaaaggcagggtttcggtgagctcctgcaggctgtaccgctcgctgattcctttaggcacctgtatcctaatacaccttacgcttacacgttctggacctacatgatgaatgctcgctccaaaaacgtcggctggagattggattatttcttgctgtcccacagtcttcttcccgcactgtgcgatagtaagatcagaagcaaggccctgggcagcgatcactgcccaataaccctgtacctcgctctttag

SEQ ID NO: 281155 - DNA, 525 bp, Artificial Sequence
  derived and/or modified sequence
atgcccaagcggggcaagaagggcgccgtggccgaggacggcgacgagctgcgcactgagcctgaagccaagaagagcaagacggccgcgaaaaagaacgataaggaggccgcaggcgaaggaccagctctctatgaggatccccctgatcaaaaaacctcaccttcaggaaaacctgccactctgaaaatttgctcctggaacgtcgatgggcttagagcctggataaagaagaagggactcgactgggtgaaagaggaggccccagacatcctgtgtctgcaagagacaaaatgcagcgaaaacaaattgcctgccgaattgcaagaactgcccggcctgtctcaccagtactggtctgccccatcggataaggagggctactccggtgtagggctgctgagtcgtcagtgccctctgaaggtgtcttacgggattggcgacgaagagcacgaccaggaagggagggtgatcgtcgccgaatttgattcctttgtactggttaccgcctatgtacccaactag

SEQ ID NO: 281156 - DNA, 327 bp, Artificial Sequence
  derived and/or modified sequence
atgcccaagcggggcaagaagggcgccgtggccgaggacggcgacgagctccgaacagagccagaagccaagaagagtaaaaccgctgccaaaaagaatgataaagaagctgcgggcgagggtccagctctgtatgaagacccaccggatcaaaagaccagcccaagcggcaaacctgcaacactgaaaatttgtagctggaacgtggacggcttgcgcgcatggatcaaaaagaaaggcctggactgggtaaaggaggaagcccctgacattttgtgtctgcaggaaacaaaatgttccgagaacaagttaccagctgaactgtag

SEQ ID NO: 281157 - DNA, 441 bp, Artificial Sequence
  derived and/or modified sequence
atgcccaagcggggcaagaagggcgccgtggccgaggacggcgacgaactacgaactgagcccgaggccaaaaagagcaaaaccgccgctaaaaaaaacgataaagaggcggccggggaagggcccgcgctttacgaggatccaccggatcagaaaacatctcctagcgggaagccagccaccctgaagatctgctcttggaacgtggacggcctacgggcgtggattaagaagaagggcctggattgggttaaagaggaagctcccgacatcctgtgtctccaggaaacaaagtgcagtgagaacaaactcccggccgaattgcaggaactgcctggcctctcgcaccagtattggagtgcccccagcgacaaagaggggtactctggcgttggcctcttaagccggcagtgtcccctgaaagttagctacggaatttag

SEQ ID NO: 281158 - DNA, 957 bp, Artificial Sequence
  derived and/or modified sequence
atgccgaagcgcggaaagaaaggtgctgtcgctgaggacggggatgaattgcgaacggaacccgaggccaaaaaatccaaaaccgctgccaaaaagaacgataaagaggccgctggggaggggccagccttgtacgaagatcctccagatcagaagacatccccttccggaaaaccagccaccctgaaaatatgctcctggaatgtggacggtttgcgagcatggataaagaagaaggggctggattgggtgaaagaagaagctcccgatattctgtgcctgcaggaaacaaagtgttcagagaacaaattgccagcagagctccaggagctacctggcctaagccatcaatactggtcagcgccatctgacaaggaaggctactccggcgtcggtctgttgagtagacagtgcccacttaaagtttcctatggcattggtgacgaggaacatgaccaggaggggcgtgtcatagtggcagaatttgactcttttgtcctggtgacggcttacgttcccaacgctggacgcggacttgtacgcctcgaatatcggcaacgttgggacgaggcctttcgaaagtttctgaaaggcttggcatcacggaagccacttgtattatgcggggacctcaacgtcgcacacgaagagatcgatctgcggaatccaaaggggaataaaaaaaatgcgggttttactccccaggaacgtcagggcttcggggagttactccaggctgtccctcttgccgacagtttcaggcacctatatccaaatactccttatgcctacactttttggacctacatgatgaacgccagatccaagaatgtcgggtggcggctcgactatttcttactgtcccacagcctgctcccggcattgtgcgactccaaaatccgcagcaaggcgctcggatctgatcactgccccatcaccttgtacctggccctctag

SEQ ID NO: 281159 - DNA, 792 bp, Artificial Sequence
  derived and/or modified sequence
atgccaaaaaggggtaagaagggtgctgtggcagaagatggggatgagttacgaaccgaacccgaggccaagaagagtaagaccgcggctaagaagaacgacaaggaggccgcaggggagggtccggcactgtatgaagatcccccagatcagaaaacctccccgagcggaaaaccggctactctgaagatttgtagctggaatgtggacgggctccgcgcatggatcaagaagaaagggctggactgggttaaggaagaggcacctgacatactgtgtctccaggagacaaaatgctccgagaataaacttcccgcagaactccaggaactccctggacttagccatcaatactggagtgcgccttctgacaaggaagggtattccggtgttggtctgctgagcagacagtgcccacttaaggtctcttacggtattggcgacgaagagcatgaccaggaaggtcgagtgatcgtggcggaattcgatagcttcgtcctggtcactgcatacgtgcccaatgctggtcgtggacttgtgcgccttgagtaccgacaacgctgggacgaagcattccggaagttcctcaagggtctggccagcagaaaaccactagtgctctgcggggacctgaacgtcgcccacgaggagatcgatctgaggaaccctaaaggaaacaaaaagaacgccggtttcacacctcaggaacgccaaggattcggggagctgctgcaagccgtgccactcgctgattctttccgtcatctgtaccccaatacaccctatgcttag

SEQ ID NO: 281160 - DNA, 957 bp, Artificial Sequence
  derived and/or modified sequence
atgcctaaacggggtaagaagggagcggttgcggaggatggtgacgaactgcgcactgagcccgaggctaaaaaaagtaagaccgcagcaaagaaaaatgacaaggaggctgcgggagaagggcctgcactgtatgaggacccccctgatcagaagacttctccatcaggtaaaccggcaacactgaaaatctgctcctggaacgtggatggactgagagcctggattaaaaagaaggggctggactgggtgaaggaggaagctcccgacattttgtgcttgcaggaaaccaaatgttcagagaataagctcccggctgaactacaagaactgccgggtcttagccaccaatattggagtgctccgagtgacaaggagggctattctggcgttggactattgtcgagacaatgtccactcaaggtgtcctacggaatcggggatgaagaacacgaccaggagggcagagtgatcgttgccgaattcgattcctttgttttagtcacagcatacgtccccaatgccggaagggggctggtacggttagaatacaggcaacgatgggatgaagcttttcgaaagttcctgaagggcctggcatctcgaaaaccgctggtgctgtgcggggacctgaatgtagcccacgaggagatcgacctgcgcaatcccaagggcaacaagaagaatgccggtttcacaccccaggagcggcagggctttggggaactcctccaggcagtgccccttgctgactctttccgtcacctttaccctaataccccctatgcctataccttctggacttatatgatgaacgccagaagcaagaacgtgggctggaggctggattactttctcctgagccacagcttgttgcccgctttgtgtgattcaaaaattagaagtaaggcacttgggtctgaccattgcccaataacactgtacttggccctttag

SEQ ID NO: 281161 - DNA, 525 bp, Artificial Sequence
  derived and/or modified sequence
atgccaaagcgcggtaagaaaggcgcagtagcagaggacggagatgaactccgtaccgagcccgaggccaagaaaagcaagacagcggctaaaaagaacgacaaagaagctgccggagagggacctgccctgtacgaggatcctcccgaccagaaaacctcaccctctggaaagcccgcaactttgaagatctgcagctggaatgtggatggtcttagggcgtggattaagaagaaggggcttgactgggtgaaagaggaggcaccagatatcttatgtcttcaggagaccaagtgctctgagaacaaacttcctgccgaattacaggaactccccggactatctcaccagtactggtctgcgccttctgataaggaaggctattcaggagtgggactactgagcaggcagtgcccacttaaggtttcgtacgggattggggacgaagagcacgatcaagaagggagggttattgtcgctgaatttgatagcttcgttctggtcaccgcctatgtccccaattag

SEQ ID NO: 281162 - DNA, 327 bp, Artificial Sequence
  derived and/or modified sequence
atgcccaagcggggaaaaaagggcgctgtagccgaggatggggacgagctgagaacggagcctgaggctaaaaagagtaagaccgccgcaaagaagaacgataaagaagccgcaggggaaggtcctgcactatatgaagatcctcccgaccagaagacaagtccgtcaggaaagccggctactctaaaaatttgtagctggaacgttgacggactccgagcctggattaaaaaaaaaggcctggattgggttaaagaggaagcccctgacattctgtgtcttcaagagactaagtgtagcgagaacaaactcccggctgagctctag

SEQ ID NO: 281163 - DNA, 441 bp, Artificial Sequence
  derived and/or modified sequence
atgcctaagcggggtaagaagggcgcagtcgcagaagatggcgatgaactgaggaccgagccagaggcgaaaaaaagtaaaacagctgccaagaaaaacgataaagaggcggctggcgaagggcctgccctttatgaagaccctcctgaccagaagacctccccctccgggaaaccagcaaccctgaagatatgcagttggaacgtggacgggctccgcgcttggataaagaaaaaaggcctcgactgggtgaaggaagaagctcccgatattttgtgcctccaggaaaccaaatgtagcgaaaacaaactgcctgctgaactgcaagagctccctgggctgagccatcagtactggtccgctccgtccgataaggagggatactctggcgtgggcttgctgagcaggcagtgcccgctgaaggtaagctatggaatatag

SEQ ID NO: 281164 - DNA, 1484 bp, Artificial Sequence
  derived and/or modified sequence
ccgctacccacgtgggggctcagcgtgcacccttctttgtgctcgggttaggaggagctaggctgccatcgggccggtgcagatacggggttgctcttttgctcataagaggggcttcgctggcagtctgaacggcaagcttgagtcaggacccttaattaagatcctcaattggctggagggcagatctcgcgagtagggcaacgcggtaaaaatattgcttcggtgggtgacgcggtacagctgcccaagggcgttcgtaacgggaatgccgaagcgtgggaaaaagggagcggtggcggaagacggggatgagctcaggacagagccagaggccaagaagagtaagacggccgcaaagaaaaatgacaaagaggcagcaggagagggcccagccctgtatgaggaccccccagatcagaaaacctcacccagtggcaaacctgccacactcaagatctgctcttggaatgtggatgggcttcgagcctggattaagaagaaaggattagattgggtaaaggaagaagccccagatatactgtgccttcaagagaccaaatgttcagagaacaaactaccagctgaacttcaggagctgcctggactctctcatcaatactggtcagctccttcggacaaggaagggtacagtggcgtgggcctgctttcccgccagtgcccactcaaagtttcttacggcataggcgatgaggagcatgatcaggaaggccgggtgattgtggctgaatttgactcgtttgtgctggtaacagcatatgtacctaatgcaggccgaggtctggtacgactggagtaccggcagcgctgggatgaagcctttcgcaagttcctgaagggcctggcttcccgaaagccccttgtgctgtgtggagacctcaatgtggcacatgaagaaattgaccttcgcaaccccaaggggaacaaaaagaatgctggcttcacgccacaagagcgccaaggcttcggggaattactgcaggctgtgccactggctgacagctttaggcacctctaccccaacacaccctatgcctacaccttttggacttatatgatgaatgctcgatccaagaatgttggttggcgccttgattactttttgttgtcccactctctgttacctgcattgtgtgacagcaagatccgttccaaggccctcggcagtgatcactgtcctatcaccctatacctagcactgtgacaccacccctaaatcactttgagcctgggaaataagccccctcaactaccattccttctttaaacactcttcagagaaatctgcattctatttctcatgtataaaactaggaatcctccaaccaggctcctgtgatagagttcttttaagcccaagattttttatttgagggttttttgttttttaaaaaaaaattgaacaaagactactaatgactttgtttgaattatccacatgaaaataaagagccatagtttca

SEQ ID NO: 281165 - DNA, 1387 bp, Artificial Sequence
  derived and/or modified sequence
cttctttgtgctcgggttaggaggagctaggctgccatcgggccggtgcagatacggggttgctcttttgctcataagaggggcttcgctggcagtctgaacggcaacgcggtaaaaatattgcttcggtgggtgacgcggtacagctgcccaagggcgttcgtaacgggaatgccgaagcgtgggaaaaagggagcggtggcggaagacggggatgagctcaggacagagccagaggccaagaagagtaagacggccgcaaagaaaaatgacaaagaggcagcaggagagggcccagccctgtatgaggaccccccagatcagaaaacctcacccagtggcaaacctgccacactcaagatctgctcttggaatgtggatgggcttcgagcctggattaagaagaaaggattagattgggtaaaggaagaagccccagatatactgtgccttcaagagaccaaatgttcagagaacaaactaccagctgaacttcaggagctgcctggactctctcatcaatactggtcagctccttcggacaaggaagggtacagtggcgtgggcctgctttcccgccagtgcccactcaaagtttcttacggcataggcgatgaggagcatgatcaggaaggccgggtgattgtggctgaatttgactcgtttgtgctggtaacagcatatgtacctaatgcaggccgaggtctggtacgactggagtaccggcagcgctgggatgaagcctttcgcaagttcctgaagggcctggcttcccgaaagccccttgtgctgtgtggagacctcaatgtggcacatgaagaaattgaccttcgcaaccccaaggggaacaaaaagaatgctggcttcacgccacaagagcgccaaggcttcggggaattactgcaggctgtgccactggctgacagctttaggcacctctaccccaacacaccctatgcctacaccttttggacttatatgatgaatgctcgatccaagaatgttggttggcgccttgattactttttgttgtcccactctctgttacctgcattgtgtgacagcaagatccgttccaaggccctcggcagtgatcactgtcctatcaccctatacctagcactgtgacaccacccctaaatcactttgagcctgggaaataagccccctcaactaccattccttctttaaacactcttcagagaaatctgcattctatttctcatgtataaaactaggaatcctccaaccaggctcctgtgatagagttcttttaagcccaagattttttatttgagggttttttgttttttaaaaaaaaattgaacaaagactactaatgactttgtttgaattatccacatgaaaataaagagccatagtttca

SEQ ID NO: 281166 - DNA, 899 bp, Artificial Sequence
  derived and/or modified sequence
cccacgtgggggctcagcgtgcacccttctttgtgctcgggcaacgcggtaaaaatattgcttcggtgggtgacgcggtacagctgcccaagggcgttcgtaacgggaatgccgaagcgtgggaaaaagggagcggtggcggaagacggggatgagctcaggacagagccagaggccaagaagagtaagacggccgcaaagaaaaatgacaaagaggcagcaggagagggcccagccctgtatgaggaccccccagatcagaaaacctcacccagtggcaaacctgccacactcaagatctgctcttggaatgtggatgggcttcgagcctggattaagaagaaaggattagattgggtaaaggaagaagccccagatatactgtgccttcaagagaccaaatgttcagagaacaaactaccagctgaacttcaggagctgcctggactctctcatcaatactggtcagctccttcggacaaggaagggtacagtggcgtgggcctgctttcccgccagtgcccactcaaagtttcttacggcataggcgatgaggagcatgatcaggaaggccgggtgattgtggctgaatttgactcgtttgtgctggtaacagcatatgtacctaatgcaggccgaggtctggtacgactggagtaccggcagcgctgggatgaagcctttcgcaagttcctgaagggcctggcttcccgaaagccccttgtgctgtgtggagacctcaatgtggcacatgaagaaattgaccttcgcaaccccaaggggaacaaaaagaatgctggcttcacgccacaagagcgccaaggcttcggggaattactgcaggctgtgccactggctgacagctttaggcacctctaccccaacacaccctatgccta

SEQ ID NO: 281167 - DNA, 1433 bp, Artificial Sequence
  derived and/or modified sequence
aggtccgctacccacgtgggggctcagcgtgcacccttctttgtgctcgggttaggaggagctaggctgccatcgggccggtgcagatacggggttgctcttttgctcataagaggggcttcgctggcagtctgaacggcaagcttgagcaacgcggtaaaaatattgcttcggtgggtgacgcggtacagctgcccaagggcgttcgtaacgggaatgccgaagcgtgggaaaaagggagcggtggcggaagacggggatgagctcaggacagagccagaggccaagaagagtaagacggccgcaaagaaaaatgacaaagaggcagcaggagagggcccagccctgtatgaggaccccccagatcagaaaacctcacccagtggcaaacctgccacactcaagatctgctcttggaatgtggatgggcttcgagcctggattaagaagaaaggattagattgggtaaaggaagaagccccagatatactgtgccttcaagagaccaaatgttcagagaacaaactaccagctgaacttcaggagctgcctggactctctcatcaatactggtcagctccttcggacaaggaagggtacagtggcgtgggcctgctttcccgccagtgcccactcaaagtttcttacggcataggcgatgaggagcatgatcaggaaggccgggtgattgtggctgaatttgactcgtttgtgctggtaacagcatatgtacctaatgcaggccgaggtctggtacgactggagtaccggcagcgctgggatgaagcctttcgcaagttcctgaagggcctggcttcccgaaagccccttgtgctgtgtggagacctcaatgtggcacatgaagaaattgaccttcgcaaccccaaggggaacaaaaagaatgctggcttcacgccacaagagcgccaaggcttcggggaattactgcaggctgtgccactggctgacagctttaggcacctctaccccaacacaccctatgcctacaccttttggacttatatgatgaatgctcgatccaagaatgttggttggcgccttgattactttttgttgtcccactctctgttacctgcattgtgtgacagcaagatccgttccaaggccctcggcagtgatcactgtcctatcaccctatacctagcactgtgacaccacccctaaatcactttgagcctgggaaataagccccctcaactaccattccttctttaaacactcttcagagaaatctgcattctatttctcatgtataaaactaggaatcctccaaccaggctcctgtgatagagttcttttaagcccaagattttttatttgagggttttttgttttttaaaaaaaaattgaacaaagactactaatgactttgtttgaattatccacatgaaaataaagagccatagtttcag

SEQ ID NO: 281168 - DNA, 773 bp, Artificial Sequence
  derived and/or modified sequence
aggagctaggctgccatcgggccggtgcagatacggggttgctcttttgctcataagaggggcttcgctggcagtctgaacggcaagcttgagtcaggacccttaattaagatcctcaattggctggagggcagatctcgcgagtagggtacaaggcactatgaaatgatctagtttcgtgggcaacgcggtaaaaatattgcttcggtgggtgacgcggtacagctgcccaagggcgttcgtaacgggaatgccgaagcgtgggaaaaagggagcggtggcggaagacggggatgagctcaggacagagccagaggccaagaagagtaagacggccgcaaagaaaaatgacaaagaggcagcaggagagggcccagccctgtatgaggaccccccagatcagaaaacctcacccagtggcaaacctgccacactcaagatctgctcttggaatgtggatgggcttcgagcctggattaagaagaaaggattagattgggtaaaggaagaagccccagatatactgtgccttcaagagaccaaatgttcagagaacaaactaccagctgaacttcaggagctgcctggactctctcatcaatactggtcagctccttcggacaaggaagggtacagtggcgtgggcctgctttcccgccagtgcccactcaaagtttcttacggcataggcgatgaggagcatgatcaggaaggccgggtgattgtggctgaatttgactcgtttgtgctggtaacagcatatgtacctaatg

SEQ ID NO: 281169 - DNA, 566 bp, Artificial Sequence
  derived and/or modified sequence
ttctttgtgctcgggttaggaggagctaggctgccatcgggccggtgcagatacggggttgctcttttgctcataagaggggcttcgctggcagtctgaacggcaagcttgagtcaggacccttaattaagatcctcaattggctggagggcagatctcgcgagtagggtacaaggcaacgcggtaaaaatattgcttcggtgggtgacgcggtacagctgcccaagggcgttcgtaacgggaatgccgaagcgtgggaaaaagggagcggtggcggaagacggggatgagctcaggacagagccagaggccaagaagagtaagacggccgcaaagaaaaatgacaaagaggcagcaggagagggcccagccctgtatgaggaccccccagatcagaaaacctcacccagtggcaaacctgccacactcaagatctgctcttggaatgtggatgggcttcgagcctggattaagaagaaaggattagattgggtaaaggaagaagccccagatatactgtgccttcaagagaccaaatgttcagagaacaaactaccagctgaact

SEQ ID NO: 281170 - DNA, 671 bp, Artificial Sequence
  derived and/or modified sequence
cttctttgtgctcgggttaggaggagctaggctgccatcgggccggtgcagatacggggttgctcttttgctcataagaggggcttcgctggcagtctgaacggcaagcttgagtcaggacccttaattaagatcctcaattggctggagggcagatctcgcgagcaacgcggtaaaaatattgcttcggtgggtgacgcggtacagctgcccaagggcgttcgtaacgggaatgccgaagcgtgggaaaaagggagcggtggcggaagacggggatgagctcaggacagagccagaggccaagaagagtaagacggccgcaaagaaaaatgacaaagaggcagcaggagagggcccagccctgtatgaggaccccccagatcagaaaacctcacccagtggcaaacctgccacactcaagatctgctcttggaatgtggatgggcttcgagcctggattaagaagaaaggattagattgggtaaaggaagaagccccagatatactgtgccttcaagagaccaaatgttcagagaacaaactaccagctgaacttcaggagctgcctggactctctcatcaatactggtcagctccttcggacaaggaagggtacagtggcgtgggcctgctttcccgccagtgcccactcaaagtttcttacggcatag

SEQ ID NO: 281171 - DNA, 957 bp, Artificial Sequence
  derived and/or modified sequence
atgcccaagagaggcaagaagggcgccgtggccgaggacggcgacgagctgagaaccgagcccgaggccaagaagagcaagaccgccgccaagaagaacgacaaggaggccgccggcgagggccccgccctgtacgaggacccccccgaccagaagaccagccccagcggcaagcccgccaccctgaagatctgcagctggaacgtggacggcctgagagcctggatcaagaagaagggcctggactgggtgaaggaggaggcccccgacatcctgtgcctgcaggagaccaagtgcagcgagaacaagctgcccgccgagctgcaggagctgcccggcctgagccaccagtactggagcgcccccagcgacaaggagggctacagcggcgtgggcctgctgagcagacagtgccccctgaaggtgagctacggcatcggcgacgaggagcacgaccaggagggcagagtgatcgtggccgagttcgacagcttcgtgctggtgaccgcctacgtgcccaacgccggcagaggcctggtgagactggagtacagacagagatgggacgaggccttcagaaagttcctgaagggcctggccagcagaaagcccctggtgctgtgcggcgacctgaacgtggcccacgaggagatcgacctgagaaaccccaagggcaacaagaagaacgccggcttcaccccccaggagagacagggcttcggcgagctgctgcaggccgtgcccctggccgacagcttcagacacctgtaccccaacaccccctacgcctacaccttctggacctacatgatgaacgccagaagcaagaacgtgggctggagactggactacttcctgctgagccacagcctgctgcccgccctgtgcgacagcaagatcagaagcaaggccctgggcagcgaccactgccccatcaccctgtacctggccctgtag

SEQ ID NO: 281172 - DNA, 792 bp, Artificial Sequence
  derived and/or modified sequence
atgcccaagagaggcaagaagggcgccgtggccgaggacggcgacgagctgagaaccgagcccgaggccaagaagagcaagaccgccgccaagaagaacgacaaggaggccgccggcgagggccccgccctgtacgaggacccccccgaccagaagaccagccccagcggcaagcccgccaccctgaagatctgcagctggaacgtggacggcctgagagcctggatcaagaagaagggcctggactgggtgaaggaggaggcccccgacatcctgtgcctgcaggagaccaagtgcagcgagaacaagctgcccgccgagctgcaggagctgcccggcctgagccaccagtactggagcgcccccagcgacaaggagggctacagcggcgtgggcctgctgagcagacagtgccccctgaaggtgagctacggcatcggcgacgaggagcacgaccaggagggcagagtgatcgtggccgagttcgacagcttcgtgctggtgaccgcctacgtgcccaacgccggcagaggcctggtgagactggagtacagacagagatgggacgaggccttcagaaagttcctgaagggcctggccagcagaaagcccctggtgctgtgcggcgacctgaacgtggcccacgaggagatcgacctgagaaaccccaagggcaacaagaagaacgccggcttcaccccccaggagagacagggcttcggcgagctgctgcaggccgtgcccctggccgacagcttcagacacctgtaccccaacaccccctacgcctag

SEQ ID NO: 281173 - DNA, 525 bp, Artificial Sequence
  derived and/or modified sequence
atgcccaagagaggcaagaagggcgccgtggccgaggacggcgacgagctgagaaccgagcccgaggccaagaagagcaagaccgccgccaagaagaacgacaaggaggccgccggcgagggccccgccctgtacgaggacccccccgaccagaagaccagccccagcggcaagcccgccaccctgaagatctgcagctggaacgtggacggcctgagagcctggatcaagaagaagggcctggactgggtgaaggaggaggcccccgacatcctgtgcctgcaggagaccaagtgcagcgagaacaagctgcccgccgagctgcaggagctgcccggcctgagccaccagtactggagcgcccccagcgacaaggagggctacagcggcgtgggcctgctgagcagacagtgccccctgaaggtgagctacggcatcggcgacgaggagcacgaccaggagggcagagtgatcgtggccgagttcgacagcttcgtgctggtgaccgcctacgtgcccaactag

SEQ ID NO: 281174 - DNA, 327 bp, Artificial Sequence
  derived and/or modified sequence
atgcccaagagaggcaagaagggcgccgtggccgaggacggcgacgagctgagaaccgagcccgaggccaagaagagcaagaccgccgccaagaagaacgacaaggaggccgccggcgagggccccgccctgtacgaggacccccccgaccagaagaccagccccagcggcaagcccgccaccctgaagatctgcagctggaacgtggacggcctgagagcctggatcaagaagaagggcctggactgggtgaaggaggaggcccccgacatcctgtgcctgcaggagaccaagtgcagcgagaacaagctgcccgccgagctgtag

SEQ ID NO: 281175 - DNA, 441 bp, Artificial Sequence
  derived and/or modified sequence
atgcccaagagaggcaagaagggcgccgtggccgaggacggcgacgagctgagaaccgagcccgaggccaagaagagcaagaccgccgccaagaagaacgacaaggaggccgccggcgagggccccgccctgtacgaggacccccccgaccagaagaccagccccagcggcaagcccgccaccctgaagatctgcagctggaacgtggacggcctgagagcctggatcaagaagaagggcctggactgggtgaaggaggaggcccccgacatcctgtgcctgcaggagaccaagtgcagcgagaacaagctgcccgccgagctgcaggagctgcccggcctgagccaccagtactggagcgcccccagcgacaaggagggctacagcggcgtgggcctgctgagcagacagtgccccctgaaggtgagctacggcatctag

SEQ ID NO: 281176 - DNA, 957 bp, Artificial Sequence
  derived and/or modified sequence
atgcccaagcgcggcaagaaaggagccgtggccgaagacggagatgagttgcgaacagagcccgaggccaagaaatccaaaaccgcagccaagaaaaacgataaggaagctgctggggagggtcctgccctctatgaagaccccccagaccagaagacttccccaagcgggaagcctgctacccttaaaatctgttcctggaacgtcgacgggctgagagcctggataaagaagaagggactggattgggtaaaggaggaagcacctgatatcctatgtctgcaggaaaccaagtgtagtgagaacaaactgcctgcggagctgcaagagctgcccgggcttagccaccagtattggtcagcaccctccgacaaagaaggctattcgggcgtcggcttactgtcacggcagtgtcccttgaaggtgtcctatggaattggcgacgaggaacacgatcaagaggggcgggtgattgtggccgagttcgattccttcgtgctggtcaccgcttatgtcccaaacgctggacgcggtttagtgaggttggagtaccggcagaggtgggatgaagcttttagaaagttcctgaaaggcctggctagccgcaaacccctggtactttgcggtgacttaaacgtcgcacacgaggagatcgacctgcgcaaccctaaaggcaataaaaaaaatgctggttttacacctcaggagagacagggcttcggggaactcctgcaagcagtgccattagcagatagctttagacatctgtatcccaacacaccatacgcttacaccttttggacatacatgatgaacgcccggtctaaaaacgtcggatggcgcctcgattacttcctgctgtcacacagtttgttgcccgccctctgcgatagcaagatccggagcaaagcacttggtagcgatcattgcccaataaccctgtacctggccctgtag

SEQ ID NO: 281177 - DNA, 957 bp, Artificial Sequence
  derived and/or modified sequence
atgcccaagcggggcaagaagggcgccgtggccgaggacggcgacgagctacggactgagccagaagccaaaaagagcaaaacagctgccaagaaaaatgacaaagaagctgcaggcgagggccccgcactttatgaagatccccctgatcagaagacctccccaagcgggaaacctgcgacgcttaagatctgtagctggaatgttgatggactgagagcatggataaagaaaaaaggtctcgattgggtgaaggaggaagcacccgacattctttgcctccaggagacgaagtgctcagagaacaaattacctgcagagctgcaggaattaccgggcctctcccatcaatattggtccgcaccctcagataaagaagggtacagtggggtcggtctattatcacgtcagtgtcctttgaaggttagttacggaatcggtgacgaggagcacgatcaggaggggcgagtcatagtggctgagttcgattcctttgtgttggtgaccgcctacgtacctaatgccggcagagggctggtgagacttgagtaccggcagaggtgggatgaagcgttccgaaagttcctaaaaggactggcgtcgcgaaaaccacttgtgctgtgtggagacctaaatgtggcccacgaggagatcgatctgcgaaatccgaagggcaacaaaaagaatgccggatttactcctcaggagcgccagggctttggggaactgctccaggccgttccactggctgacagttttcgtcacctgtaccctaataccccttatgcatatacgttttggacctacatgatgaacgcgagatcgaagaacgtcggctggagactcgattactttctgctttcccactcactgctgcccgccctctgcgacagcaaaattcgcagtaaagccctcggatccgaccattgtcctatcacgctctacctggccctgtag

SEQ ID NO: 281178 - DNA, 957 bp, Artificial Sequence
  derived and/or modified sequence
atgcccaaacggggaaagaagggagctgttgcagaggacggcgatgagcttcgcactgagcctgaggctaaaaagtcaaagactgcagcaaagaaaaatgataaggaagccgcaggcgaggggccagctctctatgaggaccctcccgatcagaagacatcgccatcgggtaaaccggctacacttaagatttgctcttggaatgtagatgggttgagagcgtggattaagaagaaggggctggactgggtgaaggaggaggcacctgacatcctgtgcctacaggaaaccaaatgtagtgagaataagcttcccgctgagctccaggaactgcctggactgtcacaccagtactggagcgcaccctctgacaaggagggatactctggcgtgggcttattaagcagacagtgtccgctgaaggtgtcgtatggaataggggatgaagagcacgaccaggaaggtcgcgtgatcgtggctgaattcgattccttcgtgcttgtgaccgcatacgtccccaacgccggtcgaggtcttgtacgattggaatatcgtcagcgctgggatgaggcttttcgtaagtttcttaagggcctcgctagcagaaagcccttagtgctctgtggcgatttaaacgtggcacacgaggagatcgacctgcgtaaccccaaagggaacaagaaaaacgccggattcacaccacaagagcggcagggcttcggcgaactgttgcaggcagtgccattggcagatagttttcggcatctttatccaaacaccccttacgcatataccttttggacttacatgatgaatgccaggagtaagaacgtcgggtggcgcctggattattttctgctttcccattccctactgcccgctctgtgtgactccaaaatccgcagtaaagcactaggctctgaccactgcccaatcactctctaccttgctctgtag

SEQ ID NO: 281179 - protein, 579 aa, Artificial Sequence
  derived and/or modified sequence
MARAVGPERRLLAVYTGGTIGMRSELGVLVPGTGLAAILRTLPMFHDEEHARARGLSEDTLVLPPASRNQRILYTVLECQPLFDSSDMTIAEWVCLAQTIKRHYEQYHGFVVIHGTDTMAFAASMLSFMLENLQKTVILTGAQVPIHALWSDGRENLLGALLMAGQYVIPEVCLFFQNQLFRGNRATKVDARRFAAFCSPNLLPLATVGADITINRELVRKVDGKAGLVVHSSMEQDVGLLRLYPGIPAALVRAFLQPPLKGVVMETFGSGNGPTKPDLLQELRVATERGLVIVNCTHCLQGAVTTDYAAGMAMAGAGVISGFDMTSEAALAKLSYVLGQPGLSLDVRKELLTKDLRGEMTPPSVEERRPSLQGNTLGGGVSWLLSLSGSQEADALRNALVPSLACAAAHAGDVEALQALVELGSDLGLVDFNGQTPLHAAARGGHTEAVTMLLQRGVDVNTRDTDGFSPLLLAVRGRHPGVIGLLREAGASLSTQELEEAGTELCRLAYRADLEGLQVWWQAGADLGQPGYDGHSALHVAEAAGNLAVVAFLQSLEGAVGAQAPCPEPSCFQEVLPGV

SEQ ID NO: 281180 - protein, 140 aa, Artificial Sequence
  derived and/or modified sequence
AAARGGHTEAVTMLLQRGVDVNTRDTDGFSPLLLAVRGRHPGVIGLLREAGASLSTQELEEAGTELCRLAYRADLEGLQVWWQAGADLGQPGYDGHSALHVAEAAGNLAVVAFLQSLEGAVGAQAPCPEPSCFQEVLPGV

SEQ ID NO: 281181 - DNA, 1740 bp, Artificial Sequence
  derived and/or modified sequence
atggccagagccgtgggccccgagagaagactgctggccgtgtacaccggcggcaccatcggcatgagaagcgagctgggcgtgctggtgcccggcaccggcctggccgccatcctgagaaccctgcccatgttccacgacgaggagcacgccagagccagaggcctgagcgaggacaccctggtgctgccccccgccagcagaaaccagagaatcctgtacaccgtgctggagtgccagcccctgttcgacagcagcgacatgaccatcgccgagtgggtgtgcctggcccagaccatcaagagacactacgagcagtaccacggcttcgtggtgatccacggcaccgacaccatggccttcgccgccagcatgctgagcttcatgctggagaacctgcagaagaccgtgatcctgaccggcgcccaggtgcccatccacgccctgtggagcgacggcagagagaacctgctgggcgccctgctgatggccggccagtacgtgatccccgaggtgtgcctgttcttccagaaccagctgttcagaggcaacagagccaccaaggtggacgccagaagattcgccgccttctgcagccccaacctgctgcccctggccaccgtgggcgccgacatcaccatcaacagagagctggtgagaaaggtggacggcaaggccggcctggtggtgcacagcagcatggagcaggacgtgggcctgctgagactgtaccccggcatccccgccgccctggtgagagccttcctgcagccccccctgaagggcgtggtgatggagaccttcggcagcggcaacggccccaccaagcccgacctgctgcaggagctgagagtggccaccgagagaggcctggtgatcgtgaactgcacccactgcctgcagggcgccgtgaccaccgactacgccgccggcatggccatggccggcgccggcgtgatcagcggcttcgacatgaccagcgaggccgccctggccaagctgagctacgtgctgggccagcccggcctgagcctggacgtgagaaaggagctgctgaccaaggacctgagaggcgagatgaccccccccagcgtggaggagagaagacccagcctgcagggcaacaccctgggcggcggcgtgagctggctgctgagcctgagcggcagccaggaggccgacgccctgagaaacgccctggtgcccagcctggcctgcgccgccgcccacgccggcgacgtggaggccctgcaggccctggtggagctgggcagcgacctgggcctggtggacttcaacggccagacccccctgcacgccgccgccagaggcggccacaccgaggccgtgaccatgctgctgcagagaggcgtggacgtgaacaccagagacaccgacggcttcagccccctgctgctggccgtgagaggcagacaccccggcgtgatcggcctgctgagagaggccggcgccagcctgagcacccaggagctggaggaggccggcaccgagctgtgcagactggcctacagagccgacctggagggcctgcaggtgtggtggcaggccggcgccgacctgggccagcccggctacgacggccacagcgccctgcacgtggccgaggccgccggcaacctggccgtggtggccttcctgcagagcctggagggcgccgtgggcgcccaggccccctgccccgagcccagctgcttccaggaggtgctgcccggcgtgtag

SEQ ID NO: 281182 - DNA, 423 bp, Artificial Sequence
  derived and/or modified sequence
gccgccgccagaggcggccacaccgaggccgtgaccatgctgctgcagagaggcgtggacgtgaacaccagagacaccgacggcttcagccccctgctgctggccgtgagaggcagacaccccggcgtgatcggcctgctgagagaggccggcgccagcctgagcacccaggagctggaggaggccggcaccgagctgtgcagactggcctacagagccgacctggagggcctgcaggtgtggtggcaggccggcgccgacctgggccagcccggctacgacggccacagcgccctgcacgtggccgaggccgccggcaacctggccgtggtggccttcctgcagagcctggagggcgccgtgggcgcccaggccccctgccccgagcccagctgcttccaggaggtgctgcccggcgtgtag

SEQ ID NO: 281183 - DNA, 1844 bp, Artificial Sequence
  derived and/or modified sequence
cccgcaggccctgcgtccccgctgcacacccccgtccactcccgtggtccccggtccggcatggcgcgcgcggtggggcccgagcggaggctgctggccgtctacaccggcggcaccattggcatgcggagtgagctcggcgtgcttgtgcccgggacgggcctggctgccatcctgaggacactgcccatgttccatgacgaggagcacgcccgagcccgcggcctctctgaggacaccctggtgctacccccggccagccgcaaccagaggattctctacaccgtgctggagtgccagcccctcttcgactccagtgacatgaccatcgctgagtgggtttgccttgcccagaccatcaagaggcactacgagcagtaccacggctttgtggtcatccacggcaccgacaccatggcctttgctgcctcgatgctgtccttcatgctggagaacctgcagaagactgtcatcctcactggggcccaggtgcccatccatgccctgtggagcgacggccgtgagaacctgctgggggcactgctcatggctggccagtatgtgatcccagaggtctgccttttcttccagaatcagctgtttcggggcaaccgggcaaccaaggtagacgctcggaggttcgcagctttctgctccccgaacctgctgcctctggccacagtgggtgctgacatcacaatcaacagggagctggtgcggaaggtggacgggaaggctgggctggtggtgcacagcagcatggagcaggacgtgggcctgctgcgcctctaccctgggatccctgccgccctggttcgggccttcttgcagcctcccctgaagggcgtggtcatggagaccttcggttcagggaacggacccaccaagcccgacctgctgcaggagctgcgggtggccaccgagcgcggcctggtcatcgtcaactgtacccactgcctccagggggctgtgaccacagactatgcagctggcatggccatggcgggagccggcgtcatctcaggcttcgacatgacatcggaggccgccctggccaagctatcgtatgtgctgggccagccagggctgagcctggatgtcaggaaggagctgctgaccaaggaccttcggggggagatgacgccaccctcggtggaagagcgccggccctcactgcagggcaacacgctgggcggtggggtctcctggctcctcagtctgagcggcagccaggaggcagatgccctgcggaatgccctggtgcccagcctggcctgtgctgctgcccacgccggtgacgtggaggcgctgcaggcgcttgtggagctgggcagtgacctgggcctggtggactttaacggccaaaccccactgcacgcggccgcccggggaggccacacagaggcagtcaccatgctgctgcagagaggtgtggacgtgaacacccgggacacggatggcttcagcccgctgctgctggccgtgcggggcaggcatccgggtgtcattgggttgctgcgggaagccggggcctccctgtccacccaggagctggaggaagcagggacggagctgtgcaggctggcatacagggccgacctcgaaggcctgcaggtgtggtggcaggcaggggctgacctggggcagccgggctatgacgggcacagcgccctgcacgtcgcagaggcagccgggaacctggcagtggtggcctttctacagagcctggagggtgcggttggtgcccaggccccatgcccagagccctcatgttttcaggaagtgctgcctggtgtctaacctgaaggcgtcctgctgcagtataagccattccttcctcccat

SEQ ID NO: 281184 - DNA, 467 bp, Artificial Sequence
  derived and/or modified sequence
gcggccgcccggggaggccacacagaggcagtcaccatgctgctgcagagaggtgtggacgtgaacacccgggacacggatggcttcagcccgctgctgctggccgtgcggggcaggcatccgggtgtcattgggttgctgcgggaagccggggcctccctgtccacccaggagctggaggaagcagggacggagctgtgcaggctggcatacagggccgacctcgaaggcctgcaggtgtggtggcaggcaggggctgacctggggcagccgggctatgacgggcacagcgccctgcacgtcgcagaggcagccgggaacctggcagtggtggcctttctacagagcctggagggtgcggttggtgcccaggccccatgcccagagccctcatgttttcaggaagtgctgcctggtgtctaacctgaaggcgtcctgctgcagtataagccattccttcctcccat

SEQ ID NO: 281185 - DNA, 1740 bp, Artificial Sequence
  derived and/or modified sequence
atggctagggcggttggtccggagaggcgactcctggctgtgtataccgggggcactattggaatgaggtctgagttgggggttctggtgcctggcaccggtctagccgcaattctacggacactgcccatgtttcacgacgaggaacacgcccgcgccagaggcctgagcgaggataccctcgtgctccctccagcgagccggaatcagcgaatcttgtataccgtgcttgaatgccaaccactgttcgactcatctgacatgactatcgccgagtgggtgtgtctggcccagaccattaagcgacactatgagcagtatcacgggtttgtcgtaatacacgggacggataccatggcctttgctgcgtctatgttgtcattcatgctagagaacttgcagaaaaccgtaattttaacaggcgcacaggtgcccatacacgccctttggtccgatggaagggagaacctactgggagccctccttatggcgggacagtacgtcatcccagaagtgtgtctgttttttcagaaccagctgttcagagggaatcgagccacaaaggtcgacgccaggcgatttgcagccttttgtagcccgaacctcctcccattagcgaccgtaggagcggatatcacaattaaccgggaattggtgcggaaggtcgatggaaaggcggggctggttgtacattcatcaatggagcaagatgtgggcctgttaagactttaccccggaatccctgccgccctggtgcgcgccttcctgcagcctcctctcaagggggtcgtaatggaaactttcggcagtggcaacggaccaaccaagccagatctgctccaggaactccgcgtggcgacagaacgcggactcgtcatcgtcaattgtactcactgcttacagggagctgtgaccaccgactatgcagccggaatggccatggccggcgccggcgtgattagtggcttcgatatgacaagtgaagctgcactagcgaagctcagctacgtcctgggccagcccgggttatctttggacgtgagaaaggagctcctcactaaggatttgcgaggtgaaatgaccccaccatctgtcgaagaacggcgcccatcactacaggggaatacactgggcggtggggtttcctggctgctgagcttgagcggctcccaggaagcagacgccttgcggaatgccctggtgccatccctggcctgtgccgcagcacacgcgggggacgtggaggcactgcaggccctagttgaactgggatctgacttaggtctggtagacttcaatgggcagacaccactgcacgcggctgccaggggtgggcacacggaagcagtcacaatgctcctccaacgaggcgtcgatgtgaatacccgtgacaccgatggattttctccactcctgctggccgttagaggcaggcaccctggggtgattggcctgttgagggaggccggagcaagtcttagtacgcaggagctggaggaagccggaacggaattgtgtcggctggcttaccgcgcagacttggaaggcctccaggtgtggtggcaggcaggggcagacttaggtcagcctgggtacgacggtcactctgcgttacatgtagctgaggctgccggcaatctggctgtggtggcgtttctccaatcgctagagggagcagtgggcgcccaagctccgtgccccgagccatcctgcttccaggaggtgctgcccggcgtgtag

SEQ ID NO: 281186 - DNA, 423 bp, Artificial Sequence
  derived and/or modified sequence
gccgctgcgaggggagggcacacagaggcagtaacgatgcttctccaacggggagtggacgtgaataccagggatactgacggattctctccacttcttctggccgttcgtgggagacatcccggtgtgatcggtctgctcagggaagccggcgcaagccttagcactcaggagcttgaggaggccgggactgaattgtgtcggctggcataccgagctgaccttgagggactgcaagtgtggtggcaggcaggggctgatctagggcagccggggtacgatggacactccgcacttcacgtagcggaggccgctgggaatctggccgtggtggccttcttgcagtcgttagagggggcagtgggagcccaggcaccctgccctgagccatcatgttttcaagaggtgcttccaggggtgtag

SEQ ID NO: 281187 - DNA, 1740 bp, Artificial Sequence
  derived and/or modified sequence
atggcccgggctgtgggccctgagcggcggctgctggccgtgtacacaggaggcaccatcggcatgaggtctgagctgggcgtgctggtgcccggcaccggcctggccgccatcctgcggaccctgcccatgtttcatgatgaggagcacgcccgggcccggggcctgtctgaggacaccctggtgctgcccccagccagcaggaaccagaggatcctgtacacagtgctggagtgccagcccctgtttgacagcagtgacatgaccatcgccgagtgggtgtgcctggcccagaccatcaagaggcactatgagcagtaccacggctttgtggtgatccacggcacagacaccatggcctttgctgcctccatgctgtccttcatgctggagaacctgcagaagacagtcatcctgaccggggcccaggtgcccatccacgccctgtggagcgatggaagagagaacctgctgggcgccctgctgatggccggccagtatgtgattcctgaggtgtgcctcttcttccagaaccagctgttccggggcaacagagccaccaaggtggatgccaggagatttgctgccttctgcagccccaacctgctgcccctggccaccgtgggcgctgacatcaccatcaaccgggagctggtgaggaaggtggatggcaaggccggcctggtggtgcacagctccatggagcaggatgtgggcctgctgcggctgtacccaggcatcccagctgccctggtgcgggccttcctgcagccccccctgaagggcgtggtgatggagaccttcggcagcggaaatggccccaccaagccagacctgctgcaggagctgcgggtggccacagagcggggcctggtgattgtgaactgcacccactgcctgcagggcgctgtgaccacagattatgctgctggcatggccatggccggggccggggtcatcagcggctttgacatgaccagcgaggccgccctggccaagctgtcctatgtgctgggccagcccggcctgagcctggatgtgaggaaggagctgctgaccaaggacctgcggggggagatgaccccacccagcgtggaggagcggcggcccagcctgcagggcaacaccctgggcggcggcgtgtcctggctgctgagcctgagcggcagccaggaggctgatgccctgagaaatgccctggtgcccagcctggcctgtgccgccgcccatgctggagatgtggaggccctgcaggccctggtggagctgggcagtgacctgggcctggtggacttcaacggccagacccccctgcacgccgccgcccggggcggccacacagaagctgtgaccatgctgctgcagaggggcgtggatgtgaacacccgggacacagatggcttcagccccctgctgctggccgtgcggggccgccaccctggggtgattggcctgctgcgggaggccggggccagcctgagcacccaggagctggaggaggccggcacagagctgtgccgcctggcctacagagctgacctggagggcctgcaggtgtggtggcaggccggggctgacctgggccagcccggctatgatggccacagcgccctgcacgtggccgaggccgccggcaacctggccgtggtggccttcctgcagagcctggagggcgctgtgggcgcccaggccccctgcccagagcccagctgcttccaggaggtgctgcccggggtgtag

SEQ ID NO: 281188 - DNA, 423 bp, Artificial Sequence
  derived and/or modified sequence
gctgctgcccggggcggccacacagaggccgtgaccatgctgctgcagaggggcgtggatgtgaacacccgggacacagatggcttcagccccctgctgctggccgtgcggggccgccaccctggggtcatcggcctgctgcgggaggccggggccagcctgagcacccaggagctggaggaggccggcacagagctgtgccgcctggcctacagagctgacctggagggcctgcaggtgtggtggcaggccggggctgacctgggccagcccggctatgatggccacagcgccctgcacgtggccgaggccgccggcaacctggccgtggtggccttcctgcagagcctggagggcgctgtgggcgcccaggccccctgcccagagcccagctgcttccaggaggtgctgcccggggtgtag

SEQ ID NO: 281189 - DNA, 1740 bp, Artificial Sequence
  derived and/or modified sequence
atggcccgggccgtgggccccgagcggcggctgctggccgtgtacaccgggggcaccattggcatgaggagtgaactgggagtgctcgtcccgggtaccggacttgccgccattctgagaactctgcccatgttccatgatgaggaacatgccagggctcgtggattatcggaggatacccttgtgctgccaccagcctccaggaaccaacgtatactctacaccgtgctggaatgccagcctctgtttgattcgtcagacatgacgatcgctgaatgggtgtgtttagcccagactatcaaacgtcactacgaacagtaccatggcttcgtggttatccacggaacagatacaatggcgttcgccgcctcgatgctaagtttcatgttagagaatctacaaaaaacggtgatcttgacaggcgctcaggtaccaatccatgctctgtggtcagatggccgagagaacctgttgggagcccttctgatggcaggacagtacgtcatccctgaggtctgcctgtttttccagaatcagctgttcagggggaatagagcgacgaaagtggatgccaggaggttcgccgcgttttgcagcccgaaccttctcccgctggccacagtgggggccgatatcacgattaacagagaactcgtgaggaaagtggacgggaaggctggtctggttgtccatagttctatggagcaggacgtggggctgctacggctataccccggtatcccggccgccctggtacgggctttcttacaaccgcccctgaaaggggtcgtgatggagacttttggctccggcaatggccccacaaaacctgatctccttcaggaactgcgcgtagctacagaaagaggactggtcatagttaattgcacgcactgtctacagggcgcggttacaaccgactacgccgccggaatggccatggcaggcgctggggtgattagcgggttcgatatgacaagcgaggccgccctcgctaagctctcgtacgtgctaggccagccggggcttagcctagatgtccgcaaagaactcctgactaaggacctcaggggcgagatgacaccccccagcgtcgaagagcggcggccctccctgcagggcaataccctaggcggtggagtgagctggcttttatctttgagcggatcacaggaggccgatgcccttcgaaacgccctggttccctccctggcctgcgccgctgcacacgcgggtgacgtggaggcgttgcaggccctggtcgaattggggtccgacctgggactggtcgattttaacggacagacaccactccacgcagctgcccgggggggccatacggaagctgtcacaatgctgctgcaacggggtgtcgacgtcaatacacgcgatactgacgggtttagccctttgctactggctgtgcgggggcgccaccctggtgttatcggactgctgagggaagcgggtgcatcactatctacccaggagctcgaagaagctggcaccgagctgtgtcgccttgcctaccgtgccgacctggagggactgcaggtgtggtggcaggcgggagcagatctggggcaacctggctacgacggtcactccgcgctgcacgttgcagaagcggccggaaatctcgccgttgtggcctttctccagagcctcgaaggcgctgtgggggcacaggcaccctgcccagaaccatcgtgctttcaagaggtcctcccaggtgtctag

SEQ ID NO: 281190 - DNA, 423 bp, Artificial Sequence
  derived and/or modified sequence
gccgccgcccggggcggccacaccgaggccgtgaccatgctgctgcagcggggagtggatgtcaacacccgtgacacagacggattttccccactcctgctggccgtgcgtggaagacatcctggggtcattgggctgctgcgcgaggcgggcgcatccctctctacccaagagctcgaggaggcagggacagaactttgtagactggcttaccgggctgacctcgaaggactgcaggtgtggtggcaggccggagccgacctcggccagcctggctatgatggccactcggctttgcatgtggccgaggcagcgggaaacctcgctgtcgtggccttcctgcagagcttggagggcgccgttggggctcaggcaccatgcccagagccgagctgctttcaggaggtgttaccaggtgtgtag

SEQ ID NO: 281191 - DNA, 1740 bp, Artificial Sequence
  derived and/or modified sequence
atggcacgggcagttggtcccgagcgcagactgctggcagtgtacaccggcggtaccataggcatgcgtagcgagttgggcgtcttagttccgggaaccggccttgccgcaatactccgaactttgccgatgtttcatgatgaggaacacgccagggcaagaggcttaagtgaagatactttagtcctgccacctgccagtcgaaaccagcgcatcctgtataccgtgctggaatgtcagcctctgtttgactcatccgatatgaccatcgccgagtgggtctgcctagcccagaccataaagcggcattacgaacagtaccacggcttcgttgtgattcacggaacagatactatggcatttgcggcatccatgctgagttttatgttagaaaacctccagaaaacagtgatcctgaccggtgcccaagtgccgatacacgcactgtggagcgacgggagagaaaatctgctgggcgctctcctgatggcaggtcaatatgtgatccctgaagtatgcctttttttccagaatcagttattccggggaaacagggcaaccaaggttgatgcacgcaggtttgctgccttctgttcaccgaaccttcttcctctggcaacggtgggagccgatatcaccatcaaccgcgagctggtgcggaaagtggatggcaaagctggcctggtggttcattcatccatggagcaggacgtggggctgctgcgattgtacccagggatacccgcagcgcttgttagagcatttctgcaacccccacttaagggcgttgtgatggagacctttggcagcgggaacgggccaaccaaacctgacctgctccaggagctgagagtagccactgaaagagggctggtaatcgtgaactgcacacattgccttcaaggcgctgtcaccactgactatgcagccggaatggctatggcaggcgctggggtcatcagcggatttgatatgacttccgaagccgctcttgccaaactgagctacgtgctgggccagcctggcctaagtttggacgtcagaaaggaactgctgacgaaagatcttcgcggtgagatgacaccaccctctgtcgaggagagaaggccgagtctccaaggcaacacactaggagggggtgtgtcctggctacttagcctgtctggctcacaagaggcggatgccctaaggaatgccctggtgccttcactcgcctgcgccgctgctcacgcaggcgatgtcgaggcactacaggccctcgtggagttaggaagtgatcttgggctcgtggacttcaatgggcagacacccctgcatgctgcggcaaggggcggacatactgaggcggtgacaatgctgttgcagcggggagtggatgtcaacacgcgagatactgatggattttcgccccttctgctggccgtgcgcggacggcacccaggtgtgatcggtcttttgcgagaagccggagcttctctgtcaacgcaagagcttgaggaggctggaacagaattatgcagactggcctaccgggctgacctggaaggcttacaagtgtggtggcaagccggagcagacctgggtcagcctgggtatgacggccattccgcgcttcacgtggccgaggctgctggcaatttggctgtggtcgcgttcctccagtccttggaaggcgctgtaggcgctcaggccccttgcccagagccaagctgtttccaggaagtgttacctggcgtttag

SEQ ID NO: 281192 - DNA, 423 bp, Artificial Sequence
  derived and/or modified sequence
gctgcggctcgcggtggacacacagaagccgtgacaatgctcctgcagcggggtgtggacgtaaatacccgggacaccgatggcttctcaccactgctcctggccgttagagggcgacacccaggtgtcattggactgctgagagaagcgggagccagtctgtccactcaggagctggaggaagcaggcactgagttgtgtaggctggcatatcgcgcagatctggaagggttgcaggtgtggtggcaagccggtgccgatttggggcaacctggctacgatggccacagtgcactccatgtggctgaggccgctggaaacctggcagtcgtcgccttccttcaatctctggaaggagctgtgggcgctcaagccccatgcccagagccatcctgtttccaagaggtgctgcccggagtgtag

SEQ ID NO: 281193 - DNA, 1740 bp, Artificial Sequence
  derived and/or modified sequence
atggccagggcagtgggaccagaaagacgcttactggcggtgtataccggcgggaccatcggaatgagaagcgaactgggagtgctcgtgcctggaactggcttggctgctatccttcgcacccttccaatgttccacgacgaagagcatgcccgtgcacgaggcctttctgaggataccctagtcctgccacccgcctcaagaaatcaacgcattctgtatacggtgctggagtgtcagcccctgttcgactcatctgacatgacaatcgccgaatgggtgtgccttgcgcagacaattaaacggcattacgagcagtatcatgggttcgtggtgatccacgggacagacactatggcctttgccgcatcaatgttgtcatttatgctcgaaaacttacagaagactgtaattctcaccggggctcaggtgcctatccacgccctgtggtcagacggaagagaaaacctgttgggcgcactgttaatggctgggcaatatgtcattccggaagtatgtctcttttttcaaaatcaattgttcagagggaacagagctacaaaggtggatgccagaagatttgccgctttttgtagtccaaacctccttcccttggcaacagtgggcgcagacatcaccattaaccgagaattggtccgaaaagtggatggaaaggctggattagtggttcacagttctatggagcaggacgtgggactgctgaggctttatcctggaattcccgcagctctcgttcgtgcgttcctccagccccccctgaagggcgtggtcatggagacattcggttccggtaacggccctacgaaaccggatctcttgcaggaacttagggtcgccacggaaagaggtttggtgatcgtgaattgcacacactgtctgcagggagcagtgactaccgattacgccgctgggatggctatggccggcgccggagtaatttccgggttcgacatgacatctgaggccgcccttgccaaactgagctacgtgttagggcagcccgggctttccctggacgttaggaaagagctgctcacaaaagatctgcggggggagatgacccctccaagcgtcgaggagaggagaccgagcctgcaaggtaacaccttaggaggaggagtgtcctggctgctgtccctctccggatcacaggaggccgatgctttaagaaacgctctggtaccaagcctggcttgtgctgccgcccacgccggcgacgtagaggctttacaggcactcgtcgagctcgggagcgacctgggactggtggatttcaatggtcagacccccctccacgcggccgctcgcggggggcatacggaggccgtgaccatgttactacaaagaggtgttgacgttaatacccgggacaccgatggtttttcacccctccttttggctgtccgcgggcggcacccaggagttattggcctacttcgggaggcaggcgcttcgctcagcacacaggaacttgaggaggccgggaccgagttatgtagactggcttatagggcagatctcgaagggttgcaggtctggtggcaagccggagccgacctgggccagcccggatacgacggacactctgcgctgcacgtcgcagaagcagctgggaatctggccgtggtggctttcttacaatcattggagggcgcggtgggagcacaggcgccttgtccagagccttcatgttttcaggaggtactgcctggcgtatag

SEQ ID NO: 281194 - DNA, 423 bp, Artificial Sequence
  derived and/or modified sequence
gcagcggcccgggggggtcacaccgaggcggttaccatgctgctgcaaaggggtgtggacgtaaatacacgagatacggacggtttttcgcctttgttgttggcagtgcgaggaagacaccctggagttattggactgcttagggaagccggggcctccctctcaacccaggagctggaagaggcagggaccgagttgtgtagattagcatatcgtgctgatctggagggactgcaggtgtggtggcaggcgggggccgatctaggtcagcccggctacgatggtcacagcgcactgcatgttgcagaagcagcggggaacctggcagtggtggccttcttgcagtccttggagggtgcggtgggtgctcaagctccatgcccagagccaagttgtttccaggaagtattaccaggtgtatag

SEQ ID NO: 281195 - DNA, 1740 bp, Artificial Sequence
  derived and/or modified sequence
atggctagagcggtgggccctgaaagaagactgctggccgtgtacacagggggtaccattggtatgaggtctgaattaggggtcttggtgccaggaaccggactagcagccatactgagaacactccccatgtttcatgacgaggagcacgcacgcgctcgcggactgtcagaagacaccttggtcctcccacccgcttcacggaatcagcgtattctatatactgttcttgagtgtcaacccctgtttgattccagcgatatgacaatagcagaatgggtttgcctggcccagactatcaaacgtcattatgaacagtaccatggcttcgtcgtcatacacgggaccgatacaatggccttcgccgcttcaatgttgagctttatgttagaaaacttgcagaaaaccgtgattctcaccggtgcgcaagtgcctattcatgccctatggtccgacgggagagagaatctccttggcgcacttctcatggccggacaatatgtgatacccgaagtctgtctgttctttcagaaccagttgtttaggggaaatcgggccaccaaagtggatgcacgtaggtttgctgcattctgtagccctaacctcctgccattggccactgttggcgcggatatcaccattaatagggagctcgtccgcaaggtagacggcaaggccgggcttgtggtgcactcatctatggaacaagacgtcggtctgcttcgcctgtatccaggtatccccgcggccctggtgcgtgccttcctccaaccccccctgaagggtgtcgttatggaaacttttggcagcggcaatggcccgacaaagccggatttgttgcaggaactcagagtcgcaactgaaaggggattagtaattgttaattgcacgcattgtctccagggcgccgtgacgaccgactatgccgcaggaatggccatggctggcgcaggggtgattagcggatttgacatgacatctgaggcagctcttgccaagctcagctacgtcctcggccagccaggcctgtccctggatgtacggaaagaacttcttactaaagatctgcgtggcgaaatgaccccgccctcagtcgaggagaggagaccaagcttacagggcaatacgcttggggggggagtaagctggttattgagtcttagcggcagtcaggaggccgatgctctgcgaaatgccttagttccctccttggcttgtgccgctgcccatgccggagatgttgaggccctgcaagccctggtggaattgggatccgatttgggtctcgtggattttaatggacaaacacccctacacgccgccgcacgtggcggacacactgaagctgtgaccatgctcctccagagaggtgtagacgtgaataccagagacaccgatggattcagccctcttttactcgccgtgcgcggacggcacccaggggtcattggcttgctacgggaagcaggtgccagcctctctacacaggaattagaagaggccggtaccgagctgtgtcgtctagcctatagggcagatctcgaaggattgcaggtttggtggcaggcaggcgcagatctgggccagcccggctatgatggacactctgcactgcacgtggctgaagctgctggtaacttagccgttgtggcatttctccagagtctcgagggtgctgtaggtgcccaggccccatgccctgaaccgtcatgctttcaagaagtgttgccgggcgtctag

SEQ ID NO: 281196 - DNA, 423 bp, Artificial Sequence
  derived and/or modified sequence
gctgctgctcggggcggtcacactgaggccgtgacaatgctgcttcagcgcggagttgatgtgaacacaagagataccgatgggttttctccattgttgctggctgtgagggggagacatccgggagttataggacttctcagggaagccggcgcgagtttgtccacccaggagttggaggaggcagggacagaactgtgccggttggcttatagggcagacctggaaggccttcaagtgtggtggcaggccggggccgaccttggacaacctggatatgacggacattctgcactgcacgttgcagaggcagctgggaatctggccgtcgttgcatttttacagtccctggagggagctgttggtgcacaagccccttgcccagaaccaagttgttttcaggaggtgttgcccggtgtttag

SEQ ID NO: 281197 - RNA, 1740 nt, Artificial Sequence
  derived and/or modified sequence
auggccagggcagugggaccagaaagacgcuuacuggcgguguauaccggcgggaccaucggaaugagaagcgaacugggagugcucgugccuggaacuggcuuggcugcuauccuucgcacccuuccaauguuccacgacgaagagcaugcccgugcacgaggccuuucugaggauacccuaguccugccacccgccucaagaaaucaacgcauucuguauacggugcuggagugucagccccuguucgacucaucugacaugacaaucgccgaaugggugugccuugcgcagacaauuaaacggcauuacgagcaguaucauggguucguggugauccacgggacagacacuauggccuuugccgcaucaauguugucauuuaugcucgaaaacuuacagaagacuguaauucucaccggggcucaggugccuauccacgcccuguggucagacggaagagaaaaccuguugggcgcacuguuaauggcugggcaauaugucauuccggaaguaugucucuuuuuucaaaaucaauuguucagagggaacagagcuacaaagguggaugccagaagauuugccgcuuuuuguaguccaaaccuccuucccuuggcaacagugggcgcagacaucaccauuaaccgagaauugguccgaaaaguggauggaaaggcuggauuagugguucacaguucuauggagcaggacgugggacugcugaggcuuuauccuggaauucccgcagcucucguucgugcguuccuccagcccccccugaagggcguggucauggagacauucgguuccgguaacggcccuacgaaaccggaucucuugcaggaacuuagggucgccacggaaagagguuuggugaucgugaauugcacacacugucugcagggagcagugacuaccgauuacgccgcugggauggcuauggccggcgccggaguaauuuccggguucgacaugacaucugaggccgcccuugccaaacugagcuacguguuagggcagcccgggcuuucccuggacguuaggaaagagcugcucacaaaagaucugcggggggagaugaccccuccaagcgucgaggagaggagaccgagccugcaagguaacaccuuaggaggaggaguguccuggcugcugucccucuccggaucacaggaggccgaugcuuuaagaaacgcucugguaccaagccuggcuugugcugccgcccacgccggcgacguagaggcuuuacaggcacucgucgagcucgggagcgaccugggacugguggauuucaauggucagaccccccuccacgcggccgcucgcggggggcauacggaggccgugaccauguuacuacaaagagguguugacguuaauacccgggacaccgaugguuuuucaccccuccuuuuggcuguccgcgggcggcacccaggaguuauuggccuacuucgggaggcaggcgcuucgcucagcacacaggaacuugaggaggccgggaccgaguuauguagacuggcuuauagggcagaucucgaaggguugcaggucugguggcaagccggagccgaccugggccagcccggauacgacggacacucugcgcugcacgucgcagaagcagcugggaaucuggccgugguggcuuucuuacaaucauuggagggcgcggugggagcacaggcgccuuguccagagccuucauguuuucaggagguacugccuggcguauag

SEQ ID NO: 281198 - RNA, 423 nt, Artificial Sequence
  derived and/or modified sequence
gcagcggcccgggggggucacaccgaggcgguuaccaugcugcugcaaagggguguggacguaaauacacgagauacggacgguuuuucgccuuuguuguuggcagugcgaggaagacacccuggaguuauuggacugcuuagggaagccggggccucccucucaacccaggagcuggaagaggcagggaccgaguuguguagauuagcauaucgugcugaucuggagggacugcaggugugguggcaggcgggggccgaucuaggucagcccggcuacgauggucacagcgcacugcauguugcagaagcagcggggaaccuggcagugguggccuucuugcaguccuuggagggugcggugggugcucaagcuccaugcccagagccaaguuguuuccaggaaguauuaccagguguauag

SEQ ID NO: 281199 - RNA, 1740 nt, Artificial Sequence
  derived and/or modified sequence
auggcuagagcggugggcccugaaagaagacugcuggccguguacacaggggguaccauugguaugaggucugaauuaggggucuuggugccaggaaccggacuagcagccauacugagaacacuccccauguuucaugacgaggagcacgcacgcgcucgcggacugucagaagacaccuugguccucccacccgcuucacggaaucagcguauucuauauacuguucuugagugucaaccccuguuugauuccagcgauaugacaauagcagaauggguuugccuggcccagacuaucaaacgucauuaugaacaguaccauggcuucgucgucauacacgggaccgauacaauggccuucgccgcuucaauguugagcuuuauguuagaaaacuugcagaaaaccgugauucucaccggugcgcaagugccuauucaugcccuaugguccgacgggagagagaaucuccuuggcgcacuucucauggccggacaauaugugauacccgaagucugucuguucuuucagaaccaguuguuuaggggaaaucgggccaccaaaguggaugcacguagguuugcugcauucuguagcccuaaccuccugccauuggccacuguuggcgcggauaucaccauuaauagggagcucguccgcaagguagacggcaaggccgggcuuguggugcacucaucuauggaacaagacgucggucugcuucgccuguauccagguauccccgcggcccuggugcgugccuuccuccaacccccccugaagggugucguuauggaaacuuuuggcagcggcaauggcccgacaaagccggauuuguugcaggaacucagagucgcaacugaaaggggauuaguaauuguuaauugcacgcauugucuccagggcgccgugacgaccgacuaugccgcaggaauggccauggcuggcgcaggggugauuagcggauuugacaugacaucugaggcagcucuugccaagcucagcuacguccucggccagccaggccugucccuggauguacggaaagaacuucuuacuaaagaucugcguggcgaaaugaccccgcccucagucgaggagaggagaccaagcuuacagggcaauacgcuuggggggggaguaagcugguuauugagucuuagcggcagucaggaggccgaugcucugcgaaaugccuuaguucccuccuuggcuugugccgcugcccaugccggagauguugaggcccugcaagcccugguggaauugggauccgauuugggucucguggauuuuaauggacaaacaccccuacacgccgccgcacguggcggacacacugaagcugugaccaugcuccuccagagagguguagacgugaauaccagagacaccgauggauucagcccucuuuuacucgccgugcgcggacggcacccaggggucauuggcuugcuacgggaagcaggugccagccucucuacacaggaauuagaagaggccgguaccgagcugugucgucuagccuauagggcagaucucgaaggauugcagguuugguggcaggcaggcgcagaucugggccagcccggcuaugauggacacucugcacugcacguggcugaagcugcugguaacuuagccguuguggcauuucuccagagucucgagggugcuguaggugcccaggccccaugcccugaaccgucaugcuuucaagaaguguugccgggcgucuag

SEQ ID NO: 281200 - RNA, 423 nt, Artificial Sequence
  derived and/or modified sequence
gcugcugcucggggcggucacacugaggccgugacaaugcugcuucagcgcggaguugaugugaacacaagagauaccgauggguuuucuccauuguugcuggcugugagggggagacauccgggaguuauaggacuucucagggaagccggcgcgaguuuguccacccaggaguuggaggaggcagggacagaacugugccgguuggcuuauagggcagaccuggaaggccuucaagugugguggcaggccggggccgaccuuggacaaccuggauaugacggacauucugcacugcacguugcagaggcagcugggaaucuggccgucguugcauuuuuacagucccuggagggagcuguuggugcacaagccccuugcccagaaccaaguuguuuucaggagguguugcccgguguuuag

SEQ ID NO: 281201 - protein, 1502 aa, Artificial Sequence
  derived and/or modified sequence
MMAKNKEPRPPSYTISIVGLSGTEKDKGNCGVGKSCLCNRFVRSKADEYYPEHTSVLSTIDFGGRVVNNDHFLYWGDIIQNSEDGVECKIHVIEQTEFIDDQTFLPHRSTNLQPYIKRAAASKLQSAEKLMYICTDQLGLEQDFEQKQMPEGKLNVDGFLLCIDVSQGCNRKFDDQLKFVNNLFVQLSKSKKPVIIAATKCDECVDHYLREVQAFASNKKNLLVVETSARFNVNIETCFTALVQMLDKTRSKPKIIPYLDAYKTQRQLVVTATDKFEKLVQTVRDYHATWKTVSNKLKNHPDYEEYINLEGTRKARNTFSKHIEQLKQEHIRKRREEYINTLPRAFNTLLPNLEEIEHLNWSEALKLMEKRADFQLCFVVLEKTPWDETDHIDKINDRRIPFDLLSTLEAEKVYQNHVQHLISEKRRVEMKEKFKKTLEKIQFISPGQPWEEVMCFVMEDEAYKYITEADSKEVYGRHQREIVEKAKEEFQEMLFEHSELFYDLDLNATPSSDKMSEIHTVLSEEPRYKALQKLAPDRESLLLKHIGFVYHPTKETCLSGQNCTDIKVEQLLASSLLQLDHGRLRLYHDSTNIDKVNLFILGKDGLAQELANEIRTQSTDDEYALDGKIYELDLRPVDAKSPYFLSQLWTAAFKPHGCFCVFNSIESLSFIGEFIGKIRTEASQIRKDKYMANLPFTLILANQRDSISKNLPILRHQGQQLANKLQCPFVDVPAGTYPRKFNETQIKQALRGVLESVKHNLDVVSPIPANKDLSEADLRIVMCAMCGDPFSVDLILSPFLDSHSCSAAQAGQNNSLMLDKIIGEKRRRIQITILSYHSSIGVRKDELVHGYILVYSAKRKASMGMLRAFLSEVQDTIPVQLVAVTDSQADFFENEAIKELMTEGEHIATEITAKFTALYSLSQYHRQTEVFTLFFSDVLEKKNMIENSYLSDNTRESTHQSEDVFLPSPRDCFPYNNYPDSDDDTEAPPPYSPIGDDVQLLPTPSDRSRYRLDLEGNEYPIHSTPNCHDHERNHKVPPPIKPKPVVPKTNVKKLDPNLLKTIEAGIGKNPRKQTSRVPLAHPEDMDPSDNYAEPIDTIFKQKGYSDEIYVVPDDSQNRIKIRNSFVNNTQGDEENGFSDRTSKSHGERRPSKYKYKSKTLFSKAKSYYRRTHSDASDDEAFTTSKTKRKGRHRGSEEDPLLSPVETWKGGIDNPAITSDQELDDKKMKKKTHKVKEDKKQKKKTKNFNPPTRRNWESNYFGMPLQDLVTAEKPIPLFVEKCVEFIEDTGLCTEGLYRVSGNKTDQDNIQKQFDQDHNINLVSMEVTVNAVAGALKAFFADLPDPLIPYSLHPELLEAAKIPDKTERLHALKEIVKKFHPVNYDVFRYVITHLNRVSQQHKINLMTADNLSICFWPTLMRPDFENREFLSTTKIHQSVVETFIQQCQFFFYNGEIVETTNIVAPPPPSNPGQLVEPMVPLQLPPPLQPQLIQPQLQTDPLGII

SEQ ID NO: 281202 - protein, 237 aa, Artificial Sequence
  derived and/or modified sequence
MSLPPPPPGPLPLRRRRRRPTLLGLCTEGLYRVSGNKTDQDNIQKQFDQDHNINLVSMEVTVNAVAGALKAFFADLPDPLIPYSLHPELLEAAKIPDKTERLHALKEIVKKFHPVNYDVFRYVITHLNRVSQQHKINLMTADNLSICFWPTLMRPDFENREFLSTTKIHQSVVETFIQQCQFFFYNGEIVETTNIVAPPPPSNPGQLVEPMVPLQLPPPLQPQLIQPQLQTDPLGII

SEQ ID NO: 281203 - protein, 241 aa, Artificial Sequence
  derived and/or modified sequence
MPLQDLVTAEKPIPLFVEKCVEFIEDTGLCTEGLYRVSGNKTDQDNIQKQFDQDHNINLVSMEVTVNAVAGALKAFFADLPDPLIPYSLHPELLEAAKIPDKTERLHALKEIVKKFHPVNYDVFRYVITHLNRVSQQHKINLMTADNLSICFWPTLMRPDFENREFLSTTKIHQSVVETFIQQCQFFFYNGEIVETTNIVAPPPPSNPGQLVEPMVPLQLPPPLQPQLIQPQLQTDPLGII

SEQ ID NO: 281204 - protein, 37 aa, Artificial Sequence
  derived and/or modified sequence
MMAKNKEPRPPSYTISIVGLSGTEKDKGNCGVGKSCL

SEQ ID NO: 281205 - protein, 140 aa, Artificial Sequence
  derived and/or modified sequence
MMAKNKEPRPPSYTISIVGLSGTEKDKGNCGVGKSCLCNRFVRSKADEYYPEHTSVLSTIDFGGRVVNNDHFLYWGDIIQNSEDGVECKIHVIEQTEFIDDQTFLPHRSTNLQPYIKRAAASKLQSAEKLMYICTDQLGL

SEQ ID NO: 281206 - DNA, 4509 bp, Artificial Sequence
  derived and/or modified sequence
atgatggcaaaaaataaggaaccgaggccccccagctacaccatctccattgtgggtttgtccggaactgagaaagataaagggaactgtggagtaggcaaatcttgcctctgcaaccgctttgtgcgctctaaagcagatgagtactacccggaacacacgtcagtgctttcaacgatagacttcgggggacgtgtcgttaataacgaccatttcttatattggggcgatatcatccagaactctgaggacggcgtggaatgcaagatccacgtgatcgagcagacagagttcatcgatgatcagacttttctgcctcatagaagcacaaacctccagccttatataaaacgcgccgccgccagtaaacttcaaagtgccgaaaaacttatgtatatctgcacagatcagctgggcctggaacaagacttcgagcagaaacagatgccggagggcaagctcaacgtggacggctttcttttgtgtatagatgtatcacagggttgtaaccgaaagtttgatgaccagctgaagtttgtaaataatctcttcgtccaactgagcaagtccaagaagcctgtgattattgcagctactaagtgtgacgagtgtgttgatcactatctacgggaggtacaggcatttgcgagcaataagaagaacctgctcgtggtggaaactagcgcccgattcaacgtcaatatcgagacgtgctttacggccctggtccaaatgcttgacaagacccgctctaagccaaagattatcccgtacctagatgcttacaaaacccagaggcagctagtggttactgccactgacaagttcgagaagctggttcaaaccgtgagggattatcatgctacttggaagacagtctctaataagttgaaaaaccatccagactatgaggagtacattaacctggagggcacgcgcaaggctaggaatacctttagcaaacatattgagcagctgaagcaagaacatatcaggaaacgcagagaagaatacataaataccctccctagggcttttaacactcttttaccaaaccttgaggaaattgagcatcttaactggagcgaggctctgaagctaatggagaaacgcgcagattttcagctctgtttcgtggtgcttgaaaagactccatgggacgagacagatcacatcgataagattaacgatagacgaatccctttcgacctcctcagtaccttagaggccgagaaagtttatcagaatcacgtgcagcaccttattagcgagaagcgaagggtggaaatgaaagaaaaattcaagaaaacgttagagaagatccagtttataagtcctgggcagccttgggaagaggtgatgtgctttgtgatggaagatgaagcctataagtacatcactgaggccgactccaaagaagtctacggccgccaccagagagagatagttgaaaaggctaaggaggagttccaggaaatgctctttgagcactctgagctgttctatgatctggatctcaatgctaccccatccagcgataagatgtccgagatccacactgttctctccgaggagccgaggtataaagccctgcaaaaactcgctcctgatcgggagagtctgttattgaagcatatcggtttcgtttatcacccaaccaaagagacatgcttgtccggccaaaattgtacagatattaaggtcgagcagcttctggcctcttcactcctgcaactggaccacggcagacttaggctataccacgacagcacgaatatagacaaagtgaatctgttcatcttaggcaaggacggcctggcacaggaattggcaaacgaaattcggactcaaagcaccgatgacgagtatgccctcgacggcaaaatctacgagctcgacctgaggcctgtggatgccaaatcaccctactttctgtcccaactttggaccgcggcatttaaaccacacgggtgcttttgtgtatttaactctatcgaaagcctgagtttcatcggagagttcatcggcaagatcaggactgaagcttcgcaaatccggaaagacaaatacatggctaacctaccctttacgctgatcttagcaaaccaacgggattctatctccaaaaacctgcccatactacgccaccaaggtcagcaactagccaataagcttcaatgtcccttcgtcgatgtgcctgcaggtacatatccacgaaaatttaacgagactcaaataaaacaggctctgcggggagtgctcgagtctgtgaagcataacttggatgtggtgtcgcccattcccgccaataaagaccttagtgaagccgaccttcggattgtcatgtgtgccatgtgtggagaccctttcagtgtggacctgattctgtccccattcctggactcccacagctgctccgcagcccaggccgggcagaacaatagcttaatgctcgacaagatcataggagagaaacggcggagaatacaaatcaccatcttgtcctaccattcttccataggcgttcgaaaggacgagttagtgcatggttatatactggtctacagtgccaagcggaaggcctccatgggcatgctgcgggccttcttgtccgaagtgcaggacactatccccgttcagctcgtggctgttacagattcgcaggctgacttttttgagaatgaagccataaaagaactgatgacagagggtgagcacatcgccacggagatcacagccaagtttactgctctttactccctatcgcagtaccacaggcaaacggaggtattcacattgtttttttctgacgtgctagaaaaaaaaaatatgatcgaaaactcctacctctccgacaacacacgcgaatcaactcatcagtccgaggatgtgttcctgcccagccctcgggattgcttcccatacaacaattaccctgattccgacgatgatactgaggcgcctcccccatatagcccaataggcgacgatgtgcagttgctacctaccccctccgatcgaagtcggtatagattagacctggaaggcaatgaatatcctattcatagtacgcctaactgtcacgatcatgaaaggaaccacaaagttcctccccccatcaaaccaaaaccagttgttcctaagactaatgtgaaaaagcttgatcccaatctgctgaaaaccatcgaggccgggattggaaagaatcccaggaagcagacctcacgggtgcccctggctcaccccgaagacatggaccctagcgataattatgccgagcctattgataccatttttaagcagaagggctacagcgacgaaatatatgtggtgcctgacgactctcagaacaggattaaaattcgaaattcattcgttaataacacacaaggagatgaggagaacgggttctcagaccggacttcaaaatctcacggtgagaggcgtccgtcgaagtataagtataaaagcaaaactttgttttccaaagctaagtcctactatcgaagaacccactcagacgcgtctgacgatgaagccttcaccaccagtaagaccaagcgaaaggggcgccatcgaggtagtgaggaagatcctttgctgtcccccgttgagacatggaagggtggcattgataacccagccatcacctctgaccaagagctggacgacaagaagatgaaaaagaaaacccataaggtgaaagaagacaaaaagcagaaaaagaagaccaagaacttcaacccccctaccagacggaattgggaatctaattactttgggatgccgctccaggatctggtaaccgctgaaaagccaatcccactttttgtggaaaagtgcgtggaattcatcgaagacacggggctgtgcacagaggggctctatcgggtcagtggcaacaaaacagatcaggacaacattcaaaagcagttcgatcaggaccacaatatcaatctggtctcaatggaggtgacggtcaacgctgtggcaggcgccctcaaggcgttctttgccgacctgcccgacccattgattccttacagtctgcatccagaacttctggaggctgcaaagatcccggacaagacagagcggctccatgccctcaaggaaattgttaaaaaatttcaccccgtgaactatgatgttttccgttacgtgatcacacacctcaaccgagtttctcagcagcacaaaataaatctaatgacagctgacaatcttagcatctgcttttggcccactctcatgcgaccggatttcgagaaccgggaatttctcagtaccaccaagatccatcaaagtgtggttgaaacattcattcagcagtgtcagttcttcttctataacggcgagatcgtcgaaacaactaacatcgtcgctccgccccctccgtccaatcccgggcaactggtggaaccaatggtgcctctgcaactgccacccccactgcagccacagctcattcaaccacagttgcagaccgacccactgggcattatctag

SEQ ID NO: 281207 - DNA, 4509 bp, Artificial Sequence
  derived and/or modified sequence
atgatggccaaaaacaaggaacctcggcccccatcctacacaatttccatcgtcggactgtcaggaactgaaaaagacaagggcaattgtggggttggaaagtcttgcctgtgcaaccgatttgtgagatcgaaagccgacgaatactaccctgagcacacatctgttttgtcaactattgacttcggtggcagagtggtgaacaatgaccacttcctttattggggcgacataatacagaatagcgaggatggggtcgaatgtaagatacatgtcatagaacagacggaattcattgatgaccagacttttctccctcatcgttcgacaaacttacaaccatacataaagcgggctgccgccagcaaacttcaaagtgccgagaaattgatgtatatctgcaccgaccagttaggccttgagcaagattttgaacaaaaacagatgcccgaaggcaagctcaatgttgatggattcctgctctgtattgacgtgagccaaggctgcaatcgcaaattcgacgaccagttgaagtttgtgaacaacctgttcgtccagctgtctaagtccaaaaagcctgtcattatagccgctacaaagtgtgacgaatgtgttgatcactatctgagggaagtgcaggcctttgctagtaataaaaaaaacttgctggtggtcgaaaccagtgctcgtttcaatgtgaacatcgaaacctgcttcacagccctggtgcagatgctcgacaagacacgctccaagcctaagatcataccctacctcgacgcgtataaaacccagagacagcttgtagtgacagctacagataagttcgaaaagcttgtacagactgttcgtgactatcacgcgacatggaagacggttagtaataagcttaagaatcatcccgattatgaagaatacatcaacctggaggggacaaggaaggcgaggaatacattttccaaacacatcgaacagctcaagcaggagcatatacggaaacgccgcgaagaatatatcaacacactaccaagggctttcaatacacttctgcctaatctggaagaaatagaacatctcaactggagtgaagcactgaagttaatggagaagcgggccgacttccaactgtgctttgtggtcctggagaaaactccctgggacgagactgatcatatcgacaagatcaacgatcgccgaattccgttcgatcttcttagcacactcgaggccgaaaaagtgtatcagaaccacgtccagcatctaatcagcgagaagaggcgcgtggaaatgaaagaaaagttcaaaaaaaccctggaaaaaattcagttcatctcaccaggtcagccttgggaagaagtcatgtgctttgttatggaggatgaagcttataagtacattacggaggcagattcaaaggaggtctacgggagacatcagcgggagatcgttgagaaagccaaggaggagtttcaggagatgctctttgagcactcagagctgttctacgacctagatcttaatgcgactccaagcagcgataaaatgagcgagatccacactgtgttgtccgaagaaccccgttacaaagccctccagaaacttgcaccggaccgtgagtcgcttctattaaagcacatcggcttcgtttatcacccaacaaaggaaacatgtcttagcgggcagaattgcacagatattaaagtggaacagctgctggcctcctcccttctgcaattggaccatggccggctaagactctaccatgactccaccaacatcgacaaggtgaatctgttcattctgggcaaagatggtctagctcaggaactagccaacgaaatacgaacacagtccactgacgatgagtacgctctggacggaaagatctatgagctggacctgagacctgtggacgcaaagtctccctattttctgtctcaactatggaccgccgcgtttaaaccccacggatgcttttgcgtcttcaattccatcgaaagcctcagtttcatcggcgagttcattggtaagatccggactgaggcatcacagatccgaaaggacaaatatatggccaacctaccgttcactctcatcctcgctaaccagcgggattcaatatcgaagaacctgcccatcctaagacaccagggtcagcagctggccaacaagcttcagtgccccttcgtcgacgtcccggctggaacatacccgcgtaaatttaatgagactcagattaagcaagccctgcggggcgttctagaaagtgtgaaacataatctcgatgtggtgtcccctatccccgcaaacaaagatctgagcgaagccgacctgcggattgtgatgtgtgccatgtgcggcgatccattctccgtcgacctcatccttagccctttcctggattcccactcatgttccgctgcccaggcgggccagaacaactcacttatgctggacaaaattatcggggagaagaggagacggattcaaattacaatcctgagctatcatagctccatcggggtgcgtaaagatgagctcgtgcacgggtatatcctagtatactcagcaaagcgaaaggccagtatgggcatgctacgcgcctttctgtctgaggtacaagacacaattccagtacagctggtggccgtcactgactcccaagctgacttcttcgagaacgaagctattaaggagttgatgaccgaaggcgaacatattgcaaccgagatcaccgccaagtttacagccctctattctcttagccaataccacagacaaacagaggtctttaccctgttcttcagcgacgtcctggagaaaaaaaatatgatcgaaaactcatacctaagcgataatactcgcgagtctacgcaccagagcgaagatgtgtttctcccctcaccacgcgactgcttcccttacaataattaccccgactcagatgatgataccgaggctcctcctccatactctcccattggggacgacgtgcagttgctgccgaccccatcagacaggtcccgctatcggcttgacctggaaggaaatgaatatcctatccattcaactcccaattgccatgatcatgagagaaatcataaggtgcccccccctattaaacccaaaccagtggtaccgaagactaatgtgaagaagctagaccccaacctgctgaagacaattgaagccggtattggaaagaatccccgtaaacagactagtcgcgtgcccttagcccatcccgaggacatggatccatccgataattacgcggagcctatagatacgatttttaaacagaaagggtactccgacgagatttacgtcgtgcctgatgactcccagaatcgcattaagattagaaactcatttgtcaataatacacaaggcgacgaggagaatggctttagtgacagaaccagtaaatcccatggcgagagaaggccttcaaaatataagtacaagagtaaaaccttgttttccaaagccaaatcatactacagaagaacgcatagcgacgcaagcgatgacgaggctttcacaacatctaagactaagcggaaaggtagacatcgcggttccgaggaggatccactgctgtctcccgtggagacttggaaaggcggtatcgataatccagcaattacctcggatcaggagttagatgacaagaagatgaagaaaaaaacgcataaggttaaagaagataagaaacaaaaaaagaagactaagaactttaatccccccacccggagaaactgggaaagtaactattttggtatgcccctgcaggacctggtgaccgctgaaaaacctattccccttttcgtggagaagtgcgtcgagttcattgaagataccgggctatgcacagaaggattgtaccgggtgtcaggcaataagacggatcaggacaatatccagaaacaattcgatcaggatcacaacattaacctggtgagtatggaggtaaccgtaaacgcggtggcaggcgcattgaaggcatttttcgcggacctgcctgaccctttgatcccttacagcctgcacccggagctgctcgaagccgctaagatcccagataaaacagaaaggttgcatgccctgaaggagatcgtgaagaagtttcaccctgtaaattacgatgtctttcggtatgtaattacccatcttaacagagtgtcacagcagcacaagatcaatcttatgacagccgacaatctctcaatttgtttctggcctaccctcatgaggcctgatttcgaaaatcgagagttcctgtcgaccacaaaaatccaccagtccgtggtcgagaccttcatccagcagtgtcaatttttcttctacaacggggaaattgtggaaacaactaacatagttgccccaccccccccaagcaatccaggacaattggtagaaccaatggtgccccttcaactcccgcctcctctgcaaccgcagctaattcagccccagctacagacagacccgcttggcatcatatag

SEQ ID NO: 281208 - DNA, 114 bp, Artificial Sequence
  derived and/or modified sequence
atgatggcgaagaacaaggaacccaggccgccatcctatacaattagtattgtggggcttagcggaacagagaaggacaagggaaattgtggcgtggggaagagctgtctatag

SEQ ID NO: 281209 - DNA, 4509 bp, Artificial Sequence
  derived and/or modified sequence
atgatggccaagaacaaggagccccggccccccagctacaccatcagcatcgtgggcctgtctggaacagagaaggacaagggcaactgtggggtgggcaagagctgcctgtgcaacagatttgtgcgcagcaaggcagatgagtactacccagagcacacctctgtgctgagcaccatcgactttggaggccgggtggtgaacaatgaccacttcctgtactggggagacatcatccagaacagtgaagatggagtggagtgcaagatccacgtgattgagcagacagagttcattgatgaccagaccttcctgccccacaggagcaccaacctgcagccctacatcaagagagctgctgccagcaagctgcagagcgctgagaagctgatgtacatctgcacagaccagctgggcctggagcaggactttgagcagaagcagatgcctgagggcaagctgaatgtggatggcttcctgctgtgcattgatgtgtcccagggctgcaacaggaagtttgatgaccagctgaagtttgtgaacaacctgtttgtgcagctgagcaagagcaagaagcctgtgatcatcgccgccaccaagtgtgatgaatgtgtggaccactacctgcgggaggtgcaggcctttgccagcaacaagaagaacctgctggtggtggagaccagcgcccgcttcaacgtgaacatcgagacctgcttcaccgccctggtgcagatgctggacaagaccaggagcaagcccaagatcatcccctacctggatgcctacaagacccagaggcagctggtggtgacagccacagacaagtttgagaagctggtgcagacagtgcgggactaccacgccacctggaagacagtgagcaacaagctgaagaaccacccagactatgaggagtacatcaacctggagggcaccaggaaggccaggaacaccttcagcaagcacatcgagcagctgaagcaggagcacatcaggaagaggcgggaggagtacatcaacaccctgccccgggccttcaacaccctgctgcccaacctggaggagattgagcacctgaactggagcgaggccctgaagctgatggagaagagagctgacttccagctgtgctttgtggtgctggagaagaccccctgggatgaaacagaccacatcgacaagatcaatgaccggcgcatcccctttgacctgctgagcaccctggaggccgagaaggtgtaccagaaccacgtgcagcacctgatcagcgagaagagaagagtggagatgaaggagaagttcaagaagaccctggagaagatccagttcatcagccctggccagccctgggaggaggtgatgtgctttgtgatggaggatgaggcctacaagtacatcacagaagctgacagcaaggaggtgtatggccgccaccagcgggagatcgtggagaaggccaaggaggagttccaggagatgctgtttgagcacagcgagctgttctatgacctggacctgaatgccacccccagcagtgacaagatgtctgagatccacacagtgctgtctgaggagccccgctacaaggccctgcagaagctggccccagaccgggagagcctgctgctgaagcacatcggctttgtgtaccaccccaccaaggagacctgcctgagcggccagaactgcacagacatcaaggtggagcagctgctggccagcagcctgctgcagctggaccacggccgcctgcggctgtaccatgacagcaccaacatcgacaaggtgaacctcttcatcctgggcaaggatggcctggcccaggagctggccaatgagatccgcacccagagcacagatgatgaatatgccctggatggcaagatctatgagctggacctgcggcctgtggatgccaagagcccctacttcctgagccagctgtggacagctgccttcaagccccacggctgcttctgtgtgttcaacagcattgagagcctgtccttcatcggggagttcatcggcaagatcagaacagaggccagccagatcaggaaggacaagtacatggccaacctgcccttcaccctcatcctggccaaccagagggacagcatcagcaagaacctgcccatcctgcggcaccagggccagcagctggccaacaagctgcagtgcccctttgtggatgtgcctgctggcacctaccccaggaagttcaatgagacccagatcaagcaggccctgcggggcgtgctggagagcgtgaagcacaacctggatgtggtgagccccatcccagccaacaaggacctgtctgaggccgacctgcgcatcgtgatgtgtgccatgtgtggggaccccttctctgtggacctgatcctgagccccttcctggacagccacagctgcagcgctgcccaggccggccagaacaacagcctgatgctggacaagatcatcggggagaagagaagacgcatccagatcaccatcctgagctaccacagcagcattggagtgaggaaggatgagctggtgcacggctacatcctggtgtacagcgccaagaggaaggcctccatgggcatgctgcgggccttcctgtctgaggtgcaggacaccatccctgtgcagctggtggccgtgacagacagccaggccgacttctttgaaaatgaggccatcaaggagctgatgacagaaggagagcacatcgccacagagatcacagccaagttcaccgccctgtacagcctgagccagtaccaccggcagacagaggtgttcaccctcttcttcagtgatgtgctggagaagaagaacatgattgagaacagctacctgagtgacaacacccgggagagcacccaccagagtgaagatgtgttcctgcccagcccccgggactgcttcccctacaacaactacccagacagtgatgatgacacagaggcccccccaccctacagccccatcggagatgatgtgcagctgctgcccacccccagcgacaggagccgctaccgcctggacctggagggcaatgagtaccccatccacagcacccccaactgccacgaccacgagaggaaccacaaggtgcccccacccatcaagcccaagcctgtggtgcccaagaccaacgtgaagaagctggaccccaacctgctgaagaccatcgaggccggcatcggcaagaaccccaggaagcagaccagccgggtgcccctggcccaccctgaggacatggaccccagcgacaactatgcagagcccatcgacaccatcttcaagcagaagggctacagtgatgagatctacgtggtgcctgatgacagccagaaccgcatcaagatccggaacagctttgtgaacaacacccagggagatgaggagaatggcttcagtgacaggaccagcaagagccatggagagcggcggcccagcaagtacaagtacaagagcaagaccctcttcagcaaggccaagagctactacagaaggacccacagtgatgccagtgatgatgaggccttcaccaccagcaagaccaagaggaagggccgccaccggggcagcgaggaggaccccctgctgagccctgtggagacctggaagggcggcatcgacaacccagccatcaccagtgaccaggagctggatgacaagaagatgaagaagaagacccacaaggtgaaggaggacaagaagcagaagaagaagaccaagaacttcaacccccccaccaggaggaactgggagagcaactacttcggcatgcccctgcaggacctggtgacagctgagaagcccatccccctgtttgtggagaagtgtgtggagttcatcgaggacaccggcctgtgcacagagggcctgtacagagtgtctggcaacaagacagaccaggacaacatccagaagcagtttgaccaggaccacaacatcaacctggtgtccatggaggtgacagtgaatgctgtggccggggccctgaaggccttctttgctgacctgcctgaccccctcatcccctacagcctgcaccctgagctgctggaggccgccaagatcccagacaagacagagcggctgcacgccctgaaggagatcgtgaagaagttccaccctgtgaactatgatgtgttccgctacgtgatcacccacctgaacagagtgtcccagcagcacaagatcaacctgatgacagctgacaacctgagcatctgcttctggcccaccctgatgaggccagactttgaaaatcgggagttcctgagcaccaccaagatccaccagagcgtggtggagaccttcatccagcagtgccagttcttcttctacaatggagagatcgtggagaccaccaacatcgtggcccctcctccacccagcaaccctggccagctggtggagcccatggtgcccctgcagctgcccccacccctgcagccccagctgatccagccccagctgcagacagaccccctgggcatcatctag

SEQ ID NO: 281210 - DNA, 114 bp, Artificial Sequence
  derived and/or modified sequence
atgatggccaagaacaaggagccccggccccccagctacaccatcagcatcgtgggcctgtctggaacagagaaggacaagggcaactgtggggtgggcaagagctgcctgtag

SEQ ID NO: 281211 - DNA, 4509 bp, Artificial Sequence
  derived and/or modified sequence
atgatggccaagaacaaggagccccggccccccagctacaccatctcaatagtggggctctccgggaccgagaaagataagggaaattgtggtgtggggaaaagctgtttgtgtaataggttcgtacgaagcaaagccgatgagtactatcccgagcacacttccgtattatccaccatcgatttcggtggccgggttgtcaacaacgaccacttcctgtattggggggacattattcagaattcagaagacggtgtcgaatgcaaaattcatgttattgagcagacagagtttattgatgaccaaacctttctcccacacagaagcacaaacctgcagccttatataaagcgggctgccgcaagtaaactgcagtcagcggagaaactgatgtatatatgcactgaccagttaggccttgagcaggactttgagcagaagcagatgccagagggaaagctgaatgtggacgggtttctcctgtgtatcgatgtgtcacagggatgtaatcgcaagttcgacgaccagctaaagttcgtcaataatctttttgtgcaactgagcaaatccaagaaacccgtaattatagctgccacgaagtgcgatgaatgcgtagatcactacctgagagaggtccaggccttcgcctccaataaaaaaaatctgctggttgtggagactagtgcacgttttaacgtaaatattgagacctgctttacagccctagtgcagatgttggataagacaaggtccaagcccaaaattattccctacctggatgcatataagacccagaggcaacttgtggtaactgctaccgacaaattcgaaaagcttgtccagaccgtgagggactatcatgctacctggaagacagtgtccaataaacttaaaaatcatccagattacgaggaatacattaacctggaaggtacccgaaaggcccgtaatactttcagtaagcatatcgaacagctcaaacaggaacatatacggaagcgtagagaagagtatattaatactcttcctcgggctttcaacactcttttgccaaacctggaggagatcgaacacctgaattggtctgaggccctgaaactgatggaaaaacgggccgacttccagctgtgctttgttgtcctggaaaagacgccgtgggatgaaactgatcatatcgataagatcaatgataggcggataccctttgacctgctcagtaccttggaggccgaaaaagtctatcagaaccatgttcagcacctcatctcggagaaaagaagagtggaaatgaaagagaaatttaagaagaccttagaaaagatacagttcatttcccctggccagccatgggaggaggtgatgtgttttgtcatggaggacgaagcctacaaatatattactgaggctgacagtaaagaagtctacgggagacatcagagagagattgttgaaaaagcaaaggaggagttccaggaaatgctattcgaacacagcgaactgttttacgacctggacctgaatgccactcctagttctgataaaatgtcagagatccacactgtattgagcgaagaacccagatataaagctctccagaagctggcacccgatcgcgaaagtctcctgctgaagcacatcggattcgtgtaccaccctaccaaggagacatgcctttcagggcaaaattgcaccgacattaaggtcgagcagctgctggcatcttcccttctgcagctggaccatggcaggcttagactgtatcatgatagcaccaatatcgacaaggtgaatttgttcatactggggaaagatggcttagcacaagagctcgccaacgagatccgtacacagtctaccgacgatgagtacgcactcgatggcaagatctatgaactggatctgagacctgttgatgccaagagcccatatttcctttctcagctgtggacagccgcatttaagccacacggttgtttttgcgtgttcaacagcatagaaagcctaagctttattggagaattcatcggcaagattcgtactgaagcttcccaaatccgaaaagataaatatatggcgaatctccctttcactttgatcctcgccaatcaacgggacagtatttctaagaatctgcctatcttgaggcatcagggacagcagcttgcaaataaactgcagtgtccttttgtcgacgtgccagccggcacatatccacgaaagtttaacgaaacccagatcaagcaggcactgcggggggtgctggaatctgtcaagcacaacctggacgtcgtgtctcccatacctgcaaataaggatctgagcgaagcggacctccgcatcgtgatgtgcgcgatgtgtggggaccctttctccgttgatctcattttatccccattcctggacagtcattcctgcagcgcagctcaggcaggtcagaataattcgctgatgctggacaagatcatcggcgaaaagcgacgacggattcaaatcacaatactctcctaccattccagtattggcgtgcggaaggacgagctcgtgcacgggtatatcctcgtatacagtgctaaacggaaggcatcgatgggcatgttgcgtgcatttctgagcgaggttcaagacaccatccctgtacagctcgtagcagtcacggactcccaagctgatttctttgaaaatgaggccatcaaggaattaatgacagagggagagcatatagccactgagatcactgcgaaatttacagcactatactctttatcacaataccacagacagaccgaagtgttcactctctttttctcggatgtcttagaaaaaaaaaatatgatagagaatagttacctttccgataacaccagagagtccactcaccagtctgaggatgtattcctgccgagccctagggactgttttccatacaataactatccggactccgacgacgataccgaggccccgcccccttatagccctataggggatgacgtgcagttgttgcctactcctagtgaccgttctaggtaccgccttgaccttgagggcaatgagtatccaattcacagcacccctaactgccacgaccatgaaagaaatcacaaggtgccacctcctataaaacctaagccagtcgtccctaaaacaaacgtcaagaagctggaccccaacctgttaaagacaattgaggccgggatcgggaaaaatcctcgcaaacagacatctcgagtgcccctagcccatcccgaagatatggacccctcggacaactacgcagagcctatcgacaccatcttcaaacagaagggctacagtgatgagatctacgtggtcccagacgattcccagaacaggattaagatccgcaatagtttcgtcaataatactcaaggcgacgaagaaaatgggttttccgatcggacgtccaaatcgcacggagagcgacgcccttctaagtataagtataaatctaaaactttatttagtaaggccaaatcttactatcgcagaacacattcagacgcaagcgacgatgaggcattcactacctccaagacaaaaagaaaaggaaggcataggggatccgaagaggatccactactcagccccgtcgaaacttggaaaggcggaatcgataaccctgcaatcactagcgatcaggaactggacgataaaaagatgaagaaaaaaacccacaaggttaaagaagataagaagcagaaaaagaagaccaagaacttcaacccccctacacgtcgtaattgggagtctaattattttggcatgcccctccaagatctggttacagccgaaaagcccattcctctgtttgtggagaagtgcgtggaattcatcgaagacaccggactctgcaccgaaggcttgtatcgagttagcggcaacaagaccgaccaggataatatccagaagcaatttgatcaggaccacaatatcaacctcgtgagtatggaagtgactgttaatgctgtcgcaggagccctcaaagccttttttgcagaccttcccgaccctctcattccttactctttgcaccctgaactcctggaagccgcaaagatcccagataagacggagcgcctccatgcccttaaggagatcgtcaaaaagttccaccctgtgaattacgacgtgtttcggtacgtgatcactcatctcaacagagtgtctcagcaacacaagatcaatctgatgaccgctgacaatcttagtatttgcttctggccgaccctgatgcgaccagactttgaaaatcgcgagttcctatccacaactaagatccatcaatctgtggtcgagacttttatccagcagtgtcagttcttcttttataacggcgagatcgttgaaaccacaaatattgtagcgcccccgccaccgagcaatcctggtcagctggtagaaccgatggtcccgctccagctcccgcccccactgcagccacaattaatccagccccagctgcaaactgacccgctggggatcatatag

SEQ ID NO: 281212 - DNA, 4509 bp, Artificial Sequence
  derived and/or modified sequence
atgatggccaagaacaaggagccccggccccccagctacaccatcagcatcgtggggctctcgggcaccgagaaagacaaaggcaactgtggggtaggaaagagctgcttgtgtaatagattcgtacggtccaaagccgacgagtattaccctgaacatacaagcgtgctgagtacaatcgatttcggtggacgcgtcgtgaacaatgaccatttcctgtattggggagatatcattcagaactctgaagacggagtcgagtgtaaaatacatgtcattgaacagactgaattcatcgacgaccaaacattcttgccccatagatcgactaacctgcagccttacatcaaacgcgccgctgctagcaagttgcagtccgcagaaaagctaatgtatatctgtactgatcagcttggactggaacaggatttcgaacagaaacagatgccggagggcaagctgaacgtggatgggttcttgctctgcatcgacgtttcccaaggatgcaataggaaattcgacgatcagttgaagttcgtcaataatctgtttgtgcagctcagcaagtctaaaaagcccgtaatcattgcggccactaagtgtgacgagtgtgttgaccactacctgcgcgaggtccaagctttcgcaagtaacaaaaaaaacctccttgtcgtggagaccagcgcacgctttaacgtcaacattgagacatgttttacagccctggtgcagatgctggacaagacccgatccaaacccaagattattccttacttggatgcctacaagactcagcgacagctggttgttacagcaaccgacaaattcgagaagctggtccagacagtgcgcgactaccatgctacatggaaaacggtctccaacaagctgaagaaccaccctgactacgaggagtatatcaatcttgagggcacccggaaggccaggaatacattttctaaacacatcgagcagcttaaacaggaacacattcgcaaacgcagagaggaatacataaataccttgccacgcgcctttaatacacttcttcccaatcttgaagaaatagagcatctaaactggtccgaagcattgaagctgatggaaaagcgggctgactttcagctgtgcttcgtcgtgctcgagaaaaccccgtgggacgaaaccgaccacatcgacaaaattaacgaccgccgcatccctttcgacctgttatctaccctggaagctgagaaagtgtatcagaaccatgtccagcacttgataagtgagaaaagaagggtggagatgaaggaaaagttcaagaagactctcgagaaaatacagttcataagtcccggccagccttgggaagaggtgatgtgctttgtcatggaagacgaagcttacaaatacataaccgaggccgactctaaggaagtgtatgggagacaccagcgagaaatcgtggaaaaggccaaggaagaatttcaggaaatgctgttcgaacactcagaattgttctatgatctcgacttgaacgccaccccgtcctcagataagatgagtgaaattcacacggtcttgtcagaagaaccgcgctataaagcgctgcagaagctggcgccggaccgagaatctctgctcttgaagcacattggctttgtctaccatcccacgaaagagacttgcttgagcggtcagaactgtacagacattaaggtggaacagctcctggcttctagtctgcttcagctggatcatgggcggctgaggttatatcacgattcaacaaacatcgataaggtgaatctgtttattctggggaaagacggactggcacaagaactggccaacgaaatcagaacccaatcaactgatgatgaatacgctcttgacggcaagatttatgagctggacctgcggcctgtggatgctaagagcccttactttttgtctcaactctggaccgccgcattcaagccccatgggtgcttctgcgtgtttaattccatagagtctctaagctttatcggggagtttattggcaagatccggactgaagcatcccaaattagaaaggataagtacatggccaacctgccttttaccctcattttggcgaatcagcgcgacagtatctccaagaacctccccatacttcgccaccagggacaacagttagcgaataagctgcagtgtccattcgtggacgttccagctggaacgtaccccaggaaatttaacgaaacccagataaaacaagctttgaggggggttctggaatctgttaagcacaacttggatgtggtgtctcccatacctgcaaataaagatctcagcgaggcggatcttcggattgtcatgtgtgccatgtgcggagaccccttctcagtagaccttatcttaagtcccttcctcgactctcatagctgttcagctgctcaggctgggcaaaataattccctgatgttggacaagatcattggcgaaaagagaaggaggatacaaatcacaatcctgagctatcattcatccatcggtgtacgaaaagacgaacttgtccatggatacatactggtatattctgccaaaaggaaggcttccatgggtatgttgagagccttcttgtcagaagtgcaagataccattcccgtccaacttgtagctgtcactgattcacaagctgatttctttgagaacgaggcaataaaggagctgatgaccgagggcgagcacatagccaccgagatcacggccaagttcactgcattatatagtctgtctcaataccaccgccaaacggaggtcttcaccctgttcttcagtgacgtgttagagaagaagaatatgatcgagaacagctatttgtctgataatacccgggagtcgacccatcagagcgaagatgtcttcctgccaagcccaagagattgtttcccctacaacaattaccctgacagcgatgatgataccgaggctccccccccttacagtcctattggggatgacgtccagctcctgcccaccccctcggataggtcccggtataggttggatttagagggcaacgaataccctattcactccacccccaattgccacgaccacgagcgaaaccataaagtaccgccgcccatcaaacccaagcccgttgtacctaagacaaatgttaaaaagttggatcccaacttgctcaagactatcgaagccggcatcggaaaaaatcctcggaagcagaccagccgtgtgcccttggcccacccagaggacatggacccatccgataattacgccgagccaattgatacgatctttaagcagaaaggttacagcgacgagatttacgttgttccagacgatagtcagaacagaatcaaaatccggaattctttcgtaaataatacgcagggagatgaggaaaacggctttagtgatagaacgagcaagagccacggggagaggcgtccctccaaatacaaatacaagtcgaagaccttgttttcaaaggcaaaatcttattaccggagaactcacagcgatgctagtgatgacgaggccttcacaacgtcaaagacaaaacgaaaagggagacatagaggtagcgaggaagacccccttctgagtcccgttgagacctggaaaggggggatagataatcccgcaatcacctccgaccaggaactcgatgacaagaagatgaaaaaaaagactcacaaagttaaagaagataagaagcagaagaagaaaacaaagaactttaatccacctactcggcgcaattgggagtcaaactacttcgggatgcccttgcaggacctagtgacggctgagaaacctatcccattgtttgtcgaaaaatgcgtggaattcattgaggataccgggctgtgcacagaaggactgtaccgggtatcagggaataaaaccgaccaggacaatatacaaaagcagtttgaccaggaccacaatatcaatcttgtcagcatggaagttaccgtgaacgctgtggctggggctttgaaggccttctttgcagatctgcccgatccgctgatcccatacagcctgcacccggagctcctggaagccgctaaaatacctgataagacagagcgactacatgccctcaaggagattgttaaaaaattccaccccgtgaattacgacgtgttcagatatgtgatcactcatttgaatagagtgagccagcagcacaagattaacctgatgactgcagataacctgagcatctgcttctggcccaccctgatgagacccgattttgaaaaccgcgaattcttaagtacgactaagattcaccagtccgtcgtggagacatttattcagcagtgccagttcttcttctacaatggggagatcgtagagaccacaaacattgtagcccccccccctccaagcaatcccggacagctggtggagccaatggtgcctctgcagctccctcctccccttcagccacagctgatccaaccgcagcttcagactgaccctcttggaatcatctag

SEQ ID NO: 281213 - DNA, 114 bp, Artificial Sequence
  derived and/or modified sequence
atgatggccaagaacaaggagccccggccccccagctacaccatctcaatcgtggggttgagtggaacagaaaaagacaaggggaattgtggcgtcggaaaaagctgcttgtag

SEQ ID NO: 281214 - DNA, 4508 bp, Artificial Sequence
  derived and/or modified sequence
atgatggccaaaaataaggagccacggccacccagttatactatatccattgtggggttaagtggtaccgagaaagacaaagggaattgcggcgtcggaaaaagttgcttatgcaatagatttgtaagatccaaggccgacgaatattacccggaacacacttcagtgctgtctaccattgactttgggggtcgagtcgtcaataatgatcatttcctatactggggtgatatcatccagaacagcgaggatggcgtcgagtgcaaaatccacgtaatcgaacagaccgagtttattgacgaccagacatttctaccacatcgtagtacgaacctccagccttacattaaaagggcagccgctagcaaactgcagagcgccgagaaactcatgtacatatgcaccgatcagctgggactcgaacaagacttcgagcagaagcagatgccggagggtaagctcaacgtggatgggttcttactttgcatcgatgtgtcacaggggtgtaaccgaaagtttgacgaccagctcaaattcgtaaacaacctgttcgttcagttgtctaagagcaagaagcccgtgattatagctgctacaaagtgcgacgaatgcgttgatcattacctgagagaggtccaagcatttgcctccaataaaaagaacttgctagtggtggagaccagcgctcgttttaatgtgaacatcgaaacctgttttaccgcactggtccagatgctggacaagaccaggtcaaagcccaaaatcattccatacctggatgcatacaaaacccagagacaacttgtagtgaccgcaaccgacaagtttgaaaagctggtgcagactgtgcgggactaccacgctacgtggaagacggtgtctaacaaattgaaaaaccaccccgattacgaagagtacattaatttggagggcactagaaaggctagaaatacctttagcaagcatatcgagcaactgaaacaagaacacattaggaagcgaagggaagagtatattaatacactgccaagggcctttaataccctcctgcccaaccttgaggaaatcgaacacctgaattggagtgaggcacttaaattaatggagaagagggctgacttccaactgtgcttcgtggtgctggagaagactccctgggacgagactgatcatatagataagataaacgaccgaaggatcccttttgacctgttatctacgttagaagccgagaaagtgtaccagaatcacgtccagcacctcatctcagaaaaaagaagggtggaaatgaaggagaaattcaagaaaaccctggaaaagatccagttcatttcccctggccaaccctgggaggaggtgatgtgttttgtcatggaagacgaggcctataagtatataacagaggctgatagcaaggaggtgtatgggaggcaccagagagagattgtggagaaagctaaggaggaattccaagaaatgctgttcgaacattctgaactgttctatgatctggacctgaacgctacaccatcctccgacaagatgtccgaaattcatactgtgctgtccgaggagccacgctacaaagccctccagaaactggccccagaccgcgagtcattgcttttaaaacacattggcttcgtctatcacccgacgaaagagacatgtctgagcggacagaactgtacggatataaaagtggagcagctgctggcaagctccttgttgcagctggatcatggaaggctccgcctatatcacgattccacaaatatcgacaaagtgaacctgttcattctcggcaaagacggtctggcccaggagcttgctaacgaaatacgtacccagagcacagatgacgaatatgcattagatggtaaaatttatgaactcgatctcaggcctgtggacgccaaatctccctatttcttgtcccagctctggactgccgcatttaagcctcatggctgcttttgcgtgtttaacagcatagagagtctttcattcatcggcgagttcatcggcaaaatacggacagaggcgtcgcaaatacgcaaggacaagtatatggccaacctgccattcacactcattctagcaaatcagcgcgactcaatcagcaagaaccttcctatactcaggcaccagggacagcaactggcaaataagttacagtgcccatttgtagacgttcccgctggtacctacccacggaaatttaacgagactcagattaagcaggccctcagaggcgttctggaatccgtcaaacataatctggatgttgtgagccctatcccagcaaacaaggatctgagcgaggccgatctgcgtatcgttatgtgcgcaatgtgcggtgacccattcagtgtggatctcattctcagtcccttcctggactcccattcatgctccgcagcacaggcagggcaaaacaactcactgatgcttgacaagatcattggggagaagcggagacggatccagatcaccattctgagctaccactcatccattggtgtgagaaaggatgagttggtccacggatacatcctggtgtactcagccaagcgtaaagcatccatgggaatgctaagggcattcctgtcagaggtgcaggacactatacccgtgcagctggtcgccgtgacagattctcaagccgacttcttcgagaacgaggcgatcaaggaacttatgaccgaaggtgaacacatagccactgaaatcacagccaagtttactgccctgtatagcctgtcacagtatcacagacagactgaagtatttacactgtttttcagcgatgtgctggaaaagaagaacatgatcgaaaatagttatctttccgacaacacaagggagtcaacacaccagtctgaggacgtattcctgccctcgccgagggattgtttcccgtacaataactacccggatagtgacgacgacacagaggccccacccccttatagcccaatcggggatgatgtccagttgttgcctaccccgtcagaccggtcccgctaccgccttgatctagaggggaatgaataccccattcattctacacctaactgtcatgaccacgagcgaaaccacaaagtgccccctcctattaagcctaaacctgtggttcccaaaactaacgtgaagaagctggatccgaacctccttaaaaccatcgaagcaggaatcggaaaaaaccccaggaagcagacatccagagtccccctggcccaccccgaagacatggaccccagcgacaactatgcggaacccatcgacacaattttcaagcagaagggctattcagacgaaatctacgttgttcccgacgattcccaaaaccgcatcaagattcggaattcatttgttaacaacacgcagggtgatgaagagaacggatttagcgatcggacctctaagtctcacggtgagaggagaccatccaagtacaagtacaagtctaagacattgttcagcaaggcaaagagctactacaggcgtacacactcggacgcttccgatgacgaagcgttcacgaccagcaaaacaaaaaggaaagggaggcacagaggatcagaagaagaccccctcttatctcctgtcgagacctggaaggggggaattgacaatccagcaattacgagtgatcaggagctggacgacaaaaaaatgaagaagaaaacccacaaagtgaaggaggataaaaagcaaaaaaagaaaaccaaaaatttcaatccacctacccgacgcaactgggaatctaactacttcggcatgccactgcaggatctggtcaccgcagagaaaccaatccctctctttgtggagaagtgtgtggagttcatcgaagacacgggactctgcacagaggggctctatcgggtcagcggcaacaagactgaccaggataacattcagaagcagtttgaccaagatcacaatatcaatcttgtctcgatggaagtcaccgtaaacgccgtggccggagctttaaaggcctttttcgcggaccttccagacccactgatcccctatagcctccatcctgagttgcttgaagccgcaaagattcccgacaagaccgagcgccttcacgccttgaaggagatagtgaagaagtttcaccccgtgaactatgacgtgtttcgctatgttattacccacctgaaccgggtgtcccagcagcacaaaatcaacttgatgacagctgacaacttgagtatctgtttttggccaactctcatgaggcctgactttgagaatagggagtttttgtccactactaagattcaccagtcagtggtcgagacatttatccagcagtgccaatttttcttctacaacggggagattgtcgagactactaacatcgttgcccctcctcccccatccaaccccggtcaactagtggaaccaatggtgcccttacagctcccccctccattacagccccagctgattcagcctcaactccagactgaccccctgggtatcatcta

SEQ ID NO: 281215 - DNA, 4509 bp, Artificial Sequence
  derived and/or modified sequence
atgatggccaagaataaggaacctagaccaccgtcctacacaatctcaatcgtcggtctgtcaggaacagaaaaagacaagggcaattgcggcgttggcaagtcatgcttgtgtaacagattcgtgaggagtaaagctgacgaatactaccctgaacacaccagtgtgttgagcactattgattttgggggtagagttgtaaacaacgatcactttctgtattggggagacattattcagaactctgaggatggagtggagtgcaagattcacgtcattgagcagacagagtttatcgatgaccagacctttttgcctcacagatctacaaatctgcagccatacatcaaaagggccgcagcgtccaaactgcagagtgctgagaaactgatgtacatatgcacagaccagctgggtctcgagcaagatttcgagcagaagcagatgccagaagggaaactcaacgtcgatggattcctgctgtgtatcgatgtgagtcaggggtgtaaccgaaaattcgacgatcagttaaaattcgtgaataacctgtttgtacagttgtctaaatccaaaaagcccgtgatcatcgcggctacaaagtgcgacgagtgtgttgaccattacctaagggaggttcaggctttcgcctcaaacaagaagaatcttctcgtcgttgagacaagtgccaggttcaatgtgaatatcgagacttgcttcaccgccttggtgcaaatgctcgataaaacacgatccaagccgaagattatcccatacctggacgcctacaagacccagcgacagcttgtcgtgaccgctaccgacaaatttgagaaactcgttcaaaccgtgcgggattatcatgcaacctggaaaacagtctccaataagctgaagaatcacccagactatgaagagtatattaacttggagggaaccaggaaggcacggaatacctttagcaaacatattgaacagttgaaacaggagcacatcagaaagcgtagagaagagtacattaacaccttaccaagagcatttaatacgcttctcccaaacttggaggagattgagcatttgaactggtccgaggcactgaaacttatggagaagcgtgctgactttcagctctgtttcgtcgtgctggagaagaccccctgggacgagactgaccacattgacaagattaacgaccgcagaattccttttgatcttctatctactctggaagcggagaaagtttaccaaaaccatgtgcagcatctgatatccgagaaaaggcgggttgaaatgaaagagaaattcaaaaaaaccctggaaaaaattcagttcatcagccctggtcagccctgggaggaggtgatgtgtttcgtgatggaggatgaagcttataagtacattacggaagccgacagtaaggaagtgtatggtcggcatcaaagagagatcgtggagaaagctaaagaggaattccaggaaatgctgtttgagcattctgaactcttttatgatctcgatttgaatgcaacaccctcatcggataagatgagcgaaattcacaccgtgttgagcgaagagccgcgatataaggcactccaaaaattagcacctgacagagagtcactgttattgaaacacatcgggtttgtatatcatccgaccaaagagacatgcttgagcgggcagaactgcaccgatatcaaggtcgagcagttgttagcatcaagccttctgcagctggatcacggcagactgcgtctgtatcatgacagcacaaatatcgataaggtcaatcttttcatcctgggcaaagatgggctcgctcaggagctcgccaatgagattcggactcagtccaccgatgacgaatacgctcttgatggcaagatctatgagctcgatctacggcctgtcgacgccaaatccccctacttcctctctcagctgtggacagccgcatttaagccccacggatgcttctgcgtcttcaacagcatcgagtctctatctttcatcggagagttcatcggcaaaattcggacagaagccagccaaatacgcaaagataaatacatggccaacctgccctttactctcatacttgccaatcaacgcgactcgatttctaaaaacctgcctatcctaagacaccagggccagcagctcgctaacaagttacaatgccccttcgtggatgtacctgccggaacctatccacgcaagttcaatgagacacagattaagcaggctttgagaggcgtcttagaaagtgttaagcataacctggacgttgtttcaccaatccccgctaacaaggacttgtccgaggctgacctacgcattgtgatgtgtgccatgtgcggtgatcccttctccgtagacctcatcctctcccctttcctcgacagccactcctgctccgcagcgcaggccggacaaaacaatagcctgatgttggataaaattatcggcgagaagaggagacgtattcagatcacgatcttatcttaccacagctctatcggcgtacgcaaggacgagctagtgcatggctatatcttggtttactcggccaagcggaaagctagcatgggaatgctgcgagcctttctgtctgaggtccaggataccatacccgtccagttggtcgcggtgactgactctcaggcagattttttcgagaacgaggctatcaaagagctcatgaccgaaggcgagcacatcgcgacagagataactgctaaatttacggccctctactcactttcccagtatcatagacagacggaggtttttacactcttcttcagtgacgtgttagagaaaaagaacatgatagaaaattcctacctgagcgacaatacccgggagagcactcatcaatctgaggatgtgttccttccatcaccccgtgactgctttccgtataataattaccccgacagtgatgatgatacagaagcccctcctccttattccccaattggcgatgatgttcagttgttgccaacaccctccgacaggagccgctacaggctggacctggagggcaatgaataccctattcacagcaccccaaattgtcacgatcatgagcggaaccacaaagttccaccacctatcaagccaaagcctgtggtgcccaagacaaatgtgaagaaattggatcccaacctcctaaagaccatagaggccggtatcggcaaaaaccctcgcaagcagacaagcagggtgcccctggcacatcccgaagatatggacccgtccgacaactacgccgaacctatagataccatcttcaaacagaagggctactctgatgaaatatacgtcgtccccgacgatagccaaaaccgtattaaaattcggaacagcttcgtgaataacacccaaggtgatgaagagaatggtttttccgaccggaccagcaaatcccacggcgaacgtagacccagcaagtacaaatataaatctaaaactctcttttccaaggccaaatcatattatcggaggacacactccgatgcatctgacgatgaggcatttactacctcgaagaccaagaggaaaggcaggcatcggggatcagaagaagatcctctgctgtcccccgtcgagacatggaaaggaggcattgacaatcccgctattactagcgaccaagagttggacgacaaaaagatgaaaaagaagacgcacaaggtgaaagaagacaaaaagcagaagaagaagaccaagaattttaatccaccaacaagaagaaactgggagtcaaattatttcggtatgcctttgcaggaccttgttaccgccgaaaaacccatccctctgttcgtcgagaagtgcgtggagttcatagaggacacagggctgtgcactgagggcttgtacagagtgtccggcaataaaaccgatcaggataacattcagaagcagttcgaccaggaccacaatatcaacctcgtcagtatggaagtgaccgtgaatgcggtggcaggagcacttaaggcattttttgcagatctgccggatcctctgatcccgtacagcttgcatcccgagctgttggaagccgctaaaatcccagataaaaccgaacgactacacgcgttaaaggaaattgttaaaaaatttcatcctgtgaactacgacgtgttcaggtacgtcatcactcaccttaaccgcgtgtcgcagcagcataagatcaatttgatgaccgccgacaacctttctatctgcttctggccaactctgatgcggcctgatttcgagaatcgggaatttctatcaacgaccaagatacaccagtcggtggtggagacgtttatccagcagtgtcaattctttttttacaatggagagattgtggaaaccaccaatatagtggcaccaccaccaccatctaaccccggtcaactcgttgaaccgatggtgcctctccaactgccacccccattgcagccacagctaattcagccacaactgcagaccgatccattgggcattatttag

SEQ ID NO: 281216 - DNA, 114 bp, Artificial Sequence
  derived and/or modified sequence
atgatggctaagaataaagaaccgaggcccccaagctatacaataagtattgtggggctgtccggcactgaaaaggataaaggcaactgtggtgtgggtaagtcatgtctgtag

SEQ ID NO: 281217 - DNA, 9604 bp, Artificial Sequence
  derived and/or modified sequence
ctcggtgagcgcgccgaggaagagaggcgagcggagagtggaggaggaggcggcggcggcgggagcggtccccaggaatgtcgctgccgccgccaccgccggggccgctgccgttgaggaggagacggaggagaccgacgttgttaggaagatgatccctatgatcttgaagatgtttctgcacagaaatgagggaaatacaaagaaccaaatacagttctgaaatttgggatctgtattttgagatgattttattttcagaatgagaagcatatctggttacctttatgaatgtagagacatgagaagagagttatgatggcaaaaaacaaagagcctcgtcccccatcctataccatcagtatagttggactctctgggactgaaaaagacaaaggtaactgtggagttggaaagtcttgtttgtgcaatagatttgtacgctcaaaagcagatgaatattatccagagcatacttctgtgcttagcaccattgactttggaggacgagtagtaaacaatgatcactttttgtactggggtgacataatacaaaatagtgaagatggagtagaatgcaaaattcatgtcattgaacaaacagagttcattgatgaccagactttcttgcctcatcggagtacgaatttgcaaccatatataaaacgtgcagctgcatctaaattgcagtcagcagaaaaactaatgtacatttgcactgatcagctaggcttagaacaagactttgaacagaagcaaatgcctgaagggaagctcaacgtagatggatttttattatgcattgatgtaagtcaaggatgcaataggaagtttgatgatcaacttaaatttgtgaataacctttttgtccagttatcaaaatcaaaaaaacctgtaataatagcagcaactaaatgtgatgaatgcgtggatcattatcttagagaagttcaggcatttgcttcaaataaaaagaaccttcttgtagtggaaacatcagcacgatttaatgtcaacattgaaacatgttttactgcactggtacaaatgttggataaaactcgtagcaagcctaaaattattccctatttggatgcttataaaacacagagacaacttgttgtcacagcaacagataagtttgaaaaacttgtgcagactgtgagagattatcatgcaacttggaaaactgttagtaataaattaaaaaatcatcctgattatgaagaatacatcaacttagagggaacaagaaaggccagaaatacattctcaaaacatatagaacaacttaaacaggaacatataagaaaaaggagagaagagtatataaatactttaccaagagcttttaacactcttttgccaaatctagaagagattgaacatttgaattggtcagaagctttgaagttaatggaaaagagagcagatttccagttatgttttgtggtgctagaaaaaactccttgggatgaaactgaccatatagacaaaattaatgataggcggattccatttgacctcctgagcactttagaagctgaaaaagtctatcagaaccatgtacagcatctgatatccgagaagaggagggtggaaatgaaggaaaaattcaaaaagactttggaaaaaattcaattcatttcaccagggcagccatgggaggaagttatgtgctttgttatggaggatgaagcctacaaatatatcactgaggctgatagcaaagaggtatatggtaggcatcagcgagaaatagttgaaaaagccaaagaagagtttcaagaaatgctttttgagcattctgaacttttttatgatttagatcttaatgcaacacctagttcagataaaatgagtgaaattcatacagttctgagtgaagaacctagatataaagctttacagaaacttgcacctgatagggaatcccttctacttaagcatataggatttgtttatcatcccactaaagaaacatgtcttagtggccaaaattgtacagacattaaagtggagcagttacttgctagtagtcttttacagttggatcatggccgcttaagattatatcacgatagtaccaatatagataaagttaacctttttattttagggaaggatggccttgcccaagaactagcaaatgagataaggacacaatccactgatgatgagtatgccttagatggaaaaatttatgaacttgatcttcggccggttgatgccaaatcgccttactttttgagtcagttatggactgccgcctttaaaccacatgggtgcttctgtgtatttaattccattgagtcattgagttttattggggaatttattgggaaaataagaactgaagcttctcagatcagaaaagataaatacatggctaatcttccatttacattaattctggctaatcagagagattccattagtaagaatctaccaattctcaggcaccaagggcagcagttggcaaacaagttgcaatgtccttttgtagatgtacctgctggtacatatcctcgtaaatttaatgaaacccaaataaagcaagctctcagaggagtattggaatcagttaaacacaatttggatgtggtgagcccaattcctgccaataaggacttatcagaagctgacttgagaattgtcatgtgcgccatgtgtggagatccatttagtgtggatcttattctttcacccttccttgattctcattcttgcagtgctgctcaagctggacagaataattccctaatgcttgataaaatcattggtgaaaaaaggaggcgaatacagatcacaatattatcataccactcttcaattggagtaagaaaagatgaactagttcatgggtatatattagtttactctgcaaaacggaaagcttcgatgggaatgcttcgagcatttctatcagaagttcaagacaccattcctgtacagctggtggcagttactgacagccaagcagatttttttgaaaatgaggctatcaaagagttaatgactgaaggagaacacattgcaactgagatcactgctaaatttacagcactgtattctttatctcagtatcatcggcaaactgaggtctttactctgttttttagtgatgttctagagaaaaaaaatatgatagaaaattcttatttgtctgataatacaagggaatcaacccatcaaagtgaagatgtttttctaccatctcccagagactgttttccctataataactaccctgattcagatgatgacacagaagcaccacctccttatagtccaattggggatgatgtacagttgcttccaacacctagtgaccgttccagatatagattagatttggaaggaaatgagtatcctattcatagtaccccaaactgtcatgaccatgaacgcaaccataaagtgcctccacctattaaacctaaaccagttgtacctaagacaaatgtgaaaaaactcgatccaaaccttttaaaaacaattgaagctggtattggtaaaaatccaagaaagcagacttcccgggtgcctttggcacatcctgaagatatggatccttcagataactatgcggaacccattgatacaattttcaaacagaagggctattctgatgagatttatgttgtcccagatgatagtcaaaatcgtattaaaattcgaaactcatttgtaaataacacccaaggagatgaagaaaatgggttttctgatagaacctcaaaaagtcatggggaacggaggccttcaaaatacaaatataaatctaaaaccttgtttagtaaagccaagtcatactatagaagaacacattcagatgccagtgatgatgaggctttcaccacttctaaaacaaaaagaaaaggaagacatcgtggaagtgaagaagatccacttctttctcctgttgaaacttggaaaggtggtattgataatcctgcaatcacttctgaccaggagttagatgataagaagatgaagaagaaaacccacaaagtgaaagaagataaaaagcagaaaaagaaaactaagaacttcaatccaccaacacgtagaaattgggaaagtaattactttgggatgcccctccaggatctggttacagctgagaagcccataccactatttgttgagaaatgtgtggaatttattgaagatacagggttatgtaccgaaggactctaccgtgtcagcgggaataaaactgaccaagacaatattcaaaagcagtttgatcaagatcataatatcaatctagtgtcaatggaagtaacagtaaatgctgtagctggagcccttaaagctttctttgcagatctgccagatcctttaattccatattctcttcatccagaactattggaagcagcaaaaatcccggataaaacagaacgtcttcatgccttgaaagaaattgttaagaaatttcatcctgtaaactatgatgtattcagatacgtgataacacatctaaacagggttagtcagcaacataaaatcaacctaatgacagcagacaacttatccatctgtttttggccaaccttgatgagacctgattttgaaaatcgagagtttctgtctactactaagattcatcaatctgttgttgaaacattcattcagcagtgtcagtttttcttttacaatggagaaattgtagaaacgacaaacattgtggctcctccaccaccttcaaacccaggacagttggtggaaccaatggtgccacttcagttgccgccaccattgcaacctcagctgatacaaccacaattacaaacggatcctcttggtattatatgagtaggaagtgattgcaaacaggctggatttggacaaaaagcaaatctagacatgcatgtttcagggttcagtagtatacttcatgtttcatacagataattcacattcaaaattacattttctctttgaactagatggtattccttattcacttacattacaaatctaagaccatgtgataagcatgactggagaggtttaatttttataaacaaaaatagctataaagtacaaagctgctgctgcatgcaaccttattgcaatcagtatatcattcctgtggcaatttctgtcaccttatattgtgaataaaatttttctatagaaattaaatgatttaaaaactcacctatatgaaacatttaatgcttttcagcctgctttctggctgattttgttatttgatgtgctaatttgggcaacttaatttacattctggcagtcggtgtagataactaaaagcccagttaagtattttataatttcaggctactgaggccatgcttgggatgttgtttgaaagaaagaaaaaatacacttgacatatttcacatttctgtaccttcatctttacttccaagtaaacccgtggatgatttgatgagggataaatgaacctatttcttttacacacataccaaggacatgcttgtggctaaagtgagttgataatgttgtgcaaaggatagttgtcaccaactcatttctttatggtccataatgaaataaaaattttgtatactgttaattctgtaaacagatgcatgttcaaaagatctatgatggtcttgtaatcttaatctaatatattttagatattttaattttttccctcttggggaacacatttagtatagtgtagaaaatacttccatgacattttcatataaggttatataacttttcatacataaacatgaaatttgttgtagaaaattctttaaaccaaacatttaaatctaggacttcaatttaatttgttccttgaatctatttttatgtggcccttaaaaaatatccaaaaaacccattgctaatatagcaataaaaatactttgggtactgacagactctttggagtgtttatattacaaatttgtattcatattcttttctgtgatgtgttgtactaaaatccaaaatggcttttgcaccatttttaagccaattttttcctttgatgttggtaccagaattactataagtgactgctgcttttgggggtaaacattttgttagtgaagataaaaccagaacactaaattatggataaaattttcagaataggtggcacaggtaaatttcactaggttatattttgtgtagtaaagaaaaaaattatttggtcaatgttatcttaattcatactacaatttaagattatcttatgtgtattatagtaaatagatgattttcagattcaaggctcctaagagtttgatttgctctgttttttcctaaaataaatattgtctctcccaactgttaagttctaggtattgtacttccaattttaacttcagaaccaagatgttggcatgaaccaggctgctgttgaagtacatgtatattataaattatcttatttgtgttatactcttacatgttatcttttctaagaaaacaaagtccctattattcctattgcaaagcacacaggaattaagaaagtacagtaatttttaaaaaaaaatccggtaaatgtagtattcttaacctgttctatattacttatacctattgtctatatagctttaatttatagttgtcagtttaactattggcatgtctggcaaagaaaattaaactttaagagttttataaactgtttctaggttgctaaagaatttatttttctactatatatggtatagacaaagcatcaaactatgtacaggaaaaaagcctgactatttctatttggaagtaggctgaaaagagaattttcaaaactgttcgtgtcttcagttcattctgtcataactttgctattgtaatatgtgaataccagtttatttaagctgttctcttttatactgtattaatttaatgttcatctgcgtttagtaccatttttgttattaaaactggcatttaccgtttttcacattaacccaccttgcaccttcccccaaacttatctccacttttctatgcattctatcattgatttgacacacttcatagtgagtcatttaaatactctacgtttggttcaattaaccagtaggttacagttattgaaaattaaagtacagtttaaagctcagtctgttacactgaattgattgtgtttgtttttgccaagggtttagatatgcttttaaatattagaaacatctaagaacagaataacataattaaacttttttctggtaagttactggaaggtttcactgtttagggacctatcatatgagacttcttaaaggattaaaagaataggatagtctcataattgtgagtaaacatcaaggcattatattttacaatactgaataaaatttcatctacacacatgttgccattgtttcatttaaggttcagtgcttatagttaactacaatattggacctaacaggatctagattagcaatataaagaagcatagtggtactctgtttcacactttcagtagatttattagaagtcaaattctattcaacagacacttattaggatatacaactaatttaagaataaaattccaggcacaatatattttttttaaatggtatttgttagtagtgcttcttccccttaacatttacagtgtaaatactgcaggtaaccgcaatctaagttagccaaaaagcagctttttttcccatactgtatgtaaataatgtagacctgggtttttttgtttatttgggtttgtttttttttttgaggtactggaatctaattaatatctcttaggtatcaacaaaagggaacaattggaatgagaatttaggccttagcttccatggtgatttttagttttttatacagtaataattgtgatgctatttgtcaactggatataaatacacatataattttaaaaagtcaaaagtgcttttgtttctttgtttaatgtaatttttgtgcttcacctacaggatgctgcagtaaattaaatatcagtgaagcttctgatgtataaagaatgctatgaataaaacattaagaagctgtgtaattttaagttatagttgcctctatttttaccatttcattggtaaaaattagctaatttttttcaagtgaaatgaaaaataaaaatataaatttatcaatatgatggaaatcttattaaggagatgtattattgaattttcactgtacctgaaaaggagattcaaaattttttctggggatgtatataggtgaaaatttgattttttaaattatcaggaaaacaagataatgcacagatttctaagactaagatcttacctggatgtgatttttgagctgtggctagacattctttagagccactggaaatattttgaaaactattctagttatagcagagctgctaatattaacgaatatatttgtgtcttcatggtttgtgactattaggccaaattttgtggtatatgttgtcagtctggatctggtgaggtctgttcaacatgaatctttgtgttatcttgaatttagtagtttcaaggtacttaaattcttaacagtttctaatttgtttcaatacatatgggacatggttgatttttttactgtattagaactcttggaagttcttagccttttcaggttatgaaatacctgaaagtaaaattttctaagatttaataagggaagatactattcaaatcattttcttaggatagcatctttacatacaatgagaggattgtacaagcattaatctcatattccaacatccagttacttgatgtgatccaagtaccctggtctttttgaagcagttaaaatctaattaattaactttgggagtcttcactattcaattgatcctcatcattgtcctatttgcatgactccattttttcctccactatatgagttttctttgtcagggggagaggagtgggaagagtcacagaatctcatattcacatcttaattaaattgtgtgaaattagtcttttgtggaaattctgtaggcagtatgattttgaaaagctaaccaatgataattagcattttagttaatactaaatgcataaaattataacccttgaaattaatttggtgctggcagttctggtttagtcatttttaccagtagttagtagtattaagacctgcagtatatgcactttttgagtagctgtcaaataattgtagttgagaaacaacttgtttattctcacaattcagattttctattcagttttgtctcaaatagtaagttattgtgaacaatttaataacggccctcctgttctagtttgcctaatattttagttaagatttagtgttttaacctatttttttaagtttattttttgtattagattttatttgaataagttatgtgggtttagtaattgacctatttattcattgcttcactaattcatccagattagttttaagtgtgtatatgtatttgctcaccagatcattttcttgggaccttgaactgtgaatgttttgtcctaaccatttaatattttctaggtacttgctgcaagttcttgaactattttaccagctttaactttggggctcttagtttcttttctccagattcttgttattttattttatccaaataaatatttaggtgttctaagaa

SEQ ID NO: 281218 - DNA, 4881 bp, Artificial Sequence
  derived and/or modified sequence
ctgcgccgccgcgccgccgctccgcccccggtcgggtgtgtggctgcgcgcgccgggagagatgctgaggaagatgatccctatgatcttgaagatgtttctgcacagaaatgagggaaatacaaagaaccaaatacagttctgaaatttgggatctgtattttgagatgattttattttcagaatgagaagcatatctggttacctttatgaatgtagagacatgagaagagagttatgatggcaaaaaacaaagagcctcgtcccccatcctataccatcagtatagttggactctctgggactgaaaaagacaaaggtaactgtggagttggaaagtcttgtttgtgcaatagatttgtacgctcaaaagcagatgaatattatccagagcatacttctgtgcttagcaccattgactttggaggacgagtagtaaacaatgatcactttttgtactggggtgacataatacaaaatagtgaagatggagtagaatgcaaaattcatgtcattgaacaaacagagttcattgatgaccagactttcttgcctcatcggagtacgaatttgcaaccatatataaaacgtgcagctgcatctaaattgcagtcagcagaaaaactaatgtacatttgcactgatcagctaggcttagaacaagactttgaacagaagcaaatgcctgaagggaagctcaacgtagatggatttttattatgcattgatgtaagtcaaggatgcaataggaagtttgatgatcaacttaaatttgtgaataacctttttgtccagttatcaaaatcaaaaaaacctgtaataatagcagcaactaaatgtgatgaatgcgtggatcattatcttagagaagttcaggcatttgcttcaaataaaaagaaccttcttgtagtggaaacatcagcacgatttaatgtcaacattgaaacatgttttactgcactggtacaaatgttggataaaactcgtagcaagcctaaaattattccctatttggatgcttataaaacacagagacaacttgttgtcacagcaacagataagtttgaaaaacttgtgcagactgtgagagattatcatgcaacttggaaaactgttagtaataaattaaaaaatcatcctgattatgaagaatacatcaacttagagggaacaagaaaggccagaaatacattctcaaaacatatagaacaacttaaacaggaacatataagaaaaaggagagaagagtatataaatactttaccaagagcttttaacactcttttgccaaatctagaagagattgaacatttgaattggtcagaagctttgaagttaatggaaaagagagcagatttccagttatgttttgtggtgctagaaaaaactccttgggatgaaactgaccatatagacaaaattaatgataggcggattccatttgacctcctgagcactttagaagctgaaaaagtctatcagaaccatgtacagcatctgatatccgagaagaggagggtggaaatgaaggaaaaattcaaaaagactttggaaaaaattcaattcatttcaccagggcagccatgggaggaagttatgtgctttgttatggaggatgaagcctacaaatatatcactgaggctgatagcaaagaggtatatggtaggcatcagcgagaaatagttgaaaaagccaaagaagagtttcaagaaatgctttttgagcattctgaacttttttatgatttagatcttaatgcaacacctagttcagataaaatgagtgaaattcatacagttctgagtgaagaacctagatataaagctttacagaaacttgcacctgatagggaatcccttctacttaagcatataggatttgtttatcatcccactaaagaaacatgtcttagtggccaaaattgtacagacattaaagtggagcagttacttgctagtagtcttttacagttggatcatggccgcttaagattatatcacgatagtaccaatatagataaagttaacctttttattttagggaaggatggccttgcccaagaactagcaaatgagataaggacacaatccactgatgatgagtatgccttagatggaaaaatttatgaacttgatcttcggccggttgatgccaaatcgccttactttttgagtcagttatggactgccgcctttaaaccacatgggtgcttctgtgtatttaattccattgagtcattgagttttattggggaatttattgggaaaataagaactgaagcttctcagatcagaaaagataaatacatggctaatcttccatttacattaattctggctaatcagagagattccattagtaagaatctaccaattctcaggcaccaagggcagcagttggcaaacaagttgcaatgtccttttgtagatgtacctgctggtacatatcctcgtaaatttaatgaaacccaaataaagcaagctctcagaggagtattggaatcagttaaacacaatttggatgtggtgagcccaattcctgccaataaggacttatcagaagctgacttgagaattgtcatgtgcgccatgtgtggagatccatttagtgtggatcttattctttcacccttccttgattctcattcttgcagtgctgctcaagctggacagaataattccctaatgcttgataaaatcattggtgaaaaaaggaggcgaatacagatcacaatattatcataccactcttcaattggagtaagaaaagatgaactagttcatgggtatatattagtttactctgcaaaacggaaagcttcgatgggaatgcttcgagcatttctatcagaagttcaagacaccattcctgtacagctggtggcagttactgacagccaagcagatttttttgaaaatgaggctatcaaagagttaatgactgaaggagaacacattgcaactgagatcactgctaaatttacagcactgtattctttatctcagtatcatcggcaaactgaggtctttactctgttttttagtgatgttctagagaaaaaaaatatgatagaaaattcttatttgtctgataatacaagggaatcaacccatcaaagtgaagatgtttttctaccatctcccagagactgttttccctataataactaccctgattcagatgatgacacagaagcaccacctccttatagtccaattggggatgatgtacagttgcttccaacacctagtgaccgttccagatatagattagatttggaaggaaatgagtatcctattcatagtaccccaaactgtcatgaccatgaacgcaaccataaagtgcctccacctattaaacctaaaccagttgtacctaagacaaatgtgaaaaaactcgatccaaaccttttaaaaacaattgaagctggtattggtaaaaatccaagaaagcagacttcccgggtgcctttggcacatcctgaagatatggatccttcagataactatgcggaacccattgatacaattttcaaacagaagggctattctgatgagatttatgttgtcccagatgatagtcaaaatcgtattaaaattcgaaactcatttgtaaataacacccaaggagatgaagaaaatgggttttctgatagaacctcaaaaagtcatggggaacggaggccttcaaaatacaaatataaatctaaaaccttgtttagtaaagccaagtcatactatagaagaacacattcagatgccagtgatgatgaggctttcaccacttctaaaacaaaaagaaaaggaagacatcgtggaagtgaagaagatccacttctttctcctgttgaaacttggaaaggtggtattgataatcctgcaatcacttctgaccaggagttagatgataagaagatgaagaagaaaacccacaaagtgaaagaagataaaaagcagaaaaagaaaactaagaacttcaatccaccaacacgtagaaattgggaaagtaattactttgggatgcccctccaggatctggttacagctgagaagcccataccactatttgttgagaaatgtgtggaatttattgaagatacagggttatgtaccgaaggactctaccgtgtcagcgggaataaaactgaccaagacaatattcaaaagcagtttgatcaagatcataatatcaatctagtgtcaatggaagtaacagtaaatgctgtagctggagcccttaaagctttctttgcagatctgccagatcctttaattccatattctcttcatccagaactattggaagcagcaaaaatcccggataaaacagaacgtcttcatgccttgaaagaaattgttaagaaatttcatcctgtaaactatgatgtattcagatacgtgataacacatctaaacagggttagtcagcaacataaaatcaacctaatgacagcagacaacttatccatctgtttttggccaaccttgatgagacctgattttgaaaatcgagagtttctgtctactactaagattcatcaatctgttgttgaaacattcattcagcagtgtcagtttttcttttacaatggagaaattgtagaaacgacaaacattgtggctcctccaccaccttcaaacccaggacagttggtggaaccaatggtgccacttcagttgccgccaccattgcaacctcagctgatacaaccacaattacaaacggatcctcttggtattatatgagtaggaagtgattgcaaacaggctggatttggacaaaaagcaaatctagacatgcatgtttcagggttcagtagtatacttcatgtttcatacagataattcacattcaaaattacattttctctttgaactaga

SEQ ID NO: 281219 - DNA, 543 bp, Artificial Sequence
  derived and/or modified sequence
agcgttattagaaatgcaagagagctggaggctcggggtgtagctgaggttgaaaggtgcacggaacagaaaaagaaaactaagaacttcaatccaccaacacgtagaaattgggaaagtaattactttgggatgcccctccaggatctggttacagctgagaagcccataccactatttgttgagaaatgtgtggaatttattgaagatacagggttatgtaccgaaggactctaccgtgtcagcgggaataaaactgaccaagacaatattcaaaagcagtttgatcaagatcataatatcaatctagtgtcaatggaagtaacagtaaatgctgtagctggagcccttaaagctttctttgcagatctgccagatcctttaattccatattctcttcatccagaactattggaagcagcaaaaatcccggataaaacagaacgtcttcatgccttgaaagaaattgttaagaaatttcatcctgtaaactatgatgtattcagatacgtgataacacatctaaacagggttagtcagcaa

SEQ ID NO: 281220 - DNA, 4509 bp, Artificial Sequence
  derived and/or modified sequence
atgatggccaagaacaaggagcccagaccccccagctacaccatcagcatcgtgggcctgagcggcaccgagaaggacaagggcaactgcggcgtgggcaagagctgcctgtgcaacagattcgtgagaagcaaggccgacgagtactaccccgagcacaccagcgtgctgagcaccatcgacttcggcggcagagtggtgaacaacgaccacttcctgtactggggcgacatcatccagaacagcgaggacggcgtggagtgcaagatccacgtgatcgagcagaccgagttcatcgacgaccagaccttcctgccccacagaagcaccaacctgcagccctacatcaagagagccgccgccagcaagctgcagagcgccgagaagctgatgtacatctgcaccgaccagctgggcctggagcaggacttcgagcagaagcagatgcccgagggcaagctgaacgtggacggcttcctgctgtgcatcgacgtgagccagggctgcaacagaaagttcgacgaccagctgaagttcgtgaacaacctgttcgtgcagctgagcaagagcaagaagcccgtgatcatcgccgccaccaagtgcgacgagtgcgtggaccactacctgagagaggtgcaggccttcgccagcaacaagaagaacctgctggtggtggagaccagcgccagattcaacgtgaacatcgagacctgcttcaccgccctggtgcagatgctggacaagaccagaagcaagcccaagatcatcccctacctggacgcctacaagacccagagacagctggtggtgaccgccaccgacaagttcgagaagctggtgcagaccgtgagagactaccacgccacctggaagaccgtgagcaacaagctgaagaaccaccccgactacgaggagtacatcaacctggagggcaccagaaaggccagaaacaccttcagcaagcacatcgagcagctgaagcaggagcacatcagaaagagaagagaggagtacatcaacaccctgcccagagccttcaacaccctgctgcccaacctggaggagatcgagcacctgaactggagcgaggccctgaagctgatggagaagagagccgacttccagctgtgcttcgtggtgctggagaagaccccctgggacgagaccgaccacatcgacaagatcaacgacagaagaatccccttcgacctgctgagcaccctggaggccgagaaggtgtaccagaaccacgtgcagcacctgatcagcgagaagagaagagtggagatgaaggagaagttcaagaagaccctggagaagatccagttcatcagccccggccagccctgggaggaggtgatgtgcttcgtgatggaggacgaggcctacaagtacatcaccgaggccgacagcaaggaggtgtacggcagacaccagagagagatcgtggagaaggccaaggaggagttccaggagatgctgttcgagcacagcgagctgttctacgacctggacctgaacgccacccccagcagcgacaagatgagcgagatccacaccgtgctgagcgaggagcccagatacaaggccctgcagaagctggcccccgacagagagagcctgctgctgaagcacatcggcttcgtgtaccaccccaccaaggagacctgcctgagcggccagaactgcaccgacatcaaggtggagcagctgctggccagcagcctgctgcagctggaccacggcagactgagactgtaccacgacagcaccaacatcgacaaggtgaacctgttcatcctgggcaaggacggcctggcccaggagctggccaacgagatcagaacccagagcaccgacgacgagtacgccctggacggcaagatctacgagctggacctgagacccgtggacgccaagagcccctacttcctgagccagctgtggaccgccgccttcaagccccacggctgcttctgcgtgttcaacagcatcgagagcctgagcttcatcggcgagttcatcggcaagatcagaaccgaggccagccagatcagaaaggacaagtacatggccaacctgcccttcaccctgatcctggccaaccagagagacagcatcagcaagaacctgcccatcctgagacaccagggccagcagctggccaacaagctgcagtgccccttcgtggacgtgcccgccggcacctaccccagaaagttcaacgagacccagatcaagcaggccctgagaggcgtgctggagagcgtgaagcacaacctggacgtggtgagccccatccccgccaacaaggacctgagcgaggccgacctgagaatcgtgatgtgcgccatgtgcggcgaccccttcagcgtggacctgatcctgagccccttcctggacagccacagctgcagcgccgcccaggccggccagaacaacagcctgatgctggacaagatcatcggcgagaagagaagaagaatccagatcaccatcctgagctaccacagcagcatcggcgtgagaaaggacgagctggtgcacggctacatcctggtgtacagcgccaagagaaaggccagcatgggcatgctgagagccttcctgagcgaggtgcaggacaccatccccgtgcagctggtggccgtgaccgacagccaggccgacttcttcgagaacgaggccatcaaggagctgatgaccgagggcgagcacatcgccaccgagatcaccgccaagttcaccgccctgtacagcctgagccagtaccacagacagaccgaggtgttcaccctgttcttcagcgacgtgctggagaagaagaacatgatcgagaacagctacctgagcgacaacaccagagagagcacccaccagagcgaggacgtgttcctgcccagccccagagactgcttcccctacaacaactaccccgacagcgacgacgacaccgaggccccccccccctacagccccatcggcgacgacgtgcagctgctgcccacccccagcgacagaagcagatacagactggacctggagggcaacgagtaccccatccacagcacccccaactgccacgaccacgagagaaaccacaaggtgcccccccccatcaagcccaagcccgtggtgcccaagaccaacgtgaagaagctggaccccaacctgctgaagaccatcgaggccggcatcggcaagaaccccagaaagcagaccagcagagtgcccctggcccaccccgaggacatggaccccagcgacaactacgccgagcccatcgacaccatcttcaagcagaagggctacagcgacgagatctacgtggtgcccgacgacagccagaacagaatcaagatcagaaacagcttcgtgaacaacacccagggcgacgaggagaacggcttcagcgacagaaccagcaagagccacggcgagagaagacccagcaagtacaagtacaagagcaagaccctgttcagcaaggccaagagctactacagaagaacccacagcgacgccagcgacgacgaggccttcaccaccagcaagaccaagagaaagggcagacacagaggcagcgaggaggaccccctgctgagccccgtggagacctggaagggcggcatcgacaaccccgccatcaccagcgaccaggagctggacgacaagaagatgaagaagaagacccacaaggtgaaggaggacaagaagcagaagaagaagaccaagaacttcaacccccccaccagaagaaactgggagagcaactacttcggcatgcccctgcaggacctggtgaccgccgagaagcccatccccctgttcgtggagaagtgcgtggagttcatcgaggacaccggcctgtgcaccgagggcctgtacagagtgagcggcaacaagaccgaccaggacaacatccagaagcagttcgaccaggaccacaacatcaacctggtgagcatggaggtgaccgtgaacgccgtggccggcgccctgaaggccttcttcgccgacctgcccgaccccctgatcccctacagcctgcaccccgagctgctggaggccgccaagatccccgacaagaccgagagactgcacgccctgaaggagatcgtgaagaagttccaccccgtgaactacgacgtgttcagatacgtgatcacccacctgaacagagtgagccagcagcacaagatcaacctgatgaccgccgacaacctgagcatctgcttctggcccaccctgatgagacccgacttcgagaacagagagttcctgagcaccaccaagatccaccagagcgtggtggagaccttcatccagcagtgccagttcttcttctacaacggcgagatcgtggagaccaccaacatcgtggccccccccccccccagcaaccccggccagctggtggagcccatggtgcccctgcagctgcccccccccctgcagccccagctgatccagccccagctgcagaccgaccccctgggcatcatctag

SEQ ID NO: 281221 - DNA, 114 bp, Artificial Sequence
  derived and/or modified sequence
atgatggccaagaacaaggagcccagaccccccagctacaccatcagcatcgtgggcctgagcggcaccgagaaggacaagggcaactgcggcgtgggcaagagctgcctgtag

SEQ ID NO: 281222 - protein, 505 aa, Artificial Sequence
  derived and/or modified sequence
  misc_feature (1)..(1): Xaa can be any naturally occurring amino acid
XVDVWSLGVILYTLVSGSLPFDGQNLKELRERVLRGKYRIPFYMSTDCENLLKRFLVLNPIKRGTLEQIMKDRWINAGHEEDELKPFVEPELDISDQKRIDIMVGMGYSQEEIQESLSKMKYDEITATYLLLGRKSSEVRPSSDLNNSTGQSPHHKVQRSVFSSQKQRRYSDHAGPAIPSVVAYPKRSQTSTADSDLKEDGISSRKSSGSAVGGKGIAPASPMLGNASNPNKADIPERKKSSTVPSSNTASGGMTRRNTYVCSERTTADRHSVIQNGKENSTIPDQRTPVASTHSISSAATPDRIRFPRGTASRSTFHGQPRERRTATYNGPPASPSLSHEATPLSQTRSRGSTNLFSKLTSKLTRRNMSFRFIKRLPTEYERNGRYEGSSRNVSAEQKDENKEAKPRSLRFTWSMKTTSSMDPGDMMREIRKVLDANNCDYEQRERFLLFCVHGDGHAENLVQWEMEVCKLPRLSLNGVRFKRISGTSIAFKNIASKIANELKL

SEQ ID NO: 281223 - DNA, 1518 bp, Artificial Sequence
  derived and/or modified sequence
taagtagatgtatggagcctcggcgtcattctgtacacactggtcagtggtagcttgccctttgacggccagaatttgaaagaactgagagagagagtactgaggggcaagtatcggatccctttctatatgtctaccgactgcgaaaaccttctgaaacggtttttggtcctaaaccccattaagcggggtaccctcgagcagatcatgaaggacagatggatcaacgccgggcacgaagaagatgaactgaagcccttcgttgagcctgagctggatatctccgatcagaagagaatcgacatcatggtgggtatgggatatagccaggaagaaattcaagagtctctgagcaaaatgaagtatgacgagatcaccgctacatacttactgctgggaagaaagagcagtgaagttcggccatcgtccgaccttaataattcgacgggccaatctcctcaccacaaggtgcagaggtcagtattttcctcacagaaacagagaagatactcagatcacgccggtccagcaatcccaagcgtggtcgcatatcctaagcgaagccagactagtaccgcagattctgatctgaaagaggacgggatttcgagcaggaagtccagtggcagcgccgtgggcggcaagggcattgcgcccgcatcaccaatgttaggaaatgcttctaaccccaataaagccgacattccagaaaggaaaaaatcaagcacggttcccagttctaacaccgcctcaggggggatgacacgccggaatacttacgtctgcagtgaaagaaccaccgctgatcgtcattccgtgatacagaatgggaaggagaattctacaatcccagaccagcggacccctgtggcctctacccattccatctccagcgcagcaactcctgaccgcatacgtttccccagggggactgccagcaggagcacattccatgggcagccacgtgagaggcggaccgccacttacaatggtccaccagcctcacctagcctgagtcatgaggcaacacctctttcccagacccgatctcgcggtagcacaaacttgttcagtaagctgacgtccaagctgacacgccggaacatgtcattccgtttcataaagcggctccccactgagtacgagcggaatggacggtacgagggcagtagtaggaacgtgtccgctgagcagaaagacgagaacaaggaggctaaaccccgctcactccgcttcacatggtctatgaagacaacatcgagtatggatccgggtgacatgatgcgcgaaattcggaaagtgctcgacgctaacaactgtgactatgagcaaagggagcggtttctgctcttttgtgtccacggcgacggccacgccgagaatttagtgcagtgggaaatggaagtgtgtaagctgcctaggctgtctctgaatggcgtcaggttcaaaagaatcagcggcacctcaatcgctttcaagaatattgcaagtaaaatcgccaacgagctcaaactatag

SEQ ID NO: 281224 - DNA, 1518 bp, Artificial Sequence
  derived and/or modified sequence
tgagtggatgtgtggagcctgggcgtcatcctgtacaccctggtgtctggcagcctgccctttgatggccagaacctgaaggagctgcgggagcgggtgctgcggggcaagtaccgcatccccttctacatgagcacagactgtgagaacctgctgaagcgcttcctggtgctgaaccccatcaagaggggcaccctggagcagatcatgaaggaccgctggatcaatgccggccatgaagaagatgagctgaagccctttgtggagcctgagctggacatcagtgaccagaagagaattgacatcatggtgggcatgggctacagccaggaggagatccaggagagcctgagcaagatgaagtatgatgagatcacagccacctacctgctgctgggcaggaagagcagcgaggtgcggcccagcagtgacctgaacaacagcacaggccagagcccccaccacaaggtgcagaggagcgtcttcagcagccagaagcagaggcgctacagcgaccacgccggccctgccatccccagcgtggtggcctaccccaagaggagccagaccagcacagctgacagcgacctgaaggaggatggcatcagcagcaggaagagcagcggcagcgctgtgggcggcaaaggaattgccccagccagccccatgctgggcaatgccagcaaccccaacaaggctgacatccctgagaggaagaagagcagcacagtgcccagcagcaacacagccagcggcggcatgaccaggaggaacacctacgtgtgcagcgagaggaccacagctgacagacacagcgtcatccagaatggcaaggagaacagcaccatcccagaccagaggacccctgtggccagcacccacagcatcagcagcgctgccaccccagaccgcatccgcttcccccggggcacagccagccgcagcaccttccacggccagccccgggagaggagaacagccacctacaacggccccccagccagccccagcctgagccatgaggccacccccctgagccagaccaggagccggggcagcaccaacctcttcagcaagctgaccagcaagctgaccaggaggaacatgtccttccgcttcatcaagaggctgcccacagaatatgaaagaaatggccgctatgagggcagcagcagaaatgtgtctgctgagcagaaggatgagaacaaggaggccaagcccaggagcctgcgcttcacctggagcatgaagaccaccagctccatggaccccggggacatgatgagggagatcaggaaggtgctggatgccaacaactgtgactatgagcagcgggagcgcttcctgctcttctgtgtgcatggagatggccatgctgagaacctggtgcagtgggagatggaggtgtgcaagctgccccggctgagcctgaatggagtgcgcttcaagaggatcagcggcaccagcatcgccttcaagaacatcgccagcaagatcgccaatgagctgaagctgtag

SEQ ID NO: 281225 - DNA, 1571 bp, Artificial Sequence
  derived and/or modified sequence
aagtggatgtgtggagtctgggggtcattttatacacactagtcagtggctcacttccctttgatgggcaaaacctaaaggaactgagagagagagtattaagagggaaatacagaattcccttctacatgtctacagactgtgaaaaccttctcaaacgtttcctggtgctaaatccaattaaacgcggcactctagagcaaatcatgaaggacaggtggatcaatgcagggcatgaagaagatgaactcaaaccatttgttgaaccagagctagacatctcagaccaaaaaagaatagatattatggtgggaatgggatattcacaagaagaaattcaagaatctcttagtaagatgaaatacgatgaaatcacagctacatatttgttattggggagaaaatcttcagaggttaggccgagcagtgatctcaacaacagtactggccagtctcctcaccacaaagtgcagagaagtgttttttcaagccaaaagcaaagacgctacagtgaccatgctggaccagctattccttctgttgtggcgtatccgaaaaggagtcagaccagcactgcagatagtgacctcaaagaagatggaatttcctcccggaaatcaagtggcagtgctgttggaggaaagggaattgctccagccagtcccatgcttgggaatgcaagtaatcctaataaggcggatattcctgaacgcaagaaaagctccactgtccctagtagtaacacagcatctggtggaatgacacgacgaaatacttatgtttgcagtgagagaactacagctgatagacactcagtgattcagaatggcaaagaaaacagcactattcctgatcagagaactccagttgcttcaacacacagtatcagtagtgcagccaccccagatcgaatccgcttcccaagaggcactgccagtcgtagcactttccacggccagccccgggaacggcgaaccgcaacatataatggccctcctgcctctcccagcctgtcccatgaagccacaccattgtcccagactcgaagccgaggctccactaatctctttagtaaattaacttcaaaactcacaaggagaaacatgtcattcaggtttatcaaaaggcttccaactgaatatgagaggaacgggagatatgagggctcaagtcgcaatgtatctgctgagcaaaaagatgaaaacaaagaagcaaagcctcgatccctacgcttcacctggagcatgaaaaccactagttcaatggatcccggggacatgatgcgggaaatccgcaaagtgttggacgccaataactgcgactatgagcagagggagcgcttcttgctcttctgcgtccacggagatgggcacgcggagaacctcgtgcagtgggaaatggaagtgtgcaagctgccaagactgtctctgaacggggtccggtttaagcggatatcggggacatccatagccttcaaaaatattgcttccaaaattgccaatgagctaaagctgtaacccagtgattatgatgtaaattaagtagcaattaaagtgttttcctgaacactg

SEQ ID NO: 281226 - DNA, 1518 bp, Artificial Sequence
  derived and/or modified sequence
tgagtggacgtgtggagcctgggcgtgatcctgtacaccctggtgagtggaagcctccctttcgacgggcaaaatctcaaggagttacgcgagagagtgctgcgggggaagtataggatccccttttacatgagcaccgactgtgaaaatctgctgaagagattcctcgtgctaaatcccatcaagagagggacattggaacagataatgaaggatcgatggatcaatgctggacacgaagaggacgagttaaaacccttcgtggagccagaattggatatctctgaccagaaaaggatagacattatggtgggaatgggatattcccaggaagagattcaagagtcactgagcaaaatgaaatatgacgaaatcaccgccacataccttcttctcggccgcaaatcgtccgaagttaggccctcatccgatctcaataacagcaccggtcagagtccccaccataaagtgcagcgctctgttttttccagtcagaaacagcgcaggtacagcgaccacgccggccccgccatcccaagtgtggttgcttaccccaaacgatcacagactagcaccgcagactccgacctgaaagaggacgggatctctagcagaaaatcgagcgggtcagctgtagggggtaaggggatcgctccagccagccctatgctcggcaacgcgtccaacccgaataaagccgacattccagagaggaagaagtccagcaccgtgccttcaagtaatacagccagcggaggtatgacacgccgtaacacctatgtatgcagcgagcgaaccacagcggaccggcacagcgtgatccagaatgggaaggaaaactctacgatccctgatcaaaggactcccgtggcaagtactcactcaattagctccgcagcaacaccagaccggatccggttccccagagggacggctagtcgcagtacctttcacgggcagccccgggagcggagaacggcaacctacaatggtcccccagctagtccctccctgtcccatgaggccactcccttgagccagacacgctccaggggttcaaccaatttgttctcgaagctgacaagtaaactcactaggaggaatatgtcctttaggtttatcaaaaggctccccaccgaatacgagcggaacggaagatatgaaggcagctcacgcaacgtctctgccgagcaaaaggacgaaaacaaggaggccaagcccaggtccttgcgctttacctggtcgatgaagaccactagcagcatggacccgggcgatatgatgagggaaattaggaaggtcctggatgcaaataactgtgattacgagcagcgggagcggttcctcctattttgtgttcacggcgatggacacgccgagaatctggtccagtgggagatggaagtatgtaaactaccaaggctgtccctcaatggagtgcggtttaaacgcattagtggtacgagcattgctttcaagaacattgctagcaaaattgcaaacgaacttaaactctag

SEQ ID NO: 281227 - DNA, 1518 bp, Artificial Sequence
  derived and/or modified sequence
tgagtggatgtgtggtcactgggtgtcatcctctataccctggtgagcggatcactcccattcgacggccaaaatctgaaagagttacgagagagagtgctcaggggtaaatatcggattcccttctacatgagcactgattgcgaaaatttactgaagaggttcctggtccttaaccctatcaaacgaggcacactggagcagattatgaaggacagatggattaacgcgggacacgaggaggacgagctgaagccattcgtggagcccgaattggacatctccgatcaaaagcgaattgatataatggtgggtatggggtatagtcaagaagagatccaagagtcacttagcaagatgaagtacgatgagatcactgctacatacctgctgctgggacggaagagttcggaagttcgaccctctagtgacctgaataatagcacaggtcagagcccccatcacaaggtgcaacgatctgtgttcagtagtcagaaacagaggcgctatagtgatcatgcagggccagccataccttcagttgtggcttatcccaagcgctctcagacctccacagcagactccgacttgaaagaggacggaatctcatcaagaaaaagctcagggagcgccgtcggcggaaaaggcattgcccctgcaagccccatgctcggcaatgcatccaatccaaacaaggcagatattccggagcggaagaagagttctacagtgcccagtagcaatactgccagcggcggaatgacccgcagaaatacctatgtgtgttctgaacggaccaccgccgatcggcattctgtcattcagaatgggaaggaaaattctactattcccgaccagcgaacccccgtggcttcgactcacagtatctcaagtgccgcaacacccgacagaatcagatttcctcgagggacagcatccagaagtacctttcacggccagcctcgagaacgaaggactgcaacctataacggcccacctgcctcgccttcactctctcatgaggcaacgccattatcccaaacacgctctcgaggatcaaccaatctgttctccaagttaacatccaagttaacacgacggaacatgagcttcagatttatcaagcgcctgccaacagagtacgaacggaacggcaggtatgaaggatctagtcggaacgtgtcagccgagcagaaagacgaaaacaaggaagctaaacctcggtcactcagatttacatggagtatgaaaacaacaagttctatggaccccggtgacatgatgcgagaaattagaaaggtgttggatgctaataactgtgattacgagcagcgtgagcgatttctgctgttctgcgtgcacggggacgggcatgcagaaaacctggttcaatgggagatggaagtatgtaaattacctcggctgtccctgaatggggtgagatttaaacgcatcagcgggacgtccatagcattcaagaatattgcctcaaaaatcgctaatgagctgaagctctag

SEQ ID NO: 281228 - DNA, 1518 bp, Artificial Sequence
  derived and/or modified sequence
tgagtggacgtgtggagcctgggcgtgatcctgtacaccctggtgagcggcagcctgcccttcgacggccagaacctgaaggagctgagagagagagtgctgagaggcaagtacagaatccccttctacatgagcaccgactgcgagaacctgctgaagagattcctggtgctgaaccccatcaagagaggcaccctggagcagatcatgaaggacagatggatcaacgccggccacgaggaggacgagctgaagcccttcgtggagcccgagctggacatcagcgaccagaagagaatcgacatcatggtgggcatgggctacagccaggaggagatccaggagagcctgagcaagatgaagtacgacgagatcaccgccacctacctgctgctgggcagaaagagcagcgaggtgagacccagcagcgacctgaacaacagcaccggccagagcccccaccacaaggtgcagagaagcgtgttcagcagccagaagcagagaagatacagcgaccacgccggccccgccatccccagcgtggtggcctaccccaagagaagccagaccagcaccgccgacagcgacctgaaggaggacggcatcagcagcagaaagagcagcggcagcgccgtgggcggcaagggcatcgcccccgccagccccatgctgggcaacgccagcaaccccaacaaggccgacatccccgagagaaagaagagcagcaccgtgcccagcagcaacaccgccagcggcggcatgaccagaagaaacacctacgtgtgcagcgagagaaccaccgccgacagacacagcgtgatccagaacggcaaggagaacagcaccatccccgaccagagaacccccgtggccagcacccacagcatcagcagcgccgccacccccgacagaatcagattccccagaggcaccgccagcagaagcaccttccacggccagcccagagagagaagaaccgccacctacaacggcccccccgccagccccagcctgagccacgaggccacccccctgagccagaccagaagcagaggcagcaccaacctgttcagcaagctgaccagcaagctgaccagaagaaacatgagcttcagattcatcaagagactgcccaccgagtacgagagaaacggcagatacgagggcagcagcagaaacgtgagcgccgagcagaaggacgagaacaaggaggccaagcccagaagcctgagattcacctggagcatgaagaccaccagcagcatggaccccggcgacatgatgagagagatcagaaaggtgctggacgccaacaactgcgactacgagcagagagagagattcctgctgttctgcgtgcacggcgacggccacgccgagaacctggtgcagtgggagatggaggtgtgcaagctgcccagactgagcctgaacggcgtgagattcaagagaatcagcggcaccagcatcgccttcaagaacatcgccagcaagatcgccaacgagctgaagctgtag

SEQ ID NO: 281229 - protein, 234 aa, Artificial Sequence
  derived and/or modified sequence
MYMDLVDGIFLNQIMLQIDPRPTNQRINKHVNNDVNLRIQNLTILVRNIKTYYQEVLQQLIVMNLPNVLMIGRDPLSGKSMEEIKKVLLLVLGCAVQCERKEEFIERIKQLDIETQAGIVAHIQEVTHNQENVFDLQWLELPDVAPEELEALSRSMVLHLRRLIDQRDECTELIVDLTQERDYLQAQHPPSPIKSSSADSTPSPTSSLSSEDKQHLAVELADTKARLRRVRQEL

SEQ ID NO: 281230 - DNA, 705 bp, Artificial Sequence
  derived and/or modified sequence
atgtacatggacctggtggacggcatcttcctgaaccagatcatgctgcagatcgaccccagacccaccaaccagagaatcaacaagcacgtgaacaacgacgtgaacctgagaatccagaacctgaccatcctggtgagaaacatcaagacctactaccaggaggtgctgcagcagctgatcgtgatgaacctgcccaacgtgctgatgatcggcagagaccccctgagcggcaagagcatggaggagatcaagaaggtgctgctgctggtgctgggctgcgccgtgcagtgcgagagaaaggaggagttcatcgagagaatcaagcagctggacatcgagacccaggccggcatcgtggcccacatccaggaggtgacccacaaccaggagaacgtgttcgacctgcagtggctggagctgcccgacgtggcccccgaggagctggaggccctgagcagaagcatggtgctgcacctgagaagactgatcgaccagagagacgagtgcaccgagctgatcgtggacctgacccaggagagagactacctgcaggcccagcacccccccagccccatcaagagcagcagcgccgacagcacccccagccccaccagcagcctgagcagcgaggacaagcagcacctggccgtggagctggccgacaccaaggccagactgagaagagtgagacaggagctgtag

SEQ ID NO: 281231 - DNA, 705 bp, Artificial Sequence
  derived and/or modified sequence
atgtatatggacttggtagacggcatctttctgaaccaaatcatgctccagatcgatccgaggccgaccaaccagcggatcaacaaacatgtgaacaacgacgtgaaccttagaattcagaatcttacaatactggtacgcaatatcaagacgtattaccaggaagtgctacaacagctgatcgtgatgaacctacccaatgtcttaatgattgggcgggaccctctctccggcaaaagtatggaagagatcaagaaggtgcttcttcttgtgctcggctgtgccgtgcagtgcgaaaggaaagaagaattcatcgaacgtattaaacaactggacattgagacacaggcgggcatcgtagcacacatccaggaagtaacacacaatcaggagaacgttttcgacttacagtggctggagttgcctgacgtcgcccctgaagaattagaagccctgtctcgatcaatggtgttacacttgcggcgactgattgaccagagggatgagtgtactgagctgattgtggacctcacccaggagcgagattacctacaagcacaacaccctccaagccccatcaaaagctccagtgccgactcgacaccatcccctacatcaagcctgagctccgaggacaagcagcacctggccgtagaattggcggatactaaggccagattaaggagagtgcgacaggagctgtag

SEQ ID NO: 281232 - DNA, 705 bp, Artificial Sequence
  derived and/or modified sequence
atgtacatggacctggtggatggcatcttcctgaaccagatcatgctgcagattgacccccggcccaccaaccagaggatcaacaagcacgtgaacaatgatgtgaacctgcgcatccagaacctgaccatcctggtgaggaacatcaagacctactaccaggaggtgctgcagcagctgattgtgatgaacctgcccaacgtgctgatgattggccgggaccccctgagcggcaagtccatggaggagatcaagaaggtgctgctgctggtgctgggctgtgctgtgcagtgtgagaggaaggaggagttcatcgagcgcatcaagcagctggacatcgagacccaggccggcatcgtggcccacatccaggaggtgacccacaaccaggagaatgtgtttgacctgcagtggctggagctgcctgatgtggcccctgaggagctggaggccctgagccgctccatggtgctgcacctgcggcggctgattgaccagagagatgaatgtacagagctgattgtggacctgacccaggagcgggactacctgcaggcccagcacccccccagccccatcaagagcagcagcgctgacagcacccccagccccaccagcagcctgagcagcgaggacaagcagcacctggccgtggagctggccgacaccaaggcccggctgcggcgggtgcggcaggagctgtag

SEQ ID NO: 281233 - DNA, 705 bp, Artificial Sequence
  derived and/or modified sequence
atgtacatggacctggtggacggcatcttcctgaaccagatcatgctccagatcgacccgagaccaaccaatcagcggatcaataagcacgtgaacaacgatgtcaatcttcgtattcagaacctaacaattctagtccgcaatattaaaacctactatcaggaagtcctgcagcagttgattgtgatgaacctgcctaacgtgctgatgatcggtcgcgacccattgtctggcaagtctatggaagagattaagaaagtcttactgctcgtgctgggatgtgccgtccagtgcgagaggaaagaggagttcattgagcgaatcaagcagctggacatagagacccaagcaggtatcgtggctcacatacaagaggtcactcataatcaagaaaacgtattcgacttgcagtggctggagctgccagatgtcgcacctgaggagttggaggccctgagtagaagtatggttctgcatctgaggagacttatcgaccagcgcgatgaatgtactgaacttatcgttgacctcacccaggaaagagattatctgcaggcacaacacccaccttccccaatcaaaagtagcagtgctgacagtactccttcaccaactagttctctgagctctgaggataagcagcatctggccgtcgagctggccgacactaaggccaggctaagacgagtgcggcaagagttatag

SEQ ID NO: 281234 - DNA, 705 bp, Artificial Sequence
  derived and/or modified sequence
atgtacatggatctggtcgacggcatctttctcaatcagataatgctgcaaatcgacccgcgaccgaccaatcagagaataaataagcacgtcaacaacgatgttaacctccgcatccagaacctcacaatattggtgaggaacattaaaacatattatcaggaggttcttcagcaattaatcgtgatgaacttacccaacgtactgatgattggccgagaccccctctcaggcaagagtatggaggagattaagaaggtcctgttgctcgtattggggtgcgcagtgcagtgtgagcgcaaagaggagttcatcgagagaattaaacagctggatatagagacccaggcgggaattgttgcacatattcaggaagtcacgcacaaccaggagaatgtctttgacctacagtggctggagctgccagatgtggcccctgaggagctggaggcactttcacgcagcatggtgttgcatctcagacgactgatagaccagagggatgaatgcactgagctaattgtggaccttactcaggaacgggattacctgcaagctcaacatccaccttccccgataaaatcctcaagcgccgactcaactccctctccaacatcatccctgagctcagaagacaagcagcatcttgcagtggaactcgctgataccaaggctaggcttaggagagtgcgacaggagctatag

SEQ ID NO: 281235 - DNA, 1092 bp, Artificial Sequence
  derived and/or modified sequence
ggcccgtttggaagcggcagccaggacaacctgactatgtacatggatttagtggacggcatctttttgaaccaaattatgctgcaaatagatcccaggcccacaaatcaacgcatcaataagcacgtcaacaatgatgtgaaccttcgcattcagaatttgaccatcttggtgagaaacattaagacctactaccaggaagttctccagcagctgattgtaatgaatttgcccaatgttttgatgattggcagagacccactgtctgggaagagcatggaggaaatcaagaaggtgctgctgctggtgctgggctgtgctgtccagtgtgagaggaaagaggagttcattgaaagaatcaaacagctggacattgagacccaggctggcatcgtggcccatatccaggaggtgactcacaaccaagagaacgtgtttgacctgcagtggctggagctgcccgacgtggctccggaggagctggaggccctgtcgaggagcatggtgctccacctgcggaggctcatcgaccagcgggacgagtgcaccgagctgatcgtggacctcactcaggaacgggactacctgcaggcacagcatccacccagccccatcaagtcctccagcgccgactccactcccagccccaccagcagcctctctagcgaagacaagcagcacctggccgtagagctggccgacaccaaggccaggctgcggcgcgtcaggcaggagctgtgagtccccggctgcttctcctacctttgtgtgtgttgcagacatgtttctggtgtggtgtcgactcacatgtgtggtgctgccaatggcacagctctgacgtgtgccccggagtcagctggggtctgccctgagcttactctttgacctcggactagctgcctcccctccagacggtgcaagttgtccacagaagcagcctccagtccacgctcagctccagcttggggccgggacgaccacacctgatgtgttttcttggctggagggatgaggtgcccctccttccctccaatctggtgagcctgttctcccaggtttcctgcagctgatggatgtcacctgtggagcctg

SEQ ID NO: 281236 - protein, 138 aa, Artificial Sequence
  derived and/or modified sequence
MTWWCRVEAWWALPWPVPWDMIFTFMTRKSCCSKQVQRKYWRNCQKLTATGSAPFPLALQRFSVVWDACSEALIMFDKDNLDDMGYIVENDVIMHALTKQLEAVSDRVTVLYRSKAIRYTWPCPFPMADSSPWVHITL

SEQ ID NO: 281237 - DNA, 1535 bp, Artificial Sequence
  derived and/or modified sequence
ctttcccgggggcagtctcttttctctcctcacctgacggctcccctccgcgcctccgggggctccctcaggcctccccacggtcatttcagctggacagaggcagcagcgacagtgacagcgatagtggcagcagcggtggcagcgagagctatgcggggccagggtccacccctttctagctttggcgtctggttggcttccagggcagcctccgatccatcccgcccgaggaggcaaggatatgatattcactttcatgacaagaaaatcctgttgctcgaagcaggtccaaagaaagtactggagaaattgtcagaaacttacagcaacagggtcagctccatttcccctggctctgcaacgcttctcagtagtgtgggacgcctgctcagaggccctgataatgtttgataaggataatttagatgacatgggctatatcgtggagaatgatgtcatcatgcatgctctcactaagcagttggaggctgtgtctgaccgagtgacggttctctacaggagcaaagccattcgctatacctggccttgtccatttcctatggccgactccagcccttgggttcatattaccctaggtgatggcagcaccttccagaccaaattgttgataggtgcagatggtcacaactccggagtacggcaggctgttggaatccagaatgtgagctggaactatgaccagtctgctgttgtggctactctgcatttatcagaggccacagaaaacaacgtagcctggcagagatttcttccctctgggcctattgctctgctcccgctctcagacaccttgagttccttggtttggtccacgtcccatgaacatgcagcagagctagttagcatggatgaggaaaaatttgtggatgccgttaactctgccttttggagtgatgctgaccacacggacttcatcgacacagctggtgccatgctgcagtatgctgtcagccttctgaagcccactaaggtctcggctcgccagctgcccccaagcgtagccagggtggatgccaaaagccgagttctgtttcctcttgggttgggacatgctgctgagtacgtcaggcctcgggtggcgctcattggggatgcagcccacagagtccatccgcttgcaggacagggtgtcaacatgggctttggggatatctccagcttggcccatcacctcagtacggcagccttcaatgggaaggacttaggttccgtgagccacctcacaggttatgaaacagaaagacagcgtcacaacactgctcttctggctgctacagacttactaaaaaggctctattctaccagtgcctccccgcttgtgttgctcaggacgtggggcttgcaggccacaaatgcagtgtctccactcaaagaacagattatggcctttgcaagcaaatgagtactcctctcctaaagaaagattacgttgatgaaaaagaacatcctgcccaggacccatcatacatattttcaagatcttatttaatttaataaacttactttacatt

SEQ ID NO: 281238 - DNA, 552 bp, Artificial Sequence
  derived and/or modified sequence
gagttctgagtgcgacggcgcaggtctgcaccatggcggcccggcttgtcagccgatgcggggctgtgcgtgcagctccccacagcggcccgctggtgtcctggcgcaggtggtccggcgcctcaacagacaccgtgtatgacgtggtggtgtcgggtggaggcctggtgggcgctgccatggcctgtgccttgggatatgatattcactttcatgacaagaaaatcctgttgctcgaagcaggtccaaagaaagtactggagaaattgtcagaaacttacagcaacagggtcagctccatttcccctggctctgcaacgcttctcagtagtgtgggacgcctgctcagaggccctgataatgtttgataaggataatttagatgacatgggctatatcgtggagaatgatgtcatcatgcatgctctcactaagcagttggaggctgtgtctgaccgagtgacggttctctacaggagcaaagccattcgctatacctggccttgtccatttcctatggccgactccagcccttgggttcatattacccta

SEQ ID NO: 281239 - DNA, 864 bp, Artificial Sequence
  derived and/or modified sequence
cggaaaccgggccgcggaggcacgatgagagccgtgagagccctagcacgacttgcccaaagacaatttctcaggatatgatattcactttcatgacaagaaaatcctgttgctcgaagcaggtccaaagaaagtactggagaaattgtcagaaacttacagcaacagggtcagctccatttcccctggctctgcaacgcttctcagtagtgtgggacgcctgctcagaggccctgataatgtttgataaggataatttagatgacatgggctatatcgtggagaatgatgtcatcatgcatgctctcactaagcagttggaggctgtgtctgaccgagtgacggttctctacaggagcaaagccattcgctatacctggccttgtccatttcctatggccgactccagcccttgggttcatattaccctaggtgatggcagcaccttccagaccaaattgttgataggtgcagatggtcacaactccggagtacggcaggctgttggaatccagaatgtgagctggaactatgaccagtctgctgttgtggctactctgcatttatcagaggccacagaaaacaacgtagcctggcagagatttcttccctctgggcctattgctctgctcccgctctcagacaccttgagttccttggtttggtccacgtcccatgaacatgcagcagagctagttagcatggatgaggaaaaatttgtggatgccgttaactctgccttttggagtgatgctgaccacacggacttcatcgacacagctggtgccatgctgcagtatgctgtcagccttctgaagcccactaaggtctcggctcgccagctgcccccaagcgtagccaggg

SEQ ID NO: 281240 - DNA, 1486 bp, Artificial Sequence
  derived and/or modified sequence
ctttcccgggggcagtctcttttctctcctcacctgacggctcccctccgcgcctccgggggctccctcaggcctccccacggtcatttcagctggacagaggcagcagcgacagtgacagcgatagtggcagcagcggtggcagcgagagctatgcggggccagggtccacccctttctagctttggcgtctggttggcttccagggcagcctccgatccatcccgcccgaggaggcaaggatatgatattcactttcatgacaagaaaatcctgttgctcgaagcaggtccaaagaaagtactggagaaattgtcagaaacttacagcaacagggtcagctccatttcccctggctctgcaacgcttctcagtagtgtgggacgcctgctcagaggccctgataatgtttgataaggataatttagatgacatgggctatatcgtggagaatgatgtcatcatgcatgctctcactaagcagttggaggctgtgtctgaccgagtgacggttctctacaggagcaaagccattcgctatacctggccttgtccatttcctatggccgactccagcccttgggttcatattaccctaggtgatggcagcaccttccagaccaaattgttgataggtgcagatggtcacaactccggagtacggcaggctgttggaatccagaatgtgagctggaactatgaccagtctgctgttgtggctactctgcatttatcagaggccacagaaaacaacgtagcctggcagagatttcttccctctgggcctattgctctgctcccgctctcagacaccttgagttccttggtttggtccacgtcccatgaacatgcagcagagctagttagcatggatgaggaaaaatttgtggatgccgttaactctgccttttggagtgatgctgaccacacggacttcatcgacacagctggtgccatgctgcagtatgctgtcagccttctgaagcccactaaggtctcggctcgccagctgcccccaagcgtagccagggtggatgccaaaagccgagttctgtttcctcttgggttgggacatgctgctgagtacgtcaggcctcgggtggcgctcattggggatgcagcccacagagtccatccgcttgcaggacagggtgtcaacatgggctttggggatatctccagcttggcccatcacctcagtacggcagccttcaatgggaaggacttaggttccgtgagccacctcacaggttatgaaacagaaagacagcgtcacaacactgctcttctggctgctacagacttactaaaaaggctctattctaccagtgcctccccgcttgtgttgctcaggacgtggggcttgcaggccacaaatgcagtgtctccactcaaaattatggcctttgcaagcaaatgagtactcctctcctaaagaaagattacgttgatgaaaaagaacatcctgcccaggacccatcataca

SEQ ID NO: 281241 - DNA, 417 bp, Artificial Sequence
  derived and/or modified sequence
atgacctggtggtgcagagtggaggcctggtgggccctgccctggcccgtgccctgggacatgatcttcaccttcatgaccagaaagagctgctgcagcaagcaggtgcagagaaagtactggagaaactgccagaagctgaccgccaccggcagcgcccccttccccctggccctgcagagattcagcgtggtgtgggacgcctgcagcgaggccctgatcatgttcgacaaggacaacctggacgacatgggctacatcgtggagaacgacgtgatcatgcacgccctgaccaagcagctggaggccgtgagcgacagagtgaccgtgctgtacagaagcaaggccatcagatacacctggccctgccccttccccatggccgacagcagcccctgggtgcacatcaccctgtag

SEQ ID NO: 281242 - DNA, 417 bp, Artificial Sequence
  derived and/or modified sequence
atgacatggtggtgtagagttgaggcgtggtgggcccttccttggccggtcccatgggatatgatcttcacatttatgacgaggaagtcttgctgcagcaaacaagtccagagaaaatactggagaaactgccaaaagcttaccgccaccggaagtgctcccttccccctggcccttcagagatttagcgttgtgtgggacgcttgttctgaggccttgatcatgttcgacaaggacaatctcgatgatatggggtacatagtcgaaaatgacgtgattatgcatgctctcactaagcagcttgaggccgtttcagatcgagtgacggtactttaccgcagtaaggctattagatacacatggccctgtcctttccctatggctgattcctctccatgggtgcatatcactctctag

SEQ ID NO: 281243 - DNA, 417 bp, Artificial Sequence
  derived and/or modified sequence
atgacctggtggtgccgggtggaggcctggtgggccctgccctggcctgtgccctgggacatgatcttcaccttcatgaccaggaagagctgctgcagcaagcaggtgcagaggaagtactggaggaactgccagaagctgacagccaccggcagcgcccccttccccctggccctgcagcgcttctctgtggtgtgggatgcctgcagcgaggccctgatcatgtttgacaaggacaacctggatgacatgggctacatcgtggagaatgatgtgatcatgcacgccctgaccaagcagctggaggccgtgtctgacagagtgacagtgctgtaccgcagcaaggccatccgctacacctggccctgccccttccccatggctgacagcagcccctgggtgcacatcaccctgtag

SEQ ID NO: 281244 - DNA, 417 bp, Artificial Sequence
  derived and/or modified sequence
atgacctggtggtgccgggtggaggcctggtgggccctgccctggcctgtgccctgggatatgatctttacctttatgacacggaagtcctgctgtagtaaacaggtccagagaaaatattggcggaactgtcagaagctgaccgccactggcagtgcccctttcccgctggctctgcagagattctccgtggtgtgggatgcttgcagcgaggcattaatcatgtttgacaaggataacctcgacgatatgggttacattgttgagaacgatgtgatcatgcacgcactgacaaagcaacttgaggctgtgtccgatagagtcacagtgctttaccgtagcaaagccatccgctatacttggccatgccccttccctatggcagattcttctccatgggtacatataaccctttag

SEQ ID NO: 281245 - DNA, 417 bp, Artificial Sequence
  derived and/or modified sequence
atgacctggtggtgccgcgtggaggcatggtgggcacttccgtggcctgtcccgtgggacatgatcttcacctttatgaccaggaaatcctgttgctccaagcaagtccaaaggaaatattggaggaattgccagaaactgacagccactggctcggctccatttccactggctcttcagcggttttcagttgtctgggatgcctgcagtgaagctctaataatgtttgacaaagataacctcgacgacatgggctatattgtggaaaatgacgtcattatgcatgcactgacaaaacagttggaggccgttagtgaccgcgtcactgtcctctacagaagcaaagcgatccgctacacttggccttgcccattcccaatggccgactcgtctccgtgggttcatataaccttatag

SEQ ID NO: 281246 - protein, 101 aa, Artificial Sequence
  derived and/or modified sequence
MDEVEQDQHEARLKELFDSFDTTGTGSLGQEELTDLCHMLSLEEVAPVLQQTLLQDNLLGRVHFDQFKEALILILSRTLSNEEHFQEPDCSLEAQPKYVRG

SEQ ID NO: 281247 - DNA, 1230 bp, Artificial Sequence
  derived and/or modified sequence
atgccacatattgataacgatgtcaaactagacttcaaggatgtgctgctaaggcctaaacgttctacgctgaagagtaggtccgaggtcgacctgaccagatctttttctttcagaaatagcaaacagacctattcgggggtccccataattgccgctaacatggacaccgtggggacattcgaaatggcaaaagtactgtgcaaattctcattattcaccgcggtgcacaaacactactccctagtgcagtggcaggaattcgcaggccagaacccggactgccttgaacatttggccgcaagtagcggcaccggatcttctgacttcgaacagctggagcaaatcctggaggcaatcccacaggtgaaatacatatgcctcgacgtggctaatgggtactccgaacactttgtcgaattcgtaaaggatgtcaggaaacggtttccccagcacacaatcatggccgggaacgtcgtcacgggcgagatggtagaagaactgatcttgagtggcgccgatatcataaaagtcggcatcgggccaggttccgtctgcaccaccaggaagaagacgggcgtcggatacccccaacttagcgccgtcatggaatgcgccgatgccgcacatggcctgaaaggacacataatttcagacggcggatgtagctgccctggtgatgtggcaaaggcttttggtgcgggcgcagatttcgtgatgttggggggcatgctagctggtcactctgaaagcggaggggagttgatagaacgcgacggcaagaagtataaattgttctatggcatgagcagtgaaatggccatgaaaaagtacgccggcggggtggccgagtaccgttacgtgtggaggccccgatctttagtcatcgtgtggcgccaaaattcctggctacttcggggcggctggtatagcagtcagcgctcaatggtgaatagaggatctatgttaggctccgttgaaaaaagcctggggttgcgtaacccagagggcgaagacaacaaggtatttccgacattacgggcgagcgaaggaaaaactgtcgaagtgcccttcaagggcgatgtcgagcacacaatacgggacatattgggcggaattcggtccacctgtacatatgtcggcgccgctaagttaaaagagctgtcccgacgcaccacttttattcgcgttacgcagcaggtgaacccgatcttcagtgaagcctgctag

SEQ ID NO: 281248 - DNA, 1230 bp, Artificial Sequence
  derived and/or modified sequence
atgccccacatcgacaatgatgtgaagctggacttcaaggatgtgctgctgcggcccaagaggagcaccctgaagagccgctctgaggtggacctgaccaggagcttctccttcaggaacagcaagcagacctacagcggcgtgcccatcatcgccgccaacatggacacagtgggcacctttgagatggccaaggtgctgtgcaagttcagcctcttcaccgctgtgcacaagcactacagcctggtgcagtggcaggagtttgctggccagaacccagactgcctggagcacctggccgccagcagcggcaccggcagcagtgactttgagcagctggagcagatcctggaggccatcccccaggtgaagtacatctgcctggatgtggccaacggctacagcgagcactttgtggagtttgtgaaggatgtgaggaagcgcttcccccagcacaccatcatggctggaaatgtggtgactggagagatggtggaggagctgatcctgtctggagctgacatcatcaaggtgggcatcggccctggctctgtgtgcaccaccaggaagaagacaggagtgggctacccccagctgtctgctgtgatggagtgtgctgatgctgcccacggcctgaagggccacatcatcagtgatggcggctgcagctgccctggagatgtggccaaggccttcggggccggggctgactttgtgatgctgggcggcatgctggccggccacagcgagagcggcggggagctgattgaaagagatggcaagaagtacaagctgttctacggcatgagcagcgagatggccatgaagaagtatgctgggggcgtggccgagtaccgctacgtgtggaggcccaggagcctggtgattgtgtggaggcagaacagctggctgctgcggggcggctggtacagcagccagaggtccatggtgaacagaggctccatgctgggctctgtggagaagagcctgggcctgagaaatcctgagggggaggacaacaaggtgttccccaccctgcgggccagcgagggcaagacagtggaggtgcccttcaagggagatgtggagcacaccatccgggacatcctgggcggcatccgcagcacctgcacctacgtgggcgccgccaagctgaaggagctgagcaggaggaccaccttcatccgggtgacccagcaggtgaaccccatcttcagcgaggcctgctag

SEQ ID NO: 281249 - DNA, 1230 bp, Artificial Sequence
  derived and/or modified sequence
atgccccacatcgacaacgacgtgaagctggacttcaaggacgtgctcctccggccaaagagatctactctgaagagtaggtccgaggtcgacctgacacggtctttcagtttcagaaattccaaacaaacatatagcggggtgcctatcatcgccgccaacatggatacagttggcactttcgaaatggctaaggtgttatgcaaatttagcctttttacggccgttcacaagcactacagtcttgtccagtggcaggagtttgctggtcagaatccagactgcttagagcacctcgcggcctcgagtggtacgggcagctctgatttcgagcaactcgaacagattctggaagcgatccctcaggtgaaatacatctgtttagacgtggctaacggttacagcgagcactttgttgaatttgtcaaggatgtgaggaagcggttccctcagcacaccataatggctggaaacgtagtgacaggagaaatggtggaggagctgatcctatccggagcagacataatcaaggtcggtatcggccctggatcagtgtgcacaacaagaaagaagacaggagtcggctacccacagctctcagcagtcatggaatgcgccgacgcagcccatgggctcaaaggacatatcatatctgatgggggatgctcctgccctggagatgtcgcaaaagcctttggggcaggcgcagatttcgtgatgttgggcggcatgctggctggacactccgagtcaggcggcgaactgatagagagggatggaaaaaagtacaaactgttttacggcatgtccagtgagatggcaatgaagaagtatgccggcggggtggccgaatatcgctatgtgtggaggcctcggagcctggtgattgtgtggagacaaaacagctggctccttcggggcggatggtacagcagccaaaggtccatggtgaacagggggtccatgctggggagcgtggaaaagtctcttggtctaagaaaccccgagggcgaagataataaggtgttccccaccctgagagccagtgagggcaagacagttgaagtgccattcaaaggggatgtagaacacaccattcgagatatcctgggcggcatccgtagcacttgcacctacgtcggcgctgctaagttaaaagagctgagccgtcgaacaacatttatcagggtaacccagcaggtcaacccaatcttctccgaggcctgctag

SEQ ID NO: 281250 - DNA, 1230 bp, Artificial Sequence
  derived and/or modified sequence
atgccccatatcgataatgacgtcaaactcgacttcaaagatgtactcttgcgccctaaaagatcaacgctcaaaagcagaagcgaggtggacctgaccaggagcttttctttcaggaactctaagcagacatactcaggcgtcccaattattgccgctaatatggacaccgtgggaacgttcgaaatggcaaaagtcctttgcaaattctcactgttcacggccgtccacaagcattactcgctggtccagtggcaggagttcgctgggcagaacccagactgcttagagcacttggcggctagctcaggcaccgggtctagcgacttcgaacaactggaacagatactcgaggccatccctcaggttaagtatatatgcctcgacgtcgccaatggctactccgagcacttcgttgagttcgtgaaagatgtccgcaaacgcttcccccagcataccatcatggccggtaacgttgtcacaggcgaaatggtggaggagcttattctctccggcgctgatataatcaaagtaggcattggcccagggtctgtgtgtacgacgaggaagaagaccggggtggggtatccacagctaagcgctgtaatggagtgcgctgatgccgcacacgggctgaagggtcacatcatttccgatggcggttgctcttgcccgggtgacgtggccaaagcattcggggctggggcagatttcgtgatgcttggaggaatgttggccggacacagcgagtccggcggagaactgatcgaaagggacggtaaaaagtataagctcttctatggaatgtcgtcagaaatggctatgaaaaaatatgccggtggagtcgcagagtaccgatacgtgtggcgcccaagatcattggtcatcgtgtggcgccagaatagttggctgttacggggagggtggtactctagccagcgctccatggtgaaccgtggctccatgctgggcagtgtcgaaaagagtctcggtctccggaaccctgaaggggaagacaacaaagtattccccacattgcgtgcctcagagggaaagacagttgaggtgcccttcaagggagatgtagagcacacgattcgtgatatccttggaggcatccggtcaacttgcacgtatgttggggcagcaaagctaaaagagctgtcgcggcgaaccacatttattagagtaactcagcaggtgaacccaatcttttccgaggcttgctag

SEQ ID NO: 281251 - DNA, 1230 bp, Artificial Sequence
  derived and/or modified sequence
atgccccacatcgacaacgacgtgaagctggacttcaaggacgtgctgctgagacccaagagaagcaccctgaagagcagaagcgaggtggacctgaccagaagcttcagcttcagaaacagcaagcagacctacagcggcgtgcccatcatcgccgccaacatggacaccgtgggcaccttcgagatggccaaggtgctgtgcaagttcagcctgttcaccgccgtgcacaagcactacagcctggtgcagtggcaggagttcgccggccagaaccccgactgcctggagcacctggccgccagcagcggcaccggcagcagcgacttcgagcagctggagcagatcctggaggccatcccccaggtgaagtacatctgcctggacgtggccaacggctacagcgagcacttcgtggagttcgtgaaggacgtgagaaagagattcccccagcacaccatcatggccggcaacgtggtgaccggcgagatggtggaggagctgatcctgagcggcgccgacatcatcaaggtgggcatcggccccggcagcgtgtgcaccaccagaaagaagaccggcgtgggctacccccagctgagcgccgtgatggagtgcgccgacgccgcccacggcctgaagggccacatcatcagcgacggcggctgcagctgccccggcgacgtggccaaggccttcggcgccggcgccgacttcgtgatgctgggcggcatgctggccggccacagcgagagcggcggcgagctgatcgagagagacggcaagaagtacaagctgttctacggcatgagcagcgagatggccatgaagaagtacgccggcggcgtggccgagtacagatacgtgtggagacccagaagcctggtgatcgtgtggagacagaacagctggctgctgagaggcggctggtacagcagccagagaagcatggtgaacagaggcagcatgctgggcagcgtggagaagagcctgggcctgagaaaccccgagggcgaggacaacaaggtgttccccaccctgagagccagcgagggcaagaccgtggaggtgcccttcaagggcgacgtggagcacaccatcagagacatcctgggcggcatcagaagcacctgcacctacgtgggcgccgccaagctgaaggagctgagcagaagaaccaccttcatcagagtgacccagcaggtgaaccccatcttcagcgaggcctgctag

SEQ ID NO: 281252 - protein, 390 aa, Artificial Sequence
  derived and/or modified sequence
MFAFEEFSEQSICQARASVMVYDDTSKKWVPIKPGQQGFSRINIYHNTASNTFRVVGVKLQDQQVVINYSIVKGLKYNQATPTFHQWRDARQVYGLNFASKEEATTFSNAMLFALNIMNSQEGGPSSQRQVQNGPSPDEMDIQRRQVMEQHQQQRQESLERRTSATGPILPPGHPSSAASAPVSCSGPPPPPPPPVPPPPTGATPPPPPPLPAGGAQGSSHDESSMSGLAAAIAGAKLRRVQRPEDASGGSSPSGTSKSDANRASSGGGGGGLMEEMNKLLAKRRKAASQSDKPAEKKEDESQMEDPSTSPSPGTRAASQPPNSSEAGRKPWERSNSVEKPVSSILSRTPSVAKSPEAKSPLQSQPHSRYRTTLLLTCPPGFGAPLSPVP

SEQ ID NO: 281253 - DNA, 1173 bp, Artificial Sequence
  derived and/or modified sequence
atgttcgccttcgaggagttcagcgagcagagcatctgccaggccagagccagcgtgatggtgtacgacgacaccagcaagaagtgggtgcccatcaagcccggccagcagggcttcagcagaatcaacatctaccacaacaccgccagcaacaccttcagagtggtgggcgtgaagctgcaggaccagcaggtggtgatcaactacagcatcgtgaagggcctgaagtacaaccaggccacccccaccttccaccagtggagagacgccagacaggtgtacggcctgaacttcgccagcaaggaggaggccaccaccttcagcaacgccatgctgttcgccctgaacatcatgaacagccaggagggcggccccagcagccagagacaggtgcagaacggccccagccccgacgagatggacatccagagaagacaggtgatggagcagcaccagcagcagagacaggagagcctggagagaagaaccagcgccaccggccccatcctgccccccggccaccccagcagcgccgccagcgcccccgtgagctgcagcggcccccccccccccccccccccccccgtgccccccccccccaccggcgccaccccccccccccccccccccctgcccgccggcggcgcccagggcagcagccacgacgagagcagcatgagcggcctggccgccgccatcgccggcgccaagctgagaagagtgcagagacccgaggacgccagcggcggcagcagccccagcggcaccagcaagagcgacgccaacagagccagcagcggcggcggcggcggcggcctgatggaggagatgaacaagctgctggccaagagaagaaaggccgccagccagagcgacaagcccgccgagaagaaggaggacgagagccagatggaggaccccagcaccagccccagccccggcaccagagccgccagccagccccccaacagcagcgaggccggcagaaagccctgggagagaagcaacagcgtggagaagcccgtgagcagcatcctgagcagaacccccagcgtggccaagagccccgaggccaagagccccctgcagagccagccccacagcagatacagaaccaccctgctgctgacctgcccccccggcttcggcgcccccctgagccccgtgccctag

SEQ ID NO: 281254 - DNA, 3704 bp, Artificial Sequence
  derived and/or modified sequence
agttcccagcctggagcctaagcatacactgcattaatcagacttgctggaatgatcacatggttttctagctgcctcccctgttagctgccgcttgtcagcagctggcggagctggaggctgcaggcccctgtctgcagaaagccttttacttcagaatattggggggtgtggaaaccccgcctcatttttctgcactttgcaccatctgactaactaaatggttgtcctccataccaaaaagactaccacacaatctaaggaaattgtctctgactaggtcatgtttgcatttgaagaattcagtgaacagagtatctgccaagcccgggcttccgtgatggtctacgatgacaccagtaagaaatgggtaccaatcaaacctggccagcagggattcagccggatcaacatctaccacaacactgccagcaacaccttcagagtcgttggagtcaagttgcaggatcagcaggttgtgatcaattattcaatcgtgaaagggctgaagtacaatcaggccacgccaaccttccaccagtggcgagatgcccgccaggtctacggcttaaactttgcaagtaaagaagaggcaaccacgttctccaatgcaatgctgtttgccctgaacatcatgaattcccaagaaggaggcccctccagccagcgtcaggtgcagaatggcccctctcctgatgagatggacatccagagaagacaagtgatggagcagcaccagcagcagcgtcaggaatctctagaaagaagaacctcggccacagggcccatcctcccaccaggacatccttcatctgcagccagcgcccccgtctcatgtagtgggcctccaccgccccccccacccccagtcccacctccacccactggggctaccccacctcccccacccccactgccagccggaggagcccaggggtccagccacgacgagagctccatgtcaggactggccgctgccatagctggggccaagctgagaagagtccaacggccagaagacgcatctggaggctccagtcccagtgggacctcaaagtccgatgccaaccgggcaagcagcgggggtggcggaggaggcctcatggaggaaatgaacaaactgctggccaagaggagaaaagcagcctcccagtcagacaagccagccgagaagaaggaagatgaaagccaaatggaagatcctagtacctccccctctccggggacccgagcagccagccagccacctaactcctcagaggctggccggaagccctgggagcggagcaactcggtggagaagcctgtgtcctcgattctgtccagaaccccgtctgtggcaaagagccccgaagctaagagcccccttcagtcgcagcctcactctaggtaccgaacaaccctcctgctcacatgtcccccagggtttggggctcctctgtcccccgtcccgtgactaacacccttgcacgctgtctcacgtcctggcatttaacaacttgctctgcgaaggtggtctgttctttcagacccaggacctcggggtcctgtcagtcagctgctccgtcttttccctctgagagagagaccaagggcaaggagggcagtgacctgtccacagaggtagtgcaggggggggccaacatggagtcccagctctggactcactacgtgtgacagtgggcaagttaggggacctctccaagcctctgttttccccccacaaagtgaggtctgttaacccctgctgcacagggtggtggtggggacagctgtgagcaacagctggacatggggtgtggtcactagccagggctgcaccctacagttcaaccagtcctagcactggcgctgagccctacccctttcctccagcccagagtccttcctctgcggccggcacacagaatcagtttccccacagacatactgaccatatttcccaagccaaaagctggcatgacaacatgatagaatatttggaactgagattgcccaaaaaggcagaggcagccagccacatagtatctggaggtacatgtggcctgaattggaaggcctctagaacctgcgtcaagaatgtctccatcgccaccacaaattgaagggaaaccacccttatcacagagcaggaggcattgaaactggccttgcagagctgaacaggtggtgagagcagagcagtgcaggtggacagagatgaggaagtcttagcagtcagctggggtttgtccaaggcttgtggtcagccaggccgtgtgctggggacagtccctgcctgcaaagagcaccgtgtgaacaaggccactgtggtcctgaggggtgctctggacagggtgcagggccacatggtggaagggacagggtgctttgcggagtggggtggggcaagcctctgtcgggagctggcattttcgttgacccggacgaggaggagtctgctctgcggagatcatggggacagcctcccaagctgaaggaagggtaagtgccagggccctgagcctgcagccacccgccaagctcccccgcacctccacctggaagcagacaggccatggggcaggggaacgggaagggtgaggaagagggtgtgggggagcgcggagttagaagtttgcattgtgttcatgcgcagggcccagtcatggaacttgaggcacagggtgccatggtggaggctgggaaggggaaggcaaccagagtgggcaaaacgagggccctggagcagacacggcagcaaggggagcctgcagcgctcccagcggactccgccacgtcctgctggtggagcaaaggcgggctgccatgttgtgagtggccaagggtcgctcactgggcaggaacattgtcaaggccattcatgcttggaatagggtctctcttcagctctgaggcaaatctgttctctaattttcagatgacttcaaggggaacgtgtaccaccacccctctggtgcgtcacattgcttaggaagcctgctgtgtttatcactgggtggctgtcagggctgagatggagagggccagggcctggcgaggtggagcagtcggcccaggtgtcccagcaattgttgctggaacagggtctggaacccacaggagaggcctgaaggacccagggccctctggctggatgcgtttgcctatcaggacccagaattacttacagacctgtttagggctaggcttggcctctttcttgagctcatctggaggggtgtggcaacactcattcttcatccttattctccctggctgtgggcaacactggtcctcagtgtcaccagatggtcctcctctgtgcccatgacccctcagcagccaaggctggccctgccagataaatgtgtgtgcccatgatcacacccaggggcacaggccacatacgtttccctgaaaccttgggctccagcctccatcccgtccatgtgggagggaacttgggtcccagcagtgtgtctttcagcaccaagtcatgtttaaaagaccagagagacaagcattttgccaagatcttccagggaagatgcatgtgtgacacattaacattcaaatcaggccagcgcggtgctcatgcctgtcatcccagcactttgggaggccgaggcgggaggatcacttgagcccaggacttggagaccagtctgggcaacacagtgagaccccatctctacaaaaagttaaaaaagaaaaaaaaaagg

SEQ ID NO: 281255 - DNA, 1173 bp, Artificial Sequence
  derived and/or modified sequence
atgttcgcctttgaggaattcagcgaacaaagtatttgccaggctagagcctccgttatggtctatgatgatacttcaaagaagtgggtgccaattaaacctggccaacagggcttctcccgtatcaatatctaccacaatacagcatcaaacaccttcagggtggttggcgtgaagctgcaggaccagcaagtggtgatcaattactcaattgtcaaggggttaaagtataatcaggccactcccacttttcatcaatggcgagatgcccgccaggtctacggtttgaattttgcttccaaagaagaagctacaaccttttcaaatgccatgctgtttgccctgaacattatgaactctcaggaggggggaccgtctagccagagacaggtgcagaatgggccttctccagacgagatggacatacagcgtcgccaggtgatggaacagcaccaacagcaacgtcaggagagcctcgagcgccgtacaagcgcaaccgggcccattctcccccctggccacccctccagcgcggcttcagcccctgtctcttgcagtgggcctcctcccccccccccccctcctgttcctcccccgccaacaggagccaccccccctccacctccccccctccctgctggcggtgctcagggtagttcccatgacgagtctagtatgtccggtctggctgcggcaattgccggggccaaacttagacgagtgcaacggccagaagatgcctccggaggaagcagcccttcaggaacttcaaaaagcgacgccaacagggcatcctccggagggggcggggggggccttatggaggaaatgaacaaactgctggcaaagagacgtaaggctgcttctcagtcagacaaaccagcagagaaaaaagaggatgagtcccagatggaagatccctccactagcccatctcctggaactcgcgcagccagccaacccccgaacagttccgaagccggtagaaaaccatgggagaggtctaatagtgtggagaagccagtgtcaagcattctgtcacgcacacctagtgttgctaagtctcccgaggcaaagtcgccactgcagtctcagccgcactcaaggtatagaaccaccctgcttctgacatgcccacccggattcggcgctccgctctccccagtaccctag

SEQ ID NO: 281256 - DNA, 1173 bp, Artificial Sequence
  derived and/or modified sequence
atgtttgcctttgaggagttcagcgagcagagcatctgccaggcccgggcctctgtgatggtgtatgatgacaccagcaagaagtgggtgcccatcaagccaggccagcagggcttcagccgcatcaacatctaccacaacacagccagcaacaccttccgggtggtgggcgtgaagctgcaggaccagcaggtggtgatcaactacagcatcgtgaagggcctgaagtacaaccaggccacccccaccttccaccagtggagagatgcccggcaggtgtatggcctgaactttgccagcaaggaggaggccaccaccttcagcaatgccatgctgtttgccctgaacatcatgaacagccaggagggcggccccagcagccagaggcaggtgcagaatggccccagcccagatgagatggacatccagaggcggcaggtgatggagcagcaccagcagcagaggcaggagagcctggagaggaggaccagcgccaccggccccatcctgcccccaggccaccccagcagcgctgccagcgcccctgtgtcctgcagcggccccccacctcctcctcctcctcctgtgcccccacctccaactggagccaccccacctcctcctccacccctgcctgctggaggagcccagggcagcagccatgatgagagctccatgagcggcctggccgccgccatcgccggggccaagctgcggcgggtgcagaggccagaagatgccagcggcggcagcagccccagcggcaccagcaagagtgatgccaacagagccagcagcggcggcggcggcggcggcctgatggaggagatgaacaagctgctggccaagaggaggaaggccgccagccagagcgacaagccagctgagaagaaggaggatgagagccagatggaggaccccagcaccagccccagccctggcaccagggctgccagccagccccccaacagcagcgaggccggcaggaagccctgggagaggagcaacagcgtggagaagcctgtgagcagcatcctgagcaggaccccatctgtggccaagagccctgaggccaagagccccctgcagagccagccccacagccgctaccgcaccaccctgctgctgacctgccccccaggctttggagcccccctgagccctgtgccctag

SEQ ID NO: 281257 - DNA, 1173 bp, Artificial Sequence
  derived and/or modified sequence
atgttcgccttcgaggagttcagcgagcagagcatctgccaggcccgcgcctctgtgatggtctatgatgacactagcaaaaaatgggtccccatcaaaccgggacagcaaggtttcagccgcattaatatctaccacaataccgcgtccaacacttttagggtagtgggagtgaagcttcaagaccaacaggtggtgataaactactcaatcgtcaagggtctcaagtacaaccaggctacccctacttttcatcagtggcgcgatgccaggcaagtgtatggcttgaactttgcaagcaaagaagaagctaccacgttctcaaatgccatgctgtttgctctcaatatcatgaacagtcaagagggagggccaagctctcagaggcaagtccagaatggaccgtcccctgatgagatggatattcagagacgccaagttatggagcaacaccaacaacaaagacaggagtctctcgaacgccgaaccagcgctacaggacctatccttccaccagggcacccgagctctgctgcgtcagccccagtgtcttgctctggacctccccccccaccccctcctcctgtcccccccccccctacaggcgccacccctccacccccaccaccactgcccgcaggtggcgctcagggttcctcacacgatgaatctagcatgtctgggctggctgctgccatagcaggcgccaagcttcgtagggtccagcgccccgaggatgcctccggaggcagttctccttcaggcacctccaaatccgatgccaaccgggcaagctcaggaggggggggcggcggtctcatggaggaaatgaataagttactggccaagagacgcaaggctgcctcccaaagtgacaagcccgcagaaaagaaggaagacgagtcgcagatggaagacccatcaaccagtccatccccaggcaccagagccgccagtcagccccccaactcctctgaggcaggacgaaaaccctgggagcgatccaactcggtcgaaaagcccgtaagctccatattgtctagaacaccatccgtcgcgaagagcccagaagccaagtcaccgctacaatcccagccacacagccgatacaggacaacacttctgctgacttgcccgcctggattcggcgcccctttgagtcccgttccatag

SEQ ID NO: 281258 - DNA, 1173 bp, Artificial Sequence
  derived and/or modified sequence
atgtttgcctttgaagaattttcagaacagtcaatttgtcaagctcgtgctagcgtcatggtctatgatgacacttccaaaaaatgggttccaataaaacccggacagcaaggctttagtcgtatcaatatataccataacacagcctccaacactttccgtgtggtgggagttaaactccaagaccaacaggtggtgattaactattcaatcgtgaaggggttaaagtataaccaggccactcccaccttccaccaatggcgtgatgctcgtcaggtgtatggcctgaatttcgcatcgaaagaggaagcgacaaccttctccaacgctatgctgtttgccctgaatatcatgaactcccaagagggagggccatccagccaaaggcaggtgcaaaacggacctagtcccgatgaaatggacattcaacggagacaggttatggaacaacaccagcaacagcggcaggaatcgttggagcgcagaaccagcgctacgggccctatccttccacctgggcaccctagcagtgccgcttccgctccggtgagctgtagtggaccaccaccccctccacccccacctgtgcctccaccgcctacaggggctacacctccgcctccccctccacttcccgcaggcggtgcccagggcagctctcacgacgagtcatctatgagcgggctagccgcagccatcgcaggggcaaaactgaggcgagtgcaaaggccagaagatgcatctggcggatcaagcccctcaggtacatccaaatctgatgctaatcgagcttcgagtggcggtggcggagggggattgatggaggaaatgaacaaattgctcgccaaacgcaggaaggcggcaagccaaagcgacaagccagctgaaaagaaagaggatgagagccagatggaggacccctcaacgagtccttcccccggaactcgagctgccagtcagccacccaattcctccgaggccggacggaagccttgggagaggagcaacagcgtcgaaaagccagttagttccattctctcaagaacgccaagcgtcgcaaagtcgcctgaagctaaatcaccgctccagtcgcagccccacagtagataccggactacactgttactgacctgcccgcctggatttggagccccactgtctcctgtcccatag

SEQ ID NO: 281259 - protein, 118 aa, Artificial Sequence
  derived and/or modified sequence
MEAKTLGTVTPRKPVLSVSARKIKDNAADWHNLILKWETLNDAGFTTANNIANLKISLLNKDKIELDSSSPASKENEEKVCLEYNEELEKLCEELQATLDGLMRFRISSWRCTGRSCS

SEQ ID NO: 281260 - DNA, 357 bp, Artificial Sequence
  derived and/or modified sequence
atggaggctaagactcttggcaccgttacaccaaggaagcctgtgctgtcagtgtccgctcgaaaaattaaagataacgccgctgactggcacaatcttatcctgaagtgggagacactcaacgatgccggctttaccacggctaataacatcgctaatctcaagatatccctgctaaacaaggataagattgaactagacagctcttcaccagcctccaaggaaaacgaggagaaggtttgcctggagtacaacgaggaactggagaagctctgcgaggagcttcaagcgacattagatggtctcatgagatttaggattagcagctggagatgcactggcaggagctgctcctag

SEQ ID NO: 281261 - DNA, 357 bp, Artificial Sequence
  derived and/or modified sequence
atggaggccaagaccctgggcaccgtgacccccaggaagcctgtgctgtctgtgtctgccaggaagatcaaggacaatgctgctgactggcacaacctgatcctgaagtgggagaccctgaatgatgctggcttcaccacagccaacaacatcgccaacctgaagatcagcctgctgaacaaggacaagattgagctggacagcagcagccctgccagcaaagaaaatgaggagaaggtgtgcctggagtacaatgaggagctggagaagctgtgtgaggagctgcaggccaccctggatggcctgatgaggttccgcatcagctcctggcgctgcaccggccgcagctgcagctag

SEQ ID NO: 281262 - DNA, 357 bp, Artificial Sequence
  derived and/or modified sequence
atggaggccaagaccctgggcaccgtgaccccccggaagcccgtgctatcagtgagcgcacggaagatcaaagataatgccgccgattggcacaaccttattctcaaatgggaaactcttaacgacgccgggttcacaacagcaaacaacattgctaatctgaagataagcctcttgaacaaggataagatcgaattagactcttcctccccagcatctaaggagaacgaggagaaggtttgccttgaatataatgaagagcttgagaagctatgcgaggagctccaggccaccctcgatgggctcatgcggttccgaatatcctcctggagatgtaccggaaggtcttgcagttag

SEQ ID NO: 281263 - DNA, 357 bp, Artificial Sequence
  derived and/or modified sequence
atggaagccaagactttaggaactgtgaccccccgaaagccagttctatcagtctctgcacgaaaaatcaaggataacgccgcagattggcacaacttgattttgaagtgggagaccctcaatgatgccggttttaccacggctaataatatcgctaaccttaaaatatccctgctcaacaaggacaaaatcgaactcgacagctccagccccgcatccaaggaaaacgaagaaaaggtatgcctggagtataacgaggagctggagaaactctgtgaagaattacaggcgaccctggacggcctcatgcgctttaggattagctcatggcgttgcaccggaagaagttgcagttag

SEQ ID NO: 281264 - DNA, 357 bp, Artificial Sequence
  derived and/or modified sequence
atggaggccaagaccctgggcaccgtgacccccagaaagcccgtgctgagcgtgagcgccagaaagatcaaggacaacgccgccgactggcacaacctgatcctgaagtgggagaccctgaacgacgccggcttcaccaccgccaacaacatcgccaacctgaagatcagcctgctgaacaaggacaagatcgagctggacagcagcagccccgccagcaaggagaacgaggagaaggtgtgcctggagtacaacgaggagctggagaagctgtgcgaggagctgcaggccaccctggacggcctgatgagattcagaatcagcagctggagatgcaccggcagaagctgcagctag

SEQ ID NO: 281265 - protein, 260 aa, Artificial Sequence
  derived and/or modified sequence
MFRTLPPSSNPTGAEFDPEEDEPTLEAAWPHLQLVYEFFLRFLESPDFQPNIAKKYIDQKFVLQLLELFDSEDPRERDFLKTTLHRIYGKFLGLRAYIRKQINNIFYRFIYETEHHNGIAELLEILGSIINGFALPLKEEHKIFLLKVLLPLHKVKSLSVYHPQLAYCVVQFLEKDSTLTEPVVMALLKYWPKTHSPKEVMFLNELEEILDVIEPSEFVKIMEPLFRQLAKCVSSPHFQDNTWLDIQRPEALHGDEPKAI

SEQ ID NO: 281266 - protein, 1132 aa, Artificial Sequence
  derived and/or modified sequence
MIATPLKHSRIYLPPEASSQRRNLPMDAIFFDSIPSGTLTPVKDLVKYQNSSLKLNDHKKNQFLKMTTFNNKNIFQSTMLTEATTSNSSLDISAIKPNKDGLKNKANYESPGKIFLRMKEKVLRDKQEQPSRNSSLLEPQKSGNNETFTPNRVEKKKLQHTYLCEEKENNKSFQSDDSSLRASVQGVPLESSNNDIFLPVKQKIQCQQEKKAPLHNLTYELPTLNQEQENFLAVEARNKTLTRAQLAKQIFHSKESIVATTKSKKDTFVLESVDSADEQFQNTNAETLSTNCIPIKNGSLLMVSDSERTTEGTSQQKVKEGNGKTVPGETGLPGSMKDTCKIVLATPRLHITIPRRSKRNISKLSPPRIFQTVTNGLKKNQVVQLQEWMIKSINNNTAICVEGKLIDVTNIYWHSNVIIERIEHNKLRTISGNVYILKGMIDQISMKEAGYPNYLIRKFMFGFPENWKEHIDNFLEQLRAGEKNREKTKQKQKTGRSVRDIRKSMKNDARENQTDTAQRATTTYDFDCDNLELKSNKHSESPGATELNMCHSNCQNKPTLRFPDDQVNNTIQNGGGDDLSNQELIGKKEYKMSSKKLKIGERTNERIIKSQKQETTEELDVSIDILTSREQFFSDEERKYMAINQKKAYILVTPLKSRKVIEQRCMRYNLSAGTIKAVTDFVIPECQKKSPISKSMGTLENTFEGHKSKNKEDCDERDLLTVNRKIKISNLEKEQMLTSDFKKNTRLLPKLKKIENQVAMSFYKHQSSPDLSSEESETEKEIKRKAEVKKTKAGNTKEAVVHLRKSTRNTSNIPVILEPETEESENEFYIKQKKARPSVKETLQKSGVRKEFPITEAVGSDKTNRHPLECLPGLIQDKEWNEKELQKLHCAFASLPKHKPGFWSEVAAAVGSRSPEECQRKYMENPRGKGSQKHVTKKKPANSKGQNGKRGDADQKQTIKITAKVGTLKRKQQMREFLEQLPKDDHDDFFSTTPLQHQRILLPSFQDSEDDDDILPNMDKNPTTPSSVIFPLVKTPQCQHVSPGMLGSINRNDCDKYVFRMQKYHKSNGGIVWGNIKKKLVETDFSTPTPRRKTPFNTDLGENSGIGKLFTNAVESLDEEEKDYYFSNSDSA

SEQ ID NO: 281267 - protein, 155 aa, Artificial Sequence
  derived and/or modified sequence
MIATPLKHSRIYLPPEASSQRRNLPMDAIFFDSIPSGTLTPVKDLVKYQNSSLKLNDHKKNQFLKMTTFNNKNIFQSTMLTEATTSNSSLDISAIKPNKDGLKNKANYESPGKIFLRMKEKVLRDKQEQPSRNSSLLEPQKSGNNETFTPNRVEK

SEQ ID NO: 281268 - DNA, 4792 bp, Artificial Sequence
  derived and/or modified sequence
caactagaggagctcgccccctgcctgtgacagcttagggtcgcctactttttgtggacacactgccgtccacggagtgcagaggccgcctgcagttttcttgcgtccctgtgagacgcacggtggcgcaattcccgagcgtgccaatcccgggctggctggagggcgggctcttcaaatttgaattgcggaagtgttttgtgtgttagagaacgtcgcggaggaggtaagcgtcgcttggcgcctggccgccgcgggcaggatacaccgtgggcctgaggcgcgagcccggcggcgtgcggccctctctccgcgcggagccgagccggaactgcggcagtctctccctgccaggctcttcatccaaggtttctgtggatcccttctgaagttctatctgaaaattgcgcttaagtgaattttctgttagaagaacttggttgctactttcttgtcaagatgattgcaacacctttgaaacattcaagaatttacttacctccagaggcatcttctcaaaggagaaatctacccatggatgcaatcttttttgacagcattccttcaggcacacttactcctgtaaaagatttggtgaaatatcagaactcctccttaaaattgaatgaccataaaaagaatcagttcctaaaaatgacaacttttaacaataaaaatatatttcaatcaactatgctaacagaggctactacctctaacagttctcttgatatcagtgctataaagcccaacaaggatggattaaaaaataaagcaaactatgaatcaccaggaaaaatatttctaagaatgaaagaaaaagtactgcgtgacaagcaagaacagccatcaagaaacagtagtttgttggaaccacagaaaagtggaaataatgaaaccttcactcctaacagagttgaaaaaaaaaaattgcagcatacctacctatgtgaagaaaaggaaaacaacaaatcattccagtcagatgacagttcactaagagcctcagtccaaggagttcctctagaatcatcaaataatgatattttcctcccggtcaaacaaaagattcagtgccagcaggaaaagaaagcaccactgcacaatttaacttacgaacttccaactctgaaccaagaacaggaaaattttttggctgtagaagcccgaaacaagacattaactagagctcagttggctaaacaaatttttcactcaaaggagagtatagttgcaaccactaaatccaaaaaggacacgtttgttttagaaagcgttgattctgctgatgaacaatttcaaaatactaatgctgagactctcagtactaattgtattcctattaaaaatggcagcctgttaatggtttctgatagtgagaggacaacagaagggacttcgcaacagaaagttaaggaaggaaatggaaaaacagtgcctggagagacaggtcttccaggttccatgaaagatacatgtaaaattgtacttgcaacaccaagacttcatataacaatacctcggaggtcaaaaagaaatatttcaaagctttctcctccaagaatatttcaaactgttacaaatggacttaaaaaaaatcaggtagttcagctacaggaatggatgattaaaagcatcaataataatactgctatatgtgtagaaggaaaattgatagacgtcactaacatatattggcacagtaatgtaattatagagcggattgagcacaacaaacttaggactatatcaggcaacgtttatatattaaaaggcatgatagaccaaatttccatgaaagaagcaggatatccaaattatctcataaggaaatttatgtttggatttccagaaaattggaaagagcacattgataattttctggaacaattaagggctggtgaaaagaacagggaaaagaccaaacaaaaacagaaaactggaagatctgtccgtgacataaggaaatcaatgaaaaatgatgcacgagaaaaccaaacagatactgctcaaagagccaccaccacttacgattttgattgtgataatttggaactgaagagtaataagcacagtgagtcaccaggagctacagaattaaacatgtgccacagtaattgccaaaataaaccaacattaaggttcccagatgaccaagtaaataatactattcaaaatggaggaggagatgacttatctaatcaggaattaattggaaaaaaagaatataaaatgtcttcaaagaaactaaaaattggtgaaagaacaaatgaaaggataataaaaagtcagaagcaagagacaactgaagaattggatgtatccattgatattctaacctcaagggaacagtttttctcagatgaagaaagaaaatacatggccatcaatcagaagaaagcttatattttagtaacaccacttaaatctagaaaagtgatagagcaaagatgcatgaggtataatctgtccgctggcaccatcaaagcagtaacagattttgtaataccagagtgtcaaaaaaaaagtcccatcagcaagtccatggggactttagaaaatacatttgaaggtcataaaagtaaaaacaaggaagattgcgatgaacgtgacttacttactgtcaaccggaaaataaaaatatctaaccttgaaaaggaacaaatgctcacctctgactttaagaaaaataccagactattaccaaaattgaagaaaatagaaaatcaggtagctatgtcattttataagcatcagtcctcaccagatttgtcaagtgaagaaagtgaaacagaaaaggaaattaaaaggaaagctgaagttaagaaaaccaaagcaggaaacaccaaagaagcagtggttcacctgagaaagagcacaagaaacacaagtaatattccagtgattttggaacctgaaactgaagaaagtgaaaatgaattttatatcaaacaaaagaaagctagaccttccgtcaaagaaactcttcagaagtctggtgttaggaaagagtttccaattactgaggcagtaggatctgataagacaaataggcatcccttagaatgcttacctggtttaattcaggataaggaatggaatgagaaggagttacagaaacttcattgtgcttttgcatctcttccaaagcacaaacctggtttctggtcagaggtagctgcggctgtaggttctcgatctcctgaagaatgccagaggaaatacatggaaaatcccagaggaaaaggatcccagaaacatgtcactaagaagaagccagccaattccaaaggccaaaatggcaagagaggtgatgctgatcagaaacaaactattaagataactgccaaagtgggaactcttaaaaggaagcaacagatgagggaatttctggaacagttgccaaaagatgaccatgatgattttttcagtacaacacctttacagcatcaaagaatactgttgccaagtttccaggacagtgaagatgatgatgatattctgccaaatatggacaaaaatccaacaactccatcatcagttatctttccattggtaaaaactcctcaatgtcagcatgtcagtcctggcatgctaggttctataaataggaatgactgtgataaatatgtttttcgtatgcaaaaatatcataaaagtaatggtggtattgtctggggcaacatcaagaaaaaattagttgaaactgatttctcaactccaacaccaagaaggaaaaccccatttaacacagacttaggagaaaactctggtattggaaaacttttcactaatgctgtggaatctttagatgaagaagagaaagattattatttttcgaactctgattctgcatagtaaaatgagaaaatatgattcctgggatttttaccataaagcagacagtgtttgtattttcaactggagtacatgtattttctttgtaaagtagcttcctatgaaaatgtggacttttttgaaggtttcatatgtttgtgttcaaagtaaaatatcctcattgctgcagcttactaaaaatgtaaagaaaattgtttttgctcgtgtagatatctgtaaatttgtttttgcatattaaaatatatatagataattttttaataagcatccaagtctgtttactttaagaaaaccatttcccaaacagatttttttttatttcaagaaaattttgctaccatttaagtaagagaaggtgagaaggatgacagaggttgtattggtagctattgaattcatgaaaacttttaagttagcatttgttagcagttattatccaagccagagtaggatttgttaccagttgttatccaaacctaatgtttaaattacacattgttgaaattaaattacacattgttgacatgcttctctcctgattgtttttattttaaacttgtgataggcatatctatgaaacctttgtaaatttagtttattgctttaccattattttactaggtaaaattagagaacagattttgttctctaatttttaagccttatttacatatgcagaaacagcttaaatattttgactagattagacaaacagttaatagatccaccattaggaatcaatatattatgtcataataaacatcctttttctttcactgaaatttcttttagaaataaacttatttttgcttgttatgttttgaaacttgacataggatattttccctctggctacacattcacctacccttgttctctatttagattattcaaataaagttagtttgcttttatagtaaaaaaaaaaaaaaaa

SEQ ID NO: 281269 - DNA, 3399 bp, Artificial Sequence
  derived and/or modified sequence
atgattgctacaccactcaagcattcgaggatttacctgccgccagaggctagttcgcagcggaggaatctccctatggacgctattttttttgactctattccaagtgggacattgacccccgtgaaggatctggttaaatatcagaacagtagccttaagctcaatgatcacaaaaaaaaccaatttttgaaaatgacaacctttaataacaagaatatatttcaatccaccatgctgacggaggccactacctctaactcctcactggatatttctgccataaaacccaataaggacgggctgaagaacaaggccaactacgagagtcctgggaagatcttcctcagaatgaaggagaaggttcttcgagacaaacaagaacagcccagtcggaatagctccctgctcgaacctcaaaagtcagggaataacgaaacgttcactcccaacagagttgaaaagaaaaaactccaacatacctacctgtgtgaagagaaggagaacaataagagtttccagagtgatgattcgtctttgcgggcatccgtgcagggagtgccccttgaatcttctaacaatgatatctttctgcccgtcaagcagaaaatacagtgtcagcaggaaaaaaaggctcctctccacaatctaacctacgaattacccactctcaatcaggagcaagaaaactttctggctgtcgaggccaggaacaagactcttacgcgtgcacagctcgcaaagcagatctttcacagcaaggagtctatcgtggctaccaccaagtcaaagaaagacacctttgtgctcgagtccgtcgactccgcagacgagcaattccaaaacacaaacgccgaaaccctttctacgaattgcattcctattaaaaacggctctttacttatggtgtcagatagcgagcgcactaccgagggaaccagccaacagaaggtaaaggagggaaacggaaagacggtaccgggcgagaccgggctgccagggagcatgaaggatacttgcaaaattgtgctggctactccccggctgcacattaccattccacggcggtccaaacggaacatttctaagctgtccccccccaggatcttccaaactgtgaccaacggtcttaagaaaaatcaggtggtgcagctgcaagagtggatgatcaagagtattaataacaatactgccatctgtgtcgaaggaaaactgatcgatgtgactaatatctattggcatagtaatgtgatcattgaaagaatcgaacacaataaactccgaaccatctctggtaatgtatacatccttaaagggatgatcgatcagatttccatgaaagaggcggggtacccgaattacctgattcggaagtttatgttcggcttccccgaaaattggaaggagcatatcgataactttttggagcagctaagagccggcgagaagaatagggagaagaccaagcagaagcaaaagacaggccggtcagtgagggatatcaggaagagcatgaaaaacgatgccagagaaaatcaaaccgacaccgctcagcgtgccacaacgacttatgactttgattgcgataatctcgagcttaagtcaaacaaacactctgagtcccccggagccaccgagctcaacatgtgccatagtaattgtcagaataaacctacattacgatttcccgacgaccaagtgaacaatacaatccagaacggaggtggcgacgacctcagtaatcaggaattgataggcaaaaaagaatacaagatgagcagtaagaagcttaaaataggcgagcggacaaatgagcggatcatcaagagtcagaaacaagagacaaccgaggaactggatgtcagcattgacatcttgacctcccgggaacaattcttcagcgacgaagagcggaaatatatggccataaatcagaagaaggcatacatcctggtgacaccacttaaaagccgaaaggttattgaacagcgctgcatgagatacaacctctccgcggggaccattaaagccgtcaccgacttcgtgatccccgagtgtcagaagaagagccctatttctaagtctatgggcactttggagaatacctttgagggccacaagtcaaaaaataaagaggattgtgacgagcgagatctgttgacagtcaaccggaagatcaagatcagcaacctggagaaagagcagatgctcacatctgatttcaagaagaacacaagacttctcccaaagctgaagaaaattgagaatcaggtggccatgtctttttataaacatcagtcaagtcccgacctgtcctcagaggaatcagagaccgagaaggagatcaagcgaaaggcagaggtgaagaagacaaaggcaggcaacacaaaagaagctgttgtccacctccgcaagtccacaagaaatacctccaatatacccgtgattcttgagcctgagacagaggaatcggaaaatgagttctatatcaagcagaaaaaagccaggcctagcgtcaaagagactctccaaaaatcaggcgtgagaaaagaatttcccatcacagaagctgttggatccgataagaccaaccggcacccattggagtgcctcccaggccttatccaggataaggagtggaacgaaaaagagctgcagaagctgcattgtgccttcgcttccttgcccaaacacaaacctggtttctggagtgaggtcgccgccgcggtgggctctcggagtcccgaggaatgccaacgtaaatatatggagaaccctcgtggaaaaggctcccaaaaacacgttacaaaaaaaaaaccagcaaattccaaaggacagaacggcaagcgtggggacgccgatcagaagcaaactatcaaaattaccgcaaaggtgggcactctgaagcgaaagcagcaaatgcgtgagtttttagaacagctgcccaaggacgaccatgacgattttttcagtactaccccccttcaacatcagaggatcctgctcccatcctttcaggactctgaggacgatgatgatattctgcctaacatggacaaaaatccaaccacaccaagctctgtgatatttcccctggtgaaaactccccaatgccagcacgtgtctccaggaatgttgggttctatcaatcggaacgactgtgacaaatatgtcttccgaatgcagaagtaccacaaaagtaacggtgggatcgtctggggcaacattaaaaagaaactagtggaaaccgacttttccacccccacccctagaaggaaaacccccttcaacaccgacttgggggagaatagcggcatcgggaaacttttcacgaatgccgtcgagtcactagacgaggaggaaaaagattactacttctcaaattctgattcagcctag

SEQ ID NO: 281270 - DNA, 468 bp, Artificial Sequence
  derived and/or modified sequence
atgatcgcaactcccttgaaacacagtcggatctatctgccaccagaggccagcagccagcggcgaaacctacctatggatgccatctttttcgactccattccctctggaactctgacccctgttaaggacctggtgaaataccagaacagttcgctcaaactgaatgatcataagaagaaccagtttttgaagatgactacgtttaataacaagaatattttccagtcaacaatgctgacagaggcgactacgtccaacagcagtcttgatatctctgctattaagcccaacaaagacgggctcaaaaataaggctaactacgagtctcctgggaagatctttctgcggatgaaggaaaaagtcctgagagataagcaagaacagccgtctcggaacagtagtttgctggagcctcaaaaaagcggtaacaatgagacatttacccctaaccgagtggagaagtag

SEQ ID NO: 281271 - DNA, 4777 bp, Artificial Sequence
  derived and/or modified sequence
caactagaggagctcgccccctgcctgtgacagcttagggtcgcctactttttgtggacacactgccgtccacggagtgcagaggccgcctgcagttttcttgcgtccctgtgagacgcacggtggcgcaattcccgagcgtgccaatcccgggctggctggagggcgggctcttcaaatttgaattgcggaagtgttttgtgtgttagagaacgtcgcggaggaggtaagcgtcgcttggcgcctggccgccgcgggcaggatacaccgtgggcctgaggcgcgagcccggcggcgtgcggccctctctccgcgcggagccgagccggaactgcggcagtctctccctgccaggctcttcatccaaggtttctgtggatcccttctgaagttctatctgaaaattgcgcttaagtgaattttctgttagaagaacttggttgctactttcttgtcaagatgattgcaacacctttgaaacattcaagaatttacttacctccagaggcatcttctcaaaggagaaatctacccatggatgcaatcttttttgacagcattccttcaggcacacttactcctgtaaaagatttggtgaaatatcagaactcctccttaaaattgaatgaccataaaaagaatcagttcctaaaaatgacaacttttaacaataaaaatatatttcaatcaactatgctaacagaggctactacctctaacagttctcttgatatcagtgctataaagcccaacaaggatggattaaaaaataaagcaaactatgaatcaccaggaaaaatatttctaagaatgaaagaaaaagtactgcgtgacaagcaagaacagccatcaagaaacagtagtttgttggaaccacagaaaagtggaaataatgaaaccttcactcctaacagagttgaaaaaaaaaaattgcagcatacctacctatgtgaagaaaaggaaaacaacaaatcattccagtcagatgacagttcactaagagcctcagtccaaggagttcctctagaatcatcaaataatgatattttcctcccggtcaaacaaaagattcagtgccagcaggaaaagaaagcaccactgcacaatttaacttacgaacttccaactctgaaccaagaacaggaaaattttttggctgtagaagcccgaaacaagacattaactagagctcagttggctaaacaaatttttcactcaaaggagagtatagttgcaaccactaaatccaaaaaggacacgtttgttttagaaagcgttgattctgctgatgaacaatttcaaaatactaatgctgagactctcagtactaattgtattcctattaaaaatggcagcctgttaatggtttctgatagtgagaggacaacagaagggacttcgcaacagaaagttaaggaaggaaatggaaaaacagtgcctggagagacaggtcttccaggttccatgaaagatacatgtaaaattgtacttgcaacaccaagacttcatataacaatacctcggaggtcaaaaagaaatatttcaaagctttctcctccaagaatatttcaaactgttacaaatggacttaaaaaaaatcaggtagttcagctacaggaatggatgattaaaagcatcaataataatactgctatatgtgtagaaggaaaattgatagacgtcactaacatatattggcacagtaatgtaattatagagcggattgagcacaacaaacttaggactatatcaggcaacgtttatatattaaaaggcatgatagaccaaatttccatgaaagaagcaggatatccaaattatctcataaggaaatttatgtttggatttccagaaaattggaaagagcacattgataattttctggaacaattaagggctggtgaaaagaacagggaaaagaccaaacaaaaacagaaaactggaagatctgtccgtgacataaggaaatcaatgaaaaatgatgcacgagaaaaccaaacagatactgctcaaagagccaccaccacttacgattttgattgtgataatttggaactgaagagtaataagcacagtgagtcaccaggagctacagaattaaacatgtgccacagtaattgccaaaataaaccaacattaaggttcccagatgaccaagtaaataatactattcaaaatggaggaggagatgacttatctaatcaggaattaattggaaaaaaagaatataaaatgtcttcaaagaaactaaaaattggtgaaagaacaaatgaaaggataataaaaagtcagaagcaagagacaactgaagaattggatgtatccattgatattctaacctcaagggaacagtttttctcagatgaagaaagaaaatacatggccatcaatcagaagaaagcttatattttagtaacaccacttaaatctagaaaagtgatagagcaaagatgcatgaggtataatctgtccgctggcaccatcaaagcagtaacagattttgtaataccagagtgtcaaaaaaaaagtcccatcagcaagtccatggggactttagaaaatacatttgaaggtcataaaagtaaaaacaaggaagattgcgatgaacgtgacttacttactgtcaaccggaaaataaaaatatctaaccttgaaaaggaacaaatgctcacctctgactttaagaaaaataccagactattaccaaaattgaagaaaatagaaaatcaggtagctatgtcattttataagcatcagtcctcaccagatttgtcaagtgaagaaagtgaaacagaaaaggaaattaaaaggaaagctgaagttaagaaaaccaaagcaggaaacaccaaagaagcagtggttcacctgagaaagagcacaagaaacacaagtaatattccagtgattttggaacctgaaactgaagaaagtgaaaatgaattttatatcaaacaaaagaaagctagaccttccgtcaaagaaactcttcagaagtctggtgttaggaaagagtttccaattactgaggcagtaggatctgataagacaaataggcatcccttagaatgcttacctggtttaattcaggataaggaatggaatgagaaggagttacagaaacttcattgtgcttttgcatctcttccaaagcacaaacctggtttctggtcagaggtagctgcggctgtaggttctcgatctcctgaagaatgccagaggaaatacatggaaaatcccagaggaaaaggatcccagaaacatgtcactaagaagaagccagccaattccaaaggccaaaatggcaagagaggtgatgctgatcagaaacaaactattaagataactgccaaagtgggaactcttaaaaggaagcaacagatgagggaatttctggaacagttgccaaaagatgaccatgatgattttttcagtacaacacctttacagcatcaaagaatactgttgccaagtttccaggacagtgaagatgatgatgatattctgccaaatatggacaaaaatccaacaactccatcatcagttatctttccattggtaaaaactcctcaatgtcagcatgtcagtcctggcatgctaggttctataaataggaatgactgtgataaatatgtttttcgtatgcaaaaatatcataaaagtaatggtggtattgtctggggcaacatcaagaaaaaattagttgaaactgatttctcaactccaacaccaagaaggaaaaccccatttaacacagacttaggagaaaactctggtattggaaaacttttcactaatgctgtggaatctttagatgaagaagagaaagattattatttttcgaactctgattctgcatagtaaaatgagaaaatatgattcctgggatttttaccataaagcagacagtgtttgtattttcaactggagtacatgtattttctttgtaaagtagcttcctatgaaaatgtggacttttttgaaggtttcatatgtttgtgttcaaagtaaaatatcctcattgctgcagcttactaaaaatgtaaagaaaattgtttttgctcgtgtagatatctgtaaatttgtttttgcatattaaaatatatatagataattttttaataagcatccaagtctgtttactttaagaaaaccatttcccaaacagatttttttttatttcaagaaaattttgctaccatttaagtaagagaaggtgagaaggatgacagaggttgtattggtagctattgaattcatgaaaacttttaagttagcatttgttagcagttattatccaagccagagtaggatttgttaccagttgttatccaaacctaatgtttaaattacacattgttgaaattaaattacacattgttgacatgcttctctcctgattgtttttattttaaacttgtgataggcatatctatgaaacctttgtaaatttagtttattgctttaccattattttactaggtaaaattagagaacagattttgttctctaatttttaagccttatttacatatgcagaaacagcttaaatattttgactagattagacaaacagttaatagatccaccattaggaatcaatatattatgtcataataaacatcctttttctttcactgaaatttcttttagaaataaacttatttttgcttgttatgttttgaaacttgacataggatattttccctctggctacacattcacctacccttgttctctatttagattattcaaataaagttagtttgcttttatagta

SEQ ID NO: 281272 - DNA, 808 bp, Artificial Sequence
  derived and/or modified sequence
ggtaagcgtcgcttggcgcctggccgccgcgggcaggatacaccgtgggcctgaggcgcgagcccggcggcgtgcggccctctctccgcgcggagccgagccggaactgcggcagtctctccctgccaggctcttcatccaaggggcagggacattaggaaacagaaagctctgttttggttcttggagcctttcaacgtgaccacaattatctgactttaaatgaagacagttctgcatgtccattacaggtttctgtggatcccttctgaagttctatctgaaaattgcgcttaagtgaattttctgttagaagaacttggttgctactttcttgtcaagatgattgcaacacctttgaaacattcaagaatttacttacctccagaggcatcttctcaaaggagaaatctacccatggatgcaatcttttttgacagcattccttcaggcacacttactcctgtaaaagatttggtgaaatatcagaactcctccttaaaattgaatgaccataaaaagaatcagttcctaaaaatgacaacttttaacaataaaaatatatttcaatcaactatgctaacagaggctactacctctaacagttctcttgatatcagtgctataaagcccaacaaggatggattaaaaaataaagcaaactatgaatcaccaggaaaaatatttctaagaatgaaagaaaaagtactgcgtgacaagcaagaacagccatcaagaaacagtagtttgttggaaccacagaaaagtggaaataatgaaaccttcactcctaacagagttgaaaaaa

SEQ ID NO: 281273 - DNA, 3399 bp, Artificial Sequence
  derived and/or modified sequence
atgattgccacccccctgaagcacagccgcatctacctgcccccagaggccagcagccagaggaggaacctgcccatggatgccatcttctttgacagcatccccagcggcaccctgacccctgtgaaggacctggtgaagtaccagaacagcagcctgaagctgaatgaccacaagaagaaccagttcctgaagatgaccaccttcaacaacaagaacatcttccagagcaccatgctgacagaggccaccaccagcaacagcagcctggacatcagcgccatcaagcccaacaaggatggcctgaagaacaaggccaactatgagagccctgggaagatcttcctgaggatgaaggagaaggtgctgcgggacaagcaggagcagcccagcaggaacagcagcctgctggagccccagaagagcggcaacaatgagaccttcacccccaacagagtggagaagaagaagctgcagcacacctacctgtgtgaggagaaggagaacaacaagagcttccagagtgatgacagcagcctgcgggcctctgtgcagggcgtgcccctggagagcagcaacaatgacatcttcctgcctgtgaagcagaagatccagtgccagcaggagaagaaggcccccctgcacaacctgacctatgagctgcccaccctgaaccaggagcaggagaacttcctggccgtggaggccaggaacaagaccctgacccgggcccagctggccaagcagatcttccacagcaaggagagcatcgtggccaccaccaagagcaagaaggacacctttgtgctggagagcgtggacagcgcagatgagcagttccagaacaccaatgctgagaccctgagcaccaactgcatccccatcaagaatggcagcctgctgatggtgtctgacagcgagaggaccacagagggcaccagccagcagaaggtgaaggagggcaatggcaagacagtgcctggagagaccggcctgcccggctccatgaaggacacctgcaagatcgtgctggccaccccccggctgcacatcaccatccccaggaggagcaagaggaacatcagcaagctgagccccccacgcatcttccagacagtgaccaacggcctgaagaagaaccaggtggtgcagctgcaggagtggatgatcaagagcatcaacaacaacacagccatctgtgtggagggcaagctgattgatgtgaccaacatctactggcacagcaatgtcatcatcgagcgcatcgagcacaacaagctgcggaccatctctggaaatgtgtacatcctgaagggcatgattgaccagatctccatgaaggaggccggctaccccaactacctgatcaggaagttcatgtttggcttccctgagaactggaaggagcacatcgacaacttcctggagcagctgcgggccggggagaagaaccgggagaagaccaagcagaagcagaagacaggccgctctgtgcgggacatcaggaagtccatgaagaatgatgcccgggagaaccagacagacacagcccagagggccaccaccacctatgactttgactgtgacaacctggagctgaagagcaacaagcacagcgagagccctggggccacagagctgaacatgtgccacagcaactgccagaacaagcccaccctgcgcttcccagatgaccaggtgaacaacaccatccagaatggaggaggagatgacctgagcaaccaggagctgattggcaagaaggagtacaagatgagcagcaagaagctgaagattggagagaggaccaatgaaagaatcatcaagagccagaagcaggagaccacagaggagctggatgtgtccattgacatcctgaccagccgggagcagttcttcagtgatgaggagaggaagtacatggccatcaaccagaagaaggcctacatcctggtgacccccctgaagagcaggaaggtgattgagcagcgctgcatgagatacaacctgtctgctggcaccatcaaggctgtgacagactttgtgattcctgagtgccagaagaagagccccatcagcaagtccatgggcaccctggagaacacctttgagggccacaagagcaagaacaaggaggactgtgatgagcgggacctgctgactgtgaacaggaagatcaagatcagcaacctggagaaggagcagatgctgaccagtgacttcaagaagaacacccggctgctgcccaagctgaagaagattgagaaccaggtggccatgtccttctacaagcaccagagcagcccagacctgagcagcgaggagagcgagacagagaaggagatcaagaggaaggccgaggtgaagaagaccaaggccggcaacaccaaggaggccgtggtgcacctgaggaagagcaccaggaacaccagcaacatccctgtgatcctggagcctgagacagaggagagtgaaaatgagttctacatcaagcagaagaaggcccggcccagcgtgaaggagaccctgcagaagagcggcgtgaggaaggagttccccatcacagaagctgtgggcagtgacaagaccaacagacaccccctggagtgcctgcccggcctcatccaggacaaggagtggaatgagaaggagctgcagaagctgcactgtgcctttgccagcctgcccaagcacaagccaggcttctggagcgaggtggccgctgctgtgggcagccgcagccctgaggagtgccagaggaagtacatggagaacccccggggcaagggcagccagaagcacgtgaccaagaagaagccagccaacagcaagggccagaatggcaagagaggagatgctgaccagaagcagaccatcaagatcacagccaaggtgggcaccctgaagaggaagcagcagatgagggagttcctggagcagctgcccaaggatgaccatgatgacttcttcagcaccacccccctgcagcaccagaggatcctgctgcccagcttccaggacagtgaagatgatgatgacatcctgcccaacatggacaagaaccccaccacccccagcagcgtcatcttccccctggtgaagaccccccagtgccagcacgtgtccccaggcatgctgggcagcatcaacagaaatgactgtgacaagtatgtgttcaggatgcagaagtaccacaagagcaatggaggcatcgtgtggggcaacatcaagaagaagctggtggagacagacttcagcacccccacccccaggaggaagacccccttcaacacagacctgggggagaacagcggcatcggcaagctgttcaccaatgctgtggagagcctggatgaggaggagaaggactactacttcagcaacagcgacagcgcctag

SEQ ID NO: 281274 - DNA, 468 bp, Artificial Sequence
  derived and/or modified sequence
atgattgccacccccctgaagcacagccgcatctacctgcccccagaggccagcagccagaggaggaacctgcccatggatgccatcttctttgacagcatccccagcggcaccctgacccctgtgaaggacctggtgaagtaccagaacagcagcctgaagctgaatgaccacaagaagaaccagttcctgaagatgaccaccttcaacaacaagaacatcttccagagcaccatgctgacagaggccaccaccagcaacagcagcctggacatcagcgccatcaagcccaacaaggatggcctgaagaacaaggccaactatgagagccctgggaagatcttcctgaggatgaaggagaaggtgctgcgggacaagcaggagcagcccagcaggaacagcagcctgctggagccccagaagagcggcaacaatgagaccttcacccccaacagagtggagaagtag

SEQ ID NO: 281275 - DNA, 3399 bp, Artificial Sequence
  derived and/or modified sequence
atgatcgccacccccctgaagcacagccggatctacctgccccccgaggcatcctcacagcgccgcaatctacctatggatgcaatcttcttcgattccataccatctggtacattaactcccgtgaaagacctggtgaagtatcagaattcgtcactgaagctgaatgaccacaagaagaaccagttcttgaaaatgacaacttttaacaacaagaatatcttccaaagcacaatgctgacagaagcgaccacatcaaactcaagtctcgatataagcgcgataaaaccgaacaaagatgggttaaagaacaaagctaactacgaaagcccaggcaagatttttttgcgcatgaaggagaaggtactgagagataaacaagagcagccatcccggaattcttcattgctggaaccccaaaagtctggcaataatgagacatttacaccaaatcgagtggaaaagaagaaactacagcacacctacctatgcgaggaaaaagagaacaataagtcttttcaatctgacgactcatcactgagggcttctgttcagggcgttccactggaaagcagcaataatgatatctttctgcccgtcaagcagaaaatccagtgccagcaggagaagaaggctccactccacaaccttacttacgaattgcctacacttaaccaggagcaggaaaatttcctcgccgtcgaggctagaaacaaaacactgacacgcgctcagctcgcaaagcagatcttccattccaaggagtccattgtagcaacaacaaagtctaaaaaagacaccttcgttttagaaagcgtcgactctgccgacgaacagtttcaaaataccaacgcggaaactctgagcactaactgcatccccattaagaatggttcactgttgatggtgagcgatagtgagcggactacagagggtacttctcagcagaaagtaaaggaaggcaacggcaaaacggtacctggcgaaacagggctgcctggcagcatgaaagatacctgtaagattgtcctggccactccaaggcttcacattactatcccacgccgtagtaagcgcaatatctccaaactcagccctccgcgcattttccagaccgtgactaacggcctgaaaaaaaaccaagtggtgcagctacaggaatggatgattaaatcaattaacaacaacaccgccatctgcgtggaaggaaaactcatcgacgtgacaaatatctattggcacagcaatgtcatcatcgagcgcatcgagcataacaagctgcgcactatctcgggcaacgtttacatactgaaggggatgatcgaccagatctctatgaaggaggccggttaccccaattatcttatccggaagttcatgttcggttttcccgaaaactggaaggagcacatcgacaacttcctagagcaacttcgagctggagagaagaatcgcgagaaaaccaaacagaaacaaaaaaccgggaggtctgtgcgtgacatcagaaagtcaatgaaaaatgacgcaagggagaatcagacagatacagcccagcgagccaccaccacctatgacttcgactgcgataacctcgagctcaagtcaaacaagcactccgaatctcccggggccacggagctcaacatgtgccacagcaattgccaaaacaagcctacactgcgctttcccgacgatcaggtcaacaacacaatccagaatggcgggggcgacgacttgtctaaccaggagctcattgggaagaaggaatacaagatgtcctccaaaaagctgaaaattggcgagagaacaaacgagcgtatcatcaaatctcagaaacaggaaaccacagaagaactcgacgtgagtatcgatatcctgacttcacgtgagcagttcttctccgacgaggaaaggaaatatatggctataaatcaaaagaaggcatatattttagtgaccccactgaagagccgaaaggtcatcgagcaaaggtgcatgagatacaacctcagcgccgggacaataaaggccgtgacagactttgtaatacccgagtgtcagaaaaagtcaccaatcagcaagtcaatggggactctggagaacacatttgaaggccataagagcaagaacaaggaagattgcgatgagcgggatctccttacggttaatcggaaaatcaaaatatcaaaccttgaaaaagagcagatgctgacatccgattttaagaagaataccagactcctgcctaaattgaaaaagattgagaaccaggtcgctatgtcattctataaacaccaatcgagtcctgacctatctagcgaggaatccgaaaccgagaaagaaattaagcgaaaagccgaagtgaaaaaaacgaaggccggcaacaccaaggaggcagtggtccacctgcgcaaatcaacaaggaatacaagcaatatccccgtgattctggaacccgagacagaggaaagtgagaatgagttctacattaagcagaaaaaggcaaggccctccgtgaaggagacactgcagaaaagcggcgttagaaaggagtttcccattacggaagcagttggcagtgacaagaccaatcgccatcctctggagtgtctgccaggtctcattcaggacaaggaatggaacgagaaagagttgcaaaaactgcactgcgctttcgcttcccttccgaaacacaaaccagggttttggtccgaagtggcggcagctgttgggagcaggtcccccgaggaatgccaacgcaagtatatggaaaacccccgaggaaaaggaagccaaaagcacgtgactaaaaaaaagcccgccaactctaagggccagaatgggaagaggggtgacgcggaccagaagcagacgattaagattacagcgaaggtgggaactctaaagcggaagcagcaaatgcgagaattcctggaacagctgccaaaagacgatcacgacgatttcttttctactactcctttgcagcaccaacgaatactgcttccatccttccaggacagcgaagacgatgacgatatcctccctaacatggacaagaaccccaccaccccctccagcgtgattttccctctggtcaagactccccagtgtcagcacgtatctcccggcatgctcggttccatcaatcggaacgattgcgataaatatgtgtttcggatgcagaagtatcacaagtcaaatggtggaatcgtgtggggaaacatcaagaagaagctggttgagaccgacttcagcactcccactccacgacggaagacaccctttaacaccgacctgggcgaaaactccggaattggcaagctatttacgaacgcggtggagtcactcgatgaggaagagaaggattattatttcagtaacagcgacagtgcctag

SEQ ID NO: 281276 - DNA, 468 bp, Artificial Sequence
  derived and/or modified sequence
atgatcgccacccccctgaagcacagccggatctacctgccccccgaagcatccagtcagcgcaggaatcttcctatggatgccattttctttgactccattccatcgggtacacttactcctgtgaaggacctcgtaaagtatcagaattccagtctgaagctcaacgatcataagaagaaccagtttctcaagatgaccactttcaacaataagaacattttccaatcaactatgttgactgaggcaacaacaagcaatagttctttggacatctccgcgataaaacctaacaaagacggcctgaaaaacaaagccaactacgagtcaccagggaagatctttctcaggatgaaggagaaagttctgcgggataagcaggagcagccatcacgaaattctagcctgctggaacctcagaaatccgggaacaacgagacattcactcctaaccgcgtagaaaagtag

SEQ ID NO: 281277 - DNA, 3399 bp, Artificial Sequence
  derived and/or modified sequence
atgattgctactcccttaaagcacagcaggatctacctgcccccagaggcttcgtcccagcggcgaaaccttccgatggatgcgattttttttgacagtatccctagtggcaccctgacccccgtgaaggatctcgttaagtaccaaaattcaagtctgaaactgaacgaccacaaaaaaaaccagttcttgaaaatgaccactttcaataacaaaaacatcttccagagcactatgctgacagaggctaccacgagcaactcatcactggatataagtgccatcaaacccaataaagatgggctgaaaaacaaagcaaattatgagagtccagggaagatctttctgcgaatgaaggagaaagtgctaagagacaagcaggagcagccatcacgcaatagcagcttactcgaaccccagaagtccggcaataacgaaaccttcaccccgaacagggttgagaagaagaagctccagcatacctacctgtgcgaggagaaagaaaataacaagtccttccagtcggacgattcatctttaagagcctccgtccagggggtccctctggagagttccaataatgatatttttttgcctgtgaagcagaaaattcagtgccagcaggaaaaaaaagctccgttacacaatttgacatacgagttgccaaccctgaaccaggaacaagaaaacttcctggccgtcgaggcccgaaacaagactcttacacgggctcagctggctaaacagatctttcactcaaaagagagcattgtcgccaccacaaaaagcaagaaagatacttttgttcttgaaagcgtcgacagcgccgacgagcaatttcaaaacacaaacgcggagacactctccacaaactgcatccctataaaaaatggtagcctcctcatggtttccgacagcgagagaacaaccgaggggacctctcaacaaaaggtcaaggaaggaaacggtaaaacagtcccaggtgaaactgggctgcccggatctatgaaagatacctgcaaaatcgtactagcgacccctcgcctgcatattactataccacgccgttccaagcgaaatatctctaaactaagtcccccaaggattttccagacagtgacaaacggcctgaagaaaaatcaagtggtgcagctgcaggaatggatgatcaagagcatcaacaacaataccgccatttgtgtagaagggaaactgatcgacgtaacaaacatttactggcatagcaatgtgattattgagcgcattgaacataacaagttacgaaccataagtggaaatgtgtatatcctcaaaggcatgatcgatcaaatctcaatgaaagaggccggttatcccaactacttgattcggaaattcatgtttggattccctgagaattggaaggagcacatagacaacttcctggagcagctccgtgcaggagagaagaacagggagaagactaaacagaagcagaaaaccggcagatcggttcgggatattcgaaagtctatgaagaacgatgccagggagaatcagaccgataccgcccagagggctaccactacctacgattttgattgcgacaatctagaactcaagagcaacaagcactccgagtccccaggggctaccgaactgaatatgtgccactccaattgtcagaacaagcccaccttacggttccctgacgaccaagttaacaatactatacaaaatggtggaggcgacgatttgtcaaaccaggaactcatcgggaaaaaggagtataaaatgtcgagtaagaagctgaagatcggcgagagaacaaatgagagaatcataaaaagtcagaaacaggaaaccactgaggaattagacgtgtccattgacatcctaacctcgcgagagcagttcttcagtgatgaggagagaaagtatatggcaatcaatcaaaagaaggcttatatcctagtgacacccttaaagtcacggaaggtgatagaacaaagatgcatgcgctataatcttagtgctgggactataaaggcagtgacagatttcgtaattcccgagtgccagaagaagtcccccattagcaagtctatgggcacactggaaaataccttcgagggacataagtctaaaaataaagaggactgcgacgagcgagatctactgacagtgaatcggaagatcaaaatttcaaaccttgaaaaagagcaaatgctcactagcgatttcaaaaaaaacactcgactcctccctaagttaaaaaaaattgagaaccaggtggcaatgagcttctacaagcatcagtctagccccgacctgtctagcgaagagagtgagacagagaaagaaatcaaaagaaaggctgaggttaagaaaaccaaagccggaaacacaaaagaagcagttgttcacttgcggaagtccactagaaatacttcaaatattcctgtgattctggagcccgaaaccgaagagtccgagaatgaattctacattaaacagaagaaggccaggccaagcgtaaaagagactctgcaaaagtctggagtgaggaaggagtttccaatcaccgaggccgtggggtcagacaagactaataggcatcccttggaatgcctgcccggtctcatacaggacaaagagtggaacgagaaagaactgcaaaaactacactgtgcatttgccagccttccgaaacataaaccgggtttctggagtgaggtggccgctgctgtaggctctcgttctcccgaagaatgccagcgcaaatatatggaaaatcctaggggaaaagggtcacagaagcatgtcaccaaaaaaaagccggctaattctaaggggcaaaacggaaagaggggtgatgcggaccaaaagcaaacaatcaaaatcaccgcaaaagtgggcacattgaaacgtaaacagcagatgagggagtttcttgaacaattgcccaaagatgaccatgacgactttttttccaccacacccctccaacatcagagaatcctcctgccctcttttcaagactccgaagacgatgatgatattcttcccaacatggataaaaatcccactactcctagttccgtgatctttccccttgtgaaaacccctcagtgtcagcatgtctcccccggtatgctcggcagcatcaatcggaatgactgtgacaaatatgtattcaggatgcaaaaatatcataaatctaatggcggaatcgtctggggaaacatcaaaaagaaactggtcgagacggatttctctacacctaccccaaggcgtaagactccctttaataccgacctgggagaaaacagtggaattggcaaactcttcacaaacgccgtggagagccttgatgaggaagaaaaagattattacttcagcaactcggactccgcatag

SEQ ID NO: 281278 - DNA, 468 bp, Artificial Sequence
  derived and/or modified sequence
atgatagcgacacccctgaagcactccaggatatatctgccacctgaagcctccagccagcgtaggaacttgccgatggatgccatattctttgattccataccgagcggtactctcaccccggttaaggatctcgtgaagtatcagaactcatctctcaaactcaacgatcacaagaagaaccagttcctcaaaatgacaacctttaataataaaaatatcttccagagcacaatgctcactgaggcaacaaccagtaactcttccctggatattagcgctatcaaacccaataaggatggcctgaagaacaaggctaactacgagtctcccggtaaaattttcctgagaatgaaagaaaaggtgctgcgcgataagcaggaacagccgtcacggaatagctcactcctggagccacagaagtcaggaaacaacgagacatttaccccgaaccgtgtcgagaagtag

SEQ ID NO: 281279 - DNA, 3399 bp, Artificial Sequence
  derived and/or modified sequence
atgatcgccacccccctgaagcacagcagaatctacctgccccccgaggccagcagccagagaagaaacctgcccatggacgccatcttcttcgacagcatccccagcggcaccctgacccccgtgaaggacctggtgaagtaccagaacagcagcctgaagctgaacgaccacaagaagaaccagttcctgaagatgaccaccttcaacaacaagaacatcttccagagcaccatgctgaccgaggccaccaccagcaacagcagcctggacatcagcgccatcaagcccaacaaggacggcctgaagaacaaggccaactacgagagccccggcaagatcttcctgagaatgaaggagaaggtgctgagagacaagcaggagcagcccagcagaaacagcagcctgctggagccccagaagagcggcaacaacgagaccttcacccccaacagagtggagaagaagaagctgcagcacacctacctgtgcgaggagaaggagaacaacaagagcttccagagcgacgacagcagcctgagagccagcgtgcagggcgtgcccctggagagcagcaacaacgacatcttcctgcccgtgaagcagaagatccagtgccagcaggagaagaaggcccccctgcacaacctgacctacgagctgcccaccctgaaccaggagcaggagaacttcctggccgtggaggccagaaacaagaccctgaccagagcccagctggccaagcagatcttccacagcaaggagagcatcgtggccaccaccaagagcaagaaggacaccttcgtgctggagagcgtggacagcgccgacgagcagttccagaacaccaacgccgagaccctgagcaccaactgcatccccatcaagaacggcagcctgctgatggtgagcgacagcgagagaaccaccgagggcaccagccagcagaaggtgaaggagggcaacggcaagaccgtgcccggcgagaccggcctgcccggcagcatgaaggacacctgcaagatcgtgctggccacccccagactgcacatcaccatccccagaagaagcaagagaaacatcagcaagctgagcccccccagaatcttccagaccgtgaccaacggcctgaagaagaaccaggtggtgcagctgcaggagtggatgatcaagagcatcaacaacaacaccgccatctgcgtggagggcaagctgatcgacgtgaccaacatctactggcacagcaacgtgatcatcgagagaatcgagcacaacaagctgagaaccatcagcggcaacgtgtacatcctgaagggcatgatcgaccagatcagcatgaaggaggccggctaccccaactacctgatcagaaagttcatgttcggcttccccgagaactggaaggagcacatcgacaacttcctggagcagctgagagccggcgagaagaacagagagaagaccaagcagaagcagaagaccggcagaagcgtgagagacatcagaaagagcatgaagaacgacgccagagagaaccagaccgacaccgcccagagagccaccaccacctacgacttcgactgcgacaacctggagctgaagagcaacaagcacagcgagagccccggcgccaccgagctgaacatgtgccacagcaactgccagaacaagcccaccctgagattccccgacgaccaggtgaacaacaccatccagaacggcggcggcgacgacctgagcaaccaggagctgatcggcaagaaggagtacaagatgagcagcaagaagctgaagatcggcgagagaaccaacgagagaatcatcaagagccagaagcaggagaccaccgaggagctggacgtgagcatcgacatcctgaccagcagagagcagttcttcagcgacgaggagagaaagtacatggccatcaaccagaagaaggcctacatcctggtgacccccctgaagagcagaaaggtgatcgagcagagatgcatgagatacaacctgagcgccggcaccatcaaggccgtgaccgacttcgtgatccccgagtgccagaagaagagccccatcagcaagagcatgggcaccctggagaacaccttcgagggccacaagagcaagaacaaggaggactgcgacgagagagacctgctgaccgtgaacagaaagatcaagatcagcaacctggagaaggagcagatgctgaccagcgacttcaagaagaacaccagactgctgcccaagctgaagaagatcgagaaccaggtggccatgagcttctacaagcaccagagcagccccgacctgagcagcgaggagagcgagaccgagaaggagatcaagagaaaggccgaggtgaagaagaccaaggccggcaacaccaaggaggccgtggtgcacctgagaaagagcaccagaaacaccagcaacatccccgtgatcctggagcccgagaccgaggagagcgagaacgagttctacatcaagcagaagaaggccagacccagcgtgaaggagaccctgcagaagagcggcgtgagaaaggagttccccatcaccgaggccgtgggcagcgacaagaccaacagacaccccctggagtgcctgcccggcctgatccaggacaaggagtggaacgagaaggagctgcagaagctgcactgcgccttcgccagcctgcccaagcacaagcccggcttctggagcgaggtggccgccgccgtgggcagcagaagccccgaggagtgccagagaaagtacatggagaaccccagaggcaagggcagccagaagcacgtgaccaagaagaagcccgccaacagcaagggccagaacggcaagagaggcgacgccgaccagaagcagaccatcaagatcaccgccaaggtgggcaccctgaagagaaagcagcagatgagagagttcctggagcagctgcccaaggacgaccacgacgacttcttcagcaccacccccctgcagcaccagagaatcctgctgcccagcttccaggacagcgaggacgacgacgacatcctgcccaacatggacaagaaccccaccacccccagcagcgtgatcttccccctggtgaagaccccccagtgccagcacgtgagccccggcatgctgggcagcatcaacagaaacgactgcgacaagtacgtgttcagaatgcagaagtaccacaagagcaacggcggcatcgtgtggggcaacatcaagaagaagctggtggagaccgacttcagcacccccacccccagaagaaagacccccttcaacaccgacctgggcgagaacagcggcatcggcaagctgttcaccaacgccgtggagagcctggacgaggaggagaaggactactacttcagcaacagcgacagcgcctag

SEQ ID NO: 281280 - DNA, 468 bp, Artificial Sequence
  derived and/or modified sequence
atgatcgccacccccctgaagcacagcagaatctacctgccccccgaggccagcagccagagaagaaacctgcccatggacgccatcttcttcgacagcatccccagcggcaccctgacccccgtgaaggacctggtgaagtaccagaacagcagcctgaagctgaacgaccacaagaagaaccagttcctgaagatgaccaccttcaacaacaagaacatcttccagagcaccatgctgaccgaggccaccaccagcaacagcagcctggacatcagcgccatcaagcccaacaaggacggcctgaagaacaaggccaactacgagagccccggcaagatcttcctgagaatgaaggagaaggtgctgagagacaagcaggagcagcccagcagaaacagcagcctgctggagccccagaagagcggcaacaacgagaccttcacccccaacagagtggagaagtag

SEQ ID NO: 281281 - protein, 235 aa, Artificial Sequence [sequence omitted]

SEQ ID NO: 281282 - protein, 833 aa, Artificial Sequence
  derived and/or modified sequence
MTDTRRRVKVYTLNEDRQWDDRGTGHVSSGYVERLKGMSLLVRAESDGSLLLESKINPNTAYQKQQDTLIVWSEAENYDLALSFQEKAGCDEIWEKICQVQGKDPSVDITQDLVDESEEERFDDMSSPGLELPSCELSRLEEIAELVASSLPSPLRREKLALALENEGYIKKLLELFHVCEDLENIEGLHHLYEIIKGIFLLNRTALFEVMFSEECIMDVIGCLEYDPALSQPRKHREFLTKTAKFKEVIPISDPELKQKIHQTYRVQYIQDMVLPTPSVFEENMLSTLHSFIFFNKVEIVGMLQEDEKFLTDLFAQLTDEATDEEKRQELVNFLKEFCAFSQTLQPQNRDAFFKTLSNMGILPALEVILGMDDTQVRSAATDIFSYLVEYNPSMVREFVMQEAQQNDDVSKKLTEQKITSKDILLINLIIEHMICDTDPELGGAVQLMGLLRTLVDPENMLATANKTEKTEFLGFFYKHCMHVLTAPLLANTTEDKPSKDDFQTAQLLALVLELLTFCVEHHTYHIKNYIINKDILRRVLVLMASKHAFLALCALRFKRKIIGLKDEFYNRYIMKSFLFEPVVKAFLNNGSRYNLMNSAIIEMFEFIRVEDIKSLTAHVIENYWKALEDVDYVQTFKGLKLRFEQQRERQDNPKLDSMRSILRNHRYRRDARTLEDEEEMWFNTDEDDMEDGEAVVSPSDKTKNDDDIMDPISKFMERKKLKESEEKEVLLKTNLSGRQSPSFKLSLSSGTKTNLTSQSSTTNLPGSPGSPGSPGSPGSPGSVPKNTSQTAAITTKGGLVGLVDYPDDDEDDDEDEDKEDTLPLSKKAKFDS

SEQ ID NO: 281283 - DNA, 2502 bp, Artificial Sequence
  derived and/or modified sequence
atgaccgacaccagaagaagagtgaaggtgtacaccctgaacgaggacagacagtgggacgacagaggcaccggccacgtgagcagcggctacgtggagagactgaagggcatgagcctgctggtgagagccgagagcgacggcagcctgctgctggagagcaagatcaaccccaacaccgcctaccagaagcagcaggacaccctgatcgtgtggagcgaggccgagaactacgacctggccctgagcttccaggagaaggccggctgcgacgagatctgggagaagatctgccaggtgcagggcaaggaccccagcgtggacatcacccaggacctggtggacgagagcgaggaggagagattcgacgacatgagcagccccggcctggagctgcccagctgcgagctgagcagactggaggagatcgccgagctggtggccagcagcctgcccagccccctgagaagagagaagctggccctggccctggagaacgagggctacatcaagaagctgctggagctgttccacgtgtgcgaggacctggagaacatcgagggcctgcaccacctgtacgagatcatcaagggcatcttcctgctgaacagaaccgccctgttcgaggtgatgttcagcgaggagtgcatcatggacgtgatcggctgcctggagtacgaccccgccctgagccagcccagaaagcacagagagttcctgaccaagaccgccaagttcaaggaggtgatccccatcagcgaccccgagctgaagcagaagatccaccagacctacagagtgcagtacatccaggacatggtgctgcccacccccagcgtgttcgaggagaacatgctgagcaccctgcacagcttcatcttcttcaacaaggtggagatcgtgggcatgctgcaggaggacgagaagttcctgaccgacctgttcgcccagctgaccgacgaggccaccgacgaggagaagagacaggagctggtgaacttcctgaaggagttctgcgccttcagccagaccctgcagccccagaacagagacgccttcttcaagaccctgagcaacatgggcatcctgcccgccctggaggtgatcctgggcatggacgacacccaggtgagaagcgccgccaccgacatcttcagctacctggtggagtacaaccccagcatggtgagagagttcgtgatgcaggaggcccagcagaacgacgacgtgagcaagaagctgaccgagcagaagatcaccagcaaggacatcctgctgatcaacctgatcatcgagcacatgatctgcgacaccgaccccgagctgggcggcgccgtgcagctgatgggcctgctgagaaccctggtggaccccgagaacatgctggccaccgccaacaagaccgagaagaccgagttcctgggcttcttctacaagcactgcatgcacgtgctgaccgcccccctgctggccaacaccaccgaggacaagcccagcaaggacgacttccagaccgcccagctgctggccctggtgctggagctgctgaccttctgcgtggagcaccacacctaccacatcaagaactacatcatcaacaaggacatcctgagaagagtgctggtgctgatggccagcaagcacgccttcctggccctgtgcgccctgagattcaagagaaagatcatcggcctgaaggacgagttctacaacagatacatcatgaagagcttcctgttcgagcccgtggtgaaggccttcctgaacaacggcagcagatacaacctgatgaacagcgccatcatcgagatgttcgagttcatcagagtggaggacatcaagagcctgaccgcccacgtgatcgagaactactggaaggccctggaggacgtggactacgtgcagaccttcaagggcctgaagctgagattcgagcagcagagagagagacaggacaaccccaagctggacagcatgagaagcatcctgagaaaccacagatacagaagagacgccagaaccctggaggacgaggaggagatgtggttcaacaccgacgaggacgacatggaggacggcgaggccgtggtgagccccagcgacaagaccaagaacgacgacgacatcatggaccccatcagcaagttcatggagagaaagaagctgaaggagagcgaggagaaggaggtgctgctgaagaccaacctgagcggcagacagagccccagcttcaagctgagcctgagcagcggcaccaagaccaacctgaccagccagagcagcaccaccaacctgcccggcagccccggcagccccggcagccccggcagccccggcagccccggcagcgtgcccaagaacaccagccagaccgccgccatcaccaccaagggcggcctggtgggcctggtggactaccccgacgacgacgaggacgacgacgaggacgaggacaaggaggacaccctgcccctgagcaagaaggccaagttcgacagctag

SEQ ID NO: 281284 - DNA, 2502 bp, Artificial Sequence
  derived and/or modified sequence
atgacggatacacggcgacgcgtgaaagtatacacacttaacgaggataggcagtgggacgacagggggaccggccacgttagtagcgggtatgtggaacggttgaagggcatgtccctgctggtgcgggcagagtctgatggctcgttgctgttggagtccaagataaatcctaacactgcatatcagaagcagcaggatacactcatcgtctggagcgaagcagaaaattatgatttagcgctgtcgttccaggagaaggcagggtgtgatgagatctgggagaaaatctgccaagtgcaagggaaggacccaagcgtcgacattacacaggacctggtagacgaaagtgaggaagagagatttgacgacatgtcatcacctgggctggaattgccaagctgcgagctatctcggctcgaggagatcgccgagttagtcgcatcatcgctccctagccctcttcgccgggagaaactggcccttgccctggagaacgaaggctacattaaaaaactgctcgaactcttccatgtgtgcgaggatttagaaaatattgaggggctgcatcatctgtatgaaatcataaaaggaatatttctcctgaaccgcacggccctgtttgaagtgatgttctccgaagaatgtatcatggatgtcattgggtgtctggagtacgacccagctcttagccagccccgtaaacacagggaattcctgaccaagactgctaaatttaaggaggtgatacccattagcgatcctgaattgaaacagaagattcaccaaacctatcgggttcagtacatccaagatatggtactgccaacgccgagcgtttttgaggaaaacatgctttccactctccattcattcatttttttcaacaaggtagagattgtgggaatgctccaggaggacgagaagtttctgacagatctcttcgcacagctgaccgacgaggctacggacgaggaaaagcgccaggagttagttaatttcctcaaggaattttgtgccttcagccaaactttgcagcctcagaaccgagatgctttttttaaaaccctttccaacatgggcattctgccagcattggaagtgattctcgggatggacgacactcaggtgcggtcagcagcgaccgacatcttctcgtatctggttgaatacaacccatccatggtgcgagaattcgtgatgcaagaggcccagcagaatgacgatgtttcaaagaaactgacagagcagaaaattaccagcaaggatatcctcctcatcaaccttattatcgagcatatgatctgtgataccgatccggaactgggcggcgccgtgcaattgatgggtcttttgcggactctcgtcgaccctgagaacatgctcgcaacagctaataagactgaaaagacagagttcctcggatttttttacaagcactgcatgcacgtcctgactgcaccacttctggccaacaccactgaggataagcctagcaaggatgacttccagaccgcacagcttctcgcactggtcctcgaacttcttacattttgcgtggagcaccacacctatcatattaagaactacatcattaataaggacattcttcgccgtgtcttagtactcatggcgtcaaagcacgctttcctcgcgttatgcgcactgcggtttaaaaggaagataataggactcaaggacgagttctataatagatatatcatgaaatcctttctctttgaaccggttgtaaaagccttcttgaataacgggagccggtacaatcttatgaatagcgctatcattgagatgtttgagttcatcagggtggaggatatcaaatccttaacagctcatgtgattgaaaactattggaaggctttggaagatgttgactacgtgcagacatttaaagggctcaaactgcgttttgagcagcagcgtgagagacaggacaaccctaagctcgactccatgagatccatcctcaggaaccaccgatataggcgagatgctcggacactggaagacgaggaggagatgtggtttaatacagacgaggacgacatggaggatggcgaggctgttgtcagtccttcagacaagacaaagaacgacgacgacattatggatcccatctctaagtttatggagagaaaaaaacttaaggagagtgaagagaaagaggtgctgttgaagactaatcttagtggccgacagtcccccagcttcaagctcagcctctctagtggtaccaaaactaacctgactagccaatcttcaactaccaatttaccgggaagtccaggctcccccggctcccctggaagtccaggatcacctgggtccgtgcccaaaaatactagccagacggcagccataacaacaaagggggggttggttggcctcgtcgattatcccgacgatgatgaagacgacgatgaggatgaggacaaagaggacacattgccgctgtctaaaaaggctaaattcgacagctag

SEQ ID NO: 281285 - DNA, 2502 bp, Artificial Sequence
  derived and/or modified sequence
atgacagacacccggcggcgggtgaaggtgtacaccctgaatgaagatcggcagtgggatgaccggggcaccggccacgtgagcagcggctacgtggagcggctgaagggcatgagcctgctggtgcgggcagagagtgatggcagcctgctgctggagagcaagatcaaccccaacacagcctaccagaagcagcaggacaccctcatcgtgtggagcgaggccgagaactatgacctggccctgtccttccaggagaaggccggctgtgatgagatctgggagaagatctgccaggtgcagggcaaggaccccagcgtggacatcacccaggacctggtggatgaaagtgaggaggagagatttgatgacatgagcagccctggcctggagctgcccagctgtgagctgagccggctggaggagattgctgagctggtggccagcagcctgcccagccccctgcggcgggagaagctggccctggccctggagaatgaaggctacatcaagaagctgctggagctgttccacgtgtgtgaggacctggagaacatcgagggcctgcaccacctgtatgagatcatcaagggcatcttcctgctgaacagaacagccctgtttgaggtgatgttttctgaggagtgcatcatggatgtgattggctgcctggagtatgaccctgccctgagccagcccaggaagcaccgggagttcctgaccaagacagccaagttcaaggaggtgatccccatcagtgaccctgagctgaagcagaagatccaccagacctacagagtgcagtacatccaggacatggtgctgcccaccccatctgtgtttgaggagaacatgctgagcaccctgcacagcttcatcttcttcaacaaggtggagatcgtgggcatgctgcaggaggatgagaagttcctgacagacctgtttgcccagctgacagatgaggccacagatgaggagaagaggcaggagctggtgaacttcctgaaggagttctgtgccttcagccagaccctgcagccccagaacagagatgccttcttcaagaccctgagcaacatgggcatcctgcctgccctggaggtgatcctgggcatggatgacacccaggtgcgctctgctgccacagacatcttctcctacctggtggagtacaaccccagcatggtgcgggagtttgtgatgcaggaggcccagcagaatgatgatgtgtccaagaagctgacagagcagaagatcaccagcaaggacatcctgctgatcaacctgatcatcgagcacatgatctgtgacacagatcctgagctgggcggcgctgtgcagctgatgggcctgctgcggaccctggtggaccctgagaacatgctggccacagccaacaagacagagaagacagagttcctgggcttcttctacaagcactgcatgcacgtgctgacagcccccctgctggccaacaccacagaggacaagcccagcaaggatgacttccagacagcccagctgctggccctggtgctggagctgctgaccttctgtgtggagcaccacacctaccacatcaagaactacatcatcaacaaggacatcctgcggcgggtgctggtgctgatggccagcaagcacgccttcctggccctgtgtgccctgcgcttcaagaggaagatcatcggcctgaaggatgagttctacaaccgctacatcatgaagagcttcctgtttgagcctgtggtgaaggccttcctgaacaacggcagccgctacaacctgatgaacagcgccatcatcgagatgtttgagttcatccgggtggaggacatcaagagcctgacagcccacgtgattgagaactactggaaggccctggaggatgtggactatgtgcagaccttcaagggcctgaagctgcgctttgagcagcagcgggagcggcaggacaaccccaagctggacagcatgaggagcatcctgaggaaccaccgctacagaagagatgcccggaccctggaggatgaggaggagatgtggttcaacacagatgaagatgacatggaggatggagaggccgtggtgagccccagcgacaagaccaagaatgatgatgacatcatggaccccatcagcaagttcatggagaggaagaagctgaaggagagcgaggagaaggaggtgctgctgaagaccaacctgagcggccggcagagccccagcttcaagctgagcctgagcagcggcaccaagaccaacctgaccagccagagcagcaccaccaacctgcccggcagccctggcagccctggcagccctggcagccctggcagccctggctctgtgcccaagaacaccagccagacagctgccatcaccaccaagggcggcctggtgggcctggtggactacccagatgatgatgaagatgatgatgaagatgaggacaaggaggacaccctgcccctgagcaagaaggccaagtttgacagctag

SEQ ID NO: 281286 - DNA, 2502 bp, Artificial Sequence
  derived and/or modified sequence
atgaccgacacccggcggcgggtgaaggtgtacaccctgaacgaggaccgacagtgggacgacaggggcactggccatgtctcaagtggctatgtggagcggctgaagggcatgtcattactggtccgcgccgagtctgacggatctctgctgctggaaagcaaaattaaccccaataccgcctatcagaaacagcaagatactctaattgtgtggtcagaggcagaaaactacgaccttgcgctctctttccaggagaaggccggatgcgatgagatttgggagaagatttgtcaagtccaaggaaaggacccaagcgtcgacattactcaggacctggtggatgagtctgaagaagaacgttttgacgatatgtcctcacctggattagagcttccatcatgcgagctctcaaggcttgaggaaatcgccgagctcgttgcaagttctctgccctctccccttaggagggagaaactcgccctcgcattggaaaacgaggggtacataaaaaagcttctggagctgttccacgtctgcgaggacctagagaacattgaaggactacaccacctatacgagatcataaagggaatcttcctgttgaaccgaacggcccttttcgaggttatgttttctgaggagtgcataatggatgtcataggttgcctcgaatatgacccggcgctgtcacaaccacggaaacacagagaatttctcactaaaaccgctaaattcaaagaagttattcctatctccgatcctgaactgaagcagaaaattcatcaaacataccgtgtgcagtacattcaagacatggttttgccaacacccagcgtgtttgaggagaacatgttgtcgactctgcacagcttcattttcttcaacaaggtagaaatcgttggtatgttacaggaagatgaaaaatttttgaccgacctcttcgcgcagctgacagatgaggctaccgatgaggagaagcggcaagagctggtaaacttcctgaaagaattttgtgctttctcacagactctccaacctcagaaccgggatgccttcttcaagacactgagtaatatggggatactccccgccctcgaggtaattctggggatggacgacacccaggttagaagcgccgccaccgatattttcagctacctggttgagtacaacccttctatggttcgagagttcgtgatgcaggaggcccagcagaatgacgatgtaagtaaaaaacttaccgagcaaaaaattacaagcaaagacattctcctgataaatctgatcatcgagcatatgatctgtgacacagatcctgagctgggaggtgcagtccagttgatgggccttctgaggaccttggttgatcctgagaacatgctggctaccgccaacaagacagaaaaaaccgagttcctgggctttttctacaaacactgcatgcatgtgctcactgcaccactgctggccaataccactgaagacaagccttctaaggatgattttcagaccgcgcagcttctagccctggttctggaacttctgactttctgcgtggagcatcacacataccacatcaagaattacatcatcaacaaggacattctgcgccgcgtgctggtgttaatggcctccaagcacgcgttcctggccttgtgtgctctgagatttaaaagaaaaatcattgggttgaaagacgaattctataaccgctacataatgaaaagctttctgtttgagccagtggtcaaagctttcctgaataacgggtctcgctacaacctcatgaattccgctatcattgaaatgtttgaattcatccgtgtggaagacatcaagtcattgaccgctcatgttatcgagaactattggaaagccctcgaagacgtggactacgtacagaccttcaaggggctcaaattgagatttgaacagcagagagagcgccaggacaatcctaagttggatagcatgaggagtatccttaggaaccaccgttatcgacgggatgccagaaccctcgaagacgaagaagaaatgtggttcaacacggacgaagacgacatggaagacggcgaggccgtggttagtccctcggacaagacaaagaacgacgatgatattatggatcccatcagtaaattcatggaacgcaaaaagttgaaggagagtgaggagaaggaggtcttactcaagacaaacctgagcggtcggcagtcccctagcttcaagctgagcttgtcctctggaaccaagacaaacctaacatcccagtcctcgactacaaacttacctggttctcccggctcccctggaagcccaggaagccctggcagtccggggtcagtgcctaagaatacgagccaaacagcggcaattaccaccaaaggaggtctggtaggcttagtggactatcctgatgatgacgaagacgacgatgaggatgaggacaaggaagatactctgccactgtcaaaaaaggcgaaatttgatagctag

SEQ ID NO: 281287 - DNA, 2502 bp, Artificial Sequence
  derived and/or modified sequence
atgacagacactcgcaggagagtgaaggtctacactctgaatgaagacagacagtgggacgatcgcggaaccgggcacgtgagcagcggctatgtcgagagactaaaggggatgtccctcctggttcgggcagagtcagacggctccctactcctggagagtaaaattaaccccaatactgcctaccagaaacaacaagatacactaattgtgtggtctgaggcggagaattacgatctggccctgtcattccaagaaaaggccggttgcgacgaaatctgggaaaaaatttgccaggtccaaggcaaggacccatctgtggatattacacaggacttagtggatgagtccgaggaagagcgatttgatgacatgtcctctccagggctggagttgccgagctgcgaattatctcggctggaagaaatagccgagctggtggcttccagcctgccaagtccccttagacgagagaagctggcactggctttggaaaacgaggggtacatcaagaagttgctggagctttttcacgtgtgcgaggatcttgaaaatattgagggcctgcatcatctctacgaaattattaaaggcatcttcctgctgaatcggactgccctgttcgaggtgatgttttccgaggaatgcatcatggacgtcatcggatgcttagaatatgatccggctttatcacagcctcggaaacatagggaatttctgaccaagactgcgaaatttaaggaggtgattcctatttctgaccctgagcttaagcagaaaatccaccaaacctacagagttcagtacatccaggatatggtgctacccacaccgagtgtattcgaggaaaacatgctgtcgacgctgcattcatttatcttcttcaacaaagttgaaattgtgggcatgctccaagaggatgagaagttcctgaccgacctctttgcccagctgactgatgaagccactgatgaagagaaacggcaagagctcgtaaactttctgaaggaattttgtgcattttcccaaacactgcagccacagaacagggacgcatttttcaaaacactcagcaatatgggcatcctgcctgctcttgaggttatcctgggcatggacgacacacaggtccgcagtgcagccacggacattttctcttacctcgtcgaatataaccctagtatggttagggaattcgttatgcaggaggctcaacaaaacgacgacgtgtcaaagaaactcaccgaacagaagattacgtccaaagacatccttctgattaacctcatcatcgagcatatgatatgcgacacggatccagagctgggcggagcggttcagcttatgggcctgctccgcacgctggtggatccagaaaatatgttggcaaccgcaaataagacagaaaagacagaattcctgggctttttttacaaacattgcatgcacgtactcacagccccattgctcgcaaataccaccgaggataaaccctccaaagatgattttcagacggcgcaactgctagctctggtactcgaacttctgactttctgcgtcgagcatcacacctatcacatcaagaactatatcatcaacaaagatattctgcgcagagttcttgtgctgatggcttctaaacatgctttcctggcactatgtgcgctgaggttcaaacggaagattatcggtcttaaagacgagttctacaacaggtatatcatgaagtccttcctgttcgagcctgtggtgaaggcatttctgaacaatggcagcaggtacaatctgatgaattctgccatcattgaaatgttcgagtttatacgcgtcgaggatattaaaagcctgacagctcacgtgatagagaactattggaaagccctcgaggatgtggattacgttcagacgttcaaaggactcaagctacgcttcgagcagcagagggagaggcaggataatcctaaactcgacagcatgagatcaatcctcagaaatcacagatataggagggacgcgaggacacttgaggacgaagaggagatgtggtttaatacagatgaggacgatatggaggatggggaagccgttgtgtcaccatccgataagactaagaatgacgatgatatcatggatccgatcagtaagtttatggagcgaaagaaattgaaggaaagcgaagaaaaggaggtgctgctgaagactaacctctccggacgacaatccccaagctttaagctgtctctaagttccgggaccaagacaaatctcactagccagtcttcaacaacgaatctccccggaagccctggcagccccggttcaccaggcagtccagggtctcccggaagcgtcccgaaaaacacaagccaaaccgccgctatcactactaagggcggattggtgggcttggtcgattaccccgatgacgatgaggacgatgatgaagatgaagataaagaggatactttacccctgagtaagaaagctaagttcgattcatag

SEQ ID NO: 281288 - DNA, 3369 bp, Artificial Sequence
  derived and/or modified sequence
tgaggccggggagccctccgctcgcgggcgccctcacgcctcgcccctcgcctctccagggcccctttcctgggcgtctactggcggggcccccgccccggttcccgggcggcacgatgaccgacacccggcggcgggtgaaggtgtacacgctcaacgaggaccggcagtgggacgaccggggcaccgggcatgtgtcgtctggctacgtggagcggctgaagggcatgtccctgcttgtcagggctgagagcgacggttctctacttttagagtcgaaaataaatcctaacactgcataccagaaacaacaggacactctgattgtgtggtctgaagcagaaaattatgacttggcccttagctttcaagaaaaagctggatgtgatgaaatttgggagaaaatatgtcaggttcaaggaaaggacccttccgtggacatcactcaggaccttgtggatgaatctgaagaggagcgttttgatgatatgtcatcgccaggcttagaattgccatcttgtgaattaagtcgccttgaagaaattgcagaacttgtggcatcatctttaccttcacctcttcgtcgtgaaaaacttgcactggcactagaaaatgagggttatattaaaaagctcctggagctttttcatgtgtgtgaagatttggaaaatattgaaggactgcaccacttgtatgaaattatcaaaggcatctttctcttgaatcgaactgctctttttgaagttatgttctctgaagaatgtataatggacgtcattggatgtttagaatatgatcctgctttatcacaaccacgaaaacacagggaatttctaacaaaaacagccaagtttaaagaagtgattcccatatcagatcctgagctgaaacaaaaaattcatcagacatacagagttcagtatatacaagatatggttctaccaactccttcggtctttgaagaaaacatgttatcaacacttcactcttttatctttttcaataaggtagagattgttggcatgttgcaggaagatgaaaaatttctgacagatttgtttgcacaactaacagatgaagcaacagatgaggaaaaaagacaggaattggttaactttttaaaagaattttgtgcgttttcccaaacgctacagcctcaaaacagagatgcttttttcaagactttgtcaaacatgggcatattaccagctttagaagtcatccttggcatggatgatacacaggtgcgaagtgctgctactgatatattctcatacttggttgaatataatccatccatggtacgagagtttgtcatgcaggaggcacaacagaatgatgatgtaagtaagaagttaacagagcaaaaaataaccagcaaggatattttgctcatcaacctcattatagaacatatgatttgtgatacagatcctgaacttggaggagcagtccagcttatgggcctgcttcgaactttagttgacccagagaacatgctagccactgccaataaaacagaaaagactgaatttctgggtttcttctacaagcactgtatgcatgttctcactgctcctttactagcaaatacaacagaagacaaacctagtaaagatgattttcagactgcccaactattggcacttgtattggaattgttaacattttgtgtggagcaccatacctaccacataaagaactacattattaataaggatatcctccggagagtgctagttcttatggcctcgaagcatgctttcttggcattatgtgcccttcgttttaaaagaaagattattggattaaaagatgagttttacaaccgctacataatgaaaagttttttgtttgaaccagtagtgaaagcatttctcaacaatggatcccgctacaatctgatgaactctgccataatagagatgtttgaatttattagagtggaagatataaaatcattaactgctcatgtaattgaaaattactggaaagcactggaagatgtagattatgtacagacatttaaaggattaaaactgagatttgaacaacaaagagaaaggcaagataatcccaaacttgacagtatgcgttccattttgaggaatcacagatatcgaagagatgccagaacactagaagatgaagaagagatgtggtttaacacagatgaagatgacatggaagatggagaagctgtagtgtctccatctgacaaaactaaaaatgatgatgatattatggatccaataagtaaattcatggaaaggaagaaattaaaagaaagtgaggaaaaggaagtgcttctgaaaacaaacctttctggacggcagagcccaagtttcaagctttccctgtccagtggaacgaagactaacctcaccagccagtcatctacaacaaatctgcctggttctccgggatcacctggatccccaggatctccaggctctcctggatccgtacctaaaaatacatctcagacggcagctattactacaaagggaggcctcgtgggtctggtagattatcctgatgatgatgaagatgatgatgaggatgaagataaggaagatacgttaccattgtcaaagaaagcaaaatttgattcataataatggcaacggcctaggatcagtacctgttgaaaaaaactggttctccacccctcccccatacaaaatccacaacaaagcgcagtggtctcttgtgaatgactgacacagatcagcctcttacacttgacttctgctcatcaagtgccaattcaatggagcaggaggaggggatatcatatatttaggggaaagacttaagcctttgagctctccagcttggaccacacattgcccttttctcagggaaggaaatggaaacaaaaagccaacagggcaggggttttgtaagtggaactctggattgactggtcagttgctacaatcagaatatgctttcttggaccatgtttgagactcagaagaatgggcctttctgccataattcttcactagtcaagaatgccagcagtttctttgtataaagagacctgcctttaaaatcatacattctgaacattttagtcaagctacaacaggtttggaaaacctctgtgggggaggggcgagtataaagttttcctcttttttaactgttccctttgcccttcaaactgcagatatttttttttttaagtggggacttctccctacttgattaaagattgagtggaattctagatgtggtcatttgtgtcataatttttttgttttattttgtttttgattttttttttcctcccctgagtgtatgcttagttgttgagtatatatatttgggaccattaaaactttttttgatgtaatataa

SEQ ID NO: 281289 - protein, 376 aa, Artificial Sequence
  derived and/or modified sequence
MVWKVAVFLSVALGIGAVPIDDPEDGGKHWVVIVAGSNGWYNYRHQADACHAYQIIHRNGIPDEQIVVMMYDDIAYSEDNPTPGIVINRPNGTDVYQGVPKDYTGEDVTPQNFLAVLRGDAEAVKGIGSGKVLKSGPQDHVFIYFTDHGSTGILVFPNEDLHVKDLNETIHYMYKHKMYRKMVFYIEACESGSMMNHLPDNINVYATTAANPRESSYACYYDEKRSTYLGDWYSVNWMEDSDVEDLTKETLHKQYHLVKSHTNTSHVMQYGNKTISTMKVMQFQGMKRKASSPVPLPPVTHLDLTPSPDVPLTIMKRKLMNTNDLEESRQLTEEIQRHLDYEYALRHLYVLVNLCEKPYPLHRIKLSMDHVCLGHY

SEQ ID NO: 281290 - DNA, 1131 bp, Artificial Sequence
  derived and/or modified sequence
atggtgtggaaggtggccgtgtttctgtcggtggctctgggcatcggagcagtccctattgacgatccagaggatggcggaaagcattgggtagttatagtggccggcagtaatgggtggtacaattatcggcaccaggcggacgcctgccacgcctaccaaatcatccataggaatgggatcccagacgaacaaattgtggtcatgatgtacgatgatattgcctactcagaagataatcctactcctggcatcgtcatcaatcgcccgaacggcactgacgtctatcagggagtcccgaaggattacactggagaggacgtgactccgcagaatttcctcgctgtgctgcggggcgacgcagaagccgtgaaagggatcggatctggaaaagtcttgaaaagcgggccacaagatcacgtgtttatctacttcacagaccatgggtcaaccggaattctggtgtttcctaatgaagatcttcacgtcaaggatctcaatgagactatccattacatgtacaagcataagatgtacaggaaaatggtattttatatcgaagcgtgtgagtctgggtccatgatgaatcacctgccggacaatattaatgtttacgccacaacagccgctaacccacgcgaaagctcctatgcctgctactatgacgagaagagatcaacctatctcggagactggtactctgtcaactggatggaggactcagatgttgaagacctgactaaagagacattacataagcagtatcacctcgtaaaatcgcacacaaacacaagccacgtgatgcagtatggcaataaaaccattagtaccatgaaagtgatgcagttccagggcatgaaacggaaggcctcatcaccagttcctctccccccagtgactcatctggatttgacccctagccctgacgtgccattgactataatgaagcggaaactcatgaacactaacgacctagaggagagtaggcaattaactgaagaaatccagagacacctggattacgagtacgccctgagacatctctacgtgctggtgaacctgtgtgaaaagccctacccactccacaggatcaaactgagtatggaccacgtttgtctcggacactattag

SEQ ID NO: 281291 - DNA, 1131 bp, Artificial Sequence
  derived and/or modified sequence
atggtgtggaaggtggccgtgttcctgtctgtggccctgggcattggagctgtgcccattgatgatcctgaagatggcggcaagcactgggtggtgattgtggccggcagcaatggctggtacaactaccgccaccaggctgatgcctgccacgcctaccagatcatccacagaaatggcatcccagatgagcagatcgtggtgatgatgtatgatgacatcgcctacagcgaggacaaccccaccccaggcatcgtcatcaaccggcccaatggaacagatgtgtaccagggcgtgcccaaggactacaccggggaggatgtgaccccccagaacttcctggccgtgctgcggggagatgctgaggccgtgaagggcatcggcagcggcaaggtgctgaagagcggcccccaggaccacgtgttcatctacttcacagaccacggcagcacaggcatcctggtgttccccaatgaagacctgcacgtgaaggacctgaatgagaccatccactacatgtacaagcacaagatgtacaggaagatggtgttctacatcgaggcctgtgagagcggctccatgatgaaccacctgcctgacaacatcaacgtgtatgccaccacagctgccaacccccgggagagcagctatgcctgctactatgatgagaagaggagcacctacctgggggactggtacagcgtgaactggatggaggacagtgatgtggaggacctgaccaaggagaccctgcacaagcagtaccacctggtgaagagccacaccaacaccagccacgtgatgcagtatggcaacaagaccatcagcaccatgaaggtgatgcagttccagggcatgaagaggaaggccagcagccctgtgcccctgccccctgtgacccacctggacctgacccccagcccagatgtgcccctgaccatcatgaagaggaagctgatgaacaccaatgacctggaggagagccggcagctgacagaggagatccagaggcacctggactatgaatatgccctgcggcacctgtatgtgctggtgaacctgtgtgagaagccctaccccctgcaccgcatcaagctgtccatggaccacgtgtgcctgggccactactag

SEQ ID NO: 281292 - DNA, 1760 bp, Artificial Sequence
  derived and/or modified sequence
gtcgtgggtgtttggtgtgaggctgcgagccgccgcgagttctcacggtcccgccggcgccaccaccgcggtcactcaccgccgccgccgccaccactgccaccacgtttcccttctcaggtgtctgcaattgaactccaaggtgcagaatggtttggaaagtagctgtattcctcagtgtggccctgggcattggtgccgttcctatagatgatcctgaagatggaggcaagcactgggtggtgatcgtggcaggttcaaatggctggtataattataggcaccaggcagacgcgtgccatgcctaccagatcattcaccgcaatgggattcctgacgaacagatcgttgtgatgatgtacgatgacattgcttactctgaagacaatcccactccaggaattgtgatcaacaggcccaatggcacagatgtctatcagggagtcccgaaggactacactggagaggatgttaccccacaaaatttccttgctgtgttgagaggcgatgcagaagcagtgaagggcataggatccggcaaagtcctgaagagtggcccccaggatcacgtgttcatttacttcactgaccatggatctactggaatactggtttttcccaatgaagatcttcatgtaaaggacctgaatgagaccatccattacatgtacaaacacaaaatgtaccgaaagatggtgttctacattgaagcctgtgagtctgggtccatgatgaaccacctgccggataacatcaatgtttatgcaactactgctgccaaccccagagagtcgtcctacgcctgttactatgatgagaagaggtccacgtacctgggggactggtacagcgtcaactggatggaagattcggacgtggaagatctgactaaagagaccctgcacaagcagtaccacctggtaaaatcgcacaccaacaccagccacgtcatgcagtatggaaacaaaacaatctccaccatgaaagtgatgcagtttcagggtatgaaacgcaaagccagttctcccgtccccctacctccagtcacacaccttgacctcacccccagccctgatgtgcctctcaccatcatgaaaaggaaactgatgaacaccaatgatctggaggagtccaggcagctcacggaggagatccagcggcatctggattacgagtatgcgttgagacatttgtacgtgctggtcaacctttgtgagaagccgtatccgcttcacaggataaaattgtccatggaccacgtgtgccttggtcactactgaagagctgcctcctggaagcttttccaagtgtgagcgccccaccgactgtgtgctgatcagagactggagaggtggagtgagaagtctccgctgctcgggccctcctggggagcccccgctccagggctcgctccaggaccttcttcacaagatgacttgctcgctgttacctgcttccccagtcttttctgaaaaactacaaattagggtgggaaaagctctgtattgagaagggtcatatttgctttctaggaggtttgttgttttgcctgttagttttgaggagcaggaagctcatgggggcttctgtagcccctctcaaaaggagtctttattctgagaatttgaagctgaaacctctttaaatcttcagaatgattttattgaagagggccgcaagccccaaatggaaaactgtttttagaaaatatgatgatttttgattgcttttgtatttaattctgcaggtgttcaagtctt

SEQ ID NO: 281293 - DNA, 1131 bp, Artificial Sequence
  derived and/or modified sequence
atggtgtggaaggtggccgtgttcctgagcgtggccctgggcatcggcgctgtacccattgatgatcccgaggacgggggaaaacattgggtggtcatcgttgcaggtagcaatggatggtataactacaggcaccaggctgacgcatgtcatgcttaccagatcatccacaggaatggaattcccgacgagcagattgtagtgatgatgtatgacgatattgcttactctgaagataaccccactcctggaatcgtcatcaatcggcctaacggcaccgatgtatatcagggagttcctaaagactataccggcgaagatgtgacaccccagaattttctggcggtcctgcgaggcgatgcagaagctgttaaggggattggaagtggaaaagtcctgaaatcggggccgcaggaccacgtgtttatttacttcaccgaccacggctccaccgggattttagtgttccccaacgaggacctgcatgtcaaggatcttaatgaaacaattcactacatgtataagcataaaatgtatagaaagatggtattctacattgaagcgtgcgaatcagggtccatgatgaatcatctccctgacaacattaatgtttacgctaccacagccgctaatccaagggaatcctcctacgcttgttactacgacgaaaagcggtctacctacctgggagattggtacagcgtgaactggatggaagacagcgatgtcgaggatttgaccaaagagactctgcacaagcaatatcacttagtcaaaagccataccaacacaagccacgtgatgcagtatggcaataaaactattagtaccatgaaagtgatgcagttccaaggcatgaagaggaaagccagctctccagttccgctcccaccagtcacacatttagacctgacccctagcccagacgttcccctgaccattatgaagaggaaattaatgaacaccaacgatctggaggagtcaaggcagctgacagaggaaatacagaggcaccttgactatgagtatgctttgcgccacctctacgttctggtcaatctctgcgagaagccttaccctctgcaccgcatcaagctgagtatggaccatgtctgtctcggccactactag

SEQ ID NO: 281294 - DNA, 1131 bp, Artificial Sequence
  derived and/or modified sequence
atggtctggaaggtagctgtgttcctgtcagtggcgctaggtattggcgcagtcccaatcgacgatcctgaggatgggggaaagcattgggtggttatcgtcgcaggaagcaatggctggtacaactaccgtcaccaagcagatgcctgccatgcttaccagattatccataggaacgggataccagatgagcagattgtggtaatgatgtatgacgatatcgcttactccgaggataacccaacgccaggcatagtgattaaccgccctaatggaaccgacgtttaccagggcgtccctaaagattacaccggggaagatgtgacaccccagaattttctggcagttctacggggagacgcagaagcggtcaaaggcatcggcagtggcaaggtgcttaaatcaggaccacaggatcatgtgtttatttactttaccgatcatggtagcacaggtattctggtctttcctaacgaggacctgcacgtgaaagaccttaacgagaccatccactacatgtacaaacataaaatgtatagaaaaatggtgttctatattgaagcctgcgaaagcggctcaatgatgaatcacctacccgataacatcaacgtgtatgccaccactgccgctaacccacgggagagtagctacgcgtgctattacgatgagaaacgtagtacatacctgggcgactggtattcggttaattggatggaagactcagatgtagaggaccttactaaggagactctgcacaaacagtatcacctcgtcaagtcccataccaacacttcccacgtgatgcagtacggcaacaagacaatctccacaatgaaggtcatgcagtttcaaggaatgaaaagaaaggcttccagccctgtgcctttgcctcctgttacacaccttgatcttacaccttcccctgatgttcccctgactattatgaaacgcaaactgatgaacactaacgatctggaagagagcaggcagttaacagaggagattcagagacatttggattacgagtacgctttacggcatttatatgtactggtaaacctctgcgagaaaccctacccgctgcacaggattaaactcagcatggatcatgtctgtctcgggcactactag

SEQ ID NO: 281295 - DNA, 1131 bp, Artificial Sequence
  derived and/or modified sequence
atggtgtggaaggtggccgtgttcctgagcgtggccctgggcatcggcgccgtgcccatcgacgaccccgaggacggcggcaagcactgggtggtgatcgtggccggcagcaacggctggtacaactacagacaccaggccgacgcctgccacgcctaccagatcatccacagaaacggcatccccgacgagcagatcgtggtgatgatgtacgacgacatcgcctacagcgaggacaaccccacccccggcatcgtgatcaacagacccaacggcaccgacgtgtaccagggcgtgcccaaggactacaccggcgaggacgtgaccccccagaacttcctggccgtgctgagaggcgacgccgaggccgtgaagggcatcggcagcggcaaggtgctgaagagcggcccccaggaccacgtgttcatctacttcaccgaccacggcagcaccggcatcctggtgttccccaacgaggacctgcacgtgaaggacctgaacgagaccatccactacatgtacaagcacaagatgtacagaaagatggtgttctacatcgaggcctgcgagagcggcagcatgatgaaccacctgcccgacaacatcaacgtgtacgccaccaccgccgccaaccccagagagagcagctacgcctgctactacgacgagaagagaagcacctacctgggcgactggtacagcgtgaactggatggaggacagcgacgtggaggacctgaccaaggagaccctgcacaagcagtaccacctggtgaagagccacaccaacaccagccacgtgatgcagtacggcaacaagaccatcagcaccatgaaggtgatgcagttccagggcatgaagagaaaggccagcagccccgtgcccctgccccccgtgacccacctggacctgacccccagccccgacgtgcccctgaccatcatgaagagaaagctgatgaacaccaacgacctggaggagagcagacagctgaccgaggagatccagagacacctggactacgagtacgccctgagacacctgtacgtgctggtgaacctgtgcgagaagccctaccccctgcacagaatcaagctgagcatggaccacgtgtgcctgggccactactag

SEQ ID NO: 281296 - protein, 372 aa, Artificial Sequence
  derived and/or modified sequence
MVWKVAVFLSVALGIGAVPIDDPEDGGKHWVVIVAGSNGWYNYRHQADACHAYQIIHRNGIPDEQIVVMMYDDIAYSEDNPTPGIVINRPNGTDVYQGVPKDYTGEDVTPQNFLAVLRGDAEAVKGIGSGKVLKSGPQDHVFIYFTDHGSTGILVFPNEDLHVKDLNETIHYMYKHKMYRKMVFYIEACESGSMMNHLPDNINVYATTAANPRESSYACYYDEKRSTYLGDWYSVNWMEDSDVEDLTKETLHKQYHLVKSHTNTSHVMQYGNKTISTMKVMQFQGMKRKASSPVPLPPVTHLDLTPSPDVPLTIMKRKLMNTNDLEESRQLTEEIQRHLDDKIVHGPRVPWSLLKSCLLEAFPSVSAPPTVC

SEQ ID NO: 281297 - protein, 19 aa, Artificial Sequence
  derived and/or modified sequence
MVWKVAVFLSVALGIGAVP

SEQ ID NO: 281298 - DNA, 1119 bp, Artificial Sequence
  derived and/or modified sequence
atggtgtggaaagtggcagtctttctgtctgtagcactagggatcggtgccgtgccaatcgacgatcccgaggacggaggcaagcactgggtggtcatcgtggctgggtccaatgggtggtacaattacaggcatcaggccgacgcttgccatgcctaccagattattcacagaaatggcatccccgatgagcagattgttgtgatgatgtatgatgatattgcctacagcgaggataacccaacgccagggattgtcattaatagaccaaatggaacagacgtgtaccagggggtgcctaaggattacacaggcgaggacgtgactcctcagaactttctggccgtgctgagaggcgacgccgaagcagtgaaagggattggcagtggtaaggtgctcaaatctggccctcaggaccacgtgttcatatattttaccgaccacggatccaccggtattcttgttttccctaatgaagacctgcacgtcaaagacctgaatgaaactatacattatatgtacaaacacaaaatgtatagaaagatggtattctacattgaagcctgcgagagcggaagtatgatgaaccatcttcctgacaatatcaatgtctacgccaccacggccgccaatccacgcgagtcctcctacgcctgttactatgacgagaaacggagcacgtacctgggagactggtactctgttaattggatggaggattccgatgtggaggatctcacaaaagagaccctgcacaagcaatatcatctggtcaaatcccacactaatacaagccacgttatgcagtatggcaacaagacgatttcaacaatgaaggtgatgcagttccagggtatgaaaagaaaagcttccagccccgtcccactgcctcctgtcacacaccttgatcttaccccctccccagatgttccactcacaatcatgaagcgcaaactaatgaataccaatgatttggaagagtcccggcagctgaccgaggaaattcagaggcatctggatgacaagatcgtccacggaccgcgggtcccgtggtctctcctgaagtcatgcctgctggaggccttcccctcagtctccgcccctccaaccgtatgctag

SEQ ID NO: 281299 - DNA, 174 bp, Artificial Sequence
  derived and/or modified sequence
atggtgtggaaggtcgccgtgtttctgtcagttgctctgggaattggggctgtgccaatcgacgaccctgaagacggcgggaagcactgggtggttatagtggccggctctaacggttggtataactacagacaccaagccgacgcatgtcacgcctatcagataatacattag

SEQ ID NO: 281300 - DNA, 177 bp, Artificial Sequence
  derived and/or modified sequence
atggtttggaaggtcgcggtcttcctgtccgtggccctcgggatcggcgccgtcccgatcgatgaccccgaggatggtggcaaacactgggtcgtgattgttgcgggcagcaacggatggtataactatcggcatcaggcagacgcatgtcacgcttaccagataattcacaggtag

SEQ ID NO: 281301 - DNA, 237 bp, Artificial Sequence
  derived and/or modified sequence
atggtgtggaaggtggctgtcttcctaagtgtcgccctgggaataggcgcagtgccaatcgatgatcccgaggacgggggaaagcactgggttgtcatagtggctgggagcaatggatggtataattaccgacaccaagcagacgcttgccatgcgtaccagatcatacacaggaacggcattcctgatgaacagatagttgtgatgatgtacgatgatattgcttattcggaatag

SEQ ID NO: 281302 - DNA, 237 bp, Artificial Sequence
  derived and/or modified sequence
atggtgtggaaggtggcagttttcctctctgtcgcgcttggtatcggagccgtaccaattgacgatcccgaggatggcggtaaacattgggtggttatagtcgctggcagcaacggttggtacaactatcgtcatcaggccgacgcgtgccacgcataccagataatccaccgcaacggtatccctgatgagcaaattgtggtgatgatgtacgacgatattgcttattctgaatag

SEQ ID NO: 281303 - DNA, 1119 bp, Artificial Sequence
  derived and/or modified sequence
atggtgtggaaggtggccgtgttcctgtctgtggccctgggcattggagctgtgcccattgatgatcctgaagatggcggcaagcactgggtggtgattgtggccggcagcaatggctggtacaactaccgccaccaggctgatgcctgccacgcctaccagatcatccacagaaatggcatcccagatgagcagatcgtggtgatgatgtatgatgacatcgcctacagcgaggacaaccccaccccaggcatcgtcatcaaccggcccaatggaacagatgtgtaccagggcgtgcccaaggactacaccggggaggatgtgaccccccagaacttcctggccgtgctgcggggagatgctgaggccgtgaagggcatcggcagcggcaaggtgctgaagagcggcccccaggaccacgtgttcatctacttcacagaccacggcagcacaggcatcctggtgttccccaatgaagacctgcacgtgaaggacctgaatgagaccatccactacatgtacaagcacaagatgtacaggaagatggtgttctacatcgaggcctgtgagagcggctccatgatgaaccacctgcctgacaacatcaacgtgtatgccaccacagctgccaacccccgggagagcagctatgcctgctactatgatgagaagaggagcacctacctgggggactggtacagcgtgaactggatggaggacagtgatgtggaggacctgaccaaggagaccctgcacaagcagtaccacctggtgaagagccacaccaacaccagccacgtgatgcagtatggcaacaagaccatcagcaccatgaaggtgatgcagttccagggcatgaagaggaaggccagcagccctgtgcccctgccccctgtgacccacctggacctgacccccagcccagatgtgcccctgaccatcatgaagaggaagctgatgaacaccaatgacctggaggagagccggcagctgacagaggagatccagaggcacctggatgacaagatcgtgcacggcccccgggtgccctggagcctgctgaagagctgcctgctggaggccttccccagcgtgtctgccccacccaccgtgtgctag

SEQ ID NO: 281304 - DNA, 174 bp, Artificial Sequence
  derived and/or modified sequence
atggtgtggaaggtggccgtgttcctgtctgtggccctgggcattggagctgtgcccattgatgatcctgaagatggcggcaagcactgggtggtgattgtggccggcagcaatggctggtacaactaccgccaccaggctgatgcctgccacgcctaccagatcatccactag

SEQ ID NO: 281305 - DNA, 177 bp, Artificial Sequence
  derived and/or modified sequence
atggtgtggaaggtggccgtgttcctgtctgtggccctgggcattggagctgtgcccattgatgatcctgaagatggcggcaagcactgggtggtgattgtggccggcagcaatggctggtacaactaccgccaccaggctgatgcctgccacgcctaccagatcatccacaggtag

SEQ ID NO: 281306 - DNA, 237 bp, Artificial Sequence
  derived and/or modified sequence
atggtgtggaaggtggccgtgttcctgtctgtggccctgggcattggagctgtgcccattgatgatcctgaagatggcggcaagcactgggtggtgattgtggccggcagcaatggctggtacaactaccgccaccaggctgatgcctgccacgcctaccagatcatccacagaaatggcatcccagatgagcagatcgtggtgatgatgtatgatgacatcgcctacagcgagtag

SEQ ID NO: 281307 - DNA, 1689 bp, Artificial Sequence
  derived and/or modified sequence
gtgggtgtttggtgtgaggctgcgagccgccgcgagttctcacggtcccgccggcgccaccaccgcggtcactcaccgccgccgccgccaccactgccaccacgtttcccttctcaggtgtctgcaattgaactccaaggtgcagaatggtttggaaagtagctgtattcctcagtgtggccctgggcattggtgccgttcctatagatgatcctgaagatggaggcaagcactgggtggtgatcgtggcaggttcaaatggctggtataattataggcaccaggcagacgcgtgccatgcctaccagatcattcaccgcaatgggattcctgacgaacagatcgttgtgatgatgtacgatgacattgcttactctgaagacaatcccactccaggaattgtgatcaacaggcccaatggcacagatgtctatcagggagtcccgaaggactacactggagaggatgttaccccacaaaatttccttgctgtgttgagaggcgatgcagaagcagtgaagggcataggatccggcaaagtcctgaagagtggcccccaggatcacgtgttcatttacttcactgaccatggatctactggaatactggtttttcccaatgaagatcttcatgtaaaggacctgaatgagaccatccattacatgtacaaacacaaaatgtaccgaaagatggtgttctacattgaagcctgtgagtctgggtccatgatgaaccacctgccggataacatcaatgtttatgcaactactgctgccaaccccagagagtcgtcctacgcctgttactatgatgagaagaggtccacgtacctgggggactggtacagcgtcaactggatggaagattcggacgtggaagatctgactaaagagaccctgcacaagcagtaccacctggtaaaatcgcacaccaacaccagccacgtcatgcagtatggaaacaaaacaatctccaccatgaaagtgatgcagtttcagggtatgaaacgcaaagccagttctcccgtccccctacctccagtcacacaccttgacctcacccccagccctgatgtgcctctcaccatcatgaaaaggaaactgatgaacaccaatgatctggaggagtccaggcagctcacggaggagatccagcggcatctggatgataaaattgtccatggaccacgtgtgccttggtcactactgaagagctgcctcctggaagcttttccaagtgtgagcgccccaccgactgtgtgctgatcagagactggagaggtggagtgagaagtctccgctgctcgggccctcctggggagcccccgctccagggctcgctccaggaccttcttcacaagatgacttgctcgctgttacctgcttccccagtcttttctgaaaaactacaaattagggtgggaaaagctctgtattgagaagggtcatatttgctttctaggaggtttgttgttttgcctgttagttttgaggagcaggaagctcatgggggcttctgtagcccctctcaaaaggagtctttattctgagaatttgaagctgaaacctctttaaatcttcagaatgattttattgaagagggccgcaagccccaaatggaaaactgtttttagaaaatatgatgatttttgattgcttttgtatttaattctgcaggtgttcaagtctt

SEQ ID NO: 281308 - DNA, 495 bp, Artificial Sequence
  derived and/or modified sequence
aatcacagcagtgccgacgtcgtgggtgtttggtgtgaggctgcgagccgccgcgagttctcacggtcccgccggcgccaccaccgcggtcactcaccgccgccgccgccaccactgccaccacggtcgcctgccacaggtggagtctcactctgttgcccaggctggagtgcagtggcacaatctcagctcactgcaaccgctgcttcccaggttcaagccattctcctgcctcagcctcccgagtagctgggattacaggtgcccaccaccacgcacaggtagcatgcccaggtgtctgcaattgaactccaaggtgcagaatggtttggaaagtagctgtattcctcagtgtggccctgggcattggtgccgttcctatagatgatcctgaagatggaggcaagcactgggtggtgatcgtggcaggttcaaatggctggtataattataggcaccaggcagacgcgtgccatgcctaccagatcattcacc

SEQ ID NO: 281309 - DNA, 283 bp, Artificial Sequence
  derived and/or modified sequence
ttctcacggtcccgccggcgccaccaccgcggtcactcaccgccgccgccgccaccactgccaccacggtcgcctgccacagacagaggacagaggtctcgctctctcacccaggccggatggttcactatagccttgacttcccgggctcaagtgatcctccccgctcagccccttgagtagctgggaccacaggtgtctgcaattgaactccaaggtgcagaatggtttggaaagtagctgtattcctcagtgtggccctgggcattggtgccgttcctat

SEQ ID NO: 281310 - DNA, 588 bp, Artificial Sequence
  derived and/or modified sequence
aatcacagcagtgccgacgtcgtgggtgtttggtgtgaggctgcgagccgccgcgagttctcacggtcccgccggcgccaccaccgcggtcactcaccgccgccgccgccaccactgccaccacggtcgcctgccacagggtcttactctgttgcccaggctggagtgcagtggcacaatcttggctcactgcaacctctgcctcccgggttcaagcaattctcctgcctcagcctcccgagtagctgggattacagttttgagccagagtctcactctgccacctaggctggagtgcagtggcctgatcttggctcactgcaacctccacctcccggtttcaggcaattctcctgcctcagcctcccaagtagctgagactacaggtgtctgcaattgaactccaaggtgcagaatggtttggaaagtagctgtattcctcagtgtggccctgggcattggtgccgttcctatagatgatcctgaagatggaggcaagcactgggtggtgatcgtggcaggttcaaatggctggtataattataggcaccaggcagacgcgtgccatgcctaccagatcattcaccg

SEQ ID NO: 281311 - DNA, 533 bp, Artificial Sequence
  derived and/or modified sequence
aatcacagcagtgccgacgtcgtgggtgtttggtgtgaggctgcgagccgccgcgagttctcacggtcccgccggcgccaccaccgcggtcactcaccgccgccgccgccaccactgccaccacggtcgcctgccacagttttgagccagagtctcactctgccacctaggctggagtgcagtggcctgatcttggctcactgcaacctccacctcccggtttcaggcaattctcctgcctcagcctcccaagtagctgagactacaggtgtctgcaattgaactccaaggtgcagaatggtttggaaagtagctgtattcctcagtgtggccctgggcattggtgccgttcctatagatgatcctgaagatggaggcaagcactgggtggtgatcgtggcaggttcaaatggctggtataattataggcaccaggcagacgcgtgccatgcctaccagatcattcaccgcaatgggattcctgacgaacagatcgttgtgatgatgtacgatgacattgcttactctgaaga

SEQ ID NO: 281312 - DNA, 546 bp, Artificial Sequence
  derived and/or modified sequence
aatcacagcagtgccgacgtcgtgggtgtttggtgtgaggctgcgagccgccgcgagttctcacggtcccgccggcgccaccaccgcggtcactcaccgccgccgccgccaccactgccaccacggtcgcctgccacaggtggagtctcactctgttgcccaggctggagtgcagtggcacaatctcagctcactgcaaccgctgcttcccaggttcaagccattctcctgcctcagcctcccgagtagctgggattacaggtgcccaccaccacgcacaggtgtctgcaattgaactccaaggtgcagaatggtttggaaagtagctgtattcctcagtgtggccctgggcattggtgccgttcctatagatgatcctgaagatggaggcaagcactgggtggtgatcgtggcaggttcaaatggctggtataattataggcaccaggcagacgcgtgccatgcctaccagatcattcaccgcaatgggattcctgacgaacagatcgttgtgatgatgtacgatgacattgcttactctgaaga

SEQ ID NO: 281313 - DNA, 1119 bp, Artificial Sequence
  derived and/or modified sequence
atggtgtggaaggtggccgtgttcctgagcgtggccctgggcatcggagctgtgcctattgatgaccctgaggatggcggcaagcactgggtggtgatcgttgctggcagcaatggctggtacaactaccgacaccaggctgacgcctgccatgcttaccagataatccatcgcaatggaatcccggacgagcagattgtggtaatgatgtatgacgatattgcatacagtgaagacaatccaacgccaggaattgtgattaacagacccaacggaaccgatgtctaccagggtgtgcctaaagactacaccggagaggacgtgaccccgcagaactttttggccgtcctccggggcgacgcagaggccgttaaaggaatcggcagtggaaaggtgctgaagtccggaccacaggaccacgtgttcatatatttcactgatcatgggtccactggcatcttagtgtttccaaacgaagacttgcacgtgaaagacttgaacgagactatacattacatgtacaaacataagatgtaccgcaaaatggtgttctacatcgaagcttgtgaaagtggctcaatgatgaaccatcttccagacaacatcaacgtgtatgcgactactgctgctaaccctcgcgagagcagttacgcatgttattacgacgaaaaacgaagtacgtacctgggagactggtattccgttaattggatggaagacagcgatgtagaggatctcacaaaagagacactccacaagcagtatcacctagtgaagtcccatactaacaccagtcacgtaatgcagtacggcaacaagactatttctacaatgaaggtgatgcagttccaggggatgaagcggaaagcctcctcacctgtgcccctgcctccagtgacccatctggatcttacaccgagcccagatgtgccactgacaataatgaagcgtaaactgatgaataccaacgatttggaggagtcccggcagctcacagaggaaatccagaggcacctggatgacaaaatcgtgcatggcccaagggtaccttggtccctgctgaagagctgcctgctcgaagcattcccctctgtttccgctccacccactgtatgttag

SEQ ID NO: 281314 - DNA, 174 bp, Artificial Sequence
  derived and/or modified sequence
atggtgtggaaggtggccgtgttcctgagcgtggccctgggcatcggcgccgtccccatagatgaccccgaagacggcggaaagcactgggtggtcatcgtggccgggtcgaacgggtggtacaattaccgtcaccaggccgatgcttgccacgcctatcaaatcatccactag

SEQ ID NO: 281315 - DNA, 177 bp, Artificial Sequence
  derived and/or modified sequence
atggtgtggaaggtggccgtgttcctgagcgtggccctgggcatcggggctgtgcccatcgacgatcctgaagacggcggtaagcactgggtggtgatagtcgcaggatccaatggatggtacaattaccggcaccaggcggacgcatgtcacgcctatcagatcatccaccgctag

SEQ ID NO: 281316 - DNA, 237 bp, Artificial Sequence
  derived and/or modified sequence
atggtgtggaaggtggccgtgttcctgagcgtggccctgggcatcggtgccgttcccatagacgacccagaggacggcggtaaacactgggtcgtgatcgtggccggatcaaatgggtggtacaactataggcaccaggctgatgcttgtcatgcgtatcagattattcatagaaatggaatcccggacgaacagattgtcgtgatgatgtacgatgatattgcgtactctgaatag

SEQ ID NO: 281317 - DNA, 237 bp, Artificial Sequence
  derived and/or modified sequence
atggtgtggaaggtggccgtgttcctgagcgtggccctgggcatcggcgccgttccgatagatgatcctgaagacggagggaaacactgggtcgtgattgtggctggctccaatggatggtacaactataggcaccaagccgacgcctgccacgcctatcagattattcatcgcaacggcatcccagacgaacagatagtagtcatgatgtacgatgatatcgcttatagtgagtag

SEQ ID NO: 281318 - DNA, 1119 bp, Artificial Sequence
  derived and/or modified sequence
atggtgtggaaggtcgcagttttcctctctgttgccctcggtataggtgccgtccctattgatgaccctgaagatggcggaaaacactgggttgtaatcgtggccggatctaacggctggtacaattaccgccaccaggccgacgcatgccatgcttaccaaattatccaccggaacgggatccccgacgagcaaattgtagtgatgatgtacgatgacatcgcatactcagaggacaatccaacgccgggaatcgtcatcaacagacctaacggcaccgacgtgtaccagggggtgccaaaagattataccggcgaggatgtcacgccccaaaacttcctcgctgtgctgaggggcgacgctgaggccgttaagggtattggaagcggaaaggtgctaaagtctggtccacaggatcatgtgttcatttattttacggatcatggaagtacaggaatcctcgtatttcctaatgaagatctacacgtgaaggatctcaatgagaccattcattacatgtacaaacataagatgtaccgcaagatggtcttctacattgaggcatgcgaatcaggatcaatgatgaatcacctgcccgacaacatcaatgtatatgccactacagcagccaaccccagggagagcagctacgcatgttactacgacgagaaaagatctacctatctgggcgattggtatagcgtgaactggatggaagacagcgatgtcgaagatctgaccaaagagacgctccacaagcaatatcacctggtgaagtcccataccaacacctcccatgtgatgcagtacggcaacaagaccatttccaccatgaaagtcatgcagtttcagggcatgaagcgaaaggcgtcgtcacctgttccattgccgcctgtgacccatctggacttaacaccatctccagatgtgcctctgaccattatgaagaggaaattaatgaacacaaatgaccttgaggagtccaggcagctgaccgaagagattcagcggcatctcgacgataagatagtgcacgggccacgagtgccatggtccctgcttaagagctgtcttctggaggcctttcctagcgtctcagcacctcccaccgtctgttag

SEQ ID NO: 281319 - DNA, 174 bp, Artificial Sequence
  derived and/or modified sequence
atggtgtggaaggtggccgtgttcctgagcgtggccctgggaataggagccgtccccatcgacgacccagaggatggaggcaaacactgggtcgtaatcgtggccggttccaatggatggtataattacaggcatcaagctgatgcttgtcacgcctaccagatcatacattag

SEQ ID NO: 281320 - DNA, 177 bp, Artificial Sequence
  derived and/or modified sequence
atggtgtggaaggtggctgttttcctgtcagtcgcccttgggatcggagctgtcccaattgacgatcccgaggacggaggcaaacattgggtagtcatcgttgcgggtagcaatgggtggtacaattatcgacaccaggcggatgcttgccatgcctatcaaatcatccaccgctag

SEQ ID NO: 281321 - DNA, 237 bp, Artificial Sequence
  derived and/or modified sequence
atggtttggaaggttgcggtctttctgtccgttgccctgggcattggagcagttcctatcgatgatcccgaagacggcggaaaacattgggttgtcatcgtcgccggtagtaacggttggtataactacaggcaccaggcagatgcctgtcacgcgtatcagattatccaccggaacggtattcctgacgagcagattgtggtgatgatgtatgacgatattgcctactctgaatag

SEQ ID NO: 281322 - DNA, 237 bp, Artificial Sequence
  derived and/or modified sequence
atggtttggaaggtggcagtgttcttgtctgtggcactcggcattggagcagttcctattgacgacccggaggacgggggaaagcattgggtcgttatcgttgcgggaagcaacggctggtacaattaccggcaccaggccgacgcttgccatgcttaccagatcattcatcgtaacggaatcccggacgagcaaatcgtagtcatgatgtacgacgacatagcatactctgaatag

SEQ ID NO: 281323 - DNA, 1119 bp, Artificial Sequence
  derived and/or modified sequence
atggtgtggaaggtggccgtgttcctgagcgtggccctgggcatcggcgccgtgcccatcgacgaccccgaggacggcggcaagcactgggtggtgatcgtggccggcagcaacggctggtacaactacagacaccaggccgacgcctgccacgcctaccagatcatccacagaaacggcatccccgacgagcagatcgtggtgatgatgtacgacgacatcgcctacagcgaggacaaccccacccccggcatcgtgatcaacagacccaacggcaccgacgtgtaccagggcgtgcccaaggactacaccggcgaggacgtgaccccccagaacttcctggccgtgctgagaggcgacgccgaggccgtgaagggcatcggcagcggcaaggtgctgaagagcggcccccaggaccacgtgttcatctacttcaccgaccacggcagcaccggcatcctggtgttccccaacgaggacctgcacgtgaaggacctgaacgagaccatccactacatgtacaagcacaagatgtacagaaagatggtgttctacatcgaggcctgcgagagcggcagcatgatgaaccacctgcccgacaacatcaacgtgtacgccaccaccgccgccaaccccagagagagcagctacgcctgctactacgacgagaagagaagcacctacctgggcgactggtacagcgtgaactggatggaggacagcgacgtggaggacctgaccaaggagaccctgcacaagcagtaccacctggtgaagagccacaccaacaccagccacgtgatgcagtacggcaacaagaccatcagcaccatgaaggtgatgcagttccagggcatgaagagaaaggccagcagccccgtgcccctgccccccgtgacccacctggacctgacccccagccccgacgtgcccctgaccatcatgaagagaaagctgatgaacaccaacgacctggaggagagcagacagctgaccgaggagatccagagacacctggacgacaagatcgtgcacggccccagagtgccctggagcctgctgaagagctgcctgctggaggccttccccagcgtgagcgccccccccaccgtgtgctag

SEQ ID NO: 281324 - DNA, 174 bp, Artificial Sequence
  derived and/or modified sequence
atggtgtggaaggtggccgtgttcctgagcgtggccctgggcatcggcgccgtgcccatcgacgaccccgaggacggcggcaagcactgggtggtgatcgtggccggcagcaacggctggtacaactacagacaccaggccgacgcctgccacgcctaccagatcatccactag

SEQ ID NO: 281325 - DNA, 177 bp, Artificial Sequence
  derived and/or modified sequence
atggtgtggaaggtggccgtgttcctgagcgtggccctgggcatcggcgccgtgcccatcgacgaccccgaggacggcggcaagcactgggtggtgatcgtggccggcagcaacggctggtacaactacagacaccaggccgacgcctgccacgcctaccagatcatccacagatag

SEQ ID NO: 281326 - DNA, 237 bp, Artificial Sequence
  derived and/or modified sequence
atggtgtggaaggtggccgtgttcctgagcgtggccctgggcatcggcgccgtgcccatcgacgaccccgaggacggcggcaagcactgggtggtgatcgtggccggcagcaacggctggtacaactacagacaccaggccgacgcctgccacgcctaccagatcatccacagaaacggcatccccgacgagcagatcgtggtgatgatgtacgacgacatcgcctacagcgagtag

SEQ ID NO: 281327 - protein, 359 aa, Artificial Sequence
  derived and/or modified sequence
MKSPFYRCQNTTSVEKGNSAVMGGVLFSTGLLGNLLALGLLARSGLGWCSRRPLRPLPSVFYMLVCGLTVTDLLGKCLLSPVVLAAYAQNRSLRVLAPALDNSLCQAFAFFMSFFGLSSTLQLLAMALECWLSLGHPFFYRRHITLRLGALVAPVVSAFSLAFCALPFMGFGKFVQYCPGTWCFIQMVHEEGSLSVLGYSVLYSSLMALLVLATVLCNLGAMRNLYAMHRRLQRHPRSCTRDCAEPRADGREASPQPLEELDHLLLLALMTVLFTMCSLPVIYRAYYGAFKDVKEKNRTSEEAEDLRALRFLSVISIVDPWIFIIFRSPVFRIFFHKIFIRPLRYRSRCSNSTNMESSL

SEQ ID NO: 281328 - DNA, 1080 bp, Artificial Sequence
  derived and/or modified sequence
atgaagtcacccttctatcgatgccaaaataccacatctgtggaaaaaggtaactcagcggtgatgggaggagtgcttttcagtaccgggctgttgggcaatctcctggcccttggactgctagcaagatccgggctgggttggtgcagtagaaggccactaaggccactgccttctgtgttttacatgcttgtctgtgggctaacggtaacagatcttttagggaagtgtctcctgtcgcctgtggtgctcgcagcctacgcacaaaaccgctctctccgcgtcctagcgcccgcactggacaatagcctatgtcaggctttcgcctttttcatgagtttcttcggcctgagttcaaccctgcagcttctggctatggctctagaatgctggttgtctctgggccaccctttcttctatcgacgacacattacacttcggctgggcgccctggtagcacctgtggtgagtgcattctctctggctttttgcgcgctccctttcatgggcttcggcaagttcgtgcagtactgccctgggacttggtgtttcattcagatggtgcacgaggaaggctccctgtccgttctgggatatagtgtactctacagtagtctcatggcccttttagtgctggccacagtactctgcaacctaggggcaatgaggaacctctatgcaatgcatcgcaggttgcagcgccacccacggtcttgtacacgcgactgtgccgaacctcgagccgatggtagggaagcgtccccacaaccactcgaggaacttgaccacctccttctgctagccctgatgaccgttttattcactatgtgcagcctacctgtcatatacagagcctattatggcgcattcaaggatgtgaaggaaaaaaatagaacttcagaagaggccgaggatttacgtgccctgagattcctgtccgtcattagtattgtcgatccgtggatctttattatttttagatcacctgtgtttcgcatattctttcacaagattttcatcagacccctgagatatcgttctaggtgttccaactctacaaacatggagagctcattatag

SEQ ID NO: 281329 - DNA, 1080 bp, Artificial Sequence
  derived and/or modified sequence
atgaagagccccttctaccgctgccagaacaccacctctgtggagaagggcaacagcgctgtgatgggcggcgtgctcttcagcacaggcctgctgggcaacctgctggccctgggcctgctggcccggagcggcctgggctggtgcagcagaagacccctgcggcccctgcccagcgtcttctacatgctggtgtgtggcctgactgtgacagacctgctgggcaagtgcctgctgagccctgtggtgctggccgcctatgcccagaacagaagcctgcgggtgctggccccagccctggacaacagcctgtgccaggcctttgccttcttcatgtccttcttcggcctgagcagcaccctgcagctgctggccatggccctggagtgctggctgagcctgggccaccccttcttctacagaagacacatcaccctgcggctgggcgccctggtggcccctgtggtgtctgccttcagcctggccttctgtgccctgcccttcatgggctttgggaagtttgtgcagtactgccccggcacctggtgcttcatccagatggtgcatgaggagggcagcctgtctgtgctgggctacagcgtgctgtacagcagcctgatggccctgctggtgctggccaccgtgctgtgcaacctgggcgccatgaggaacctgtatgccatgcaccggcggctgcagaggcaccccaggagctgcacccgggactgtgccgagcccagggcagatggccgggaggccagcccccagcccctggaggagctggaccacctgctgctgctggccctgatgacagtgctcttcaccatgtgcagcctgcccgtcatctaccgggcctactatggagccttcaaggatgtgaaggagaagaacagaaccagcgaggaggccgaggacctgcgggccctgcgcttcctgagcgtcatcagcatcgtggacccctggatcttcatcatcttccgcagccctgtgttccgcatcttcttccacaagatcttcatccggcccctgcgctaccgcagccgctgcagcaacagcaccaacatggagagcagcctgtag

SEQ ID NO: 281330 - DNA, 1080 bp, Artificial Sequence
  derived and/or modified sequence
atgaagagccccttctaccggtgccagaacaccaccagcgtggagaaaggcaatagcgccgtgatgggcggcgtattatttagcaccggccttctggggaacctgctagccctggggctgctcgcacgttcagggcttggatggtgtagcaggcgtcctctaagaccactccccagcgttttctatatgttggtgtgcgggctcactgtgacggatttgcttggaaagtgcctcttaagccctgtggtgctagctgcctacgctcaaaacaggtcactacgagtactggcaccagctctggataattctctgtgtcaagcctttgctttctttatgagtttttttggactgagttccacattgcaattgctggccatggccctggaatgctggcttagcctgggccatcctttcttttaccgcagacatatcacattgcgcctcggggctctggtcgcccccgtagtatctgcgttcagtctggcattctgcgccctgccatttatggggtttgggaagttcgtccagtactgtcccgggacctggtgctttattcaaatggtacacgaggagggatctttatctgtgttagggtatagcgttctctactcatcactgatggctctgctcgtgctggcaactgttttatgcaacctgggagctatgcgcaacctatatgcgatgcatcgtaggcttcaaaggcatccacgctcttgcactcgggactgtgctgagccacgggccgacggacgtgaagcatcaccacaaccactggaggaactggaccacctgctcctgttggccctcatgactgtgctgttcactatgtgcagcttgccagtaatctatagagcatactacggcgcgtttaaggatgtgaaagagaaaaaccggaccagcgaagaggcggaagacctccgcgccctcaggttcctgagcgtgatttctatcgtcgacccttggatctttatcatcttccgaagccctgtgtttcggatcttctttcacaagatattcattaggcccctgagatatcgatcccggtgctcaaattcaacaaacatggagtcctcattatag

SEQ ID NO: 281331 - DNA, 1080 bp, Artificial Sequence
  derived and/or modified sequence
atgaaaagcccattctatagatgtcagaacacaactagtgttgagaagggaaacagcgccgtgatgggcggtgttctgttctcaaccgggttgctcggcaacttgctggcgctcgggctccttgccagaagcggattggggtggtgttcacggaggccattgagacctctgccaagcgtcttttatatgctggtgtgcggtttaaccgtcacggatctgctggggaagtgcctcttgagtccagtggttctcgcagcttatgcacagaatcgatcccttagggtcttggctccagcactcgataactccttgtgccaagctttcgctttcttcatgagcttcttcggcctctcgagtacactgcagctgctggccatggccctcgagtgttggttgtccctgggtcatccgttcttctatcggaggcatataactctgaggctgggagcactggtagcccctgtcgtctcagcattctctcttgcgttttgcgccctacccttcatggggttcggcaaattcgtacagtactgcccaggcacctggtgctttattcagatggttcacgaggaagggagcctgtctgtgctggggtactctgtgctgtacagttccctcatggcactgctggttctcgcaactgttctgtgcaacttaggggctatgagaaatctgtatgcgatgcatagacgcttacagaggcacccacgtagctgtacccgcgactgcgctgagccacgggcagatggtagggaggcctctcctcagcccctagaggaactggaccacctcttgctgctggcccttatgacagtactgttcacaatgtgcagcctgcccgtaatttatagggcatactacggggcatttaaagatgttaaggagaagaaccgaactagtgaagaggccgaagatctgagggcactgcgttttctttcggtgatttccattgtagatccctggatattcataatctttcgctctccagtcttccgaatcttttttcacaagattttcattcgccctttgcgatatcggtcacgctgctccaattcgacgaacatggagtcctccctgtag

SEQ ID NO: 281332 - DNA, 2942 bp, Artificial Sequence
  derived and/or modified sequence
cgcccgagccgcgcgcggagctgccgggggctccttagcacccgggcgccggggccctcgcccttccgcagccttcactccagccctctgctcccgcacgccatgaagtcgccgttctaccgctgccagaacaccacctctgtggaaaaaggcaactcggcggtgatgggcggggtgctcttcagcaccggcctcctgggcaacctgctggccctggggctgctggcgcgctcggggctggggtggtgctcgcggcgtccactgcgcccgctgccctcggtcttctacatgctggtgtgtggcctgacggtcaccgacttgctgggcaagtgcctcctaagcccggtggtgctggctgcctacgctcagaaccggagtctgcgggtgcttgcgcccgcattggacaactcgttgtgccaagccttcgccttcttcatgtccttctttgggctctcctcgacactgcaactcctggccatggcactggagtgctggctctccctagggcaccctttcttctaccgacggcacatcaccctgcgcctgggcgcactggtggccccggtggtgagcgccttctccctggctttctgcgcgctacctttcatgggcttcgggaagttcgtgcagtactgccccggcacctggtgctttatccagatggtccacgaggagggctcgctgtcggtgctggggtactctgtgctctactccagcctcatggcgctgctggtcctcgccaccgtgctgtgcaacctcggcgccatgcgcaacctctatgcgatgcaccggcggctgcagcggcacccgcgctcctgcaccagggactgtgccgagccgcgcgcggacgggagggaagcgtcccctcagcccctggaggagctggatcacctcctgctgctggcgctgatgaccgtgctcttcactatgtgttctctgcccgtaatttatcgcgcttactatggagcatttaaggatgtcaaggagaaaaacaggacctctgaagaagcagaagacctccgagccttgcgatttctatctgtgatttcaattgtggacccttggatttttatcattttcagatctccagtatttcggatattttttcacaagattttcattagacctcttaggtacaggagccggtgcagcaattccactaacatggaatccagtctgtgacagtgtttttcactctgtggtaagctgaggaatatgtcacattttcagtcaaagaaccatgattaaaaaaaaaaagacaacttacaatttaaatccttaaaagttacctcccataacaaaagcatgtatatgtattttcaaaagtatttgatatcttaacaatgtgttaccattctatagtcatgaaccccttcagtgcattttcatttttttattaacagcaactaaaattttatatattgtaaccagtgttaaaagtcttaaaaaacaatggtattaattgtccctacatttgtgcttggtggccctattttttttttttagagaggccttgagacatacaggtcttttaaaatacagtagaaacaccactgtttacgattatacgatggacattcataaaaagcataatttcttaccctattcattttttggtgaaacctgattcattgattttatatcattgccgatgtttagttcatttctttgccaattgatctaagcatagcctgaattatgatgttcctcagagaagtgaggtgggaaatatgaccaggtcaggcagttggaggggcttccccagccaccatcggggagtacttgctgcctcaggtggagacctgaagctgtaactagatgcagagcaagatatgactatagcccacaacccaaagaagcaaaaattcgtttttatcttttgaaatccagtttcttttgtattgagtcaagggtgtcagtaggaatcaaaagttgggggtgggttgcaaaatgttctttcagtttttagaacctccattttataaaagaattatcctatcaatggattctttagtggaaggatttatgcttctttgaaaaccagtgtgtgactcactgtagagccatgtttactgtttgactgtgtggcacaggggggcatttggcacagcaaaaagcccacccaggacttagcctcagttgacgatagtaacaatggccttaacatctaccttaacagctacctattacagccgtattctgctgtccgtggagacggtaagatcttaggttccaagattttacttcaaattacaccttcaaaactggagcagcatatagccgaaaaggagcacaactgagcactttaatagtaatttaaaagttttcaagggtcagcaatatgatgactgaaagggaaaagtggaggaaacgcagctgcaactgaagcggagactctaaacccagcttgcaggtaagagctttcacctttggtaaaagaacagctggggaggttcaaggggtttcagcatctctggagttcctttgtatctgacaatctcaggactccaaggtgcaaagcctgctgcatttgcgtgatctcaagacctccagccagaagtcccttccaaatataagagtactcatgtttatttatttccaactgagcagcaacctcctttgtttcacttatgttttttccagtatctgagataatataaagctgggtaattttttatgtaattttttggtatagcaaaactgtgaaaaagccaaattaggcatacaaggagtatgatttaacagtatgacatgatgaaaaaaatacagttgtttttgaaatttaacttttgtttgtaccttcaatgtgtaagtacatgcatgttttattgtcagaggaagaacatgttttttgtattctttttttggagaggtgtgttaggataattgtccagttaatttgaaaaggccccagatgaatcaataaatataattttatagta

SEQ ID NO: 281333 - DNA, 1080 bp, Artificial Sequence
  derived and/or modified sequence
atgaagagccccttctacagatgccagaacaccaccagcgtggagaagggcaacagcgccgtgatgggcggcgtgctgttcagcaccggcctgctgggcaacctgctggccctgggcctgctggccagaagcggcctgggctggtgcagcagaagacccctgagacccctgcccagcgtgttctacatgctggtgtgcggcctgaccgtgaccgacctgctgggcaagtgcctgctgagccccgtggtgctggccgcctacgcccagaacagaagcctgagagtgctggcccccgccctggacaacagcctgtgccaggccttcgccttcttcatgagcttcttcggcctgagcagcaccctgcagctgctggccatggccctggagtgctggctgagcctgggccaccccttcttctacagaagacacatcaccctgagactgggcgccctggtggcccccgtggtgagcgccttcagcctggccttctgcgccctgcccttcatgggcttcggcaagttcgtgcagtactgccccggcacctggtgcttcatccagatggtgcacgaggagggcagcctgagcgtgctgggctacagcgtgctgtacagcagcctgatggccctgctggtgctggccaccgtgctgtgcaacctgggcgccatgagaaacctgtacgccatgcacagaagactgcagagacaccccagaagctgcaccagagactgcgccgagcccagagccgacggcagagaggccagcccccagcccctggaggagctggaccacctgctgctgctggccctgatgaccgtgctgttcaccatgtgcagcctgcccgtgatctacagagcctactacggcgccttcaaggacgtgaaggagaagaacagaaccagcgaggaggccgaggacctgagagccctgagattcctgagcgtgatcagcatcgtggacccctggatcttcatcatcttcagaagccccgtgttcagaatcttcttccacaagatcttcatcagacccctgagatacagaagcagatgcagcaacagcaccaacatggagagcagcctgtag

SEQ ID NO: 281334 - DNA, 522 bp, Artificial Sequence
  derived and/or modified sequence
atggccgagctgcaggaggtgcagatcaccgaggagaagcccctgctgcccggccagacccccgaggccgccaaggaggccgagctggccgccagaatcctgctggaccagggccagacccacagcgtggagaccccctacggcagcgtgaccttcaccgtgtacggcacccccaagcccaagagacccgccatcctgacctaccacgacgtgggcctgaactacaagagctgcttccagcccctgttccagttcgaggacatgcaggagatcatccagaacttcgtgagagtgcacgtggacgcccccggcatggaggagggcgcccccgtgttccccctgggctaccagtaccccagcctggaccagctggccgacatgatcccctgcgtgctgcagtacctgaacttcagcaccatcatcggcgtgggcgtgggcgccggcgcctacatcctggccagatacgccctgaaccaccccgacaccgtggagggcctggtgctgatcaacatcgacccctag

SEQ ID NO: 281335 - DNA, 759 bp, Artificial Sequence
  derived and/or modified sequence
atggccgagctgcaggaggtgcagatcaccgaggagaagcccctgctgcccggccagacccccgaggccgccaaggaggccgagctggccgccagaatcctgctggaccagggccagacccacagcgtggagaccccctacggcagcgtgaccttcaccgtgtacggcacccccaagcccaagagacccgccatcctgacctaccacgacgtgggcctgaactacaagagctgcttccagcccctgttccagttcgaggacatgcaggagatcatccagaacttcgtgagagtgcacgtggacgcccccggcatggaggagggcgcccccgtgttccccctgggctaccagtaccccagcctggaccagctggccgacatgatcccctgcgtgctgcagtacctgaacttcagcaccatcatcggcgtgggcgtgggcgccggcgcctacatcctggccagatacgccctgaaccaccccgacaccgtggagggcctggtgctgatcaacatcgaccccaacgccaagggctggatggactgggccgcccacaagctgaccggcctgaccagcagcatccccgagatgatcctgggccacctgttcagccaggaggagctgagcggcaacagcgagctgatccagaagtacagaaacatcatcacccacgcccccaacctggacaacatcgagctgtactggaacagctacaacaacagaagagacctgaacttcgagagaggcggcgacatcacctag

SEQ ID NO: 281336 - DNA, 450 bp, Artificial Sequence
  derived and/or modified sequence
atggccgagctgcaggaggtgcagatcaccgaggagaagcccctgctgcccggccagacccccgaggccgccaaggaggccgagctggccgccagaatcctgctggaccagggccagacccacagcgtggagaccccctacggcagcgtgaccttcaccgtgtacggcacccccaagcccaagagacccgccatcctgacctaccacgacgtgggcctgaactacaagagctgcttccagcccctgttccagttcgaggacatgcaggagatcatccagaacttcgtgagagtgcacgtggacgcccccggcatggaggagggcgcccccgtgttccccctgggctaccagtaccccagcctggaccagctggccgacatgatcccctgcgtgctgcagtacctgaacttcagcaccatcatcggcgtgggcgtgggcgccggcgcctag

SEQ ID NO: 281337 - DNA, 261 bp, Artificial Sequence
  derived and/or modified sequence
atggccgagctgcaggaggtgcagatcaccgaggagaagcccctgctgcccggccagacccccgaggccgccaaggaggccgagctggccgccagaatcctgctggaccagggccagacccacagcgtggagaccccctacggcagcgtgaccttcaccgtgtacggcacccccaagcccaagagacccgccatcctgacctaccacgacgtgggcctgaactacaagagctgcttccagcccctgttccagttcgagtag

SEQ ID NO: 281338 - DNA, 390 bp, Artificial Sequence
  derived and/or modified sequence
atggccgagctgcaggaggtgcagatcaccgaggagaagcccctgctgcccggccagacccccgaggccgccaaggaggccgagctggccgccagaatcctgctggaccagggccagacccacagcgtggagaccccctacggcagcgtgaccttcaccgtgtacggcacccccaagcccaagagacccgccatcctgacctaccacgacgtgggcctgaactacaagagctgcttccagcccctgttccagttcgaggacatgcaggagatcatccagaacttcgtgagagtgcacgtggacgcccccggcatggaggagggcgcccccgtgttccccctgggctaccagtaccccagcctggaccagctggccgacatgatcccctag

SEQ ID NO: 281339 - DNA, 447 bp, Artificial Sequence
  derived and/or modified sequence
atggccgagctgcaggaggtgcagatcaccgaggagaagcccctgctgcccggccagacccccgaggccgccaaggaggccgagctggccgccagaatcctgctggaccagggccagacccacagcgtggagaccccctacggcagcgtgaccttcaccgtgtacggcacccccaagcccaagagacccgccatcctgacctaccacgacgtgggcctgaactacaagagctgcttccagcccctgttccagttcgaggacatgcaggagatcatccagaacttcgtgagagtgcacgtggacgcccccggcatggaggagggcgcccccgtgttccccctgggctaccagtaccccagcctggaccagctggccgacatgatcccctgcgtgctgcagtacctgaacttcagcaccatcatcggcgtgggcgtgggcgccggctag

SEQ ID NO: 281340 - DNA, 300 bp, Artificial Sequence
  derived and/or modified sequence
atggccgagctgcaggaggtgcagatcaccgaggagaagcccctgctgcccggccagacccccgaggccgccaaggaggccgagctggccgccagaatcctgctggaccagggccagacccacagcgtggagaccccctacggcagcgtgaccttcaccgtgtacggcacccccaagcccaagagacccgccatcctgacctaccacgacgtgggcctgaactacaagagctgcttccagcccctgttccagttcgaggacatgcaggagatcatccagaacttcgtgagagtgcactag

SEQ ID NO: 281341 - DNA, 585 bp, Artificial Sequence
  derived and/or modified sequence
atggccgagctgcaggaggtgcagatcaccgaggagaagcccctgctgcccggccagacccccgaggccgccaaggaggccgagctggccgccagaatcctgctggaccagggccagacccacagcgtggagaccccctacggcagcgtgaccttcaccgtgtacggcacccccaagcccaagagacccgccatcctgacctaccacgacgtgggcctgaactacaagagctgcttccagcccctgttccagttcgaggacatgcaggagatcatccagaacttcgtgagagtgcacgtggacgcccccggcatggaggagggcgcccccgtgttccccctgggctaccagtaccccagcctggaccagctggccgacatgatcccctgcgtgctgcagtacctgaacttcagcaccatcatcggcgtgggcgtgggcgccggcgcctacatcctggccagatacgccctgaaccaccccgacaccgtggagggcctggtgctgatcaacatcgaccccaacgccaagggctggatggactgggccgcccacaagctgaccggcctgaccagcagcatcccctag

SEQ ID NO: 281342 - DNA, 660 bp, Artificial Sequence
  derived and/or modified sequence
atggccgagctgcaggaggtgcagatcaccgaggagaagcccctgctgcccggccagacccccgaggccgccaaggaggccgagctggccgccagaatcctgctggaccagggccagacccacagcgtggagaccccctacggcagcgtgaccttcaccgtgtacggcacccccaagcccaagagacccgccatcctgacctaccacgacgtgggcctgaactacaagagctgcttccagcccctgttccagttcgaggacatgcaggagatcatccagaacttcgtgagagtgcacgtggacgcccccggcatggaggagggcgcccccgtgttccccctgggctaccagtaccccagcctggaccagctggccgacatgatcccctgcgtgctgcagtacctgaacttcagcaccatcatcggcgtgggcgtgggcgccggcgcctacatcctggccagatacgccctgaaccaccccgacaccgtggagggcctggtgctgatcaacatcgaccccaacgccaagggctggatggactgggccgcccacaagctgaccggcctgaccagcagcatccccgagatgatcctgggccacctgttcagccaggaggagctgagcggcaacagcgagctgatccagaagtacagaaactag

SEQ ID NO: 281343 - DNA, 426 bp, Artificial Sequence
  derived and/or modified sequence
atggccgagctgcaggaggtgcagatcaccgaggagaagcccctgctgcccggccagacccccgaggccgccaaggaggccgagctggccgccagaatcctgctggaccagggccagacccacagcgtggagaccccctacggcagcgtgaccttcaccgtgtacggcacccccaagcccaagagacccgccatcctgacctaccacgacgtgggcctgaactacaagagctgcttccagcccctgttccagttcgaggacatgcaggagatcatccagaacttcgtgagagtgcacgtggacgcccccggcatggaggagggcgcccccgtgttccccctgggctaccagtaccccagcctggaccagctggccgacatgatcccctgcgtgctgcagtacctgaacttcagcaccatcatctag

SEQ ID NO: 281344 - DNA, 357 bp, Artificial Sequence
  derived and/or modified sequence
atggccgagctgcaggaggtgcagatcaccgaggagaagcccctgctgcccggccagacccccgaggccgccaaggaggccgagctggccgccagaatcctgctggaccagggccagacccacagcgtggagaccccctacggcagcgtgaccttcaccgtgtacggcacccccaagcccaagagacccgccatcctgacctaccacgacgtgggcctgaactacaagagctgcttccagcccctgttccagttcgaggacatgcaggagatcatccagaacttcgtgagagtgcacgtggacgcccccggcatggaggagggcgcccccgtgttccccctgggctaccagtactag

SEQ ID NO: 281345 - DNA, 423 bp, Artificial Sequence
  derived and/or modified sequence
atggccgagctgcaggaggtgcagatcaccgaggagaagcccctgctgcccggccagacccccgaggccgccaaggaggccgagctggccgccagaatcctgctggaccagggccagacccacagcgtggagaccccctacggcagcgtgaccttcaccgtgtacggcacccccaagcccaagagacccgccatcctgacctaccacgacgtgggcctgaactacaagagctgcttccagcccctgttccagttcgaggacatgcaggagatcatccagaacttcgtgagagtgcacgtggacgcccccggcatggaggagggcgcccccgtgttccccctgggctaccagtaccccagcctggaccagctggccgacatgatcccctgcgtgctgcagtacctgaacttcagcaccatctag

SEQ ID NO: 281346 - DNA, 522 bp, Artificial Sequence
  derived and/or modified sequence
atggcagagcttcaggaggtacagattaccgaggagaagcccttactccccggacagacgcccgaggctgccaaagaggccgagctggccgcgcggattcttctagaccagggacagacgcattccgtagaaactccctacggcagtgtaacattcactgtgtatggcacgcccaagcccaagagacccgctatcttaacctaccacgacgtgggtcttaattacaaaagctgttttcaaccactattccagttcgaagacatgcaggaaattatccaaaactttgtgcgcgtgcacgttgatgcccctggcatggaggagggtgcccccgtgtttcccctcggctatcaatacccttcgctggaccagctggccgatatgattccatgtgtcctgcagtatcttaatttctccaccattatcggcgtaggcgtgggggccggcgcatatatactcgcccggtatgcccttaaccatccagatactgtggagggccttgtactcatcaatatcgatccctag

SEQ ID NO: 281347 - DNA, 759 bp, Artificial Sequence
  derived and/or modified sequence
atggcagaactgcaagaggttcagataaccgaagagaaacctcttctgcctggccaaactccggaggccgctaaagaagcagagttggccgccaggattctgctggaccaaggccaaacccactccgtggagacaccctacggcagcgttacattcacagtctatggaacacccaagccaaagagacccgccattcttacctaccatgacgtcggactgaactacaaaagttgctttcagcctctgttccagtttgaagatatgcaagaaatcattcagaacttcgtacgggtacatgtagatgccccaggtatggaagagggagcaccagtctttcctttgggctaccaatatccatcccttgaccagttggccgacatgatcccttgcgtgctgcagtacctgaacttttcaacaatcataggagtgggagtgggagcaggcgcgtacattctggcacgttacgcactgaaccacccagataccgtcgagggccttgtattaatcaatatcgaccccaacgccaaaggatggatggattgggcagcacacaagctaacagggctgacaagtagtatccccgagatgattctgggacatcttttttctcaggaggagctcagcgggaactcagaattgattcagaaatatagaaatatcattacccacgcccccaatcttgataatattgagctttactggaattcttacaataatcggcgggacttgaatttcgagcgtggaggcgacattacctag

SEQ ID NO: 281348 - DNA, 450 bp, Artificial Sequence
  derived and/or modified sequence
atggccgaattgcaggaggtgcagattaccgaggagaaacccctcttacccggacagactccagaagccgcgaaggaggcggaactggctgccagaattctgttggaccaagggcagacacattcggtcgagaccccctatggctccgtaacctttactgtctacggcacgccaaaacctaaaagacccgctatcctcacttatcacgacgtgggactcaactataaaagttgcttccaaccgctctttcaatttgaggatatgcaagagattatacagaactttgtgagagtacacgtggacgcaccaggaatggaagaaggcgcgccggtgtttcccttaggatatcagtaccctagtttagatcagctggcagatatgattccatgcgtgcttcaatatctaaactttagcaccatcataggtgtcggagttggggccggggcctag

SEQ ID NO: 281349 - DNA, 261 bp, Artificial Sequence
  derived and/or modified sequence
atggctgagttgcaggaagtgcagataactgaggaaaagcctctgctaccgggccaaacacctgaggcagccaaggaagccgagctggctgctaggatcttactggaccaggggcagactcactctgtggaaaccccttatggtagtgtgactttcaccgtgtatgggacacccaaaccaaagaggcctgctattctgacatatcacgatgttggactgaattacaaaagctgctttcagccgctgttccagtttgaatag

SEQ ID NO: 281350 - DNA, 390 bp, Artificial Sequence
  derived and/or modified sequence
atggccgagcttcaggaagtgcagatcacagaggaaaaacccctcctacctggccaaacacctgaagccgccaaggaagccgagctggccgcccggatacttctggaccaaggacaaactcattctgtcgagactccttacggaagtgttaccttcactgtatatgggaccccaaagcctaagaggccggcgatactgacctaccacgacgtcggcctgaactacaaaagctgcttccagcccctgttccagtttgaagatatgcaggagatcattcagaactttgtcagagtccacgtggacgcgccaggtatggaggaaggggctccagtgtttccccttggctaccagtatccttccctggatcagctcgctgacatgatcccttag

SEQ ID NO: 281351 - DNA, 447 bp, Artificial Sequence
  derived and/or modified sequence
atggcagagctccaggaagtgcagatcactgaagaaaagcctctcctgcccggacagacccccgaggcagctaaggaggccgagctagctgccaggatcttgcttgatcagggccagacacattcagttgaaactccctatgggagtgtcacatttactgtatacggtactcctaaaccaaagcggcccgctattctcacctatcacgatgtgggcttaaactataaaagctgttttcaacctttgtttcagttcgaggacatgcaggagattatccaaaacttcgttagggtacacgtggatgcacccggcatggaggagggtgcccctgtgttccccctcggctaccagtatccatctctagaccagcttgcggatatgattccatgcgtcctgcagtatcttaatttttcaactatcataggagtcggagtaggtgccggctag

SEQ ID NO: 281352 - DNA, 300 bp, Artificial Sequence
  derived and/or modified sequence
atggcagagttgcaggaggtgcagattaccgaagaaaaaccccttctgcccgggcaaacacctgaagccgccaaggaggccgaactggcggcaagaatactgctcgaccaggggcagacccactctgtggaaactccatacggatctgtgacctttactgtgtatgggactccaaaaccgaaacggccagcaatcctaacataccacgatgtgggactcaactataagtcatgctttcagcctttgttccagtttgaggatatgcaggagatcattcaaaacttcgttagggtgcattag

SEQ ID NO: 281353 - DNA, 585 bp, Artificial Sequence
  derived and/or modified sequence
atggcagagctgcaggaggtccaaattacagaggagaaacctcttctgcccggtcagacacccgaggctgcaaaagaagccgagttagccgccagaatcctgctggatcagggacaaactcactcggtggagacaccatacggatcagtcaccttcactgtttacggtacccctaaaccaaaacgacccgcaattctcacgtaccatgacgtcggcctgaattataaaagctgcttccagcccctgttccagtttgaagacatgcaggagatcatccagaatttcgttcgcgttcatgttgacgcaccaggaatggaagaaggggcgcccgtatttcctctggggtatcagtatccctccctcgaccagctggctgacatgattccttgtgtgctgcagtatttaaacttttccaccatcatcggcgtcggagtgggcgcaggcgcctatattctggctaggtacgcactgaatcaccccgataccgttgagggcctggtgctgattaatattgaccccaatgccaagggctggatggattgggctgcccacaaactgacaggactgaccagttccatcccatag

SEQ ID NO: 281354 - DNA, 660 bp, Artificial Sequence
  derived and/or modified sequence
atggcagagctgcaggaggtgcagattactgaggagaagccccttttgcccgggcagaccccagaagccgccaaggaggctgagctcgctgcccggatcctgctcgaccaaggacagacccattcagtggagactccttacgggagtgtgacctttaccgtatatgggactcccaaacctaaacgccctgctatcctcacctaccacgacgtggggctgaattacaagagctgtttccagcctctgttccagtttgaggacatgcaggaaatcatccaaaattttgtgcgggtacacgtcgatgcacctggaatggaggagggagccccagtgtttcccttaggataccagtatcctagtcttgaccaacttgccgacatgattccctgcgtcctacagtacctgaacttctctacgatcattggggtcggggttggcgcgggggcatacatcttagcaaggtacgcgctcaatcacccagataccgttgagggattggttctcataaatattgaccctaacgcgaagggctggatggactgggccgctcacaagctgactggtctgacaagctccatcccagagatgattctcggtcacttattttcacaggaggaactttctgggaatagcgaactgattcagaagtatcgtaattag

SEQ ID NO: 281355 - DNA, 426 bp, Artificial Sequence
  derived and/or modified sequence
atggccgagttacaagaagttcagataaccgaagaaaagccgttgttgcccggacagaccccagaggcagccaaggaagccgaactcgccgctagaatcttgcttgaccagggccaaacccactctgtcgaaacaccttacggttcagtgacattcacagtctatggcactccaaaacccaaacggcctgcgattctcacatatcacgacgtgggcctgaactataaatcctgtttccagcccttgttccaattcgaggacatgcaggaaattatccagaacttcgtccgcgtacacgttgacgctcccggcatggaggaaggggctccagtttttcccctggggtatcagtaccccagcctggaccagctcgcggacatgatcccctgcgttctgcagtatctgaatttctcaaccatcatttag

SEQ ID NO: 281356 - DNA, 357 bp, Artificial Sequence
  derived and/or modified sequence
atggccgagctccaggaggtccaaatcaccgaggaaaagcctctgctacctggacagacacccgaggcggctaaggaggccgagctagccgccaggatcctgctggaccagggccagacccattcagttgagactccatacggcagtgtaacctttacggtatacggaactcccaagcctaagaggccagctatcctgacctatcacgacgtgggccttaactataagtcctgtttccaaccactattccagttcgaggatatgcaggagattattcagaactttgtaagggtgcatgtagacgctccgggtatggaggagggggcccctgtatttcccctgggctaccagtactag

SEQ ID NO: 281357 - DNA, 423 bp, Artificial Sequence
  derived and/or modified sequence
atggccgagttgcaggaggtgcagattaccgaggagaagcctctgctacccgggcaaacaccagaggccgctaaggaggctgaactcgcagctcgtatattgctagatcagggtcagacccatagcgtcgaaaccccctatggctctgtgacattcactgtgtacggaactcctaagcccaagcgccccgctatacttacgtaccatgatgtcggcctaaactataagagctgtttccaacctttgtttcagtttgaagacatgcaggaaatcatccagaacttcgtacgggtacatgtcgatgcacccggaatggaagaaggtgcacctgttttcccactcggataccagtaccccagcttggatcagctagcagatatgataccatgcgtccttcaatacttaaattttagtaccatatag

SEQ ID NO: 281358 - DNA, 522 bp, Artificial Sequence
  derived and/or modified sequence
atggccgagctgcaggaggtgcagatcacagaggagaagcccctgctgcccggccagaccccagaggccgccaaggaggccgagctggccgcccgcatcctgctggaccagggccagacccacagcgtggagaccccctacggctctgtgaccttcaccgtgtatggcacccccaagcccaagaggcctgccatcctgacctaccatgatgtgggcctgaactacaagagctgcttccagcccctcttccagtttgaggacatgcaggagatcatccagaactttgtgcgggtgcacgtggatgcccctggcatggaggagggcgcccctgtgttccccctgggctaccagtaccccagcctggaccagctggccgacatgatcccctgtgtgctgcagtacctgaacttcagcaccatcattggagtgggcgtgggcgctggggcctacatcctggcccgctatgccctgaaccacccagacacagtggagggcctggtgctgatcaacatcgacccctag

SEQ ID NO: 281359 - DNA, 759 bp, Artificial Sequence
  derived and/or modified sequence
atggccgagctgcaggaggtgcagatcacagaggagaagcccctgctgcccggccagaccccagaggccgccaaggaggccgagctggccgcccgcatcctgctggaccagggccagacccacagcgtggagaccccctacggctctgtgaccttcaccgtgtatggcacccccaagcccaagaggcctgccatcctgacctaccatgatgtgggcctgaactacaagagctgcttccagcccctcttccagtttgaggacatgcaggagatcatccagaactttgtgcgggtgcacgtggatgcccctggcatggaggagggcgcccctgtgttccccctgggctaccagtaccccagcctggaccagctggccgacatgatcccctgtgtgctgcagtacctgaacttcagcaccatcattggagtgggcgtgggcgctggggcctacatcctggcccgctatgccctgaaccacccagacacagtggagggcctggtgctgatcaacatcgaccccaatgccaagggctggatggactgggccgcccacaagctgaccggcctgaccagcagcatccctgagatgatcctgggccacctgttcagccaggaggagctgagcggcaacagcgagctgatccagaagtacagaaacatcatcacccacgcccccaacctggacaacatcgagctgtactggaacagctacaacaacagaagagacctgaactttgagcggggcggggacatcacctag

SEQ ID NO: 281360 - DNA, 450 bp, Artificial Sequence
  derived and/or modified sequence
atggccgagctgcaggaggtgcagatcacagaggagaagcccctgctgcccggccagaccccagaggccgccaaggaggccgagctggccgcccgcatcctgctggaccagggccagacccacagcgtggagaccccctacggctctgtgaccttcaccgtgtatggcacccccaagcccaagaggcctgccatcctgacctaccatgatgtgggcctgaactacaagagctgcttccagcccctcttccagtttgaggacatgcaggagatcatccagaactttgtgcgggtgcacgtggatgcccctggcatggaggagggcgcccctgtgttccccctgggctaccagtaccccagcctggaccagctggccgacatgatcccctgtgtgctgcagtacctgaacttcagcaccatcattggagtgggcgtgggcgctggggcctag

SEQ ID NO: 281361 - DNA, 261 bp, Artificial Sequence
  derived and/or modified sequence
atggccgagctgcaggaggtgcagatcacagaggagaagcccctgctgcccggccagaccccagaggccgccaaggaggccgagctggccgcccgcatcctgctggaccagggccagacccacagcgtggagaccccctacggctctgtgaccttcaccgtgtatggcacccccaagcccaagaggcctgccatcctgacctaccatgatgtgggcctgaactacaagagctgcttccagcccctcttccagtttgaatag

SEQ ID NO: 281362 - DNA, 390 bp, Artificial Sequence
  derived and/or modified sequence
atggccgagctgcaggaggtgcagatcacagaggagaagcccctgctgcccggccagaccccagaggccgccaaggaggccgagctggccgcccgcatcctgctggaccagggccagacccacagcgtggagaccccctacggctctgtgaccttcaccgtgtatggcacccccaagcccaagaggcctgccatcctgacctaccatgatgtgggcctgaactacaagagctgcttccagcccctcttccagtttgaggacatgcaggagatcatccagaactttgtgcgggtgcacgtggatgcccctggcatggaggagggcgcccctgtgttccccctgggctaccagtaccccagcctggaccagctggccgacatgatcccctag

SEQ ID NO: 281363 - DNA, 447 bp, Artificial Sequence
  derived and/or modified sequence
atggccgagctgcaggaggtgcagatcacagaggagaagcccctgctgcccggccagaccccagaggccgccaaggaggccgagctggccgcccgcatcctgctggaccagggccagacccacagcgtggagaccccctacggctctgtgaccttcaccgtgtatggcacccccaagcccaagaggcctgccatcctgacctaccatgatgtgggcctgaactacaagagctgcttccagcccctcttccagtttgaggacatgcaggagatcatccagaactttgtgcgggtgcacgtggatgcccctggcatggaggagggcgcccctgtgttccccctgggctaccagtaccccagcctggaccagctggccgacatgatcccctgtgtgctgcagtacctgaacttcagcaccatcattggagtgggcgtgggcgccggctag

SEQ ID NO: 281364 - DNA, 300 bp, Artificial Sequence
  derived and/or modified sequence
atggccgagctgcaggaggtgcagatcacagaggagaagcccctgctgcccggccagaccccagaggccgccaaggaggccgagctggccgcccgcatcctgctggaccagggccagacccacagcgtggagaccccctacggctctgtgaccttcaccgtgtatggcacccccaagcccaagaggcctgccatcctgacctaccatgatgtgggcctgaactacaagagctgcttccagcccctcttccagtttgaggacatgcaggagatcatccagaactttgtgcgggtgcactag

SEQ ID NO: 281365 - DNA, 585 bp, Artificial Sequence
  derived and/or modified sequence
atggccgagctgcaggaggtgcagatcacagaggagaagcccctgctgcccggccagaccccagaggccgccaaggaggccgagctggccgcccgcatcctgctggaccagggccagacccacagcgtggagaccccctacggctctgtgaccttcaccgtgtatggcacccccaagcccaagaggcctgccatcctgacctaccatgatgtgggcctgaactacaagagctgcttccagcccctcttccagtttgaggacatgcaggagatcatccagaactttgtgcgggtgcacgtggatgcccctggcatggaggagggcgcccctgtgttccccctgggctaccagtaccccagcctggaccagctggccgacatgatcccctgtgtgctgcagtacctgaacttcagcaccatcattggagtgggcgtgggcgctggggcctacatcctggcccgctatgccctgaaccacccagacacagtggagggcctggtgctgatcaacatcgaccccaatgccaagggctggatggactgggccgcccacaagctgaccggcctgaccagcagcatcccctag

SEQ ID NO: 281366 - DNA, 660 bp, Artificial Sequence
  derived and/or modified sequence
atggccgagctgcaggaggtgcagatcacagaggagaagcccctgctgcccggccagaccccagaggccgccaaggaggccgagctggccgcccgcatcctgctggaccagggccagacccacagcgtggagaccccctacggctctgtgaccttcaccgtgtatggcacccccaagcccaagaggcctgccatcctgacctaccatgatgtgggcctgaactacaagagctgcttccagcccctcttccagtttgaggacatgcaggagatcatccagaactttgtgcgggtgcacgtggatgcccctggcatggaggagggcgcccctgtgttccccctgggctaccagtaccccagcctggaccagctggccgacatgatcccctgtgtgctgcagtacctgaacttcagcaccatcattggagtgggcgtgggcgctggggcctacatcctggcccgctatgccctgaaccacccagacacagtggagggcctggtgctgatcaacatcgaccccaatgccaagggctggatggactgggccgcccacaagctgaccggcctgaccagcagcatccctgagatgatcctgggccacctgttcagccaggaggagctgagcggcaacagcgagctgatccagaagtacagaaattag

SEQ ID NO: 281367 - DNA, 426 bp, Artificial Sequence
  derived and/or modified sequence
atggccgagctgcaggaggtgcagatcacagaggagaagcccctgctgcccggccagaccccagaggccgccaaggaggccgagctggccgcccgcatcctgctggaccagggccagacccacagcgtggagaccccctacggctctgtgaccttcaccgtgtatggcacccccaagcccaagaggcctgccatcctgacctaccatgatgtgggcctgaactacaagagctgcttccagcccctcttccagtttgaggacatgcaggagatcatccagaactttgtgcgggtgcacgtggatgcccctggcatggaggagggcgcccctgtgttccccctgggctaccagtaccccagcctggaccagctggccgacatgatcccctgtgtgctgcagtacctgaacttcagcaccatcatctag

SEQ ID NO: 281368 - DNA, 357 bp, Artificial Sequence
  derived and/or modified sequence
atggccgagctgcaggaggtgcagatcacagaggagaagcccctgctgcccggccagaccccagaggccgccaaggaggccgagctggccgcccgcatcctgctggaccagggccagacccacagcgtggagaccccctacggctctgtgaccttcaccgtgtatggcacccccaagcccaagaggcctgccatcctgacctaccatgatgtgggcctgaactacaagagctgcttccagcccctcttccagtttgaggacatgcaggagatcatccagaactttgtgcgggtgcacgtggatgcccctggcatggaggagggcgcccctgtgttccccctgggctaccagtactag

SEQ ID NO: 281369 - DNA, 423 bp, Artificial Sequence
  derived and/or modified sequence
atggccgagctgcaggaggtgcagatcacagaggagaagcccctgctgcccggccagaccccagaggccgccaaggaggccgagctggccgcccgcatcctgctggaccagggccagacccacagcgtggagaccccctacggctctgtgaccttcaccgtgtatggcacccccaagcccaagaggcctgccatcctgacctaccatgatgtgggcctgaactacaagagctgcttccagcccctcttccagtttgaggacatgcaggagatcatccagaactttgtgcgggtgcacgtggatgcccctggcatggaggagggcgcccctgtgttccccctgggctaccagtaccccagcctggaccagctggccgacatgatcccctgtgtgctgcagtacctgaacttcagcaccatctag

SEQ ID NO: 281370 - DNA, 522 bp, Artificial Sequence
  derived and/or modified sequence
atggccgagctgcaggaggtgcagatcaccgaggagaagcccctgctgccaggacaaactccagaggccgcaaaggaagccgagcttgctgcccggatcctccttgatcagggtcagactcatagcgtggagactccatatggatcagtcacttttaccgtttacgggaccccgaagccaaaacgccccgcaattctcacctaccacgacgtcggcctcaactacaaatcatgctttcaaccgctgttccagttcgaggatatgcaggagattattcaaaactttgtcagagtccatgttgatgcccctggcatggaagagggtgctccagtcttccctcttggctatcagtacccgtccttggaccagctcgctgatatgatcccttgtgtgctccagtacctcaatttttctaccatcattggggtgggagttggtgcgggggcatacatactggctcggtatgctctgaatcaccctgacaccgtagaaggactcgtcctgatcaatatcgacccgtag

SEQ ID NO: 281371 - DNA, 759 bp, Artificial Sequence
  derived and/or modified sequence
atggccgagctgcaggaggtgcagatcaccgaggagaagcccctgctgccaggacaaacaccagaggctgctaaagaagctgagttagcggcgagaattctcctcgaccagggacagacacactcagttgagaccccttatggatccgtgaccttcaccgtgtatggtactccaaaacctaagaggccagcaatactcacctaccatgacgtaggtctcaattataaatcttgctttcaacctttgtttcagtttgaggatatgcaggagatcatccagaatttcgtgcgcgtccacgtcgatgcccccggaatggaggaaggagcccccgtgttcccactagggtaccaatacccttccctcgaccagctcgccgatatgattccttgcgtcctacagtatctgaatttcagtacaataataggcgtcggggtgggcgccggcgcttacatcctggcccgatacgccctcaaccacccggacacagtagagggactagtgctgattaacatcgacccaaacgcaaagggctggatggactgggcggcccacaagctgacgggactgacatcctccatacccgaaatgattctcggtcatctattttcacaagaggagctgagtggaaactctgagctgatccagaagtacagaaatatcatcactcatgcgcctaacctcgacaacatcgaactttactggaacagctacaacaaccgtagagacttgaacttcgaacgggggggagacatcacatag

SEQ ID NO: 281372 - DNA, 450 bp, Artificial Sequence
  derived and/or modified sequence
atggccgagctgcaggaggtgcagatcaccgaggagaagcccctgcttccgggccagacccccgaagccgcaaaggaggccgaactagctgcgcggatcctcctggaccaggggcagacacattcagtcgagactccgtacggtagcgtgacctttacagtgtatggcacccctaagccgaaacggcctgcaatcctcacctatcacgacgttgggttgaactacaagtcctgttttcagcctttgtttcagttcgaagacatgcaggagatcatacagaactttgtgcgggtccatgttgacgcccccggaatggaggaaggcgctcctgtctttcctctcggataccagtacccgtctctggaccagctggccgatatgatcccgtgtgtgttgcagtatttgaatttctccaccatcattggcgtgggtgtgggagccggtgcctag

SEQ ID NO: 281373 - DNA, 261 bp, Artificial Sequence
  derived and/or modified sequence
atggccgagctgcaggaggtgcagatcaccgaggagaagcccctgcttcctgggcaaacaccggaagccgcgaaggaagctgagctggccgcgcgtatcctgcttgatcaaggacaaactcactcagtggagaccccttacgggagcgtcaccttcaccgtttacggaactccaaagccgaagcgacctgctattctgacctatcatgacgtcggactgaactacaaatcctgtttccagcccttgtttcaatttgaatag

SEQ ID NO: 281374 - DNA, 390 bp, Artificial Sequence
  derived and/or modified sequence
atggccgagctgcaggaggtgcagatcaccgaggagaagcccctgttgcctggacagactccagaggccgcaaaagaagcagaactagccgccaggatcctgctggatcagggacaaacgcattctgtggaaaccccctacggatctgttactttcaccgtatatggaacccctaagcccaagagacctgccatactgacatatcacgacgtgggactgaactataagtcctgttttcagcctcttttccagttcgaggacatgcaggagataatccagaactttgtcagggtgcacgtggacgcacctggaatggaagagggggcaccagtcttccccctcgggtatcagtacccctccctagaccagctcgccgacatgatcccgtag

SEQ ID NO: 281375 - DNA, 447 bp, Artificial Sequence
  derived and/or modified sequence
atggccgagctgcaggaggtgcagatcaccgaggagaagcccctgctacctggacagacacccgaggccgctaaggaggcagaactcgccgctcggattttgcttgatcaggggcagacccactctgtcgaaactccatatgggagcgtcacatttaccgtctacgggacccccaagcccaagcggcctgcaattcttacataccatgacgtcgggcttaattataagagttgcttccagcctctgttccagttcgaggatatgcaggagattatccaaaacttcgttcgcgtccacgtggacgccccaggaatggaggagggggcacctgtgtttccactgggataccagtatcccagcctcgaccagctggcagacatgattccttgtgtgctacaatacttgaatttcagtactattatcggcgtcggggttggagccggctag

SEQ ID NO: 281376 - DNA, 300 bp, Artificial Sequence
  derived and/or modified sequence
atggccgagctgcaggaggtgcagatcaccgaggagaagcccctgctgccaggccaaacccccgaagccgccaaggaagccgagctcgctgccaggattctgctggaccaaggccagactcatagcgtggagaccccctatggcagcgtaacctttacagtgtatgggactcctaagcctaaacggcctgcaatcttgacataccatgatgtcggactgaactataaatcatgctttcagccacttttccagtttgaagatatgcaagaaattatacaaaatttcgtgagggttcattag

SEQ ID NO: 281377 - DNA, 585 bp, Artificial Sequence
  derived and/or modified sequence
atggccgagctgcaggaggtgcagatcaccgaggagaagcccctgctcccaggacagactcccgaggccgcaaaggaagcagaactcgctgcacgaattttgctcgatcagggacagacacattccgtagaaactccgtatggatcagtgaccttcacggtatatggcacacctaagcctaagaggcccgccatccttacctatcacgacgtcggactgaattataaaagctgctttcaacctctcttccaattcgaggatatgcaggagatcatccagaatttcgtccgcgtacatgtagacgcccctggtatggaagaaggcgcgccagtgttccccctgggttatcagtacccatctttagatcagttagccgatatgattccctgcgtactgcaatacttaaatttctccacaatcattggcgtgggagtgggggcgggtgcgtatatcctggctaggtacgcactgaaccaccccgacactgttgagggtctggttcttattaacatagaccccaacgcaaaagggtggatggactgggccgctcataaactgactggccttacttcgagcattccatag

SEQ ID NO: 281378 - DNA, 660 bp, Artificial Sequence
  derived and/or modified sequence
atggccgagctgcaggaggtgcagatcaccgaggagaagcccctgttgcctggtcagacacctgaagccgccaaggaagctgagctcgcggctcgcattttgctcgatcagggccagacacactcggtcgagactccctatggttccgtaactttcaccgtttatggaacgcctaaacctaagagaccagccattctcacataccatgatgtcggcctaaactacaaatcatgctttcaacccctctttcagttcgaagatatgcaggaaattatccagaatttcgtgcgggtccacgtggacgcgcctgggatggaggagggcgctcccgtgtttcctctcggctatcagtacccttccctggatcagctcgccgacatgattccttgcgtgctgcagtatctgaatttttctactattataggtgtgggtgtgggcgcaggtgcttacatcttagcacgctacgcccttaatcaccccgacacagtagaaggattggtcctaataaatattgatcctaatgccaaaggctggatggattgggcagctcacaaacttactgggttgacctctagcatacccgaaatgatactcggccatctgttcagtcaggaggagctatctggcaattctgagctaattcagaaatatagaaactag

SEQ ID NO: 281379 - DNA, 426 bp, Artificial Sequence
  derived and/or modified sequence
atggccgagctgcaggaggtgcagatcaccgaggagaagcccctgctgcctggccagacccctgaggcagcaaaggaggccgaactggctgcacggatactgctggaccagggacaaacccacagtgttgagacaccttatgggagcgtaacatttaccgtgtacgggactccgaagcccaagcgtccagctatactgacttaccatgatgtcgggctaaactacaagtcctgttttcaaccattatttcagtttgaagacatgcaggagatcatccagaatttcgtcagagtgcatgtggacgctcccggaatggaagagggagccccagtcttccccctcgggtaccagtacccatctctggaccagctggctgacatgataccttgcgtcctacagtatcttaatttctctaccataatctag

SEQ ID NO: 281380 - DNA, 357 bp, Artificial Sequence
  derived and/or modified sequence
atggccgagctgcaggaggtgcagatcaccgaggagaagcccctgctgcccggccagacacctgaggcagctaaggaggcagaacttgccgcgcgcattctcctcgaccagggccagacacatagcgttgagactccctacggatctgtgacgttcacagtctatggtacccccaagcccaaacgcccagctatcctgacttaccacgacgtcgggctgaactataaatcctgcttccagcccttatttcagttcgaagacatgcaggaaattattcagaacttcgttagggtgcatgtcgacgcccctggaatggaagagggggctcctgtcttcccactcgggtaccaatactag

SEQ ID NO: 281381 - DNA, 423 bp, Artificial Sequence
  derived and/or modified sequence
atggccgagctgcaggaggtgcagatcaccgaggagaagcccctgctgccaggacagacccctgaggctgctaaagaggccgaacttgccgcaaggattcttctagatcagggacagacacactctgttgagacaccttatggttctgtcacgtttaccgtgtacggaactcccaagccaaagcggcctgcaatcttgacttaccacgacgtggggctcaactataagtcctgcttccagcctctgtttcagtttgaagacatgcaggagattatacaaaatttcgttagagtgcatgttgacgcccccggtatggaggaaggcgctcctgtgtttccccttggataccaatacccatcacttgatcagctggccgacatgataccctgcgttctacagtaccttaatttttctaccatatag

SEQ ID NO: 281382 - DNA, 943 bp, Artificial Sequence
  derived and/or modified sequence
ttttggtaccctgtcctttagaatactcagtcactgagctacaagtttcactccctacctgagagtgtggggtggcccctaaatatagcccgagaaatctgagctacacttctgccccaccctggtattttggtccagggcagaggagggaggggtctggaggtgtggtgttgagggtggcagtggggatggtgagtatcaagagaagggctgtcctgattcctcttccaaagcttccaccgatcagcctggaaacggagctgggggcaggaaaggccctctgtgtgttctagagtagtcttcaacccctgggtccctctgttccctgcatcttcctgtgctgagagaggaagcctggtgtttgaggcgatgtggggatgtagagacaacttcccagtctcatttcctcatcctgccaggccaccatggcggagctgcaggaggtgcagatcacagaggagaagccactgttgccaggacagacgcctgaggcggccaaggaggctgagttagctgcccgaatcctcctggaccagggacagactcactctgtggagacaccatacggctctgtcactttcactgtctatggcacccccaaacccaaacgcccagcgatccttacctaccacgatgtgggactcaactataaatcttgcttccagccactgtttcagttcgaggacatgcaggaaatcattcagaactttgtgcgggttcatgtggatgcccctggaatggaagagggagcccctgtgttccctttgggatatcagtacccatctctggaccagcttgcagacatgatcccttgcgtcctgcagtacctaaatttctctacaataattggagttggtgttggagctggagcctacatcctggcgagatatgctcttaaccacccggacactgttgaaggtcttgtcctcatcaacattgatcc

SEQ ID NO: 281383 - DNA, 848 bp, Artificial Sequence
  derived and/or modified sequence
gcggccgcggcggcagcagaccccagagtcagaaggagtgagaaccctgacccctaatcccactgcatccagccaataggagcccagccaccatggcggagctgcaggaggtgcagatcacagaggagaagccactgttgccaggacagacgcctgaggcggccaaggaggctgagttagctgcccgaatcctcctggaccagggacagactcactctgtggagacaccatacggctctgtcactttcactgtctatggcacccccaaacccaaacgcccagcgatccttacctaccacgatgtgggactcaactataaatcttgcttccagccactgtttcagttcgaggacatgcaggaaatcattcagaactttgtgcgggttcatgtggatgcccctggaatggaagagggagcccctgtgttccctttgggatatcagtacccatctctggaccagcttgcagacatgatcccttgcgtcctgcagtacctaaatttctctacaataattggagttggtgttggagctggagcctacatcctggcgagatatgctcttaaccacccggacactgttgaaggtcttgtcctcatcaacattgatcccaatgccaagggttggatggattgggcagcccacaagctaacaggcctcacctcttccattccggagatgatccttggacatcttttcagccaggaagagctctctggaaattctgagttgatacaaaagtacagaaatatcattacacatgcacccaacctggataacattgaattgtactggaacagctacaacaaccgccgagacctgaactttgagcgtggaggtgatatcacc

SEQ ID NO: 281384 - DNA, 565 bp, Artificial Sequence
  derived and/or modified sequence
accccagagtcagaaggagtgagaaccctgacccctaatcccactgcatccagccaataggagcccagtaagtgaccccaccccgcaggctgcaggctccttcctgtgcaggccaccatggcggagctgcaggaggtgcagatcacagaggagaagccactgttgccaggacagacgcctgaggcggccaaggaggctgagttagctgcccgaatcctcctggaccagggacagactcactctgtggagacaccatacggctctgtcactttcactgtctatggcacccccaaacccaaacgcccagcgatccttacctaccacgatgtgggactcaactataaatcttgcttccagccactgtttcagttcgaggacatgcaggaaatcattcagaactttgtgcgggttcatgtggatgcccctggaatggaagagggagcccctgtgttccctttgggatatcagtacccatctctggaccagcttgcagacatgatcccttgcgtcctgcagtacctaaatttctctacaataattggagttggtgttggagctggagcct

SEQ ID NO: 281385 - DNA, 554 bp, Artificial Sequence
  derived and/or modified sequence
agcaaagagaggagaggtaccaggactctgggcacgagggagtcggaactcctgcgccctcgacgttcccccgtgccccctttcggcgccagcacacctgcccctgccagccggcgagacccccgcctcctcagcggcggtcccgcccacctcctcctttcttaatctagttctctgtgttcgggcggggggagtcgaactcgtggggtgtcagtatcccggaccccagagtcagaaggagtgagaaccctgacccctaatcccactgcatccagccaataggagcccagccaccatggcggagctgcaggaggtgcagatcacagaggagaagccactgttgccaggacagacgcctgaggcggccaaggaggctgagttagctgcccgaatcctcctggaccagggacagactcactctgtggagacaccatacggctctgtcactttcactgtctatggcacccccaaacccaaacgcccagcgatccttacctaccacgatgtgggactcaactataaatcttgcttccagccactgtttcagttcgagg

SEQ ID NO: 281386 - DNA, 583 bp, Artificial Sequence
  derived and/or modified sequence
cccacctccccgccttgttgtccaacttctcccggagcagccggagagcaggcgtcgggacgcagcaaagagaggagagaccccagagtcagaaggagtgagaaccctgacccctaatcccactgcatccagccaataggagcccagtaagtgaccccaccccgcaggctgcaggctccttcctgtgcaggccaccatggcggagctgcaggaggtgcagatcacagaggagaagccactgttgccaggacagacgcctgaggcggccaaggaggctgagttagctgcccgaatcctcctggaccagggacagactcactctgtggagacaccatacggctctgtcactttcactgtctatggcacccccaaacccaaacgcccagcgatccttacctaccacgatgtgggactcaactataaatcttgcttccagccactgtttcagttcgaggacatgcaggaaatcattcagaactttgtgcgggttcatgtggatgcccctggaatggaagagggagcccctgtgttccctttgggatatcagtacccatctctggaccagcttgcagacatgatccct

SEQ ID NO: 281387 - DNA, 587 bp, Artificial Sequence
  derived and/or modified sequence
atattgattccggctcgagcctagagaggacgtgttctctggacttaggggtagacagacactggggaggaccccagagtcagaaggagtgagaaccctgacccctaatcccactgcatccagccaataggagcccagccaccatggcggagctgcaggaggtgcagatcacagaggagaagccactgttgccaggacagacgcctgaggcggccaaggaggctgagttagctgcccgaatcctcctggaccagggacagactcactctgtggagacaccatacggctctgtcactttcactgtctatggcacccccaaacccaaacgcccagcgatccttacctaccacgatgtgggactcaactataaatcttgcttccagccactgtttcagttcgaggacatgcaggaaatcattcagaactttgtgcgggttcatgtggatgcccctggaatggaagagggagcccctgtgttccctttgggatatcagtacccatctctggaccagcttgcagacatgatcccttgcgtcctgcagtacctaaatttctctacaataattggagttggtgttggagctgga

SEQ ID NO: 281388 - DNA, 571 bp, Artificial Sequence
  derived and/or modified sequence
agggggaggggcaggcgaggggccgtagggcctggaaggcgccagccgggccggcgggcggtgtgattgatccgcgtcccctggagctggaggctcgggggaaagggccagcacggagcgggcgctcggttgctgcgcacaaaggctgaggctccaagagctgcagggcgtgtttggggtgcgcgcgaggttgtgtgcaagaccccagagtcagaaggagtgagaaccctgacccctaatcccactgcatccagccaataggagcccagccaccatggcggagctgcaggaggtgcagatcacagaggagaagccactgttgccaggacagacgcctgaggcggccaaggaggctgagttagctgcccgaatcctcctggaccagggacagactcactctgtggagacaccatacggctctgtcactttcactgtctatggcacccccaaacccaaacgcccagcgatccttacctaccacgatgtgggactcaactataaatcttgcttccagccactgtttcagttcgaggacatgcaggaaatcattcagaactttgtgcgggttcat

SEQ ID NO: 281389 - DNA, 775 bp, Artificial Sequence
  derived and/or modified sequence
agcaggtagggggaggggcaggcgaggggccgtagggcctggaaggcgccagccgggccggcgggcggtgtgattgatccgcgtcccctggagctggaggctcgggggaaagggccagcacggagcgggcgctcggttgctgcgcacaaaggctgaggctccaagagctgcagggcgtgtttggggccaccatggcggagctgcaggaggtgcagatcacagaggagaagccactgttgccaggacagacgcctgaggcggccaaggaggctgagttagctgcccgaatcctcctggaccagggacagactcactctgtggagacaccatacggctctgtcactttcactgtctatggcacccccaaacccaaacgcccagcgatccttacctaccacgatgtgggactcaactataaatcttgcttccagccactgtttcagttcgaggacatgcaggaaatcattcagaactttgtgcgggttcatgtggatgcccctggaatggaagagggagcccctgtgttccctttgggatatcagtacccatctctggaccagcttgcagacatgatcccttgcgtcctgcagtacctaaatttctctacaataattggagttggtgttggagctggagcctacatcctggcgagatatgctcttaaccacccggacactgttgaaggtcttgtcctcatcaacattgatcccaatgccaagggttggatggattgggcagcccacaagctaacaggcctcacctcttccattccgga

SEQ ID NO: 281390 - DNA, 924 bp, Artificial Sequence
  derived and/or modified sequence
cgcggcggcagcaggtagggggaggggcaggcgaggggccgtagggcctggaaggcgccagccgggccggcgggcggtgtgattgatccgcgtcccctggagctggaggctcgggggaaagggccagcacggagcgggcgctcggttgctgcgcacaaaggctgaggctccaagagctgcagggcgtgtttgggaccccagagtcagaaggagtgagaaccctgacccctaatcccactgcatccagccaataggagcccagccaccatggcggagctgcaggaggtgcagatcacagaggagaagccactgttgccaggacagacgcctgaggcggccaaggaggctgagttagctgcccgaatcctcctggaccagggacagactcactctgtggagacaccatacggctctgtcactttcactgtctatggcacccccaaacccaaacgcccagcgatccttacctaccacgatgtgggactcaactataaatcttgcttccagccactgtttcagttcgaggacatgcaggaaatcattcagaactttgtgcgggttcatgtggatgcccctggaatggaagagggagcccctgtgttccctttgggatatcagtacccatctctggaccagcttgcagacatgatcccttgcgtcctgcagtacctaaatttctctacaataattggagttggtgttggagctggagcctacatcctggcgagatatgctcttaaccacccggacactgttgaaggtcttgtcctcatcaacattgatcccaatgccaagggttggatggattgggcagcccacaagctaacaggcctcacctcttccattccggagatgatccttggacatcttttcagccaggaagagctctctggaaattctgagttgatacaaaagtacagaaat

SEQ ID NO: 281391 - DNA, 635 bp, Artificial Sequence
  derived and/or modified sequence
cttaatctagttctctgtgttcgggcggggggagtcgaactcgtggggtgtcagtatcccgggttcgtctccccactaccggttcccaccactgagtctgggggcgaaggaaggagccagagtgcaattgcagatccagaccccagagtcagaaggagtgagaaccctgacccctaatcccactgcatccagccaataggagcccagccaccatggcggagctgcaggaggtgcagatcacagaggagaagccactgttgccaggacagacgcctgaggcggccaaggaggctgagttagctgcccgaatcctcctggaccagggacagactcactctgtggagacaccatacggctctgtcactttcactgtctatggcacccccaaacccaaacgcccagcgatccttacctaccacgatgtgggactcaactataaatcttgcttccagccactgtttcagttcgaggacatgcaggaaatcattcagaactttgtgcgggttcatgtggatgcccctggaatggaagagggagcccctgtgttccctttgggatatcagtacccatctctggaccagcttgcagacatgatcccttgcgtcctgcagtacctaaatttctctacaataatt

SEQ ID NO: 281392 - DNA, 580 bp, Artificial Sequence
  derived and/or modified sequence
gtcctacccatcccttcccgatggcgcttgccttcgcgggccgtcgggggagaacgggagaagattgtgggaccgctctcctctccctttctccactcgtgggacctacacggagactgagtagaggagagaagcgacggcaccaatctttgtaccccagagtcagaaggagtgagaaccctgacccctaatcccactgcatccagccaataggagcccagccaccatggcggagctgcaggaggtgcagatcacagaggagaagccactgttgccaggacagacgcctgaggcggccaaggaggctgagttagctgcccgaatcctcctggaccagggacagactcactctgtggagacaccatacggctctgtcactttcactgtctatggcacccccaaacccaaacgcccagcgatccttacctaccacgatgtgggactcaactataaatcttgcttccagccactgtttcagttcgaggacatgcaggaaatcattcagaactttgtgcgggttcatgtggatgcccctggaatggaagagggagcccctgtgttccctttgggatatcagtac

SEQ ID NO: 281393 - DNA, 583 bp, Artificial Sequence
  derived and/or modified sequence
gagtcaaaggcaagtgaaggtggaagcggccgcggcggcagcagaccccagagtcagaaggagtgagaaccctgacccctaatcccactgcatccagccaataggagcccagtaagtgaccccaccccgcaggctgcaggctccttcctgtgcaggccaccatggcggagctgcaggaggtgcagatcacagaggagaagccactgttgccaggacagacgcctgaggcggccaaggaggctgagttagctgcccgaatcctcctggaccagggacagactcactctgtggagacaccatacggctctgtcactttcactgtctatggcacccccaaacccaaacgcccagcgatccttacctaccacgatgtgggactcaactataaatcttgcttccagccactgtttcagttcgaggacatgcaggaaatcattcagaactttgtgcgggttcatgtggatgcccctggaatggaagagggagcccctgtgttccctttgggatatcagtacccatctctggaccagcttgcagacatgatcccttgcgtcctgcagtacctaaatttctctacaataat

SEQ ID NO: 281394 - DNA, 522 bp, Artificial Sequence
  derived and/or modified sequence
atggccgaactgcaggaagtgcaaatcacagaggaaaagcccctgttacccggtcagacgcctgaggctgctaaggaggcggagctcgcagccaggatcttactggatcagggccaaactcatagcgttgagacaccatacggatctgtgactttcacggtttatggcacgcccaagcccaaaagacctgccattctcacataccatgacgtggggctcaattacaagtcttgttttcagcccttatttcagtttgaagacatgcaggagattatccagaattttgtgcgcgtgcatgtggatgctccaggaatggaggaaggggctccagtgtttcctctgggataccagtatccgtccctggatcagcttgcagatatgattccatgcgtgctccagtacctcaatttcagtacgattattggggtaggcgttggggcaggcgcttacattctggctaggtacgcactcaatcatcccgacactgtagaaggccttgtgttgatcaatattgatccatag

SEQ ID NO: 281395 - DNA, 759 bp, Artificial Sequence
  derived and/or modified sequence
atggcagagctccaagaggtgcagattaccgaggagaaacccctgttgccaggccagactccagaagcagcgaaggaggcggagctggccgctaggatcctgctggatcagggccagacccatagcgtggagacaccttacggcagtgtgactttcacagtgtatgggacgcctaaaccgaagcgcccagcaatactcacttaccatgatgttgggctgaattataaaagctgtttccaacctcttttccagttcgaggatatgcaggaaatcatccagaacttcgtccgggtacatgtggatgcaccaggaatggaggagggggctcccgtgtttccgttaggataccagtatccttcactggatcagttggcagacatgattccttgcgtgctgcaatacctgaacttctcgacaataattggagtcggcgttggagccggagcttacattctagccaggtatgctctgaaccatcctgatactgtcgagggactggttctgattaacatcgaccccaacgcaaagggttggatggactgggcagctcacaagctcactggcctaactagttccatcccagagatgatcctcggacaccttttcagccaggaagagctctcagggaatagcgagctcattcagaagtaccgaaacattatcacacatgcccctaacctcgacaatatcgagctctactggaactcttacaacaaccggagggacttaaacttcgagcgcggaggtgacataacttag

SEQ ID NO: 281396 - DNA, 450 bp, Artificial Sequence
  derived and/or modified sequence
atggccgagctgcaggaagtacaaattactgaagagaagccactcctccccggacaaactcctgaagccgcaaaagaggctgagttggctgcccgaattcttctagatcagggccagacccacagcgtggaaaccccttacggttctgtgaccttcactgtgtacggcacacctaaaccgaagagacctgctatcttaacctaccacgatgtgggtctcaattacaaatcttgttttcaaccactgtttcagttcgaggacatgcaagagattatccagaatttcgtgcgcgtacatgtcgacgcacccggtatggaggaaggagcccctgtctttcctcttggatatcagtacccgagcctggaccagctagccgacatgattccatgcgtgcttcaatatttgaatttcagtacgattattggcgtgggtgtgggtgcaggagcctag

SEQ ID NO: 281397 - DNA, 261 bp, Artificial Sequence
  derived and/or modified sequence
atggccgagctgcaggaagtccagattaccgaggagaagcccttgctgcccggtcaaacacccgaagctgccaaagaggccgagctggccgctcggattctgctcgaccaggggcagactcacagtgtggagactccatatggttccgtgaccttcaccgtatatggcacacccaagcctaaaagacctgcaatcttgacctaccacgacgtgggactcaattacaagtcgtgctttcagccactcttccagttcgaatag

SEQ ID NO: 281398 - DNA, 390 bp, Artificial Sequence
  derived and/or modified sequence
atggctgagctgcaagaagtgcagatcactgaagagaagccattattacctgggcagactcctgaggcggctaaggaggctgagttggcggcacgcatactcctggatcagggccagacccacagcgtcgagaccccctatggttctgtaacgttcaccgtctatggcacaccaaagcccaaaaggcctgcaattttaacgtatcacgacgtgggtctgaattataagtcctgtttccagcctctcttccagtttgaggatatgcaagaaatcattcagaactttgttcgcgtgcacgtggacgcacctgggatggaagagggagcgccagtgtttccactgggctatcagtacccatccctggaccagctggctgacatgatcccttag

SEQ ID NO: 281399 - DNA, 447 bp, Artificial Sequence
  derived and/or modified sequence
atggctgaactgcaagaggttcagatcaccgaggaaaagcctctcctaccaggtcaaactccggaggctgccaaagaggctgaactggcggctcgaatcttactagaccagggccagacacactctgtcgagacaccctatggttccgtcactttcactgtgtacggcacccccaagcctaaacgccctgccattttaacctaccatgatgtgggcctgaactataagtcgtgtttccagccccttttccagtttgaggacatgcaggagattatccaaaactttgtgagggtccatgtggacgcccctgggatggaagaaggggctccagtgttcccactgggataccagtatcctagcttggaccagttggctgatatgattccatgcgtgcttcagtacctgaacttttcaaccattatcggtgtgggcgttggcgctggttag

SEQ ID NO: 281400 - DNA, 300 bp, Artificial Sequence
  derived and/or modified sequence
atggcggaactgcaggaggtgcaaatcaccgaggagaagccgttgttgccaggccaaaccccggaagccgctaaggaagcagagctggccgctagaattctccttgatcaaggacagacacattcagtcgaaaccccctacggcagcgtgacttttacagtttatggcacaccgaagccaaagcgaccggcaattctgacataccatgacgttgggctcaactacaagtcatgcttccagcctctatttcaattcgaggacatgcaggaaattatacagaactttgtaagggttcactag

SEQ ID NO: 281401 - DNA, 585 bp, Artificial Sequence
  derived and/or modified sequence
atggctgagttacaggaggtacagattacagaggagaaaccacttttgccagggcagactcctgaggccgcaaaggaagctgagctggccgcacggattctgctggaccagggccagactcacagtgtggaaactccttatgggtctgtgacgttcacagtgtacggaacgcccaagccaaagcggcctgctatactcacgtaccatgacgtgggccttaactataaaagttgttttcaaccgctgttccaatttgaagatatgcaagagattattcagaacttcgtaagggtccatgtggatgcacctggcatggaagaaggcgcacccgtatttccattgggataccagtacccctcactcgaccaactggctgacatgataccctgcgtgttgcagtaccttaacttcagtaccataattggtgttggcgtgggagcaggtgcatatatccttgcccgatacgccctgaatcacccagatacggtcgagggcctggttcttatcaatattgatccaaacgcgaaagggtggatggattgggccgcacataagctcaccggcctgactagctctatcccctag

SEQ ID NO: 281402 - DNA, 660 bp, Artificial Sequence
  derived and/or modified sequence
atggccgaactgcaagaagttcagatcaccgaggaaaagccattgttgcctggacagactccggaggctgccaaggaggccgagttggcagcccgaatcctgcttgaccaggggcagacgcattctgttgaaaccccatacggttccgtaacctttacagtgtatgggacaccaaaacccaaacgcccagcaatcctgacctatcatgatgtcggactcaattacaaaagctgtttccagccgctgtttcagttcgaggatatgcaggagataatccagaactttgtaagagtacacgtcgatgccccaggcatggaagagggggcaccggtgtttcccctgggctatcagtatcccagtttagatcagctggctgacatgatcccctgcgtgttacagtatctcaactttagtaccatcatcggcgtgggcgtgggggctggagcctacatcctcgccaggtatgccctgaatcaccctgacacggtagaggggcttgtgcttattaacattgaccctaacgcgaagggctggatggactgggctgcccataaactaacaggtctgacctcaagcataccggagatgatcttgggccacctgtttagtcaggaggaactatcgggaaatagtgaactgatccaaaagtacaggaattag

SEQ ID NO: 281403 - DNA, 426 bp, Artificial Sequence
  derived and/or modified sequence
atggcagaactgcaggaggtacagatcacagaggagaagcctctgttgcctgggcagacgcctgaagccgcaaaggaggccgagctggccgcaagaatcctcctagaccaaggccaaacacactcagtagaaactccatacgggagcgttacctttacagtatacggaacccctaagccgaaacgaccagcaatcctgacttatcatgatgtgggactgaattacaaatcctgtttccagccattgttccagttcgaggatatgcaggagatcattcaaaacttcgtgcgtgtgcacgtcgacgctcccggaatggaggaaggggcacctgtttttcctctaggctaccagtacccctctttggatcaattagcagacatgattccctgtgtgcttcaatacttaaacttctccactatcatctag

SEQ ID NO: 281404 - DNA, 357 bp, Artificial Sequence
  derived and/or modified sequence
atggccgagctgcaggaagtgcaaatcaccgaagagaagccgctgcttcctgggcagacccctgaggcagccaaggaggctgaactggcagctcggattcttctggaccaagggcagacacactccgtggagactccctacggtagcgtgacgttcaccgtgtatggaacacccaagcctaaacggccagccatactcacttaccatgacgtgggactgaactataagtcttgctttcaacccctgttccagttcgaagacatgcaggaaatcatccagaactttgtgagagtgcatgtggatgcaccaggcatggaggagggcgcaccagtctttcccctggggtatcaatattag

SEQ ID NO: 281405 - DNA, 423 bp, Artificial Sequence
  derived and/or modified sequence
atggccgagctgcaagaggtgcagattaccgaggagaaacctctcctccctggacagaccccggaggccgcaaaagaggcagaattggccgcaagaatactcctcgaccagggccagacacattcagtggagaccccatatggatcggtgacattcactgtatacggcaccccgaaacctaagcggccagctatacttacttatcacgacgtgggactgaattataaaagctgcttccagccactttttcagtttgaagatatgcaagaaatcatacagaatttcgtccgcgtccatgtcgatgctccaggcatggaggagggtgcaccagtatttccactcgggtatcagtacccaagtctggatcagttggccgatatgataccttgtgtattacagtacctgaacttctcgacaatttag

SEQ ID NO: 281406 - protein, 593 aa, Artificial Sequence
  derived and/or modified sequence
MEKLSALQEQKGELRKRLSYTTHKLEKLETEFDSTRHYLEIELRRAQEELEKVTEKLRRIQSNYMALQRINQELEDKLYRMGQHYEEEKRALSHEIVALNSHLLEAKVTIDKLSEDNELYRKDCNLAAQLLQCSQTYGRVHKVSELPSDFQERVSLHMEKHGCSLPSPLCHPAYADSVPTCVIAKVLEKPDPASLSSRLSDASARDLAFCDGVEKPGPRPPYKGDIYCSDTALYCPEERRRDRRPSVDAPVTDVGFLRAQNSTDSAAEEEEEAEAAAFPAGFQHEAFPSYAGSLPTSSSYSSFSATSEEKEHAQASTLTASQQAIYLNSRDELFDRKPPATTYEGSPRFAKATAAVAAPLEAEVAPGFGRTMSPYPAETFRFPASPGPQQALMPPNLWSLRAKPGTARLPGEDMRGQWRPLSVEDIGAYSYPVSAAGRASPCSFSERYYGGAGGSPGKKADGRASPLYASYKADSFSEGDDLSQGHLAEPCFLRAGGDLSLSPGRSADPLPGYAPSEGGDGDRLGVQLCGTASSPEPEQGSRDSLEPSSMEASPEMHPAARLSPQQAFPRTGGSGLSRKDSLTKAQLYGTLLN

SEQ ID NO: 281407 - protein, 288 aa, Artificial Sequence
  derived and/or modified sequence
MEKLSALQEQKGELRKRLSYTTHKLEKLETEFDSTRHYLEIELRRAQEELEKVTEKLRRIQSNYMALQRINQELEDKLYRMGQHYEEEKRALSHEIVALNSHLLEAKVTIDKLSEDNELYRKDCNLAAQLLQCSQTYGRVHKVSELPSDFQERVSLHMEKHGCSLPSPLCHPAYADSVPTCVIAKVLEKPDPASLSSRLSDASARDLAFCDGVEKPGPRPPYKGDIYCSDTALYCPEERRRDRRPSVDAPVTDVGFLRAQNSTDSAAEEEEEAEAAAFPAGFQHEAFP

SEQ ID NO: 281408 - DNA, 2744 bp, Artificial Sequence
  derived and/or modified sequence
gcggcgccgggcttcccacggacggggccccgcggggttgcccggccgtgcccgctgtgcccggctctgcccggcgcggccgcggagcgcacgcctcctgcctgctgaccctctcgtttggtttctcgcaggcctctgccgcagacatggagaaactcagcgcgctgcaggagcagaagggcgagctgcgcaagcggctgtcctacaccacacacaagctcgagaagctcgagaccgagttcgactccacgcgccactacctggagatcgagctgcggcgcgcgcaggaggaactggagaaggtcacggagaagctgcgcaggattcagagcaactacatggcactgcagaggatcaaccaggagctggaggacaagctgtaccgcatgggccagcactatgaggaggagaagcgtgcgctgagccacgagattgttgccctcaacagccatctgctagaagccaaggtgaccatcgacaagctgtcagaggacaacgagctctataggaaggactgcaatctagcggcccagctgctgcagtgcagccagacctacggcagggtccacaaggtgtctgagctgccctcggatttccaggagcgcgtgagcctgcacatggagaagcacggctgcagcctgccatccccgctctgccacccggcctacgccgacagcgtccccacctgcgtcattgccaaggtgctggagaagccggaccccgccagcctgtcctcccgcctgtccgatgcctccgcccgcgacctggccttctgcgacggggtggagaaaccaggcccgcggcccccctacaagggagacatctactgcagtgacacagccctctactgcccggaggagcggcggcgagaccggcggcctagcgtggacgcgcccgtgaccgacgtgggcttcctgcgggcccagaactccactgacagcgcggccgaggaggaggaggaggccgaggcggcggccttcccggcgggcttccagcatgaggccttccccagctacgcaggctcactgcccacgtccagctcctactccagcttcagcgccacgtcggaggagaaggagcacgcgcaggccagcacgctgaccgcgtcgcagcaggccatctacctgaacagccgcgacgagctcttcgaccgcaagccacccgccaccacctacgagggcagccctcgctttgccaaggccacggccgcggtggcggccccgctggaggccgaagtggccccaggcttcgggcggaccatgtcaccgtacccggccgagaccttccgcttcccggcctctccgggtccccagcaggccctgatgcccccaaacctgtggagcctgcgggccaagccggggaccgcccggctccccggggaggacatgaggggccagtggcgtcccctgagcgtggaggacatcggcgcctactcctaccccgtgagcgctgccggccgcgcctcaccctgcagcttctctgaacgctactacggcggggccgggggcagcccgggcaagaaggccgacggccgcgccagcccgctctacgccagctacaaggccgacagcttctccgagggggacgacctctcccagggccacctggcagagccctgcttcctgcgggcgggcggcgacctgagcctcagtcccggccgctcggctgacccactgcccggctatgcacccagcgaggggggggacggggacaggctcggggtgcagctgtgtgggaccgccagcagccctgagcccgagcagggttccagggactccttggagccgagctccatggaggcctccccggaaatgcatcctgccgcccgcctcagcccccagcaggcctttccgcggactggtggctcggggctgagccgcaaggacagcctcaccaaggcccagctctacggaaccttgctcaactgagcgcctgcgtgcaggcctggccgtggttcgctccccgccagcccacgtgccccagaagggccggcctcacctctccccagcccccgctgttcccctgccccggccaacaacgaggagtctgttcctccccgcacctcctctcctccccagccctgtaggcctgaggggagggtcccccacaccacggtgtccacccggccccggcccgtggaactccacttagagcgtttttcacgcgtccttcccccatgtgagaggagcatccccccttttataaagcgaaactatttttatagagaaaaagggtctttcttaacgcacttggcctccagctccctggacggctgccttggcgttttcaacacaaagctcctttattttttgggcgagggtgcgtggggcctgccccttggaagggaagggaaggacggtgtcctgtggagaccagactctgcaagtggggagaccacccccgcaagccagtgacaagggagccctgaagttgtgtccacgaagagggagctgaaacaaattcggggctatgaagtgttttaaaaatccattcttcgcagtgtggccaccacaccgccctgagccctcccacggcccatcgtcccgggtgggccgggatgatgccccagtgcggccggtgctcatctccgcccccgggtccgccccctgacaccgtcttactctacctcagacatgaggaggccctccattcctggtttctgtagcttgcattcttgttgtctctgatgcatgccctgccagttagtactgtattttgcattcattaataaaagacaccggtgg

SEQ ID NO: 281409 - DNA, 1010 bp, Artificial Sequence
  derived and/or modified sequence
ccaggaggggaaagggccaggaaagacaggctccagtgccgtaggatccaggcatgcactgtccgtgtttattgagcgcctgctgtatgctgggacctagcatgagaagcgctgtcatggggacccggaaaggcctctgccgcagacatggagaaactcagcgcgctgcaggagcagaagggcgagctgcgcaagcggctgtcctacaccacacacaagctcgagaagctcgagaccgagttcgactccacgcgccactacctggagatcgagctgcggcgcgcgcaggaggaactggagaaggtcacggagaagctgcgcaggattcagagcaactacatggcactgcagaggatcaaccaggagctggaggacaagctgtaccgcatgggccagcactatgaggaggagaagcgtgcgctgagccacgagattgttgccctcaacagccatctgctagaagccaaggtgaccatcgacaagctgtcagaggacaacgagctctataggaaggactgcaatctagcggcccagctgctgcagtgcagccagacctacggcagggtccacaaggtgtctgagctgccctcggatttccaggagcgcgtgagcctgcacatggagaagcacggctgcagcctgccatccccgctctgccacccggcctacgccgacagcgtccccacctgcgtcattgccaaggtgctggagaagccggaccccgccagcctgtcctcccgcctgtccgatgcctccgcccgcgacctggccttctgcgacggggtggagaaaccaggcccgcggcccccctacaagggagacatctactgcagtgacacagccctctactgcccggaggagcggcggcgagaccggcggcctagcgtggacgcgcccgtgaccgacgtgggcttcctgcgggcccagaactccactgacagcgcggccgaggaggaggaggaggccgaggcggcggccttcccggcgggcttccagcatgaggccttccc

SEQ ID NO: 281410 - DNA, 649 bp, Artificial Sequence
  derived and/or modified sequence
gcggcgccgggcttcccacggacggggccccgcggggttgcccggccgtgcccgctgtgcccggctctgcccggcgcggccgcggagcgcacgcctcctgcctgctgaccctctcgtttggtttctcgcaggcctctgccgcagacatggagaaactcagcgcgctgcaggagcagaagggcgagctgcgcaagcggctgtcctacaccacacacaagctcgagaagctcgagaccgagttcgactccacgcgccactacctggagatcgagctgcggcgcgcgcaggaggaactggagaaggtcacggagaagctgcgcaggattcagagcaactacatggcactgcagaggatcaaccaggagctggaggacaagctgtaccgcatgggccagcactatgaggaggagaagcgtgcgctgagccacgagattgttgccctcaacagccatctgctagaagccaaggtgaccatcgacaagctgtcagaggacaacgagctctataggaaggactgcaatctagcggcccagctgctgcagtgcagccagacctacggcagggtccacaaggtgtctgagctgccctcggatttccaggagcgcgtgagcctgcacatggagaagcacggctgcagcctgccatcccc

SEQ ID NO: 281411 - protein, 168 aa, Artificial Sequence
  derived and/or modified sequence
MEKLSALQEQKGELRKRLSYTTHKLEKLETEFDSTRHYLEIELRRAQEELEKVTEKLRRIQSNYMALQRINQELEDKLYRMGQHYEEEKRALSHEIVALNSHLLEAKVTIDKLSEDNELYRKDCNLAAQLLQCSQTYGRVHKVSELPSDFQERVSLHMEKHGCSLPSP

SEQ ID NO: 281412 - DNA, 2674 bp, Artificial Sequence
  derived and/or modified sequence
ctgctttgtctgctgtcccctctctgctggagaacttagcccagagctagtgaacgagcctctgccgcagacatggagaaactcagcgcgctgcaggagcagaagggcgagctgcgcaagcggctgtcctacaccacacacaagctcgagaagctcgagaccgagttcgactccacgcgccactacctggagatcgagctgcggcgcgcgcaggaggaactggagaaggtcacggagaagctgcgcaggattcagagcaactacatggcactgcagaggatcaaccaggagctggaggacaagctgtaccgcatgggccagcactatgaggaggagaagcgtgcgctgagccacgagattgttgccctcaacagccatctgctagaagccaaggtgaccatcgacaagctgtcagaggacaacgagctctataggaaggactgcaatctagcggcccagctgctgcagtgcagccagacctacggcagggtccacaaggtgtctgagctgccctcggatttccaggagcgcgtgagcctgcacatggagaagcacggctgcagcctgccatccccgctctgccacccggcctacgccgacagcgtccccacctgcgtcattgccaaggtgctggagaagccggaccccgccagcctgtcctcccgcctgtccgatgcctccgcccgcgacctggccttctgcgacggggtggagaaaccaggcccgcggcccccctacaagggagacatctactgcagtgacacagccctctactgcccggaggagcggcggcgagaccggcggcctagcgtggacgcgcccgtgaccgacgtgggcttcctgcgggcccagaactccactgacagcgcggccgaggaggaggaggaggccgaggcggcggccttcccggcgggcttccagcatgaggccttccccagctacgcaggctcactgcccacgtccagctcctactccagcttcagcgccacgtcggaggagaaggagcacgcgcaggccagcacgctgaccgcgtcgcagcaggccatctacctgaacagccgcgacgagctcttcgaccgcaagccacccgccaccacctacgagggcagccctcgctttgccaaggccacggccgcggtggcggccccgctggaggccgaagtggccccaggcttcgggcggaccatgtcaccgtacccggccgagaccttccgcttcccggcctctccgggtccccagcaggccctgatgcccccaaacctgtggagcctgcgggccaagccggggaccgcccggctccccggggaggacatgaggggccagtggcgtcccctgagcgtggaggacatcggcgcctactcctaccccgtgagcgctgccggccgcgcctcaccctgcagcttctctgaacgctactacggcggggccgggggcagcccgggcaagaaggccgacggccgcgccagcccgctctacgccagctacaaggccgacagcttctccgagggggacgacctctcccagggccacctggcagagccctgcttcctgcgggcgggcggcgacctgagcctcagtcccggccgctcggctgacccactgcccggctatgcacccagcgaggggggggacggggacaggctcggggtgcagctgtgtgggaccgccagcagccctgagcccgagcagggttccagggactccttggagccgagctccatggaggcctccccggaaatgcatcctgccgcccgcctcagcccccagcaggcctttccgcggactggtggctcggggctgagccgcaaggacagcctcaccaaggcccagctctacggaaccttgctcaactgagcgcctgcgtgcaggcctggccgtggttcgctccccgccagcccacgtgccccagaagggccggcctcacctctccccagcccccgctgttcccctgccccggccaacaacgaggagtctgttcctccccgcacctcctctcctccccagccctgtaggcctgaggggagggtcccccacaccacggtgtccacccggccccggcccgtggaactccacttagagcgtttttcacgcgtccttcccccatgtgagaggagcatccccccttttataaagcgaaactatttttatagagaaaaagggtctttcttaacgcacttggcctccagctccctggacggctgccttggcgttttcaacacaaagctcctttattttttgggcgagggtgcgtggggcctgccccttggaagggaagggaaggacggtgtcctgtggagaccagactctgcaagtggggagaccacccccgcaagccagtgacaagggagccctgaagttgtgtccacgaagagggagctgaaacaaattcggggctatgaagtgttttaaaaatccattcttcgcagtgtggccaccacaccgccctgagccctcccacggcccatcgtcccgggtgggccgggatgatgccccagtgcggccggtgctcatctccgcccccgggtccgccccctgacaccgtcttactctacctcagacatgaggaggccctccattcctggtttctgtagcttgcattcttgttgtctctgatgcatgccctgccagttagtactgtattttgcattcattaataaaagacaccggtggaaag

SEQ ID NO: 281413 - protein, 98 aa, Artificial Sequence
  derived and/or modified sequence
MRSLLLSTVGINTFDYLGSILSYVVIAIPIFSGVYGDLSPAELSTLVSKNAFVCIYLISCFTQLIDLSTTLSDVAGYTHRIGQLRETLLDMSLKSQDC

SEQ ID NO: 281414 - DNA, 297 bp, Artificial Sequence
  derived and/or modified sequence
atgagatccttgctgctgtctacagtgggcatcaatacctttgattatctgggcagtattctgtcatacgtggttatcgctatacccatattcagcggagtgtacggcgacctttcccccgccgaactgtctactttggtgagcaaaaacgcctttgtgtgtatctacctcatcagctgcttcactcaactcattgacttatctaccactctgtccgatgtcgccggctacactcatagaattgggcagcttagggaaacacttctcgacatgtcactgaaaagtcaggactgttag

SEQ ID NO: 281415 - DNA, 297 bp, Artificial Sequence
  derived and/or modified sequence
atgaggagcctgctgctgagcacagtgggcatcaacacctttgactacctgggcagcatcctgtcctatgtggtgattgccatccccatcttcagcggcgtgtatggagacctgagccctgctgagctgagcaccctggtgtccaagaatgcctttgtgtgcatctacctgatcagctgcttcacccagctgattgacctgagcaccaccctgagtgatgtggccggctacacccacagaattggccagctgcgggagaccctgctggacatgagcctgaagagccaggactgctag

SEQ ID NO: 281416 - DNA, 297 bp, Artificial Sequence
  derived and/or modified sequence
atgcggagcctgctgctgagcaccgtgggcatcaacaccttcgactatctggggtctatcctgagttatgtggttattgcgattcccattttctctggagtctatggagatctctcgcctgccgaattgtccacactggtgagtaagaacgcgtttgtgtgcatttacctcataagctgtttcacacaactgattgacctgagtacaacactctcggacgtggcagggtacactcacagaattggtcagcttagagaaaccctgcttgacatgtctcttaaatcccaggactgttag

SEQ ID NO: 281417 - DNA, 297 bp, Artificial Sequence
  derived and/or modified sequence
atgcgctctttgctcctcagtactgtgggcatcaacactttcgattacctgggttccatcctctcatacgttgtgatcgcgatcccaatcttttctggcgtttatggtgacctcagccctgcggaactttccaccctggttagtaagaacgcgttcgtctgcatttatttgatcagttgctttacccaactgattgatctgtcaactacgctgagcgacgtggccggttacacacatagaatcggacagctgagggagactctcctcgatatgagtctgaaaagccaggattgctag

SEQ ID NO: 281418 - DNA, 1094 bp, Artificial Sequence
  derived and/or modified sequence
atgcggagcctgctgctttctacagtcggcatcaacacctttgactatctgggcagcatcctgagttacgttgtcatcgcaatccccattttcagcggggtctatggagacctgagtcccgcagagcttagcaccctggtcagcaagaatgcctttgtgtgcatctacctcatcagctgcttcacccagctcatcgacctgtccacgacgctctcagatgtggctggctacacgcacagaattgggcagcttcgggagacgcttctggacatgtccctgaagtcacaggactgcgagatcctgggcgagagcgagtggggcttggacacacccccagggtggccagcggcagagccagcagacacagcatttctccttgagcgggtctccatctctgccccctcctctgacaaacccctaatcaaggatctgagcctaaagatctccgagggacagagcctgctcatcacaggcaacacgggcactggcaagacctccttgctccgggttctgggtggcctctggacgagtacacggggctcagtgcagatgctgacggactttgggccccatggggtgctattcctgccacaaaagccattcttcactgacgggacccttcgggagcaggtgatatatcccctgaaggaggtctaccccgactcaggttctgccgatgatgagaggatcttgaggttcttggaattggcaggcctgtccaacttggtggcaaggacagagggcctggaccagcaggtggactggaactggtatgatgttctgtccccgggggagatgcaacggctctcctttgcccgactcttctacctgcagccgaagtacgcagtgcttgatgaagccaccagtgccctgacagaggaagtggagagcgagctctatcgcatcggccagcagctggggatgacgttcatcagtgtgggacatcggcagagccttgagaaggtacccgtgctcacaaggatggcctgaggaggagaaagaacccaaaggctcagcctggccagggccagaggcccctcaaaacggggagtagcagtagcagagagaaccgagtggcctcctctgccagcggc

SEQ ID NO: 281419 - DNA, 297 bp, Artificial Sequence
  derived and/or modified sequence
atgagaagcctgctgctgagcaccgtgggcatcaacaccttcgactacctgggcagcatcctgagctacgtggtgatcgccatccccatcttcagcggcgtgtacggcgacctgagccccgccgagctgagcaccctggtgagcaagaacgccttcgtgtgcatctacctgatcagctgcttcacccagctgatcgacctgagcaccaccctgagcgacgtggccggctacacccacagaatcggccagctgagagagaccctgctggacatgagcctgaagagccaggactgctag

SEQ ID NO: 281420 - protein, 85 aa, Artificial Sequence
  derived and/or modified sequence
GFGTDVDYETAFIHYRLASEQQHSAQAMFNLGYMHEKGLGIKQDIHLAKRFYDMAASQPRCTSSSLPSPLQIGRRLFLAVHTGNK

SEQ ID NO: 281421 - DNA, 258 bp, Artificial Sequence
  derived and/or modified sequence
gggtttgggaccgatgtcgattatgagaccgccttcatccactacaggctcgcctccgagcagcaacattccgcccaagcaatgtttaatttgggatacatgcatgaaaaaggcctgggcatcaaacaggacattcatctggccaaaagattctacgatatggcggcctctcaacctcggtgcacttctagcagcctgccctcaccactgcagatcggccggcggctcttccttgctgttcacactggtaataaatag

SEQ ID NO: 281422 - DNA, 258 bp, Artificial Sequence
  derived and/or modified sequence
ggcttcggcacagatgtggactatgaaacagccttcatccactaccgcctggccagcgagcagcagcacagcgcccaggccatgttcaacctgggctacatgcatgagaagggcctgggcatcaagcaggacatccacctggccaagcgcttctatgacatggccgccagccagccccgctgcaccagcagcagcctgcccagccccctgcagatcggccggcggctcttcctggccgtgcacacaggcaacaagtag

SEQ ID NO: 281423 - DNA, 258 bp, Artificial Sequence
  derived and/or modified sequence
ggcttcggcaccgacgtggactacgagaccgccttcatccactaccggctggcatccgaacagcagcattccgcccaagctatgttcaacctgggttacatgcacgaaaagggactgggtatcaaacaagatattcacctggccaagcgcttttatgacatggccgcttcacaaccaagatgcacaagcagctccctcccttcccctcttcagataggcaggcgattgttcctcgccgtgcatactggaaataagtag

SEQ ID NO: 281424 - DNA, 258 bp, Artificial Sequence
  derived and/or modified sequence
ggatttggtactgacgtcgactacgagaccgcttttatacactatcgactggcctccgagcagcagcacagcgcacaagctatgttcaatctggggtacatgcatgaaaagggactgggcatcaagcaggacatccatcttgctaagcggttctacgatatggccgcatcccagccccgttgtacctcatcaagcctaccatctcccttgcagattggaagaagactcttccttgcagtgcacaccggcaataaatag

SEQ ID NO: 281425 - DNA, 258 bp, Artificial Sequence
  derived and/or modified sequence
ggcttcggcaccgacgtggactacgagaccgccttcatccactacagactggccagcgagcagcagcacagcgcccaggccatgttcaacctgggctacatgcacgagaagggcctgggcatcaagcaggacatccacctggccaagagattctacgacatggccgccagccagcccagatgcaccagcagcagcctgcccagccccctgcagatcggcagaagactgttcctggccgtgcacaccggcaacaagtag

SEQ ID NO: 281426 - protein, 153 aa, Artificial Sequence
  derived and/or modified sequence
MRDFANQGDPPWNLRMEGPPPNTSVKGAQRRRSPSALAIEVFEAHLGSHILQSLDGFVFALNQEGKFLYISETVSIYLGLSQVELTGSSVFDYVHPGDHVEMAEQLGMKLPPGRGLLSQGTAEDGASSASSSSQSETPEPVVCFPPASDQFLL

SEQ ID NO: 281427 - protein, 272 aa, Artificial Sequence
  derived and/or modified sequence
MSGCRVFIGRLNPAAREKDVERFFKGYGRIRDIDLKRGFGFVEFEDPRDADDAVYELDGKELCSERVTIEHARARSRGGRGRGRYSDRFSSRRPRNDRRNAPPVRTENRLIVENLSSRVSWQDLKDFMRQAGEVTFADAHRPKLNEGVVEFASYGDLKNAIEKLSGKEINGRKIKLIEGSKRHSRSRSRSRSRTRSSSRSRSRSRSRSRKSYSRSRSRSRSRSRSKSRSVSRSPVPEKSQKRGSSSRSKSPASVDRQRSRSRSRSRSVDSGN

SEQ ID NO: 281428 - protein, 138 aa, Artificial Sequence
  derived and/or modified sequence
MSGCRVFIGRLNPAAREKDVERFFKGYGRIRDIDLKRGFGFVEFEDPRDADDAVYELDGKELCSERVTIEHARARSRGGRGRGRYSDRFSSRRPRNDRRNAPPVRTENRLIVENLSSRVSWQPVCVVGLMTRSACGLS

SEQ ID NO: 281429 - DNA, 819 bp, Artificial Sequence
  derived and/or modified sequence
atgagcggttgccgggtgtttatcgggcgactgaatcccgccgcccgggaaaaggatgttgagagattcttcaagggctatggacgaatacgtgacatagatttgaagagggggtttggttttgttgagttcgaagatcctagagacgccgacgatgccgtctacgagctggatggaaaagaactgtgcagcgaacgagtgacgatcgaacatgctagagccagatctagaggcggcaggggtagaggcagatattcggacaggttttcatctcgaaggcctagaaatgaccgtcgcaacgctccccccgttcgcacagaaaacagacttatcgtcgagaacttatcctctcgggtctcttggcaagacctgaaagacttcatgcgtcaggcaggcgaggtgactttcgcagacgctcaccgcccaaaactgaacgaaggcgtcgtggaatttgcctcatacggcgacttaaaaaatgcaatcgaaaaactaagcgggaaggagataaatggcagaaaaattaaactgatagaaggaagcaaaagacattcgcggtcgcggtcccggagccggtcacggacacgctcaagttctcgatctcggtcccgtagcagatcccgtagcaggaagtcatattcaagatcacgctcgaggtcccgatctcgctcgcggtctaagtcccggtccgtgagccgtagccctgttcccgaaaagagccaaaagcgtggcagctcctcccggtccaagagcccggcatccgtcgaccgccagagatcgaggtccaggagcagaagtcggtctgtggacagtggcaattag

SEQ ID NO: 281430 - DNA, 417 bp, Artificial Sequence
  derived and/or modified sequence
atgtccgggtgtagagtttttattgggagattaaaccctgccgctagagaaaaagacgtggagcggttttttaaaggctacggacggatcagagacatcgatctaaagcgcgggttcggattcgtggagttcgaggatcctagagacgcggacgacgctgtgtatgagctagacgggaaagagttatgctccgagagagtcaccattgagcatgcccgggcacggagtagagggggccgaggccgcggccgttattccgataggttctctagtagaagaccccgcaacgacagacggaatgcaccacctgtcaggacagaaaatcgattgatagttgagaatttgagctcaagagtgtcctggcagcccgtttgcgtcgtcggtttaatgacacgtagtgcctgcggccttagctag

SEQ ID NO: 281431 - DNA, 819 bp, Artificial Sequence
  derived and/or modified sequence
atgtctggctgtcgcgtgttcatcgggcggttgaatccagccgcaagagaaaaagacgtagaaagattctttaaaggctacggtcggatcagggacattgacctgaaacgaggttttggattcgtcgagtttgaggacccccgtgatgctgacgatgccgtctacgaattagacggcaaagaattgtgtagcgagagggtgacgattgaacatgccagggcccgctcccgagggggtcggggacgaggacggtatagcgacagattcagctcgagacgccctagaaatgacaggcggaacgccccccctgtgcggaccgaaaataggttgattgtggagaacctcagcagccgcgtatcttggcaggaccttaaggacttcatgaggcaggccggagaggtcactttcgccgacgcacaccgtcccaagctcaacgaaggcgtcgtggaattcgcatcctatggtgacctgaaaaacgccatcgagaaattgtctggtaaagaaatcaacgggcgtaagatcaagctgattgagggctccaagcgacactccagatccagaagcagatccaggtcccgtacccgctcaagcagcaggtctaggagccgctcaaggtctagatctcgaaagagttacagccgctccagaagtaggtctaggtcaaggtctcggtctaagtctcggtccgtttcacgaagccccgttcctgagaagagccagaagagggggtcttcctcccggtccaagtctcccgcctccgttgataggcagagatcaagaagccggtctagaagccgcagcgttgattctggaaattag

SEQ ID NO: 281432 - DNA, 819 bp, Artificial Sequence
  derived and/or modified sequence
atgtcgggctgtagggtgtttatcgggcgccttaaccccgccgcgcgagaaaaggacgttgaacgctttttcaagggctatggccgaattcgcgacatcgacctgaaacgaggctttggcttcgtggaattcgaggatcccagagatgccgacgatgcagtgtacgagttagatggtaaggagctttgctcggagcgggtgacaatcgaacacgcacgtgcgaggagccgagggggacgtggacgaggcaggtatagtgatcgattttctagcaggcggccccgaaatgacagacgtaacgccccccctgtcagaacagagaatcggcttattgtggaaaatctcagcagtagggtgagctggcaagatctgaaggatttcatgcggcaggcgggggaggtcacattcgccgacgctcatcgtccgaagctgaacgagggggtggtggaatttgcatcttacggggatctaaaaaacgctattgagaaacttagcggaaaggagataaatggacgtaaaattaagttaatcgaaggttccaagaggcatagccgaagcaggagtagatctaggagtcgtaccagatcctcctcaaggtcccgatccagatcacggagccggtctaggaagagctatagccgttctagatctcggtcacggagtaggtctagatccaagagtcgatcagtgtctcgatccccggtgccagaaaaatcccagaaaaggggcagtagttcacgctccaagagcccagcaagcgtagatcgacaacgcagcaggagccgttctagatccaggtcagtcgactctggtaactag

SEQ ID NO: 281433 - DNA, 819 bp, Artificial Sequence
  derived and/or modified sequence
atgagcggctgcagggtcttcatcggccgcctgaacccagctgcccgggagaaggatgtggagcgcttcttcaagggctacggccgcatccgggacatcgacctgaagaggggctttggatttgtggagtttgaggaccccagagatgctgatgatgctgtgtatgagctggatggcaaggagctgtgcagcgagcgggtgaccattgaacatgcccgggcccggagccggggcggccggggccggggccgctacagcgaccgcttcagcagccggcggcccagaaatgacagaagaaatgcccctcctgtgaggacagaaaatcggctgattgtggagaacctgagcagccgggtgtcctggcaggacctgaaggacttcatgaggcaggccggggaggtgacctttgctgatgcccaccggcccaagctgaatgaaggagtggtggagtttgccagctatggagacctgaagaatgccatcgagaagctgagcggcaaggagatcaatggaaggaagatcaagctgattgagggcagcaagaggcacagccgcagccgcagccgcagccgcagcaggaccaggagcagcagccgcagccgcagccgcagccgcagccgcagcaggaagagctacagccgcagccgcagccgcagccgcagccgcagccgcagcaagagccgctctgtgagccgcagccctgtgcctgagaagagccagaagaggggcagcagcagccgcagcaagagccctgcctctgtggaccggcagaggagccgcagccgcagccgcagccgctctgtggacagcggcaactag

SEQ ID NO: 281434 - DNA, 417 bp, Artificial Sequence
  derived and/or modified sequence
atgagcggctgcagggtcttcatcggccgcctgaacccagctgcccgggagaaggatgtggagcgcttcttcaagggctacggccgcatccgggacatcgacctgaagaggggctttggatttgtggagtttgaggaccccagagatgctgatgatgctgtgtatgagctggatggcaaggagctgtgcagcgagcgggtgaccattgaacatgcccgggcccggagccggggcggccggggccggggccgctacagcgaccgcttcagcagccggcggcccagaaatgacagaagaaatgcccctcctgtgaggacagaaaatcggctgattgtggagaacctgagcagccgggtgtcctggcagcctgtgtgtgtggtgggcctgatgaccaggtctgcctgtggcctgtcctag

SEQ ID NO: 281435 - DNA, 819 bp, Artificial Sequence
  derived and/or modified sequence
atgagcggctgccgggtgttcatcggccggctgaaccccgccgccagggagaaggacgttgaacggtttttcaagggatacgggaggattagagatatagacttgaaaagaggctttggctttgtagagttcgaggatccacgcgacgccgacgatgccgtatacgagttggatggcaaggagctgtgttctgagagagtgacaatcgaacacgccagggccaggagcaggggtggccgcggccgtgggaggtactctgacagattttcctcccggcggcctcggaacgataggcggaacgccccgccagtgaggactgaaaacagactgattgtggagaacctttcctcgcgggtgagctggcaggacctgaaagacttcatgaggcaggcaggagaagtgacctttgctgatgcccaccgccccaaactgaatgagggcgtggtcgaattcgcctcctacggtgacctgaagaacgccattgagaaactttccggcaaggagataaatggtagaaaaattaaactgatcgagggttcgaaacgacatagtagaagtcgttcccgatcccggtctcgtaccaggtcctcttctcgcagccgatctcgtagtagatcacgtagccggaaaagctactcgcggagccgttccagatcaagaagtcgctcaagaagcaagagcaggtccgtgtcccggtcacctgtccccgaaaagtcccagaaaagggggtcatcttctcgcagcaaatcccctgccagtgtggaccgacaaaggtctcgatctagaagtcgctctcggagcgttgactcagggaattag

SEQ ID NO: 281436 - DNA, 417 bp, Artificial Sequence
  derived and/or modified sequence
atgagcggctgccgggtgttcatcggccggctgaaccccgccgccagggaaaaagatgtggaaagattttttaaaggctacgggcgaatccgtgacatagacctgaaacgagggttcggctttgtggagttcgaggacccacgcgacgctgatgatgctgtctatgagctagacgggaaggaactgtgcagtgaaagagttaccatcgagcacgcccgggcacggtcacgggggggaagaggcaggggccggtactccgaccgcttcagcagccggcggcctagaaatgataggcgcaatgcgcctcccgtgagaaccgagaaccgacttatcgtagagaacctgagctctcgcgtgtcttggcagcccgtttgcgtggtggggctgatgacccggagcgcttgcgggctgagctag

SEQ ID NO: 281437 - DNA, 819 bp, Artificial Sequence
  derived and/or modified sequence
atgagcggctgccgggtgttcatcggccggctgaaccccgccgcccgcgagaaggacgtggagcggttttttaaaggctacggccgaattagagacatcgacctaaaacgcggctttggcttcgttgaattcgaagacccacgtgatgccgacgacgcggtatatgagctggacggaaaagagctctgctcagagcgtgtgaccatcgagcatgcgcgggctagatctcgtgggggtcgggggcgaggtcggtatagtgaccgattctcctcccgtcgccctcgaaatgatcggcggaatgcgccccctgtgcggactgagaatcgactaatagtggagaatctgtcgtcacgcgtcagctggcaggacctcaaagacttcatgcggcaggcgggggaggtgacatttgctgatgctcatcgccctaagctcaatgaaggcgtggtcgaatttgcttcgtatggagatctgaaaaacgctatcgagaagttatcagggaaggaaatcaacggtagaaaaatcaagctcattgagggatccaagcgccacagcaggagccgctcacgtagcagatcacggactagatctagctctcggagcaggagccgctcacggagtcggtcaagaaaaagctactcccgttccagaagcaggtctcgcagtcgcagtagatctaaatcaagaagcgtgtcacggtcacccgtgccagaaaaatctcaaaagagaggctctagttcacgctctaagagccccgcttccgtggacagacagcggagtcgcagtcgttcacggtcaagatctgtcgactcgggcaattag

SEQ ID NO: 281438 - DNA, 819 bp, Artificial Sequence
  derived and/or modified sequence
atgagcggctgccgggtgttcatcggccggctgaaccccgccgcccgtgagaaagacgttgagcgattcttcaaggggtacgggaggattagagacatcgatctaaaaagaggattcggctttgtcgagtttgaggacccgagggatgcggatgatgcagtttacgagctggacgggaaggagctgtgcagcgagcgagtcaccattgagcatgccagggcccgcagcagaggaggtcgaggaagggggcgctatagcgacagattctcctcccgtagaccgcggaacgaccgtcggaacgctcctccagttcgaaccgagaacaggcttatcgtggagaacctgtctagtagagtaagctggcaagatttgaaagacttcatgaggcaggcaggagaggtgacttttgcagacgcacaccgacccaagttgaacgaaggtgtagtggaatttgctagttatggcgacctcaagaacgccattgaaaagttaagtggtaaggagatcaacggaaggaagatcaagttaatcgaagggtccaaaagacattccaggagccgcagccggtctaggagtaggacacgtagcagctcgcgatcacgaagcaggagcaggagtaggagtaggaagtcctatagtcgctcaagatcccggagtcgttctcgcagcagatcgaaatcccgttcggtgtcgagatcacccgttcccgaaaagtctcagaagcgcggatcttcatcccgctctaagtcaccagcatcggttgacaggcagagatctagatccagatcccgatctagatcggtggactcaggcaattag

SEQ ID NO: 281439 - DNA, 819 bp, Artificial Sequence
  derived and/or modified sequence
atgagcgggtgcagggttttcatcggtcgcctgaaccccgcagccagagaaaaggacgttgagaggttttttaaaggatacgggaggattcgcgatatcgatttgaaaaggggctttggcttcgtagagttcgaggacccgagggacgccgacgatgccgtctatgagcttgacggcaaggagctctgtagcgaaagagttactatcgagcacgcgagagccaggtccaggggaggccgaggtcgtggacggtacagtgatcgattctccagccgacgccctcgcaacgacagaagaaacgctccccctgtacggaccgagaacaggttgatcgtcgaaaatctttcttcacgagttagctggcaggatctcaaggacttcatgaggcaggctggagaagtcaccttcgcagatgcccaccgtccaaagctcaatgagggggtcgtggagttcgcttcttacggggatctcaagaatgctatagagaagctaagcggaaaagaaattaatggcaggaagataaaactcatcgagggctcaaagagacattcccgcagtcgctcccggtctcgatcaaggaccaggtcctctagccggtcccggtccagatctcgctccaggagcaggaagtcatacagccgaagccggtctcggagccggtctcggtctaggtctaagtcccgctcggtctcccgatctcccgtgccggaaaagtcccagaaaagagggagcagttctcggtctaagtctcccgcttcagtagaccgccaaagatcccggagccgctcccggagcagaagtgtcgattcaggaaattag

SEQ ID NO: 281440 - DNA, 417 bp, Artificial Sequence
  derived and/or modified sequence
atgagcgggtgccgtgtttttatcggacgcttgaatccggcagcgcgtgagaaagacgttgaaagattctttaaggggtatgggaggattcgcgacatcgacctgaagcggggattcggattcgttgaatttgaggacccacgggatgccgacgacgcagtgtacgagttagacggcaaggagctctgctcagagcgggttactattgagcacgccagagctcggagcaggggcggacgtggcaggggaagatattctgacaggttcagttccaggaggcccagaaacgacaggaggaatgctccaccggtcagaactgaaaatcgactaattgtggaaaatctatcgtcgcgcgtaagctggcagccagtgtgcgtcgttggcctgatgacacgtagtgcttgcggcctgtcttag

SEQ ID NO: 281441 - DNA, 819 bp, Artificial Sequence
  derived and/or modified sequence
atgagtggctgtcgggtgttcatcggtcgtctgaacccagcagcccgtgagaaagacgtcgagagatttttcaagggctatgggaggataagagatattgacctaaaaagaggcttcggtttcgtggagttcgaggaccctagggacgccgacgacgccgtgtacgagctcgacgggaaagagctctgcagcgaacgtgtcacaattgagcacgccagagccagaagccgcggtgggaggggacggggtagatactctgatcggttctcttctagaagacccagaaacgatcgacgcaatgctccaccagtgaggacagaaaatcgcttaatcgtggaaaacctgagctcccgcgtgagttggcaggatctgaaggacttcatgcgacaggctggcgaggtcacctttgcggatgcacaccggcctaaactgaatgaaggcgtggtcgagtttgcttcctatggggatttgaaaaacgcaatcgagaagctgtctgggaaagagataaacggacggaagatcaaactgatcgaaggctccaaaaggcatagcaggtcccggtcccggtctcgctcgagaactcggtcgagcagtcggtccagatcacggtcacgcagccgaagccggaagagctattctcgcagcagaagtcgatctcggagcagatcgagaagtaagagtcggtctgtgtctagatctcccgtgcccgaaaagtcgcagaaaaggggctcctctagccgttccaagtcccctgcatcagttgatcgccagaggtctcggagccgaagccgctctcggtccgtcgatagtggcaattag

SEQ ID NO: 281442 - DNA, 819 bp, Artificial Sequence
  derived and/or modified sequence
atgagtgggtgtagggtctttatcggaaggcttaacccagccgcaagagagaaggatgtggaacggtttttcaagggttacggccgaatccgcgacatagacctgaaaagggggttcggattcgtggagtttgaggaccctcgcgacgcagacgatgcagtgtacgaactggacggcaaggagctgtgttcggagagagtgacaatagaacatgcccgagcaaggtcaagaggagggagaggaagaggacggtattctgatagattttccagccgccgacccaggaatgataggcggaacgccccacctgtgcggacagagaaccgcctgatcgtggaaaatttgtcaagccgcgtgagctggcaggacctgaaagactttatgagacaagccggtgaggttacttttgcagacgctcatcgacccaagctgaacgaaggtgtggtcgagttcgcaagctacggagacctaaagaacgccattgagaaattgtctggcaaggaaataaacggccgtaagatcaagcttatcgagggaagtaaacgccactcacgatccaggtcacggagtcggtcgcggacaagatcaagctcgcggagtcgcagtcgctcccggagcaggtcccggaagagctacagcagatcccgctctagaagccgcagtagaagtcgtagcaaatcccggtcagtatcacggtcccccgtgccagaaaaaagccaaaaaagaggctcctcatccagatctaagtccccggcttccgttgaccggcagcgctcacgtagcagaagccgatccaggtcagtcgacagcgggaactag

SEQ ID NO: 281443 - DNA, 1638 bp, Artificial Sequence
  derived and/or modified sequence
gacgtaggacgcgccctccattttgtggagcgccagagctgctaagtgcgtcagttgtggagtggcgtagacgagttaagtcctggtctgcgtggaggtcgacgactccgtcgcagactacggacctgtctgggtctcagccgccaaagaccccgtccggtaggtgagtggctcactttgagggcaagccttctcggatcgaggcttcttcatggccgctcagatcgtgagcggccggggctgctctctttgcggaggatggcgtctaatgagcgcagttgattcgaggaagtactagccggacatcatgagtggctgtcgggtattcatcgggagactaaatccagcggccagggagaaggacgtggaaagattcttcaagggatatggacggataagagatattgatctgaaaagaggctttggttttgtggaatttgaggatccaagggatgcagatgatgctgtgtatgagcttgatggaaaagaactctgtagtgaaagggttactattgaacatgctagggctcggtcacgaggtggaagaggtagaggacgatactctgaccgttttagtagtcgcagacctcgaaatgatagacgaaatgctccacctgtaagaacagaaaatcgtcttatagttgagaatttatcctcaagagtcagctggcaggatctcaaagatttcatgagacaagctggggaagtaacgtttgcggatgcacaccgacctaaattaaatgaaggggtggttgagtttgcctcttatggtgacttaaagaatgctattgaaaaactttctggaaaggaaataaatgggagaaaaataaaattaattgaaggcagcaaaaggcacagtaggtcaagaagcaggtctcgatcccggaccagaagttcctctaggtctcgtagccgatcccgttcccgtagtcgcaaatcttacagccggtcaagaagcaggagcaggagccggagccggagcaagtcccgttctgttagtaggtctcccgtgcctgagaagagccagaaacgtggttcttcaagtagatctaagtctccagcatctgtggatcgccagaggtcccggtcccgatcaaggtccagatcagttgacagtggcaattaaactgtaaataacttgccctgggggcctttttttaaaaaacaaaaaccacaaaaattcccaaaccatacttgctaaaaattctggtaagtatgtgcttttctgtgggggtgggatttggaaggggggttgggttgggctggatatctttgtagatgtggaccaccaaggggttgttgaaaactaattgtattaaatgtcttttgataagccttctgctcacatttttgtgaatgtctgaagtatatagtttgtgtatattgacagagctcttttataactaaagcaaatttaatttttttgtactagaaaaaaatttgaacattttagttcttggttataaaaatgttaattcagaattagtttaatgccttaattaaactaattaatagctttggacacttaaaagagctctaaatttgcttgtacataaaggcttaatttgttttccttgttagggtcaagggtgtcctccactctttaacagctgctggacagacacattagagcagctg

SEQ ID NO: 281444 - DNA, 822 bp, Artificial Sequence
  derived and/or modified sequence
agttgtggagtggcgtagacgagttaagtcctggtctgcgtggaggtcgacgactccgtcgcagactacggacctgtctgggtctcagccgccaaagaccccgtccggtaggaagtactagccggacatcatgagtggctgtcgggtattcatcgggagactaaatccagcggccagggagaaggacgtggaaagattcttcaagggatatggacggataagagatattgatctgaaaagaggctttggttttgtggaatttgaggatccaagggatgcagatgatgctgtgtatgagcttgatggaaaagaactctgtagtgaaagggttactattgaacatgctagggctcggtcacgaggtggaagaggtagaggacgatactctgaccgttttagtagtcgcagacctcgaaatgatagacgaaatgctccacctgtaagaacagaaaatcgtcttatagttgagaatttatcctcaagagtcagctggcagcctgtctgtgtcgttggccttatgacgaggagtgcctgtgggttatcctaatcgttgtcttggtcactcttggttgggcctggttgactttgccagtcagctcctacagtgatcagttggccacctctagatctgtgtttgccggtctagacgttatcggtgcacttccttgaagtgccaggttgcagcgatcccagagcgttgataacgtgatctgatccctaagttgagacctgtcttcctgtaacgcttccgaataagaggtccggtcgaaaagagttgaaagatacgaaattaggtggtcgttggaatcctgatcgcagtaa

SEQ ID NO: 281445 - DNA, 2815 bp, Artificial Sequence
  derived and/or modified sequence
gccggaggaagcgccacgggcggctcagacctgaggccgcaagggcgcgccgggcgggcagggcggagggtccgatttcctccctctgaacggaaaaaaagccactttccctgggaagaactcgaagaagttggatgtctgatcttcaccttggatttgtggtctcggcccgcgggcgactcaccccacccaccaggatcccacgaagccgggccggctcagcccgctggcgccatctagtgtcgaatgaggaggcggccctctgcggctggaggggacgcttgggcgtgtgaaatctgaacggagaggattaaccaaataccatttggacttaaaagcagcttgaggccgggcgcggtggctcatgcctgtaatcccagcactttgggaggccgagacgggccgatcacgaggtcaggagatcgagaccatcccggctaacacggtgaaaccccgtctctactaaaaatacaaaaaaattagccggtgtggtggcgggcgcctgtagtcgcagctactcgggaggctgaggcagaagaatggcgtgaacccgggaggcggagcccagatcgcgccactgcactccagcctgggcgacagagcaagactgtctcaaaaaaaacaacaaaaaacagcttgaaacctcttccagccactctcccagagtgacggacatgcagaaatctgtattccagcctcaattcaagacagccttctagctgcagtcccattttcaacatttcatcagtgaaaatcctttcatttaaaaaatacttcagtgccttagtcttctcaccacaacaaaaccacacagctgtggcatggttgaaaaaagaactcgaacatctaggagctccctgctttgagggcaaatttaaattgcaagcagcaagagctaaggaaaggccaggtatttctgcaaagctaagtttctcctaattagtaatcttctgggtgtctaagaaaaactttagatacaagaagggttgccacttttctcaggagactcttctgggagagatgatgatgaaccgaacgccaaggacttagcaggggcgaacgacgtcaacagatgtccctccagactccggcaccagccggccgagcccaaacgagttctcgcccccgaccccacccaccgcgggagcagggttcggtcactcgcagtgtcagagaggcccacatcctcctaaatttccggccctcccaaaacttccgtcttccctaggtccaacggggtggacccaaggcccaggggcgtccccggaagtgacgtaggacgcgccctccattttgtggagcgccagagctgctaagtgcgtcagttgtggagtggcgtagacgagttaagtcctggtctgcgtggaggtcgacgactccgtcgcagactacggacctgtctgggtctcagccgccaaagaccccgtccggtaggaagtactagccggacatcatgagtggctgtcgggtattcatcgggagactaaatccagcggccagggagaaggacgtggaaagattcttcaagggatatggacggataagagatattgatctgaaaagaggctttggttttgtggaatttgaggatccaagggatgcagatgatgctgtgtatgagcttgatggaaaagaactctgtagtgaaagggttactattgaacatgctagggctcggtcacgaggtggaagaggtagaggacgatactctgaccgttttagtagtcgcagacctcgaaatgatagacgaaatgctccacctgtaagaacagaaaatcgtcttatagttgagaatttatcctcaagagtcagctggcaggatctcaaagatttcatgagacaagctggggaagtaacgtttgcggatgcacaccgacctaaattaaatgaaggggtggttgagtttgcctcttatggtgacttaaagaatgctattgaaaaactttctggaaaggaaataaatgggagaaaaataaaattaattgaaggcagcaaaaggcacagtaggtcaagaagcaggtctcgatcccggaccagaagttcctctaggtctcgtagccgatcccgttcccgtagtcgcaaatcttacagccggtcaagaagcaggagcaggagccggagccggagcaagtcccgttctgttagtaggtctcccgtgcctgagaagagccagaaacgtggttcttcaagtagatctaagtctccagcatctgtggatcgccagaggtcccggtcccgatcaaggtccagatcagttgacagtggcaattaaactgtaaataacttgccctgggggcctttttttaaaaaacaaaaaccacaaaaattcccaaaccatacttgctaaaaattctggtaagtatgtgcttttctgtgggggtgggatttggaaggggggttgggttgggctggatatctttgtagatgtggaccaccaaggggttgttgaaaactaattgtattaaatgtcttttgataagccttctgctcacatttttgtgaatgtctgaagtatatagtttgtgtatattgacagagctcttttataactaaagcaaatttaatttttttgtactagaaaaaaatttgaacattttagttcttggttataaaaatgttaattcagaattagtttaatgccttaattaaactaattaatagctttggacacttaaaagagctctaaatttgcttgtacataaaggcttaatttgttttccttgttagggtcaagggtgtcctccactctttaacagctgctggacagacacattagagcagctgtttgttattgataataaaatattataaaact

SEQ ID NO: 281446 - DNA, 1500 bp, Artificial Sequence
  derived and/or modified sequence
gccagagctgctaagtgcgtcagttgtggagtggcgtagacgagttaagtcctggtctgcgtggaggtcgacgactccgtcgcagactacggacctgtctgggtctcagccgccaaagaccccgtccggtaggaagtactagccggacatcatgagtggctgtcgggtattcatcgggagactaaatccagcggccagggagaaggacgtggaaagattcttcaagggatatggacggataagagatattgatctgaaaagaggctttggttttgtggaatttgaggatccaagggatgcagatgatgctgtgtatgagcttgatggaaaagaactctgtagtgaaagggttactattgaacatgctagggctcggtcacgaggtggaagaggtagaggacgatactctgaccgttttagtagtcgcagacctcgaaatgatagacgaaatgctccacctgtaagaacagaaaatcgtcttatagttgagaatttatcctcaagagtcagctggcaggatctcaaagatttcatgagacaagctggggaagtaacgtttgcggatgcacaccgacctaaattaaatgaaggggtggttgagtttgcctcttatggtgacttaaagaatgctattgaaaaactttctggaaaggaaataaatgggagaaaaataaaattaattgaaggcagcaaaaggcacagtaggtcaagaagcaggtctcgatcccggaccagaagttcctctaggtctcgtagccgatcccgttcccgtagtcgcaaatcttacagccggtcaagaagcaggagcaggagccggagccggagcaagtcccgttctgttagtaggtctcccgtgcctgagaagagccagaaacgtggttcttcaagtagatctaagtctccagcatctgtggatcgccagaggtcccggtcccgatcaaggtccagatcagttgacagtggcaattaaactgtaaataacttgccctgggggcctttttttaaaaaacaaaaaccacaaaaattcccaaaccatacttgctaaaaattctggtaagtatgtgcttttctgtgggggtgggatttggaaggggggttgggttgggctggatatctttgtagatgtggaccaccaaggggttgttgaaaactaattgtattaaatgtcttttgataagccttctgctcacatttttgtgaatgtctgaagtatatagtttgtgtatattgacagagctcttttataactaaagcaaatttaatttttttgtactagaaaaaaatttgaacattttagttcttggttataaaaatgttaattcagaattagtttaatgccttaattaaactaattaatagctttggacacttaaaagagctctaaatttgcttgtacataaaggcttaatttgttttccttgttagggtcaagggtgtcctccactctttaacagctgctggacagacacattagagcagctgtttgttattgataataaa

SEQ ID NO: 281447 - DNA, 819 bp, Artificial Sequence
  derived and/or modified sequence
atgagcggctgcagagtgttcatcggcagactgaaccccgccgccagagagaaggacgtggagagattcttcaagggctacggcagaatcagagacatcgacctgaagagaggcttcggcttcgtggagttcgaggaccccagagacgccgacgacgccgtgtacgagctggacggcaaggagctgtgcagcgagagagtgaccatcgagcacgccagagccagaagcagaggcggcagaggcagaggcagatacagcgacagattcagcagcagaagacccagaaacgacagaagaaacgccccccccgtgagaaccgagaacagactgatcgtggagaacctgagcagcagagtgagctggcaggacctgaaggacttcatgagacaggccggcgaggtgaccttcgccgacgcccacagacccaagctgaacgagggcgtggtggagttcgccagctacggcgacctgaagaacgccatcgagaagctgagcggcaaggagatcaacggcagaaagatcaagctgatcgagggcagcaagagacacagcagaagcagaagcagaagcagaagcagaaccagaagcagcagcagaagcagaagcagaagcagaagcagaagcagaaagagctacagcagaagcagaagcagaagcagaagcagaagcagaagcaagagcagaagcgtgagcagaagccccgtgcccgagaagagccagaagagaggcagcagcagcagaagcaagagccccgccagcgtggacagacagagaagcagaagcagaagcagaagcagaagcgtggacagcggcaactag

SEQ ID NO: 281448 - DNA, 417 bp, Artificial Sequence
  derived and/or modified sequence
atgagcggctgcagagtgttcatcggcagactgaaccccgccgccagagagaaggacgtggagagattcttcaagggctacggcagaatcagagacatcgacctgaagagaggcttcggcttcgtggagttcgaggaccccagagacgccgacgacgccgtgtacgagctggacggcaaggagctgtgcagcgagagagtgaccatcgagcacgccagagccagaagcagaggcggcagaggcagaggcagatacagcgacagattcagcagcagaagacccagaaacgacagaagaaacgccccccccgtgagaaccgagaacagactgatcgtggagaacctgagcagcagagtgagctggcagcccgtgtgcgtggtgggcctgatgaccagaagcgcctgcggcctgagctag

SEQ ID NO: 281449 - DNA, 3750 bp, Artificial Sequence
  derived and/or modified sequence
atgtctgtgaaggagggcgcccaaaggaagtgggctgcgctgaaagaaaagcttggccctcaggactcggaccccaccgaggcgaatctcgaaagcgctgatccggaactttgcattcgtttactgcagatgccatccgttgtcaactattctgggctaaggaagcgccttgaggggtctgacgggggctggatggtgcaatttcttgaacagtctggcttagaccttctgctcgaggcactggcccgtctctccgggcggggtgtggccaggatcagtgatgccttattacagctcacttgtgtgtcttgtgttagagcagtgatgaactctaggcagggaatcgagtatatactgagcaaccagggctatgttagacagctgagtcaagcgctcgataccagcaacgtgatggttaaaaaacaggttttcgagctactggctgcgctctgtatctattctcctgagggacacgtgctgactctggacgctttggatcattacaagaccgtgtgcagccagcagtatcgtttctccattgtaatgaacgagctaagcggttctgacaacgtgccatatgtggtgactctactgagtgttatcaatgcagtaattcttggtcctgaggatctccgggcacggacccagctacgcaacgagtttatcggacttcagctccttgacgttttggcaaggttgcgtgatcttgaagatgcagatctgcttatacagctggaagccttcgaggaggcaaaggccgaggacgaggaggagctgctgagggtgtccgggggagttgatatgtctagtcatcaggaggtattcgcatcgttgtttcacaaagtaagctgctcccctgtttcggcccaacttctgtccgtgctgcagggcctgctgcacctggagcctacgcttagaagtagtcaacttttgtgggaggcactcgagagcctcgttaatagggcggtgcttctggcctccgacgctcaggaatgtaccctcgaggaggttgtggagaggctcctgtccgtcaaggggaggccacgtccctcgcctttagtcaaggcccacaagtctgtgcaagccaatttggatcagtcacaacgaggcagctctcctcagaataccactaccccgaaaccctctgtagagggccaacagcccgccgccgctgcagcctgcgagcctgtcgaccacgctcagagcgaaagcatccttaaggtttctcagccaagagctctcgaacagcaggcctctaccccaccaccaccccctccgcccccactgctccccggaagtagcgcagaaccgccgcctccaccccctccaccgccactgcccagtgtgggtgccaaggcacttccgactgctccgccccccccacctctccccggtctcggcgccatggcacccccagccccccctctcccccctccacttccagggtcctgtgaattcctcccacccccccctcccccactaccagggctgggatgtccaccacctcccccccctctgctgcccggtatgggctgggggcctccaccacctccaccaccattactgccctgtacctgttctcccccagttgccggtggcatggaagaggtaatagttgcccaagtggatcatggtctgggctctgcttgggtgccctctcaccgcagggtgaatcctccaacactgcgcatgaagaaacttaattggcagaaactgccatccaacgtcgcgagagaacacaatagcatgtgggcttctttgtcgtcccccgacgcggaagctgtggaaccggattttagtagtatcgagagactgttttcctttcctgcggctaagcctaaagagcccaccatggtggcaccccgagcacggaaggaaccgaaggaaatcacattcctggatgcgaaaaagagccttaatttgaacatttttctaaaacagttcaagtgctccaatgaagaagttgcagccatgatcagggctggtgatacgaccaagtttgatgttgaggtgctgaaacagctgctgaagctccttcccgaaaagcatgaaatcgagaacctgcgtgcttttacagaagagagagcgaagctagccagcgccgaccacttctacctgctgcttttagctattccatgttaccagctacgaattgagtgcatgctcctttgcgagggggcggctgccgtgcttgatatggtgcgacccaaagcccagttggtgctggctgcttgtgaatcactgttgactagcaggcaactgcctatattttgccagttaattctccggattggtaacttcttaaactacgggtcccacacaggggacgcagatgggtttaaaatcagcaccctgttgaagctgacagaaaccaaatcccagcaaaaccgagtcaccctgctccaccatgtactagaggaggccgagaagagccatccagaccttttacagttacccagagatctggaacagccttcacaagctgccggaataaatctggaaattattaggtcagaggcctccagcaatttaaaaaagctcctggagacagagagaaaagttagtgctagcgtcgccgaagtgcaagagcagtatacagaacgccttcaagcgtccatcagcgcattccgcgccttggacgaactgtttgaggcgatcgaacaaaagcagcgggaactggcagactacctgtgcgaggacgcgcagcagctgagcctggaggataccttctccactatgaaagcgtttcgggatctgtttcttcgagccctgaaggagaataaggaccgtaaagagcaagctgccaaagcagaacggagaaaacagcagctggccgaggaggaggcaagaaggcctcgcggcgaagatggaaaaccagtgcgaaaggggccaggcaagcaggaggaagtgtgtgtgattgatgctctcctggccgacatacggaaaggtttccaattgaggaagacagctagaggccggggggatactgacggcggaagtaaggctgcgtcaatggacccaccgcgtgccaccgagccagtcgctacatccaatcccgcaggtgaccccgtcggctctacacgctgtccagccagcgagcccggcctcgacgctacaaccgcctctgagtctaggggttgggatctcgttgacgcagtaacaccgggtcctcagccaaccttagagcaattggaggaaggcggaccaagacccttggaacgcagaagcagctggtatgtggatgcatccgacgttcttactacagaggaccctcagtgtcctcaacctctggagggtgcgtggccagtcacactgggggacgcccaagctttgaaaccactcaagttctcttcaaaccagccccccgcagctgggtcctctcgccaggatgccaaggaccccacttcgctgcttggggtccttcaggcggaagctgattcgacttctgagggtttagaggacgctgtccacagtagaggagcacgaccaccagcagccggtcccgggggggacgaggacgaagatgaagaggacaccgctccagagagcgccctggacaccagtctagataagtcattctctgaagatgccgtgaccgactcatcagggtctggaaccttgccaagagctagggggcgcgctagtaaagggaccggcaaacggcgaaaaaagcgcccttcacgctctcaggaggaagtgccccccgacagcgacgacaataaaacgaaaaagctttgcgtgatccagtag

SEQ ID NO: 281450 - DNA, 4672 bp, Artificial Sequence
  derived and/or modified sequence
gccttgcggagcgcggcagtgggcgccggctgcccgcagcccctgacccggccccggacggagcgccggccgcaccaccgccctctggccgttgcctcaccggctcggcaagatgtcggtgaaggagggcgcacagcgcaagtgggcagcgctgaaggagaagctggggccacaggattcggaccccacggaggccaacctggagagcgcggaccccgagctgtgcatccggctgctccagatgccctctgtggtcaactactccggcctgcgcaagcgcctggagggcagcgacggcggctggatggtgcagttcctggagcagagcggcctggacctgctgctggaggcgctggcgcggctgtcgggccgcggcgttgcacgtatctccgacgccctgctgcagctcacctgcgtcagctgcgtgcgcgccgtcatgaactcgcggcagggcatcgagtacatcctcagcaaccagggctacgtgcgccagctctcccaggccctggacacatccaacgtgatggtgaagaagcaggtgtttgagctactggctgccctgtgcatctactctcccgagggccacgtgctgaccctggacgccctggaccactacaagacggtgtgcagccagcagtaccgcttcagcattgtcatgaacgagctctccggcagcgacaacgtgccctacgtggtcaccctgcttagcgtgatcaacgccgtcatcttgggccccgaggacctgcgcgcgcgcacccagctgcggaacgagtttatcgggctgcagctgctggacgtcctggctcgcctgcgagacctggaggatgccgacctgctgatccagctggaggctttcgaggaggctaaggccgaggacgaggaggagctgctgcgagtctctggcggggtcgacatgagcagccaccaggaggtctttgcctccctgttccacaaggtgagctgctccccggtgtctgcccagctcctgtcggtgctgcagggcctcctgcacctggagcccaccctccgctccagccagctgctctgggaggccctggagagcctcgtgaaccgggccgtgctcctggccagcgatgcccaggaatgcaccctggaggaagtggttgagcggctcctgtctgtcaaggggcgacccagaccgagccccctggtcaaggcccataaaagcgtccaggccaacctagaccagagccagaggggcagctccccgcaaaacactacaacccccaagcccagcgtggagggccagcagccagcagcagctgctgcctgcgagcccgtggaccacgcccagagtgagagcatcctgaaagtttcgcagcccagagccctggagcagcaggcgtccaccccacccccacccccacccccacccctgctccctggttccagtgccgagccccctccccctcccccaccaccccccctgcccagtgtgggggctaaggccctcccaacagcacccccgcccccacccctgccaggcctgggggccatggcccccccagcacctcctctaccaccacccctgccaggctcctgtgagttcctgcccccaccacctccaccactcccgggcttgggatgcccgcccccacccccacccctgctgcctggtatgggctggggccctcctccacccccacctccactactgccctgcacctgcagcccccccgtggcgggaggcatggaggaggtcatcgtggcccaggtggaccatggcttgggctcagcatgggtccccagccatcggcgggtgaacccacccacactgcgcatgaagaagctgaactggcagaagctgccatccaacgtggcacgtgagcacaactctatgtgggcgtccctgagcagccccgacgccgaggctgtggagcccgacttctccagcatcgagcgactattctccttccctgcagccaagcccaaggagcccaccatggtggccccccgggccaggaaggagcccaaggagatcactttcctcgatgccaagaagagcctgaacctcaacatcttcctgaagcaatttaagtgctccaacgaggaggtcgctgctatgatccgggctggagataccaccaagtttgatgtggaggttctcaaacaactccttaagctccttcccgagaagcacgagattgaaaacctgcgggcattcacagaggagcgagccaagctggccagcgccgaccacttctacctcctcctgctggccattccctgctaccagctgcgaatcgagtgcatgctgctgtgtgagggcgcggccgccgtgctggacatggtgcggcccaaggcccagctggtgctggctgcctgcgaaagcctgctcaccagccgccagctgcccatcttctgccagctgatcctgagaattgggaacttcctcaactacggcagccacaccggtgacgccgacggcttcaagatcagcacattgctgaagctcacggagaccaagtcccagcagaaccgcgtgacgctgctgcaccacgtgctggaggaagcggaaaagagccaccccgacctcctgcagctgccccgggacctggaacagccctcgcaagcagcagggatcaacctggagatcatccgctcagaggccagctccaacctgaagaagcttctggagaccgagcggaaggtgtctgcctccgtggccgaggtccaggagcagtacaccgagcgcctccaggccagcatctcggccttccgggcactggatgagctgtttgaggccatcgagcagaagcaacgggagctggccgactacctgtgtgaggacgcccagcagctgtccctggaggacacgttcagcaccatgaaggctttccgggaccttttcctccgcgccctgaaggagaacaaggaccggaaggagcaggcggcgaaggcagagaggaggaagcagcagctggcggaggaggaggcgcggcggcctcggggagaggacgggaagcctgtcaggaaggggcccgggaagcaggaggaggtgtgtgtcatcgatgccctgctggctgacatcaggaagggcttccagctgcggaagacagcccggggccgcggggacaccgacgggggcagcaaggcagcctccatggatcccccaagagccacagagcctgtggccaccagtaaccctgcaggagatcccgtgggcagcacgcgctgtcccgcctctgagcccggccttgatgctacaacagccagcgagtcccggggctgggaccttgtagacgccgtgacccccggccctcagcccaccctggagcagttggaggagggtggtccacggcccctggagaggcgttcttcctggtatgtggatgccagcgatgtcctaaccactgaggatccccagtgcccccagcccttggagggggcctggccggtgactctgggagatgctcaggccctgaagcccctcaagttctccagcaaccagccccctgcagccggaagttcaaggcaagatgccaaggatcccacgtccttgctgggcgtcctccaggccgaggccgacagcacaagtgaggggctggaggacgctgtccacagccgtggtgccagaccccctgcagcaggcccaggtggggatgaggacgaggacgaggaggacacggccccagagtccgcactggacacatccctggacaagtccttctccgaggatgcggtgaccgactcctcggggtcgggcacactccccagggcccggggccgggcctcaaaggggaccgggaagcgaaggaagaagcgtccctccaggagccaggaagaggttccccctgattctgatgataataaaacaaagaaactgtgtgtgatccagtaaggcctcaggcccaggcccaaggccaagtgagagagcccaggccacaggacatgctgccattctgccaagagaggctcttctgggggccaggctgggactgggccccggaaaccaaaactccgtgccttacccagccggggccctcctggagccttcttggggtgttgtggctgggaacccgacaggcaccagtgccctgccaggcctggtgccctcctggaccgcctgcacgtgccagcctcccacctgcttcctaaaggcaaccctggcccacacccgcatgcgcccggtgcagcctgccaagggccagtcggggggtgctgcgtcctgccagtgtccaccacagctctgcctgcccttcagcccagcaaggtttaatcaaaatgcaatgctttgcaagtctttactgcttggaggtggctgagttgggggccctgggcaggggtaagctggcaggcagtgccatggcaggccagggtcccctcccatggggtctggcccccgttccagcatgtccagcccctgaagttggagtggggggcggtctgcctttgctgccactgccaggcctctgccctgcagctgaaacttggccatcacatcaacagaaaacccctcccagtgccagctgcccagcgtgggcaggccctggggacaatacaggtccacctgaggggctgcagggtgacacccagcagccgctgccccctcactgcccacccagcgagggcagcctacccgagcctgccccctgccaggtgtgtgccctgaggctggcggctggatgcgtggccaataaaaagcagacct

SEQ ID NO: 281451 - DNA, 3750 bp, Artificial Sequence
  derived and/or modified sequence
atgtctgtgaaggagggcgcccagaggaagtgggccgccctgaaggagaagctgggcccccaggacagcgaccccacagaggccaacctggagagcgctgaccctgagctgtgcatccggctgctgcagatgcccagcgtggtgaactacagcggcctgaggaagaggctggagggcagtgatggcggctggatggtgcagttcctggagcagagcggcctggacctgctgctggaggccctggcccggctgagcggccggggcgtggcccgcatcagtgatgccctgctgcagctgacctgtgtgtcctgtgtgcgggctgtgatgaacagccggcagggcatcgagtacatcctgagcaaccagggctacgtgcggcagctgagccaggccctggacaccagcaatgtgatggtgaagaagcaggtgtttgagctgctggccgccctgtgcatctacagccctgagggccacgtgctgaccctggatgccctggaccactacaagacagtgtgcagccagcagtaccgcttcagcatcgtgatgaatgagctgagcggcagtgacaacgtgccctacgtggtgaccctgctgagcgtcatcaatgctgtgatcctgggccctgaggacctgcgggcccggacccagctgagaaatgagttcatcggcctgcagctgctggatgtgctggcccggctgcgggacctggaggatgctgacctgctgatccagctggaggcctttgaggaggccaaggccgaggatgaggaggagctgctgcgggtgtctggaggagtggacatgagcagccaccaggaggtgtttgccagcctcttccacaaggtgtcctgcagccctgtgtctgcccagctgctgtctgtgctgcagggcctgctgcacctggagcccaccctgcggagcagccagctgctgtgggaggccctggagagcctggtgaacagagctgtgctgctggccagtgatgcccaggagtgcaccctggaggaggtggtggagcggctgctgtctgtgaagggccggccccggcccagccccctggtgaaggcccacaagtctgtgcaggccaacctggaccagagccagaggggcagcagcccccagaacaccaccacccccaagcccagcgtggagggccagcagcctgctgctgctgctgcctgtgagcctgtggaccacgcccagagcgagagcatcctgaaggtgtcccagccccgggccctggagcagcaggccagcaccccacctcctcctcctcctccacccctgctgcccggcagcagcgctgagcccccacctcctcctcctcctccacccctgcccagcgtgggcgccaaggccctgcccacagcccctcctcctccacccctgcccggcctgggcgccatggcccccccagccccacccctgcccccacccctgcccggcagctgtgagttcctgcccccacctcctccacccctgcccggcctgggctgccccccacctcctccacccctgctgcccggcatgggctggggccccccacctcctcctccacccctgctgccctgcacctgcagcccccctgtggccggcggcatggaggaggtgattgtggcccaggtggaccacggcctgggcagcgcctgggtgcccagccacagaagagtgaacccccccaccctgaggatgaagaagctgaactggcagaagctgcccagcaatgtggcccgggagcacaacagcatgtgggccagcctgagcagcccagatgctgaggccgtggagccagacttcagcagcattgaaagactcttctccttccctgctgccaagcccaaggagcccaccatggtggccccccgggccaggaaggagcccaaggagatcaccttcctggatgccaagaagagcctgaacctgaacatcttcctgaagcagttcaagtgcagcaatgaggaggtggccgccatgatccgggccggggacaccaccaagtttgatgtggaggtgctgaagcagctgctgaagctgctgcctgagaagcatgaaattgagaacctgcgggccttcacagaggagcgggccaagctggccagcgctgaccacttctacctgctgctgctggccatcccctgctaccagctgagaattgagtgcatgctgctgtgtgagggcgctgctgctgtgctggacatggtgcggcccaaggcccagctggtgctggccgcctgtgagagcctgctgaccagccggcagctgcccatcttctgccagctgatcctgcgcatcggcaacttcctgaactacggcagccacactggagatgctgatggcttcaagatcagcaccctgctgaagctgacagagaccaagagccagcagaacagagtgaccctgctgcaccacgtgctggaggaggccgagaagagccacccagacctgctgcagctgccccgggacctggagcagcccagccaggccgccggcatcaacctggagatcatccgctctgaggccagcagcaacctgaagaagctgctggagacagagaggaaggtgtctgcctctgtggccgaggtgcaggagcagtacacagagcggctgcaggccagcatcagcgccttccgggccctggatgagctgtttgaggccatcgagcagaagcagcgggagctggccgactacctgtgtgaagatgcccagcagctgagcctggaggacaccttcagcaccatgaaggccttccgggacctcttcctgcgggccctgaaggagaacaaggacaggaaggagcaggccgccaaggccgagaggaggaagcagcagctggccgaggaggaggcccggcggcccagaggagaagatggcaagcctgtgaggaagggccctgggaagcaggaggaggtgtgtgtgattgatgccctgctggccgacatcaggaagggcttccagctgaggaagacagcccggggccgcggggacacagatggcggcagcaaggccgcctccatggaccccccccgggccacagagcctgtggccaccagcaacccagctggggaccctgtgggcagcacccgctgcccagccagcgagcccggcctggatgccaccacagccagcgagagccggggctgggacctggtggatgctgtgaccccaggcccccagcccaccctggagcagctggaggagggcggcccccggcccctggagcggcgcagctcctggtacgtggatgccagtgatgtgctgaccacagaggacccccagtgcccccagcccctggagggcgcctggcctgtgaccctgggagatgcccaggccctgaagcccctgaagttcagcagcaaccagcccccagctgctggcagcagccggcaggatgccaaggaccccaccagcctgctgggcgtgctgcaggccgaggccgacagcaccagcgagggcctggaggatgctgtgcacagcagaggagcccggcccccagctgctggccctggaggagatgaagatgaagatgaggaggacacagcccctgagagcgccctggacaccagcctggacaagagcttctctgaagatgctgtgacagacagcagcggcagcggcaccctgccccgggcccggggccgggccagcaagggcaccgggaagaggaggaagaagaggcccagccgcagccaggaggaggtgcccccagacagtgatgacaacaagaccaagaagctgtgtgtgatccagtag

SEQ ID NO: 281452 - DNA, 3750 bp, Artificial Sequence
  derived and/or modified sequence
atgagcgtgaaggagggcgcccagcggaagtgggccgccctgaaggaaaaactgggcccccaagacagcgatccaactgaggctaacctcgaatccgcagaccctgagctgtgtattcgcttgctgcagatgccctcagttgtaaactactccggcctgcggaagagactggaaggatccgacggaggctggatggtgcagttcttggagcagtccggcctcgacctcttgctcgaagcacttgcacggttgtccggccgtggtgttgcccgaatatctgatgctctgttacagctgacctgcgtgtcctgtgtcagggcagtcatgaattctcgacagggtattgaatatattttgagtaaccagggctacgtgcgtcagctcagtcaagccctcgatacctccaatgtcatggtcaagaaacaagtgttcgaattactggccgctttatgtatttacagtcctgagggtcatgtgcttacactggatgctttggaccattataaaaccgtttgctcacagcagtaccgattctccatcgtcatgaacgagctgagtgggtccgataacgtgccctacgtggtcacacttctctctgtcattaacgctgtcatcctgggaccagaggacctccgcgccagaacgcaactacgtaacgaattcattggtctccagctcctagacgtattggcgcgcttgagggacctggaggacgcggatctcctcatccagctcgaggcttttgaggaggccaaggcagaagacgaagaggagcttcttcgagtgtcaggcggagtggatatgtcaagccatcaagaggtgtttgcatccctgttccacaaggtatcctgtagtcccgtctccgcacagttgctcagtgtgctgcaggggctactgcacctggagcccactttgcggtcttcccagttgctatgggaagccttagaatctcttgttaacagagcagtcttattagccagcgacgcccaagagtgtacgttggaggaggtggtcgaaaggctgctttccgtgaagggccgccccagaccatctcccctcgtgaaggctcataagtctgtgcaggctaacctggaccaatcccagcggggatctagcccacagaacacgacaacgccaaagccatcagtggagggccagcagccagccgctgctgctgcatgtgagccagtcgaccacgcccaatccgagtctatcctcaaagtgtcccagcctcgtgctctggagcagcaggctagcacgcccccacctcctcccccgccaccattactcccaggaagctccgcggagcctccaccacccccacctccccccccactgccttcggttggagcgaaggccctgcctactgcccctcccccacccccacttccgggactcggtgcaatggctccaccggcaccgccactgcctcctcctcttccaggctcctgcgaattcctgcctccccctcccccgcccttgcccggactgggctgcccaccacccccccctcccctgcttcctggtatggggtgggggccaccccccccacccccaccattactgccctgtacctgttcccctcccgtcgccggcgggatggaagaagttatcgtggcccaggtggatcacggcctaggctccgcatgggtgccttcacaccggcgcgtcaatccacccactttgaggatgaagaagctcaattggcaaaaactgccgtctaacgtcgcccgagagcacaattcaatgtgggcatcattatccagtcccgatgcggaggcggtggaaccggactttagtagtattgagcggcttttctcgttccccgctgctaagcccaaggagcctactatggtcgctccgagggcaaggaaagagcccaaagagatcactttcctggacgccaagaaatccctgaacctaaacatctttttgaaacagttcaagtgttctaatgaagaggtagccgcaatgatacgcgctggcgacacgacgaagttcgatgtggaggtgttgaagcaactcctgaagctgcttcccgaaaagcatgaaattgaaaacctgcgtgctttcaccgaagagagggcgaagctcgcatccgctgatcacttctatttgctcctgttagctatcccatgctatcagctgagaatagagtgcatgctgctctgtgaaggcgctgctgccgtgcttgacatggtgcggcccaaagcccagcttgtcttggctgcttgcgagtcattactgacctcccgtcagttgcccattttctgccaactgattctcagaatcggaaatttcctaaattacggcagtcacacaggggatgctgatggtttcaagatctctactttgctcaaactcactgaaaccaagtcgcagcagaacagagttacactactacatcacgtgctggaggaggcggaaaagagccatccagacctactccagctccctcgggaccttgaacagccgagccaggctgctggcattaatctggaaataatcaggtccgaagccagttccaacctaaaaaagctgctggaaactgagagaaaggtttccgccagcgttgccgaagttcaagaacagtacacagagagattgcaggcatctatctcagctttccgcgcattggacgaactcttcgaggccattgagcagaaacagcgagagcttgctgattacctgtgtgaggacgcccagcagctgagtctagaagacactttctcgacaatgaaggctttccgggatctgtttctccgggcccttaaagaaaacaaggataggaaggagcaggccgccaaggccgagcgtaggaaacagcagttggcagaggaggaggccagaaggccgaggggcgaagacggaaaaccagtgcggaaggggcctggaaagcaagaggaggtatgtgtaatcgacgcccttcttgccgatattcgcaaggggtttcaactacggaagaccgcacgtggtaggggggacaccgacggcggctccaaggccgcatcaatggacccccccagagccaccgaaccagttgctactagcaatcccgctggagatccagttggatctaccagatgccccgcaagcgagccagggctggacgcaaccaccgcctctgaatcacgaggctgggaccttgtcgacgcggtcacccccgggccacaacctactcttgagcagttggaagagggggggcccagacccctcgaacgaagatcaagttggtatgtggatgcctctgacgtgctcacaacagaggatccccagtgtccgcagcctctagaaggagcatggccagtgacactaggcgatgctcaggcccttaagcctctgaagttttcatctaatcagccacctgctgccggttcttcaagacaggacgctaaagacccgacctctctattgggagtacttcaagccgaagccgactctaccagtgagggtttggaagatgcggtgcactcacggggggcgaggcctccggctgctggacctgggggggatgaggacgaggatgaggaagataccgccccggagagcgctctggacacttctctggacaagagtttcagcgaggacgccgtgaccgactcctctggatcagggactctcccccgagcaagaggaagagcgagcaaggggacgggtaagcggcggaagaagcgccccagccgctctcaagaggaagtccccccagattccgacgacaataagaccaaaaaactttgcgtcatacagtag

SEQ ID NO: 281453 - DNA, 3750 bp, Artificial Sequence
  derived and/or modified sequence
atgtccgtgaaggaaggtgctcagaggaaatgggccgcactcaaggaaaagcttggccctcaggactccgatcctactgaggccaatcttgagtctgcagaccctgagctgtgtataaggctgcttcagatgccctctgtggtgaactactccgggctgcgcaagagattggaagggtccgacgggggatggatggtgcagttcctggagcagtccgggctggatctcctcctggaggccctagcaaggctgtcagggcgaggagtggccaggatcagcgatgctctgctgcagttgacatgcgtgtcatgcgttagagccgttatgaactctcgccagggaatcgaatatattctgtctaatcaaggttacgtgagacagctctctcaggctctcgacaccagtaacgtaatggtcaagaagcaggtgttcgaactgcttgccgcactctgcatatattctccggaaggccatgttctcactcttgatgcattagatcattacaaaactgtgtgtagccagcagtacagattttccatcgtcatgaacgaactgagcggaagtgataatgtgccttatgttgtgactttgctcagcgtaattaatgctgtcatcctgggaccagaggaccttcgggctaggacccaactccgcaacgagttcatcggattgcagctcctggacgtgctggctagattgagggatcttgaagacgccgaccttcttatccagctggaagcattcgaagaggcaaaagccgaggacgaagaagaactgttgcgcgtgtctggcggtgttgacatgtcatctcaccaggaggtttttgcttctctgttccataaagtcagctgcagtcctgtaagtgcacaactgctaagtgtgctccagggtctactgcacttggaaccaaccctgcgcagttcccaattgttatgggaggctctcgaaagcctcgtgaaccgggcagtcctgctggcttctgacgcccaggagtgcaccctggaagaagttgtggagcggctgctgtctgtcaaaggcaggcccaggcctagccccctcgtgaaagcccataaaagcgtgcaggccaatctcgaccaatctcagaggggctctagtccacagaacaccaccacacctaagccatccgtggaaggccagcagccagccgctgcagcagcatgcgaacctgtggatcatgcccagtctgagtccattctgaaagtgtcgcaacccagggccctcgagcaacaggctagtaccccacctccccctcctcctccacctttacttcccggttcatccgctgagccgcctccacccccacctccgccacccctcccatcagttggtgccaaggctctgccaacagcccctccccctcctcccctgcctggattaggcgcaatggcaccgccagcaccccctttgcctcctcccctgccagggtcctgtgagttcctgcctccaccaccccctcccttacccggtcttggatgtcctccaccgcctccccctttgctccccggaatggggtgggggccacctccgccacctccgcctttgttaccttgcacgtgctcccctcccgtggccggtggcatggaggaagtcattgttgcacaggtggaccacggcctcgggtccgcatgggttcccagccataggcgagtcaaccctcctaccctgaggatgaaaaaattgaattggcagaagctgcccagcaacgttgctcgcgagcacaactctatgtgggctagcttatcaagtcccgatgcagaggccgtcgaaccagatttcagcagtattgaacgcctgttttcctttccagccgcaaagccaaaagaacctacaatggtggcccctcgagccagaaaggagcctaaggaaatcaccttcctggatgccaagaagtccctcaatctgaacattttcctgaagcagttcaagtgtagcaacgaggaggtagccgctatgataagagcaggcgacacaactaaatttgacgtcgaggtgctcaagcaactgcttaagctcctgcctgagaagcacgagatagagaacctccgcgctttcacagaggaaagagccaagcttgcgtctgcggaccatttttatctcttgttactagctataccgtgttaccagctccgcatcgagtgtatgctcctgtgcgagggagctgctgccgttctggatatggttagaccaaaggcccagctggtgctcgctgcctgcgaatccctccttacctcgcgtcagttgcccatcttctgccagctgatactgagaatcggtaactttctaaactatggaagtcacacaggggacgccgacggatttaagatatcaacacttttgaagctgacagagacaaaatcccaacaaaaccgggtgacactcctgcaccatgtgctcgaagaggctgagaaaagccaccccgatctgcttcagctacctcgcgatctcgagcagccctcccaggccgcaggaataaaccttgaaatcattcgcagcgaggcttcttctaaccttaagaagctcctcgagacagagcgcaaggttagcgcttccgtagctgaagtgcaggaacagtatacagaacggctgcaagcaagcatcagcgctttcagagccctcgatgagctgttcgaagcaattgagcagaagcaaagagaactcgccgactatctatgtgaggacgcccagcaactgagtctggaagataccttcagcactatgaaagccttccgggacctgttcctgcgcgctctgaaggagaataaggacaggaaggaacaagcggcaaaggctgagaggagaaaacagcaactagccgaagaagaggccagacggcctcgcggagaggatggaaagcctgtgcgaaaaggacctggaaagcaggaagaagtgtgcgtcatcgacgctctgttagcagatattcggaagggttttcaactgagaaagactgccaggggacggggtgacaccgacggtggatccaaggctgcctcaatggacccccctcgagccaccgaacccgtggcaactagtaatccggcaggagacccagtcgggtcaactcgctgtcctgccagtgagcccggtttggacgctaccaccgcttctgaaagcagagggtgggatctcgttgacgctgtgaccccagggcctcagcccactcttgagcagcttgaagaaggcggtccaaggccactggaacgcaggtcaagctggtatgttgatgcttcagatgtgctcaccaccgaggacccccagtgtccccagcctctggagggggcatggcctgtcaccctgggtgacgcccaggccttaaaacccttgaagttctcctccaatcagcccccagcagctgggtcctctcggcaggacgctaaggatccaacatccctcctgggggttcttcaggctgaagctgattccacatctgaaggactggaggatgccgtgcattcaaggggagctaggcccccagctgccggaccgggtggggacgaggatgaggatgaggaagacactgcccctgaatccgccctggatacctccctagacaaaagcttcagcgaggacgccgtgaccgactcctcaggatctgggactttgccacgcgcacgcggtcgagcgagtaaagggactggcaagcgccgtaagaaacgtcccagcaggtcccaggaagaggtccctccagattccgatgataacaaaaccaaaaagctttgtgtcatccagtag

SEQ ID NO: 281454 - DNA, 3750 bp, Artificial Sequence
  derived and/or modified sequence
atgagcgtgaaggagggcgcccagagaaagtgggccgccctgaaggagaagctgggcccccaggacagcgaccccaccgaggccaacctggagagcgccgaccccgagctgtgcatcagactgctgcagatgcccagcgtggtgaactacagcggcctgagaaagagactggagggcagcgacggcggctggatggtgcagttcctggagcagagcggcctggacctgctgctggaggccctggccagactgagcggcagaggcgtggccagaatcagcgacgccctgctgcagctgacctgcgtgagctgcgtgagagccgtgatgaacagcagacagggcatcgagtacatcctgagcaaccagggctacgtgagacagctgagccaggccctggacaccagcaacgtgatggtgaagaagcaggtgttcgagctgctggccgccctgtgcatctacagccccgagggccacgtgctgaccctggacgccctggaccactacaagaccgtgtgcagccagcagtacagattcagcatcgtgatgaacgagctgagcggcagcgacaacgtgccctacgtggtgaccctgctgagcgtgatcaacgccgtgatcctgggccccgaggacctgagagccagaacccagctgagaaacgagttcatcggcctgcagctgctggacgtgctggccagactgagagacctggaggacgccgacctgctgatccagctggaggccttcgaggaggccaaggccgaggacgaggaggagctgctgagagtgagcggcggcgtggacatgagcagccaccaggaggtgttcgccagcctgttccacaaggtgagctgcagccccgtgagcgcccagctgctgagcgtgctgcagggcctgctgcacctggagcccaccctgagaagcagccagctgctgtgggaggccctggagagcctggtgaacagagccgtgctgctggccagcgacgcccaggagtgcaccctggaggaggtggtggagagactgctgagcgtgaagggcagacccagacccagccccctggtgaaggcccacaagagcgtgcaggccaacctggaccagagccagagaggcagcagcccccagaacaccaccacccccaagcccagcgtggagggccagcagcccgccgccgccgccgcctgcgagcccgtggaccacgcccagagcgagagcatcctgaaggtgagccagcccagagccctggagcagcaggccagcaccccccccccccccccccccccccccctgctgcccggcagcagcgccgagcccccccccccccccccccccccccccctgcccagcgtgggcgccaaggccctgcccaccgcccccccccccccccccctgcccggcctgggcgccatggccccccccgccccccccctgcccccccccctgcccggcagctgcgagttcctgccccccccccccccccccctgcccggcctgggctgcccccccccccccccccccctgctgcccggcatgggctggggccccccccccccccccccccccctgctgccctgcacctgcagcccccccgtggccggcggcatggaggaggtgatcgtggcccaggtggaccacggcctgggcagcgcctgggtgcccagccacagaagagtgaacccccccaccctgagaatgaagaagctgaactggcagaagctgcccagcaacgtggccagagagcacaacagcatgtgggccagcctgagcagccccgacgccgaggccgtggagcccgacttcagcagcatcgagagactgttcagcttccccgccgccaagcccaaggagcccaccatggtggcccccagagccagaaaggagcccaaggagatcaccttcctggacgccaagaagagcctgaacctgaacatcttcctgaagcagttcaagtgcagcaacgaggaggtggccgccatgatcagagccggcgacaccaccaagttcgacgtggaggtgctgaagcagctgctgaagctgctgcccgagaagcacgagatcgagaacctgagagccttcaccgaggagagagccaagctggccagcgccgaccacttctacctgctgctgctggccatcccctgctaccagctgagaatcgagtgcatgctgctgtgcgagggcgccgccgccgtgctggacatggtgagacccaaggcccagctggtgctggccgcctgcgagagcctgctgaccagcagacagctgcccatcttctgccagctgatcctgagaatcggcaacttcctgaactacggcagccacaccggcgacgccgacggcttcaagatcagcaccctgctgaagctgaccgagaccaagagccagcagaacagagtgaccctgctgcaccacgtgctggaggaggccgagaagagccaccccgacctgctgcagctgcccagagacctggagcagcccagccaggccgccggcatcaacctggagatcatcagaagcgaggccagcagcaacctgaagaagctgctggagaccgagagaaaggtgagcgccagcgtggccgaggtgcaggagcagtacaccgagagactgcaggccagcatcagcgccttcagagccctggacgagctgttcgaggccatcgagcagaagcagagagagctggccgactacctgtgcgaggacgcccagcagctgagcctggaggacaccttcagcaccatgaaggccttcagagacctgttcctgagagccctgaaggagaacaaggacagaaaggagcaggccgccaaggccgagagaagaaagcagcagctggccgaggaggaggccagaagacccagaggcgaggacggcaagcccgtgagaaagggccccggcaagcaggaggaggtgtgcgtgatcgacgccctgctggccgacatcagaaagggcttccagctgagaaagaccgccagaggcagaggcgacaccgacggcggcagcaaggccgccagcatggacccccccagagccaccgagcccgtggccaccagcaaccccgccggcgaccccgtgggcagcaccagatgccccgccagcgagcccggcctggacgccaccaccgccagcgagagcagaggctgggacctggtggacgccgtgacccccggcccccagcccaccctggagcagctggaggagggcggccccagacccctggagagaagaagcagctggtacgtggacgccagcgacgtgctgaccaccgaggacccccagtgcccccagcccctggagggcgcctggcccgtgaccctgggcgacgcccaggccctgaagcccctgaagttcagcagcaaccagccccccgccgccggcagcagcagacaggacgccaaggaccccaccagcctgctgggcgtgctgcaggccgaggccgacagcaccagcgagggcctggaggacgccgtgcacagcagaggcgccagaccccccgccgccggccccggcggcgacgaggacgaggacgaggaggacaccgcccccgagagcgccctggacaccagcctggacaagagcttcagcgaggacgccgtgaccgacagcagcggcagcggcaccctgcccagagccagaggcagagccagcaagggcaccggcaagagaagaaagaagagacccagcagaagccaggaggaggtgccccccgacagcgacgacaacaagaccaagaagctgtgcgtgatccagtag

SEQ ID NO: 281455 - DNA, 3723 bp, Artificial Sequence
  derived and/or modified sequence
atgtccgtgaaagaaggggctcagaggaaatgggctgccttaaaagagaaactgggtccccaagattccgatccaaccgaagccaacctcgaatcagctgatcccgaactctgcatacgactgctgcagatgccctctgtagtcaactactctggcctgcgaaagcgcttagaaggatccgacgggggatggatggtgcaattcctcgaacagagcggcctcgatcttctgttagaggctcttgcgaggctgtctggcagaggcgtggccagaatcagcgacgcactcctccagctcacctgcgtctcgtgtgttagagctgtgatgaactcaagacagggcatcgaatacatactgtctaaccagggctatgtgagacaacttagtcaggcactggacacctctaatgtgatggtaaagaagcaagtgttcgaactccttgcagcactgtgtatctattcccccgagggccatgtcctgacacttgacgctctggaccattacaaaacggtgtgttcccagcagtatcggttctctatagtgatgaacgagctgagcggctcagacaatgtcccctacgtggttacactactatccgtgataaacgccgtgatcctaggcccggaagacctgcgagctcgaacgcagctcaggaacgagtttatcgggttgcagctgttagatgtcttggcacgcctgcgggacctggaagacgcagacctgctcatacagttggaggcatttgaggaagccaaggctgaggatgaagaggagctccttcgcgtaagcgggggcgttgatatgagttcccaccaggaggtgttcgccagcttgtttcataaagtatcctgcagccccgtgtctgctcaactgctctctgtgttgcaaggattgctccacctagagccaacattacgcagttcccaattgctctgggaagccctggaatccttagtaaatcgggcagtactactggccagcgatgcacaggagtgtactctagaggaagtggttgagcgattgttgagtgtgaaaggtcggccacggccctcacccctagtaaaggcgcacaagtccgtgcaagcgaatctggaccagtctcagcggggttcttcccctcagaacactaccacccccaaacctagtgttgagggccagcagcctgccgctgccgccgcatgtgagcccgtggaccatgcacaatctgaatcgatccttaaggtaagtcaaccccgcgcactcgaacagcaggcaagtacacctccaccaccccccccacctcctctgctccccggtagctctgccgaacccccccccccccccccccctcctcctctgcccagcgtgggagcaaaggcacttcctaccgcgccacccccgccacccctgccaggcctaggtgctatggcacccccggctcctcctctgcctccacctcttcccggcagttgcgagtttctgccaccgccccctccccccctccccggcctgggctgtccccccccccctcccccgcttctccccggaatgggctggggccctccacccccccctccccctctgctgccctgcacttgctcaccacctgtggcaggcggaatggaagaagtgattgtggcccaagtagatcacgggcttggttccgcctgggtgcctagccatagaagggtgaatcctcccaccctccggatgaaaaagctgaattggcagaaactgccgtcgaacgtcgcacgtgagcataattctatgtgggcatccctgtcttctccagacgctgaagcagtggagccagacttctcctctatcgagcggctttttagcttccctgctgccaaacctaaggagccaaccatggtagccccccgagctcgaaaggagcctaaagaaatcacctttcttgacgctaaaaagtcgctgaacctcaacatttttctaaagcagttcaaatgctctaatgaagaggtcgcagccatgattagagccggcgacacgactaagttcgacgtcgaagtcctgaagcagttgcttaagctgctccctgaaaaacatgagatagaaaaccttcgcgcatttaccgaagagcgcgccaaacttgcctcagctgatcatttctacctgcttcttctcgcaatcccctgctaccagttgagaatcgagtgtatgctgctatgcgagggcgctgctgccgtactggatatggtgcgacctaaggcacaactggtgttggccgcttgcgagagtttactcacttcgcggcagctgcccattttctgccagctcatcctgcggatcggcaattttttaaactacggatcccataccggggacgcagacggcttcaaaatcagcaccctcttaaagttgacagagactaagtctcaacagaaccgcgtgaccctactacatcacgtgttagaggaggctgagaagagccaccctgacctccttcaacttccccgcgacctcgaacagcccagtcaggctgccggcatcaacttagagattatccgctccgaggcctcatctaatttaaagaaactgttagagaccgagcgcaaggtgtctgcttccgtggcagaagtgcaagaacaatacacagaacggctgcaggcctctatttctgccttccgcgccctggatgagctgttcgaagcaatagagcagaaacagcgtgaattagcggactacttatgcgaggatgcacagcagttgagcttggaagacactttctcaacaatgaaggccttcagagatctctttctgcgggcactgaaggagaacaaggaccgcaaagaacaggccgcgaaggccgagcgcaggaagcagcaactcgctgaggaagaggccaggagaccacgcggtgaagacggaaagcccgttcgtaaggggccaggaaagcaagaggaagtctgcgttattgacgccttgctggctgacatacggaaaggatttcagttgaggaaaaccgctagaggccgtggggatactgatgggggatccaaagcggcatctatggatccacccagagccactgagcctgtggccactagcaatccagcaggtgaccccgtcggcagcacacgctgtcctgcatctgaacccggcttggacgcaacaacagccagcgaatcaagaggctgggacctcgtggacgccgtgacaccggggccacagccaaccctggagcagctggaagagggaggtccccgaccgctcgaacggcgctctagttggtatgttgacgcctctgacgtgctaacgaccgaggatccgcagtgcccccagcctctagagggggcatggcccgtcacgctgggcgacgcgcaggcgctcaagccacttaagttttcaagcaaccagccaccagcagcaggatcaagccgtcaggacgctaaagacccaacctctttgctgggtgttcttcaggcagaggccgatagcacaagcgaaggccttgaggatgcagtccactccagaggggcccgcccaccagccgctggcccgggcggcgatgaggatgaggacgaagaagacaccgctcctgagtctgctcttgataccagtctcgacaaaagcttctctgaagacgctgtgactgacagttcaggttctggaaccctgccaagagccaggggtcgggccagcaaaggaactgggaaaaggaggaaaaaacgaccttcaagatctcaggagggcctcaggccccgcccgaaggcgaaatag

SEQ ID NO: 281456 - DNA, 4648 bp, Artificial Sequence
  derived and/or modified sequence
cgccccgcgcccgccaggagccaccgtccgagccttgcggagcgcggcagtgggcgccggctgcccgcagcccctgacccggccccggacggagcgccggccgcaccaccgccctctggccgttgcctcaccggctcggcaagatgtcggtgaaggagggcgcacagcgcaagtgggcagcgctgaaggagaagctggggccacaggattcggaccccacggaggccaacctggagagcgcggaccccgagctgtgcatccggctgctccagatgccctctgtggtcaactactccggcctgcgcaagcgcctggagggcagcgacggcggctggatggtgcagttcctggagcagagcggcctggacctgctgctggaggcgctggcgcggctgtcgggccgcggcgttgcacgtatctccgacgccctgctgcagctcacctgcgtcagctgcgtgcgcgccgtcatgaactcgcggcagggcatcgagtacatcctcagcaaccagggctacgtgcgccagctctcccaggccctggacacatccaacgtgatggtgaagaagcaggtgtttgagctactggctgccctgtgcatctactctcccgagggccacgtgctgaccctggacgccctggaccactacaagacggtgtgcagccagcagtaccgcttcagcattgtcatgaacgagctctccggcagcgacaacgtgccctacgtggtcaccctgcttagcgtgatcaacgccgtcatcttgggccccgaggacctgcgcgcgcgcacccagctgcggaacgagtttatcgggctgcagctgctggacgtcctggctcgcctgcgagacctggaggatgccgacctgctgatccagctggaggctttcgaggaggctaaggccgaggacgaggaggagctgctgcgagtctctggcggggtcgacatgagcagccaccaggaggtctttgcctccctgttccacaaggtgagctgctccccggtgtctgcccagctcctgtcggtgctgcagggcctcctgcacctggagcccaccctccgctccagccagctgctctgggaggccctggagagcctcgtgaaccgggccgtgctcctggccagcgatgcccaggaatgcaccctggaggaagtggttgagcggctcctgtctgtcaaggggcgacccagaccgagccccctggtcaaggcccataaaagcgtccaggccaacctagaccagagccagaggggcagctccccgcaaaacactacaacccccaagcccagcgtggagggccagcagccagcagcagctgctgcctgcgagcccgtggaccacgcccagagtgagagcatcctgaaagtttcgcagcccagagccctggagcagcaggcgtccaccccacccccacccccacccccacccctgctccctggttccagtgccgagccccctccccctcccccaccaccccccctgcccagtgtgggggctaaggccctcccaacagcacccccgcccccacccctgccaggcctgggggccatggcccccccagcacctcctctaccaccacccctgccaggctcctgtgagttcctgcccccaccacctccaccactcccgggcttgggatgcccgcccccacccccacccctgctgcctggtatgggctggggccctcctccacccccacctccactactgccctgcacctgcagcccccccgtggcgggaggcatggaggaggtcatcgtggcccaggtggaccatggcttgggctcagcatgggtccccagccatcggcgggtgaacccacccacactgcgcatgaagaagctgaactggcagaagctgccatccaacgtggcacgtgagcacaactctatgtgggcgtccctgagcagccccgacgccgaggctgtggagcccgacttctccagcatcgagcgactattctccttccctgcagccaagcccaaggagcccaccatggtggccccccgggccaggaaggagcccaaggagatcactttcctcgatgccaagaagagcctgaacctcaacatcttcctgaagcaatttaagtgctccaacgaggaggtcgctgctatgatccgggctggagataccaccaagtttgatgtggaggttctcaaacaactccttaagctccttcccgagaagcacgagattgaaaacctgcgggcattcacagaggagcgagccaagctggccagcgccgaccacttctacctcctcctgctggccattccctgctaccagctgcgaatcgagtgcatgctgctgtgtgagggcgcggccgccgtgctggacatggtgcggcccaaggcccagctggtgctggctgcctgcgaaagcctgctcaccagccgccagctgcccatcttctgccagctgatcctgagaattgggaacttcctcaactacggcagccacaccggtgacgccgacggcttcaagatcagcacattgctgaagctcacggagaccaagtcccagcagaaccgcgtgacgctgctgcaccacgtgctggaggaagcggaaaagagccaccccgacctcctgcagctgccccgggacctggaacagccctcgcaagcagcagggatcaacctggagatcatccgctcagaggccagctccaacctgaagaagcttctggagaccgagcggaaggtgtctgcctccgtggccgaggtccaggagcagtacaccgagcgcctccaggccagcatctcggccttccgggcactggatgagctgtttgaggccatcgagcagaagcaacgggagctggccgactacctgtgtgaggacgcccagcagctgtccctggaggacacgttcagcaccatgaaggctttccgggaccttttcctccgcgccctgaaggagaacaaggaccggaaggagcaggcggcgaaggcagagaggaggaagcagcagctggcggaggaggaggcgcggcggcctcggggagaggacgggaagcctgtcaggaaggggcccgggaagcaggaggaggtgtgtgtcatcgatgccctgctggctgacatcaggaagggcttccagctgcggaagacagcccggggccgcggggacaccgacgggggcagcaaggcagcctccatggatcccccaagagccacagagcctgtggccaccagtaaccctgcaggagatcccgtgggcagcacgcgctgtcccgcctctgagcccggccttgatgctacaacagccagcgagtcccggggctgggaccttgtagacgccgtgacccccggccctcagcccaccctggagcagttggaggagggtggtccacggcccctggagaggcgttcttcctggtatgtggatgccagcgatgtcctaaccactgaggatccccagtgcccccagcccttggagggggcctggccggtgactctgggagatgctcaggccctgaagcccctcaagttctccagcaaccagccccctgcagccggaagttcaaggcaagatgccaaggatcccacgtccttgctgggcgtcctccaggccgaggccgacagcacaagtgaggggctggaggacgctgtccacagccgtggtgccagaccccctgcagcaggcccaggtggggatgaggacgaggacgaggaggacacggccccagagtccgcactggacacatccctggacaagtccttctccgaggatgcggtgaccgactcctcggggtcgggcacactccccagggcccggggccgggcctcaaaggggaccgggaagcgaaggaagaagcgtccctccaggagccaggaaggcctcaggcccaggcccaaggccaagtgagagagcccaggccacaggacatgctgccattctgccaagagaggctcttctgggggccaggctgggactgggccccggaaaccaaaactccgtgccttacccagccggggccctcctggagccttcttggggtgttgtggctgggaacccgacaggcaccagtgccctgccaggcctggtgccctcctggaccgcctgcacgtgccagcctcccacctgcttcctaaaggcaaccctggcccacacccgcatgcgcccggtgcagcctgccaagggccagtcggggggtgctgcgtcctgccagtgtccaccacagctctgcctgcccttcagcccagcaaggtttaatcaaaatgcaatgctttgcaagtctttactgcttggaggtggctgagttgggggccctgggcaggggtaagctggcaggcagtgccatggcaggccagggtcccctcccatggggtctggcccccgttccagcatgtccagcccctgaagttggagtggggggcggtctgcctttgctgccactgccaggcctctgccctgcagctgaaacttggccatcacatcaacagaaaacccctcccagtgccagctgcccagcgtgggcaggccctggggacaatacaggtccacctgaggggctgcagggtgacacccagcagccgctgccccctcactgcccacccagcgagggcagcctacccgagcctgccccctgccaggtgtgtgccctgaggctggcggctggatgcgtggccaataaaaagcagacctag

SEQ ID NO: 281457 - DNA, 3723 bp, Artificial Sequence
  derived and/or modified sequence
atgtctgtgaaggagggcgcccagaggaagtgggccgccctgaaggagaagctgggcccccaggacagcgaccccacagaggccaacctggagagcgctgaccctgagctgtgcatccggctgctgcagatgcccagcgtggtgaactacagcggcctgaggaagaggctggagggcagtgatggcggctggatggtgcagttcctggagcagagcggcctggacctgctgctggaggccctggcccggctgagcggccggggcgtggcccgcatcagtgatgccctgctgcagctgacctgtgtgtcctgtgtgcgggctgtgatgaacagccggcagggcatcgagtacatcctgagcaaccagggctacgtgcggcagctgagccaggccctggacaccagcaatgtgatggtgaagaagcaggtgtttgagctgctggccgccctgtgcatctacagccctgagggccacgtgctgaccctggatgccctggaccactacaagacagtgtgcagccagcagtaccgcttcagcatcgtgatgaatgagctgagcggcagtgacaacgtgccctacgtggtgaccctgctgagcgtcatcaatgctgtgatcctgggccctgaggacctgcgggcccggacccagctgagaaatgagttcatcggcctgcagctgctggatgtgctggcccggctgcgggacctggaggatgctgacctgctgatccagctggaggcctttgaggaggccaaggccgaggatgaggaggagctgctgcgggtgtctggaggagtggacatgagcagccaccaggaggtgtttgccagcctcttccacaaggtgtcctgcagccctgtgtctgcccagctgctgtctgtgctgcagggcctgctgcacctggagcccaccctgcggagcagccagctgctgtgggaggccctggagagcctggtgaacagagctgtgctgctggccagtgatgcccaggagtgcaccctggaggaggtggtggagcggctgctgtctgtgaagggccggccccggcccagccccctggtgaaggcccacaagtctgtgcaggccaacctggaccagagccagaggggcagcagcccccagaacaccaccacccccaagcccagcgtggagggccagcagcctgctgctgctgctgcctgtgagcctgtggaccacgcccagagcgagagcatcctgaaggtgtcccagccccgggccctggagcagcaggccagcaccccacctcctcctcctcctccacccctgctgcccggcagcagcgctgagcccccacctcctcctcctcctccacccctgcccagcgtgggcgccaaggccctgcccacagcccctcctcctccacccctgcccggcctgggcgccatggcccccccagccccacccctgcccccacccctgcccggcagctgtgagttcctgcccccacctcctccacccctgcccggcctgggctgccccccacctcctccacccctgctgcccggcatgggctggggccccccacctcctcctccacccctgctgccctgcacctgcagcccccctgtggccggcggcatggaggaggtgattgtggcccaggtggaccacggcctgggcagcgcctgggtgcccagccacagaagagtgaacccccccaccctgaggatgaagaagctgaactggcagaagctgcccagcaatgtggcccgggagcacaacagcatgtgggccagcctgagcagcccagatgctgaggccgtggagccagacttcagcagcattgaaagactcttctccttccctgctgccaagcccaaggagcccaccatggtggccccccgggccaggaaggagcccaaggagatcaccttcctggatgccaagaagagcctgaacctgaacatcttcctgaagcagttcaagtgcagcaatgaggaggtggccgccatgatccgggccggggacaccaccaagtttgatgtggaggtgctgaagcagctgctgaagctgctgcctgagaagcatgaaattgagaacctgcgggccttcacagaggagcgggccaagctggccagcgctgaccacttctacctgctgctgctggccatcccctgctaccagctgagaattgagtgcatgctgctgtgtgagggcgctgctgctgtgctggacatggtgcggcccaaggcccagctggtgctggccgcctgtgagagcctgctgaccagccggcagctgcccatcttctgccagctgatcctgcgcatcggcaacttcctgaactacggcagccacactggagatgctgatggcttcaagatcagcaccctgctgaagctgacagagaccaagagccagcagaacagagtgaccctgctgcaccacgtgctggaggaggccgagaagagccacccagacctgctgcagctgccccgggacctggagcagcccagccaggccgccggcatcaacctggagatcatccgctctgaggccagcagcaacctgaagaagctgctggagacagagaggaaggtgtctgcctctgtggccgaggtgcaggagcagtacacagagcggctgcaggccagcatcagcgccttccgggccctggatgagctgtttgaggccatcgagcagaagcagcgggagctggccgactacctgtgtgaagatgcccagcagctgagcctggaggacaccttcagcaccatgaaggccttccgggacctcttcctgcgggccctgaaggagaacaaggacaggaaggagcaggccgccaaggccgagaggaggaagcagcagctggccgaggaggaggcccggcggcccagaggagaagatggcaagcctgtgaggaagggccctgggaagcaggaggaggtgtgtgtgattgatgccctgctggccgacatcaggaagggcttccagctgaggaagacagcccggggccgcggggacacagatggcggcagcaaggccgcctccatggaccccccccgggccacagagcctgtggccaccagcaacccagctggggaccctgtgggcagcacccgctgcccagccagcgagcccggcctggatgccaccacagccagcgagagccggggctgggacctggtggatgctgtgaccccaggcccccagcccaccctggagcagctggaggagggcggcccccggcccctggagcggcgcagctcctggtacgtggatgccagtgatgtgctgaccacagaggacccccagtgcccccagcccctggagggcgcctggcctgtgaccctgggagatgcccaggccctgaagcccctgaagttcagcagcaaccagcccccagctgctggcagcagccggcaggatgccaaggaccccaccagcctgctgggcgtgctgcaggccgaggccgacagcaccagcgagggcctggaggatgctgtgcacagcagaggagcccggcccccagctgctggccctggaggagatgaagatgaagatgaggaggacacagcccctgagagcgccctggacaccagcctggacaagagcttctctgaagatgctgtgacagacagcagcggcagcggcaccctgccccgggcccggggccgggccagcaagggcaccgggaagaggaggaagaagaggcccagccgcagccaggagggcctgcggccccggcccaaggccaagtag

SEQ ID NO: 281458 - DNA, 3723 bp, Artificial Sequence
  derived and/or modified sequence
atgagcgtgaaggagggcgcccagcggaagtgggccgccctgaaggagaaacttggtcctcaggattctgatccgacagaggcaaacctggaatctgcagatcctgagctgtgtatcagactactccaaatgccctcagtcgtgaactactcaggccttcggaagaggttggaggggagtgatggaggatggatggttcagttcctggagcaatccggcttagacctgctgctcgaggccttggcgcgtctctcgggtagaggtgtggcgagaattagcgacgcactgctacaactgacatgtgtttcctgcgtccgggcagtgatgaacagtagacagggcattgagtacattcttagtaatcaaggatacgttaggcagctgtcccaggctcttgataccagcaacgttatggttaagaaacaagtgttcgaattactggccgctttatgtatttacagcccagaaggccatgtgctgaccctggacgcccttgatcattataaaactgtttgttcccagcagtacaggttttcgattgtgatgaacgagctttcagggtctgacaacgttccctatgtggtgacactactgtccgtgattaacgccgtcatcctgggccccgaagacctaagggcaagaacacagctgagaaacgagttcattggcctacagctgttggatgtgctggccaggcttcgcgatctggaggacgctgatctgctgattcagctggaggcctttgaggaagcgaaagcagaagacgaagaggaattgctacgggtgtctggtggtgtggatatgagttctcaccaagaagtctttgcttctctgttccataaagtatcatgtagccctgttagcgctcaattgttgtctgtgctgcagggtctgctgcacctcgagccaactctccggagctcccagctcctctgggaggcactggagtccctggttaatagggcggtcctgcttgctagcgacgcccaggagtgtactttggaggaggtcgtggaacgactcctctcagtgaaggggaggccgcgcccctccccactggtgaaggcacataagtccgtccaggccaatttggaccagagccagaggggtagttcccctcagaataccactacaccgaagccaagcgtagaggggcagcagcctgcggcagctgcagcgtgtgagcccgtcgatcacgctcagtctgagagcatcctaaaagtatcacagccccgagccttagagcagcaggctagtacccctccacccccaccgccgccccccctcttgcccggatcttccgcggaaccaccgcccccacctccaccacccccactcccctcagtgggggccaaagcactgcctacagccccgccccccccccctctgccgggactgggtgccatggcccccccagctcccccactgcctccacctcttccagggagctgcgaattccttcctccaccacccccgccactgccaggtctgggatgcccccctcctcctccacctctgcttcccgggatgggatggggcccccccccccccccacccccactcctgccatgtacttgtagccctcctgtggcaggtggcatggaggaagttatcgtggcgcaggtggaccacggcctaggaagcgcttgggtgccatctcatagaagggtcaatccaccaacactgaggatgaaaaagttgaactggcagaagctcccgagcaacgttgcacgagaacataatagtatgtgggcctccctatcatctcccgacgcagaggccgttgagccagacttctcctcaatcgagcgtctgttctctttccccgctgccaaaccaaaggaacctacgatggttgcaccacgggcccgaaaggagcccaaggagatcacttttctggatgccaaaaagtccctcaacctcaatattttcttgaaacaattcaagtgttcaaacgaagaagtggccgctatgatccgtgccggcgatacaaccaagtttgatgttgaggtcttgaaacagctgttgaaattactgcccgagaaacatgagattgagaatcttagggccttcaccgaagaacgcgctaagctggccagcgcagatcatttctatttacttctgctggctatcccctgctaccagctgcgcattgagtgtatgcttctctgcgagggggcagccgcggttctcgacatggtacggcctaaagcacagcttgtgcttgcagcctgcgagagcttattgactagccgtcaactgccaattttctgtcagcttatcctaaggatagggaactttctgaactatggttcacacacaggcgatgccgacgggtttaagatctctactctgcttaaactgacagagaccaaaagccagcagaaccgcgtaaccttgctgcaccacgtgctcgaggaagccgaaaagtcacatccagatttactgcagctcccaagggacctggaacagccctctcaagccgcaggcatcaacttggaaattatccgctctgaggcaagtagtaacctgaagaaactccttgaaaccgaacgaaaagtcagcgcctctgttgctgaagtgcaggagcagtacaccgagcgtttgcaagcaagcattagtgccttccgggcactggacgaactgttcgaggctatcgaacaaaaacaacgcgaactcgctgattacctctgcgaagacgcccagcagctgtcactagaggacactttttcaaccatgaaggcatttcgggacctttttttgcgagcactcaaggaaaataaagataggaaggaacaggcagcgaaagctgaacgaaggaagcagcagctcgcagaggaagaagctaggcggccacgcggcgaggacggcaagcccgtgaggaaaggtcctggcaagcaggaagaggtatgcgtaatcgatgccttgcttgccgatatcaggaagggcttccaactccgcaagaccgcccggggacgtggcgataccgacggagggtccaaagctgcatctatggatccccctcgggctacggagcccgtggcaacctccaatcctgctggcgacccagttggctccacaaggtgccctgctagtgagcccggcttggatgcaacaactgcaagtgagagccgggggtgggacctggttgatgccgttactccagggccccaacctactcttgagcaactggaggaagggggcccacgacccctggagcgaaggagttcctggtatgtggatgcatccgatgtcctcaccaccgaagacccacagtgcccccaacctctggagggggcctggccagttaccctgggggatgcacaggcacttaagccactgaagttttcttcgaaccagcccccagccgccggatcatccagacaggacgctaaggatcctacaagcctgctgggcgtacttcaggccgaggccgattccacttccgaaggtcttgaagatgcagttcacagccgcggagctcgccccccagctgccggccccggaggagacgaggatgaggatgaggaagatactgccccagagtctgctctggataccagccttgataaaagcttcagcgaagacgctgtcactgactcctccggttctggtacactccctcgcgcccgcggaagagcatctaagggcactggcaagagaaggaagaagcggccatcgagatctcaggagggtttaagaccccgccctaaggctaaatag

SEQ ID NO: 281459 - DNA, 3723 bp, Artificial Sequence
  derived and/or modified sequence
atgtctgtgaaggagggtgcccaacgaaaatgggctgccttaaaggaaaaactcggtcctcaagattctgatcctaccgaggcgaacctggagagcgccgatcctgagctgtgtatccgccttttgcaaatgccctcggtggtgaattacagtggcctgcggaagcgcctcgaaggcagcgacggcggatggatggtccaattcctcgagcaatccgggctggatttacttctcgaggctcttgcacggttgagcggcagaggcgtagctcgcatttcagatgctttgttgcaattgacttgtgtgagttgtgttagagccgtcatgaactctaggcagggaattgaatatattttatctaatcagggatacgttaggcagctttcccaagcccttgatacctccaacgtgatggtaaagaagcaggttttcgaactgctagctgccctttgcatctattctcctgagggccatgtcctaactttagacgccttggatcattacaagaccgtctgctcccagcaataccgcttttctatcgtgatgaacgagttatccggcagcgacaacgtcccttacgtagtgactctcctgtcagtgatcaatgccgtgattctaggacctgaggaccttcgcgcacggactcaactgcgcaacgagttcatcgggttacagctcctggatgtactggcacggctgcgcgatctcgaggatgcggatttactcatccaattggaggcattcgaggaggcaaaggctgaggacgaggaagagctgctgcgagtaagcgggggtgtggatatgtcctcccatcaggaggtttttgcgtccctgttccataaagtgagctgtagtccagtttctgctcagctgctgagcgtgctacaaggactgctgcatctggaaccaaccctgcgcagttctcagctgttgtgggaggcactggaaagtctggttaaccgcgctgtgcttctggctagtgatgcccaggaatgtacactcgaggaggttgtggagcgccttctttccgtgaagggaaggccgcgaccatcacctttagttaaggcgcacaagagcgtccaggccaatctggaccagagccagagaggctcatcaccccagaatacgactacacctaaacccagcgtggagggccagcaacctgccgctgcggcagcttgtgaacccgtcgaccatgctcagagcgaatcgatcctgaaagtttcccaaccacgcgcactcgaacagcaggcaagcacaccgcctcctccaccaccccctcctcttctacccggaagctctgcggagccccctcctccgccaccccctccgcctctcccttccgttggggcaaaggcactgccaacagcccctccgccaccccctctgccgggactaggcgcaatggcgcctccagcccctccactccccccaccccttcctggttcttgcgagtttctgcctccccctcctccccctctgccaggcctcggatgcccccctccaccgccaccactgctccctgggatgggctggggaccgcctcctcctcctcccccactactgccttgcacatgtagcccgccagtggctggaggaatggaagaagtgatagtcgcacaggtggaccacggcttgggttccgcctgggttccgtcacataggagagtaaatccacctaccctcagaatgaaaaaactcaactggcagaagcttcctagcaatgtcgcacgcgaacataactctatgtgggcttccctgagttcacccgatgccgaggccgtcgaaccagatttttccagtatcgagcgtctcttctcatttcccgcagccaagccaaaggagcctacaatggtcgctcctcgcgctcgaaaggaaccaaaagagatcacttttttggacgctaagaaatctttgaacttgaacatctttctcaaacaatttaagtgctccaacgaagaggttgctgcaatgattagggcgggtgacaccactaagttcgacgtggaagtcctcaaacaactgctgaagctgctgccagagaaacacgaaatcgaaaacctgagggcatttacggaggaacgtgccaagcttgcctctgcagatcatttctaccttctgctcctcgccattccttgttaccaactacgtatagaatgtatgttgctttgtgagggagcagcagcagtgcttgatatggtcaggcccaaggctcagctagtcctcgccgcttgtgagtcattgctgacgagccgacagctccccattttttgccagctcattttgagaatcggaaatttcttgaactatggtagccacactggtgatgcagatgggtttaaaatctccacgctgctcaaactgactgagacaaaatctcagcagaatagggtcaccctactccatcatgttctggaggaagccgagaaatcccatccagatttactgcaactcccaagagacctggaacagccgtcacaggctgccggaatcaatttagaaattatccggtcagaagccagcagcaacctgaagaagctccttgaaaccgagcggaaggtaagcgcatccgtcgcagaagtgcaagaacagtacaccgagcgactccaggccagcatcagtgccttccgggcactcgacgagctgttcgaagccattgagcaaaagcagagggagctggcggattacctgtgtgaggatgcccagcagctcagtctcgaggacacattttctaccatgaaggctttccgtgatctctttttgcgtgcgctgaaagagaacaaagataggaaggagcaggccgcaaaggccgagcggaggaagcaacagttagctgaagaagaagctaggcgtcccagaggagaagacggcaaaccagtcagaaaagggccaggtaagcaggaggaggtctgtgtcattgacgccttgctggccgacataagaaaaggcttccaacttaggaaaacagctagaggcagaggcgacacagatgggggtagcaaagccgctagtatggacccacccagggccaccgagcctgtggcaaccagtaaccctgccggtgatcccgtcggctccacccggtgtcctgcttctgagcccggacttgacgctacaaccgcctccgagagccggggttgggacctggttgatgcggtgacacctggcccacaaccaacactggagcagctagaggaaggaggcccaagacccctggagaggaggagttcgtggtatgtggacgcttccgatgtgctgaccacggaggatccccaatgtccacagcctctggaaggagcctggccagtgacactgggggatgcacaggcactgaaacccttgaaattcagctccaatcagccacccgctgcaggttccagccggcaagacgctaaggatccaacatccctgctcggagttttacaggctgaagctgactcaacctcggaggggctcgaggacgcagtgcatagtcgaggtgcccgacctcctgccgctggtcctggcggagacgaggacgaggacgaggaggacactgcacctgagtccgctttggacaccagtctcgataaaagtttctctgaggacgcagtgactgattcaagtgggagcggcaccctgcctagggcacgcggacgcgcttcaaaaggaacgggcaagaggagaaaaaaacggccaagccgcagccaagagggcctgcggcctaggccaaaggccaaatag

SEQ ID NO: 281460 - DNA, 3723 bp, Artificial Sequence
  derived and/or modified sequence
atgagcgtgaaggagggcgcccagagaaagtgggccgccctgaaggagaagctgggcccccaggacagcgaccccaccgaggccaacctggagagcgccgaccccgagctgtgcatcagactgctgcagatgcccagcgtggtgaactacagcggcctgagaaagagactggagggcagcgacggcggctggatggtgcagttcctggagcagagcggcctggacctgctgctggaggccctggccagactgagcggcagaggcgtggccagaatcagcgacgccctgctgcagctgacctgcgtgagctgcgtgagagccgtgatgaacagcagacagggcatcgagtacatcctgagcaaccagggctacgtgagacagctgagccaggccctggacaccagcaacgtgatggtgaagaagcaggtgttcgagctgctggccgccctgtgcatctacagccccgagggccacgtgctgaccctggacgccctggaccactacaagaccgtgtgcagccagcagtacagattcagcatcgtgatgaacgagctgagcggcagcgacaacgtgccctacgtggtgaccctgctgagcgtgatcaacgccgtgatcctgggccccgaggacctgagagccagaacccagctgagaaacgagttcatcggcctgcagctgctggacgtgctggccagactgagagacctggaggacgccgacctgctgatccagctggaggccttcgaggaggccaaggccgaggacgaggaggagctgctgagagtgagcggcggcgtggacatgagcagccaccaggaggtgttcgccagcctgttccacaaggtgagctgcagccccgtgagcgcccagctgctgagcgtgctgcagggcctgctgcacctggagcccaccctgagaagcagccagctgctgtgggaggccctggagagcctggtgaacagagccgtgctgctggccagcgacgcccaggagtgcaccctggaggaggtggtggagagactgctgagcgtgaagggcagacccagacccagccccctggtgaaggcccacaagagcgtgcaggccaacctggaccagagccagagaggcagcagcccccagaacaccaccacccccaagcccagcgtggagggccagcagcccgccgccgccgccgcctgcgagcccgtggaccacgcccagagcgagagcatcctgaaggtgagccagcccagagccctggagcagcaggccagcaccccccccccccccccccccccccccctgctgcccggcagcagcgccgagcccccccccccccccccccccccccccctgcccagcgtgggcgccaaggccctgcccaccgcccccccccccccccccctgcccggcctgggcgccatggccccccccgccccccccctgcccccccccctgcccggcagctgcgagttcctgccccccccccccccccccctgcccggcctgggctgcccccccccccccccccccctgctgcccggcatgggctggggccccccccccccccccccccccctgctgccctgcacctgcagcccccccgtggccggcggcatggaggaggtgatcgtggcccaggtggaccacggcctgggcagcgcctgggtgcccagccacagaagagtgaacccccccaccctgagaatgaagaagctgaactggcagaagctgcccagcaacgtggccagagagcacaacagcatgtgggccagcctgagcagccccgacgccgaggccgtggagcccgacttcagcagcatcgagagactgttcagcttccccgccgccaagcccaaggagcccaccatggtggcccccagagccagaaaggagcccaaggagatcaccttcctggacgccaagaagagcctgaacctgaacatcttcctgaagcagttcaagtgcagcaacgaggaggtggccgccatgatcagagccggcgacaccaccaagttcgacgtggaggtgctgaagcagctgctgaagctgctgcccgagaagcacgagatcgagaacctgagagccttcaccgaggagagagccaagctggccagcgccgaccacttctacctgctgctgctggccatcccctgctaccagctgagaatcgagtgcatgctgctgtgcgagggcgccgccgccgtgctggacatggtgagacccaaggcccagctggtgctggccgcctgcgagagcctgctgaccagcagacagctgcccatcttctgccagctgatcctgagaatcggcaacttcctgaactacggcagccacaccggcgacgccgacggcttcaagatcagcaccctgctgaagctgaccgagaccaagagccagcagaacagagtgaccctgctgcaccacgtgctggaggaggccgagaagagccaccccgacctgctgcagctgcccagagacctggagcagcccagccaggccgccggcatcaacctggagatcatcagaagcgaggccagcagcaacctgaagaagctgctggagaccgagagaaaggtgagcgccagcgtggccgaggtgcaggagcagtacaccgagagactgcaggccagcatcagcgccttcagagccctggacgagctgttcgaggccatcgagcagaagcagagagagctggccgactacctgtgcgaggacgcccagcagctgagcctggaggacaccttcagcaccatgaaggccttcagagacctgttcctgagagccctgaaggagaacaaggacagaaaggagcaggccgccaaggccgagagaagaaagcagcagctggccgaggaggaggccagaagacccagaggcgaggacggcaagcccgtgagaaagggccccggcaagcaggaggaggtgtgcgtgatcgacgccctgctggccgacatcagaaagggcttccagctgagaaagaccgccagaggcagaggcgacaccgacggcggcagcaaggccgccagcatggacccccccagagccaccgagcccgtggccaccagcaaccccgccggcgaccccgtgggcagcaccagatgccccgccagcgagcccggcctggacgccaccaccgccagcgagagcagaggctgggacctggtggacgccgtgacccccggcccccagcccaccctggagcagctggaggagggcggccccagacccctggagagaagaagcagctggtacgtggacgccagcgacgtgctgaccaccgaggacccccagtgcccccagcccctggagggcgcctggcccgtgaccctgggcgacgcccaggccctgaagcccctgaagttcagcagcaaccagccccccgccgccggcagcagcagacaggacgccaaggaccccaccagcctgctgggcgtgctgcaggccgaggccgacagcaccagcgagggcctggaggacgccgtgcacagcagaggcgccagaccccccgccgccggccccggcggcgacgaggacgaggacgaggaggacaccgcccccgagagcgccctggacaccagcctggacaagagcttcagcgaggacgccgtgaccgacagcagcggcagcggcaccctgcccagagccagaggcagagccagcaagggcaccggcaagagaagaaagaagagacccagcagaagccaggagggcctgagacccagacccaaggccaagtag

SEQ ID NO: 281461 - protein, 1172 aa, Artificial Sequence
  derived and/or modified sequence
MSPDVPLLNDYKQDFFLKRFPQTVLGGPRFKLGYCAPPYIYVNQIILFLMPWVWGGVGTLLYQLGILKDYYTAALSGGLMLFTAFVIQFTSLYAKNKSTTVERILTTDILAEEDEHEFTSCTGAETVKFLIPGKKYVANTVFHSILAGLACGLGTWYLLPNRITLLYGSTGGTALLFFFGWMTLCIAEYSLIVNTATETATFQTQDTYEIIPLMRPLYIFFFVSVDLAHRFVVNMPALEHMNQILHILFVFLPFLWALGTLPPPDALLLWAMEQVLEFGLGGSSMSTHLRLLVMFIMSAGTAIASYFIPSTVGVVLFMTGFGFLLSLNLSDMGHKIGTKSKDLPSGPEKHFSWKECLFYIIILVLALLETSLLHHFAGFSQISKSNSQAIVGYGLMILLIILWILREIQSVYIIGIFRNPFYPKDVQTVTVFFEKQTRLMKIGIVRRILLTLVSPFAMIAFLSLDSSLQGLHSVSVCIGFTRAFRMVWQNTENALLETVIVSTVHLISSTDIWWNRSLDTGLRLLLVGIIRDRLIQFISKLQFAVTVLLTSWTEKKQRRKTTATLCILNIVFSPFVLVIIVFSTLLSSPLLPLFTLPVFLVGFPRPIQSWPGAAGTTACVCADTVYYYQMVPRLTAVLQTAMAAGSLGLLLPGSHYLGRFQDRLMWIMILECGYTYCSINIKGLELQETSCHTAEARRVDEVFEDAFEQEYTRVCSLNEHFGNVLTPCTVLPVKLYSDARNVLSGIIDSHENLKEFKGDLIKVLVWILVQYCSKRPGMKENVHNTENKGKAPLMLPALNTLPPPKSPEDIDSLNSETFNDWSDDNIFDDEPTIKKVIEEKHQLKDLPGTNLFIPGSVESQRVGDHSTGTVPENDLYKAVLLGYPAVDKGKQEDMPYIPLMEFSCSHSHLVCLPAEWRTSCMPSSKMKEMSSLFPEDWYQFVLRQLECYHSEEKASNVLEEIAKDKVLKDFYVHTVMTCYFSLFGIDNMAPSPGHILRVYGGVLPWSVALDWLTEKPELFQLALKAFRYTLKLMIDKASLGPIEDFRELIKYLEEYERDWYIGLVSDEKWKEAILQEKPYLFSLGYDSNMGIYTGRVLSLQELLIQVGKLNPEAVRGQWANLSWELLYATNDDEERYSIQAHPLLLRNLTVQAAEPPLGYPIYSSKPLHIHLY

SEQ ID NO: 281462 - protein, 298 aa, Artificial Sequence
  derived and/or modified sequence
MLPALNTLPPPKSPEDIDSLNSETFNDWSDDNIFDDEPTIKKVIEEKHQLKDLPGTNLFIPGSVESQRVGDHSTGTVPENDLYKAVLLGYPAVDKGKQEDMPYIPLMEFSCSHSHLVCLPAEWRTSCMPSSKMKEMSSLFPEDWYQFVLRQLECYHSEEKASNVLEEIAKDKVLKDFYVHTVMTCYFSLFGIDNMAPSPGHILRVYGGVLPWSVALDWLTEKPELFQLALKAFRYTLKLMIDKASLGPIEDFRELIKYLEEYERDWYIGLVSDEKWKEAILQEKPYLFSLGYDSNMYL

SEQ ID NO: 281463 - protein, 527 aa, Artificial Sequence
  derived and/or modified sequence
LCILNIVFSPFVLVIIVFSTLLSSPLLPLFTLPVFLVGFPRPIQSWPGAAGTTACVCADTVYYYQMVPRLTAVLQTAMAAGSLGLLLPGSHYLGRFQDRLMWIMILECGYTYCSINIKGLELQETSCHTAEARRVDEVFEDAFEQEYTRVCSLNEHFGNVLTPCTVLPVKLYSDARNVLSGIIDSHENLKEFKGDLIKVLVWILVQYCSKRPGMKENVHNTENKGKAPLMLPALNTLPPPKSPEDIDSLNSETFNDWSDDNIFDDEPTIKKVIEEKHQLKDLPGTNLFIPGSVESQRVGDHSTGTVPENDLYKAVLLGYPAVDKGKQEDMPYIPLMEFSCSHSHLVCLPAEWRTSCMPSSKMKEMSSLFPEDWYQFVLRQLECYHSEEKASNVLEEIAKDKVLKDFYVHTVMTCYFSLFGIDNMAPSPGHILRVYGGVLPWSVALDWLTEKPELFQLALKAFRYTLKLMIDKASLGPIEDFRELIKYLEEYERDWYIGLVSDEKWKEAILQEKPYLFSLGYDSNMYL

SEQ ID NO: 281464 - DNA, 3932 bp, Artificial Sequence
  derived and/or modified sequence
aacgacgctcttgcgtaaaggcccggcccaagggaacgttcagggcgtctcggctttccccgctgctgcttctgctaggcccagtgcgagaccagagcacgagcgactcccgtcgtccccggccaggcagatgttggcctagtcctggcgcgaacgaagcgcgctatttccctgcttcctctaggccaagcctgctttacggcagggcccgcctcgggagcgagcacagaccggggcagcgaggccagccaggcgccgacgaggtccccgaacgcgcacgcgctccgttcagctccgggtggcggccgccggagtagacgttagccatggaaaccgagagctggcccgggcggggccgcggtgagctcgttattcggccgccgcagcttttctgcctccgcattcgggcactaaccaacctcccggcgggagcgcccagcccgagtttacctgcaaaaatgcggtccctgggatgccttcgcgtcttctcttccctcgggtgacttgaggtttgtggtaaatatgccagctctagaacacatgaatcagattttacacatcttgtttgtatttttaccctttctgtgggcacttgggactctgcccccacccgatgcacttctcttatgggcaatggagcaggttttagagttcggccttggaggctcatctatgtcaacccacttacggttattagtaatgttcatcatgtctgctggaacagctatagcatcatatttcattccaagcactgttggtgtggttcttttcatgactggatttggtttcttgctgagtctgaacttaagtgatatgggtcacaaaattggaaccaaatctaaggatttacccagtggtccggaaaaacatttttcatggaaggaatgccttttctacatcattatattagtcttggctcttttagaaactagcttgcttcatcactttgctggcttctcacagatttctaaaagcaattcccaggctattgtgggctatggtttgatgatattacttataatactgtggatacttagagaaattcaaagcgtatatatcattggaattttccgaaatcccttttatccgaaggatgtgcaaactgtgactgtattctttgagaagcaaactaggctcatgaagattggtattgtcagacggattttgctaactttagtatcaccttttgccatgatagcatttctttcattggacagttccttacaagggctccactcagtgtctgtctgtattggattcacaagagcctttagaatggtatggcagaatacagaaaatgctttattggagacagtcattgtatcaacagtacacttgatctccagtacagacatatggtggaacagaagcctggatacaggactcagactcttactggttggtatcatacgtgatcgtttgattcagttcatctctaaattgcagtttgccgtgactgtgcttttgacatcatggacagagaaaaaacaacgtcgaaaaacaactgccactttatgtatactcaacattgtcttttctccattcgtgttggtcatcatagttttttctacactactctcttctcccttactccctcttttcacccttcctgtgttcttggtggggtttccccgacctattcagagttggccaggagcagcaggcaccacagcctgtgtgtgtgcagatacagtgtactactaccaaatggtgcccaggttgactgctgtactgcagactgcaatggcagctggaagtttaggtctcctcctacctggatctcattacttgggccgttttcaggatcgtttaatgtggataatgattctggaatgtggctatacttactgctctattaacattaaggggttagaattgcaggaaacatcctgtcatactgcagaagctcgcagagttgatgaagtttttgaagatgcttttgagcaagaatacacaagagtatgttcccttaatgaacactttggaaatgtcttgacaccctgtactgttttgcctgtgaaattgtattctgatgccaggaatgttctatcaggcataattgattctcatgaaaacttaaaagaatttaaaggtgacctcattaaagtacttgtgtggatacttgttcaatactgctccaaaaggcctggcatgaaagagaatgttcacaacactgaaaataaagggaaagcacctctaatgttgcctgctttgaacactttgccacctcccaaatccccagaagacatagacagtttaaattcagaaacttttaatgactggtctgatgataatatttttgatgatgagccaactatcaaaaaagtaatagaagaaaaacatcagttgaaagatttgccaggtacaaatttgtttattccaggatcagtagaatcacagagggttggtgatcattctacaggcactgttcctgaaaacgatctttacaaagcagttctattaggataccctgctgttgacaaaggaaaacaagaggacatgccatatattcctctcatggagttcagttgttcacattctcacttagtatgcttacccgcagagtggaggactagctgtatgcccagttccaaaatgaaggagatgagctcgttatttccagaagactggtaccaatttgttctaaggcagttggaatgttatcattcagaagagaaggcctcaaatgtactggaagaaattgccaaggacaaagttttaaaagacttttatgttcatacagtaatgacttgttattttagtttatttggaatagacaatatggctcctagtcctggtcatatattgagagtttacggtggtgttttgccttggtctgttgctttggactggctcacagaaaagccagaactgtttcaactagcactgaaagcattcaggtatactctgaaactaatgattgataaagcaagtttaggtccaatagaagactttagagaactgattaagtaccttgaagaatatgaacgtgactggtacattggtttggtatctgatgaaaagtggaaggaagcaattttacaagaaaagccatacttgttttctctggggtatgattctaatatgggaatttacactgggagagtgcttagccttcaagaattattgatccaagtgggaaagttaaatcctgaagctgttagaggtcagtgggccaatctttcatgggaattactttatgccacaaacgatgatgaagaacgttatagtatacaagctcatccactacttttaagaaatcttacggtacaagcagcagaacctcccctgggatatccgatttattcttcaaaacctctccacatacatttgtattagagctcattttgactgtaatgtcatcaaatgcaatgtttttattttttcatcctaaaaaagtaactgtgattcttgtaacttgaggacttctccacacccccattcagatgcctgagaacagctaagctccgtaaagttggttctcttagccatcttaatggttctaaaaaacagcaaaaacatctttatgtctaagataaaagaactatttggccaatatttgtgccctctggactttagtaggctttggtaaatgtgagaaaacttttgtagaattatcatataatgaattttgtaatgctttcttaaatgtgttataggtgaattgccatacaaagttaacagctatgtaatttttacatacttaagagataaacatatcagtgttctaagtagtgataatggatcctgttgaaggttaacataatgtgtatatatttgtttgaaatataatttatagtattttcaaatgtgctgatttattttgacatctaatatctgaatgtttttgtatcaagtagtttgttttcatagacttcaattcataaactttaaaaaacttttaataaaatattttccttccttttcaaata

SEQ ID NO: 281465 - DNA, 4107 bp, Artificial Sequence
  derived and/or modified sequence
atgagtccagatgtgcctctactgaatgattacaagcaggacttctttctgaagcgctttccacagactgttcttggaggccctcgattcaaattaggctattgtgcccctccttacatatatgttaatcaaattattctttttctaatgccatgggtttggggtggagtcggaacacttttataccagttaggcatcctgaaagactattatacagcagcactttcaggtggattaatgctttttactgcatttgtcatccagttcacaagtttatacgccaaaaacaaatcaacaacagtagaaagaatactaaccacggatatcttagcagaggaggatgagcatgaatttaccagttgtactggtgctgagactgtcaaatttctcattcctggcaagaaatatgtagccaatacagtttttcattctattcttgctggattagcgtgtggtcttggaacatggtatctgctcccaaatagaataaccttgctgtatggcagtacaggaggcactgctctactattcttctttggatggatgacactatgtatagcagaatattctttaattgtaaacacagctacagagactgcgactttccaaacacaggatacttatgaaattattcctcttatgagacctctttatatttttttctttgtttctgtggatctggcacacaggtttgtggtaaatatgccagctctagaacacatgaatcagattttacacatcttgtttgtatttttaccctttctgtgggcacttgggactctgcccccacccgatgcacttctcttatgggcaatggagcaggttttagagttcggccttggaggctcatctatgtcaacccacttacggttattagtaatgttcatcatgtctgctggaacagctatagcatcatatttcattccaagcactgttggtgtggttcttttcatgactggatttggtttcttgctgagtctgaacttaagtgatatgggtcacaaaattggaaccaaatctaaggatttacccagtggtccggaaaaacatttttcatggaaggaatgccttttctacatcattatattagtcttggctcttttagaaactagcttgcttcatcactttgctggcttctcacagatttctaaaagcaattcccaggctattgtgggctatggtttgatgatattacttataatactgtggatacttagagaaattcaaagcgtatatatcattggaattttccgaaatcccttttatccgaaggatgtgcaaactgtgactgtattctttgagaagcaaactaggctcatgaagattggtattgtcagacggattttgctaactttagtatcaccttttgccatgatagcatttctttcattggacagttccttacaagggctccactcagtgtctgtctgtattggattcacaagagcctttagaatggtatggcagaatacagaaaatgctttattggagacagtcattgtatcaacagtacacttgatctccagtacagacatatggtggaacagaagcctggatacaggactcagactcttactggttggtatcatacgtgatcgtttgattcagttcatctctaaattgcagtttgccgtgactgtgcttttgacatcatggacagagaaaaaacaacgtcgaaaaacaactgccactttatgtatactcaacattgtcttttctccattcgtgttggtcatcatagttttttctacactactctcttctcccttactccctcttttcacccttcctgtgttcttggtggggtttccccgacctattcagagttggccaggagcagcaggcaccacagcctgtgtgtgtgcagatacagtgtactactaccaaatggtgcccaggttgactgctgtactgcagactgcaatggcagctggaagtttaggtctcctcctacctggatctcattacttgggccgttttcaggatcgtttaatgtggataatgattctggaatgtggctatacttactgctctattaacattaaggggttagaattgcaggaaacatcctgtcatactgcagaagctcgcagagttgatgaagtttttgaagatgcttttgagcaagaatacacaagagtatgttcccttaatgaacactttggaaatgtcttgacaccctgtactgttttgcctgtgaaattgtattctgatgccaggaatgttctatcaggcataattgattctcatgaaaacttaaaagaatttaaaggtgacctcattaaagtacttgtgtggatacttgttcaatactgctccaaaaggcctggcatgaaagagaatgttcacaacactgaaaataaagggaaagcacctctaatgttgcctgctttgaacactttgccacctcccaaatccccagaagacatagacagtttaaattcagaaacttttaatgactggtctgatgataatatttttgatgatgagccaactatcaaaaaagtaatagaagaaaaacatcagttgaaagatttgccaggtacaaatttgtttattccaggatcagtagaatcacagagggttggtgatcattctacaggcactgttcctgaaaacgatctttacaaagcagttctattaggataccctgctgttgacaaaggaaaacaagaggacatgccatatattcctctcatggagttcagttgttcacattctcacttagtatgcttacccgcagagtggaggactagctgtatgcccagttccaaaatgaaggagatgagctcgttatttccagaagactggtaccaatttgttctaaggcagttggaatgttatcattcagaagagaaggcctcaaatgtactggaagaaattgccaaggacaaagttttaaaagacttttatgttcatacagtaatgacttgttattttagtttatttggaatagacaatatggctcctagtcctggtcatatattgagagtttacggtggtgttttgccttggtctgttgctttggactggctcacagaaaagccagaactgtttcaactagcactgaaagcattcaggtatactctgaaactaatgattgataaagcaagtttaggtccaatagaagactttagagaactgattaagtaccttgaagaatatgaacgtgactggtacattggtttggtatctgatgaaaagtggaaggaagcaattttacaagaaaagccatacttgttttctctggggtatgattctaatatgggaatttacactgggagagtgcttagccttcaagaattattgatccaagtgggaaagttaaatcctgaagctgttagaggtcagtgggccaatctttcatgggaattactttatgccacaaacgatgatgaagaacgttatagtatacaagctcatccactacttttaagaaatcttacggtacaagcagcagaacctcccctgggatatccgatttattcttcaaaacctctccacatacatttgtattagagctcattttgactgtaatgtcatcaaatgcaatgtttttattttttcatcctaaaaaagtaactgtgattcttgtaacttgaggacttctccacacccccattcagatgcctgagaacagctaagctccgtaaagttggttctcttagccatcttaatggttctaaaaaacagcaaaaacatctttatgtctaagataaaagaactatttggccaatatttgtgccctctggactttagtaggctttggtaaatgtgagaaaacttttgtagaattatcatataatgaattttgtaatgctttcttaaatgtgttataggtgaattgccatacaaagttaacagctatgtaatttttacatacttaagagataaacatatcagtgttctaagtagtgataatggatcctgttgaaggttaacataatgtgtatatatttgtttgaaatataatttatagtattttcaaatgtgctgatttattttgacatctaatatctgaatgtttttgtatcaagtagtttgttttcatagacttcaattcataaactttaaaaaacttttaataaaatattttccttccttttc

SEQ ID NO: 281466 - DNA, 4666 bp, Artificial Sequence
  derived and/or modified sequence
tcttgcgtaaaggcccggcccaagggaacgttcagggcgtctcggctttccccgctgctgcttctgctaggcccagtgcgagaccagagcacgagcgactcccgtcgtccccggccaggcagatgttggcctagtcctggcgcgaacgaagcgcgctatttccctgcttcctctaggccaagcctgctttacggcagggcccgcctcgggagcgagcacagaccggggcagcgaggccagccaggcgccgacgaggtccccgaacgcgcacgcgctccgttcagctccgggtggcggccgccggagtagacgttagccatggaaaccgagagctggcccgggcggggccgcggtgagctcgttattcggccgccgcagcttttctgcctccgcattcgggcactaaccaacctcccggcgggagcgcccagcccgagtttacctgcaaaaatgcggtccctgggatgccttcgcgtcttctcttccctcgggtgacttgagaaactgctgtgttacagaaaagcatgtgactttcagaataatcccgagtgaggatgagtccagatgtgcctctactgaatgattacaagcaggacttctttctgaagcgctttccacagactgttcttggaggccctcgattcaaattaggctattgtgcccctccttacatatatgttaatcaaattattctttttctaatgccatgggtttggggtggagtcggaacacttttataccagttaggcatcctgaaagactattatacagcagcactttcaggtggattaatgctttttactgcatttgtcatccagttcacaagtttatacgccaaaaacaaatcaacaacagtagaaagaatactaaccacggatatcttagcagaggaggatgagcatgaatttaccagttgtactggtgctgagactgtcaaatttctcattcctggcaagaaatatgtagccaatacagtttttcattctattcttgctggattagcgtgtggtcttggaacatggtatctgctcccaaatagaataaccttgctgtatggcagtacaggaggcactgctctactattcttctttggatggatgacactatgtatagcagaatattctttaattgtaaacacagctacagagactgcgactttccaaacacaggatacttatgaaattattcctcttatgagacctctttatatttttttctttgtttctgtggatctggcacacaggtttgtggtaaatatgccagctctagaacacatgaatcagattttacacatcttgtttgtatttttaccctttctgtgggcacttgggactctgcccccacccgatgcacttctcttatgggcaatggagcaggttttagagttcggccttggaggctcatctatgtcaacccacttacggttattagtaatgttcatcatgtctgctggaacagctatagcatcatatttcattccaagcactgttggtgtggttcttttcatgactggatttggtttcttgctgagtctgaacttaagtgatatgggtcacaaaattggaaccaaatctaaggatttacccagtggtccggaaaaacatttttcatggaaggaatgccttttctacatcattatattagtcttggctcttttagaaactagcttgcttcatcactttgctggcttctcacagatttctaaaagcaattcccaggctattgtgggctatggtttgatgatattacttataatactgtggatacttagagaaattcaaagcgtatatatcattggaattttccgaaatcccttttatccgaaggatgtgcaaactgtgactgtattctttgagaagcaaactaggctcatgaagattggtattgtcagacggattttgctaactttagtatcaccttttgccatgatagcatttctttcattggacagttccttacaagggctccactcagtgtctgtctgtattggattcacaagagcctttagaatggtatggcagaatacagaaaatgctttattggagacagtcattgtatcaacagtacacttgatctccagtacagacatatggtggaacagaagcctggatacaggactcagactcttactggttggtatcatacgtgatcgtttgattcagttcatctctaaattgcagtttgccgtgactgtgcttttgacatcatggacagagaaaaaacaacgtcgaaaaacaactgccactttatgtatactcaacattgtcttttctccattcgtgttggtcatcatagttttttctacactactctcttctcccttactccctcttttcacccttcctgtgttcttggtggggtttccccgacctattcagagttggccaggagcagcaggcaccacagcctgtgtgtgtgcagatacagtgtactactaccaaatggtgcccaggttgactgctgtactgcagactgcaatggcagctggaagtttaggtctcctcctacctggatctcattacttgggccgttttcaggatcgtttaatgtggataatgattctggaatgtggctatacttactgctctattaacattaaggggttagaattgcaggaaacatcctgtcatactgcagaagctcgcagagttgatgaagtttttgaagatgcttttgagcaagaatacacaagagtatgttcccttaatgaacactttggaaatgtcttgacaccctgtactgttttgcctgtgaaattgtattctgatgccaggaatgttctatcaggcataattgattctcatgaaaacttaaaagaatttaaaggtgacctcattaaagtacttgtgtggatacttgttcaatactgctccaaaaggcctggcatgaaagagaatgttcacaacactgaaaataaagggaaagcacctctaatgttgcctgctttgaacactttgccacctcccaaatccccagaagacatagacagtttaaattcagaaacttttaatgactggtctgatgataatatttttgatgatgagccaactatcaaaaaagtaatagaagaaaaacatcagttgaaagatttgccaggtacaaatttgtttattccaggatcagtagaatcacagagggttggtgatcattctacaggcactgttcctgaaaacgatctttacaaagcagttctattaggataccctgctgttgacaaaggaaaacaagaggacatgccatatattcctctcatggagttcagttgttcacattctcacttagtatgcttacccgcagagtggaggactagctgtatgcccagttccaaaatgaaggagatgagctcgttatttccagaagactggtaccaatttgttctaaggcagttggaatgttatcattcagaagagaaggcctcaaatgtactggaagaaattgccaaggacaaagttttaaaagacttttatgttcatacagtaatgacttgttattttagtttatttggaatagacaatatggctcctagtcctggtcatatattgagagtttacggtggtgttttgccttggtctgttgctttggactggctcacagaaaagccagaactgtttcaactagcactgaaagcattcaggtatactctgaaactaatgattgataaagcaagtttaggtccaatagaagactttagagaactgattaagtaccttgaagaatatgaacgtgactggtacattggtttggtatctgatgaaaagtggaaggaagcaattttacaagaaaagccatacttgttttctctggggtatgattctaatatgggaatttacactgggagagtgcttagccttcaagaattattgatccaagtgggaaagttaaatcctgaagctgttagaggtcagtgggccaatctttcatgggaattactttatgccacaaacgatgatgaagaacgttatagtatacaagctcatccactacttttaagaaatcttacggtacaagcagcagaacctcccctgggatatccgatttattcttcaaaacctctccacatacatttgtattagagctcattttgactgtaatgtcatcaaatgcaatgtttttattttttcatcctaaaaaagtaactgtgattcttgtaacttgaggacttctccacacccccattcagatgcctgagaacagctaagctccgtaaagttggttctcttagccatcttaatggttctaaaaaacagcaaaaacatctttatgtctaagataaaagaactatttggccaatatttgtgccctctggactttagtaggctttggtaaatgtgagaaaacttttgtagaattatcatataatgaattttgtaatgctttcttaaatgtgttataggtgaattgccatacaaagttaacagctatgtaatttttacatacttaagagataaacatatcagtgttctaagtagtgataatggatcctgttgaaggttaacataatgtgtatatatttgtttgaaatataatttatagtattttcaaatgtgctgatttattttgacatctaatatctgaatgtttttgtatcaagtagtttgttttcatagacttcaattcataaactttaaaaaacttttaataaaatattttccttccttttcaaata

SEQ ID NO: 281467 - DNA, 2545 bp, Artificial Sequence
  derived and/or modified sequence
ttatgtatactcaacattgtcttttctccattcgtgttggtcatcatagttttttctacactactctcttctcccttactccctcttttcacccttcctgtgttcttggtggggtttccccgacctattcagagttggccaggagcagcaggcaccacagcctgtgtgtgtgcagatacagtgtactactaccaaatggtgcccaggttgactgctgtactgcagactgcaatggcagctggaagtttaggtctcctcctacctggatctcattacttgggccgttttcaggatcgtttaatgtggataatgattctggaatgtggctatacttactgctctattaacattaaggggttagaattgcaggaaacatcctgtcatactgcagaagctcgcagagttgatgaagtttttgaagatgcttttgagcaagaatacacaagagtatgttcccttaatgaacactttggaaatgtcttgacaccctgtactgttttgcctgtgaaattgtattctgatgccaggaatgttctatcaggcataattgattctcatgaaaacttaaaagaatttaaaggtgacctcattaaagtacttgtgtggatacttgttcaatactgctccaaaaggcctggcatgaaagagaatgttcacaacactgaaaataaagggaaagcacctctaatgttgcctgctttgaacactttgccacctcccaaatccccagaagacatagacagtttaaattcagaaacttttaatgactggtctgatgataatatttttgatgatgagccaactatcaaaaaagtaatagaagaaaaacatcagttgaaagatttgccaggtacaaatttgtttattccaggatcagtagaatcacagagggttggtgatcattctacaggcactgttcctgaaaacgatctttacaaagcagttctattaggataccctgctgttgacaaaggaaaacaagaggacatgccatatattcctctcatggagttcagttgttcacattctcacttagtatgcttacccgcagagtggaggactagctgtatgcccagttccaaaatgaaggagatgagctcgttatttccagaagactggtaccaatttgttctaaggcagttggaatgttatcattcagaagagaaggcctcaaatgtactggaagaaattgccaaggacaaagttttaaaagacttttatgttcatacagtaatgacttgttattttagtttatttggaatagacaatatggctcctagtcctggtcatatattgagagtttacggtggtgttttgccttggtctgttgctttggactggctcacagaaaagccagaactgtttcaactagcactgaaagcattcaggtatactctgaaactaatgattgataaagcaagtttaggtccaatagaagactttagagaactgattaagtaccttgaagaatatgaacgtgactggtacattggtttggtatctgatgaaaagtggaaggaagcaattttacaagaaaagccatacttgttttctctggggtatgattctaatatgtatttatgactatgcatcgctgaggcaacagatcagaaaaggcagacaaagagaagtgactaagattttgcctaatggtgattgagatggctgccaggaaacttttatttaaagaaccaaggaagtagagggaatttacactgggagagtgcttagccttcaagaattattgatccaagtgggaaagttaaatcctgaagctgttagaggtcagtgggccaatctttcatgggaattactttatgccacaaacgatgatgaagaacgttatagtatacaagctcatccactacttttaagaaatcttacggtacaagcagcagaacctcccctgggatatccgatttattcttcaaaacctctccacatacatttgtattagagctcattttgactgtaatgtcatcaaatgcaatgtttttattttttcatcctaaaaaagtaactgtgattcttgtaacttgaggacttctccacacccccattcagatgcctgagaacagctaagctccgtaaagttggttctcttagccatcttaatggttctaaaaaacagcaaaaacatctttatgtctaagataaaagaactatttggccaatatttgtgccctctggactttagtaggctttggtaaatgtgagaaaacttttgtagaattatcatataatgaattttgtaatgctttcttaaatgtgttataggtgaattgccatacaaagttaacagctatgtaatttttacatacttaagagataaacatatcagtgttctaagtagtgataatggatcctgttgaaggttaacataatgtgtatatatttgtttgaaatataatttatagtattttcaaatgtgctgatttattttgacatctaatatctgaatgtttttgtatcaagtagtttgttttcatagacttcaattcataaactttaaaaaacttttaataaaatattttccttccttttc

SEQ ID NO: 281468 - DNA, 2817 bp, Artificial Sequence
  derived and/or modified sequence
atgcccgccctggagcacatgaaccagatcctgcacatcctgttcgtgttcctgcccttcctgtgggccctgggcaccctgcccccccccgacgccctgctgctgtgggccatggagcaggtgctggagttcggcctgggcggcagcagcatgagcacccacctgagactgctggtgatgttcatcatgagcgccggcaccgccatcgccagctacttcatccccagcaccgtgggcgtggtgctgttcatgaccggcttcggcttcctgctgagcctgaacctgagcgacatgggccacaagatcggcaccaagagcaaggacctgcccagcggccccgagaagcacttcagctggaaggagtgcctgttctacatcatcatcctggtgctggccctgctggagaccagcctgctgcaccacttcgccggcttcagccagatcagcaagagcaacagccaggccatcgtgggctacggcctgatgatcctgctgatcatcctgtggatcctgagagagatccagagcgtgtacatcatcggcatcttcagaaaccccttctaccccaaggacgtgcagaccgtgaccgtgttcttcgagaagcagaccagactgatgaagatcggcatcgtgagaagaatcctgctgaccctggtgagccccttcgccatgatcgccttcctgagcctggacagcagcctgcagggcctgcacagcgtgagcgtgtgcatcggcttcaccagagccttcagaatggtgtggcagaacaccgagaacgccctgctggagaccgtgatcgtgagcaccgtgcacctgatcagcagcaccgacatctggtggaacagaagcctggacaccggcctgagactgctgctggtgggcatcatcagagacagactgatccagttcatcagcaagctgcagttcgccgtgaccgtgctgctgaccagctggaccgagaagaagcagagaagaaagaccaccgccaccctgtgcatcctgaacatcgtgttcagccccttcgtgctggtgatcatcgtgttcagcaccctgctgagcagccccctgctgcccctgttcaccctgcccgtgttcctggtgggcttccccagacccatccagagctggcccggcgccgccggcaccaccgcctgcgtgtgcgccgacaccgtgtactactaccagatggtgcccagactgaccgccgtgctgcagaccgccatggccgccggcagcctgggcctgctgctgcccggcagccactacctgggcagattccaggacagactgatgtggatcatgatcctggagtgcggctacacctactgcagcatcaacatcaagggcctggagctgcaggagaccagctgccacaccgccgaggccagaagagtggacgaggtgttcgaggacgccttcgagcaggagtacaccagagtgtgcagcctgaacgagcacttcggcaacgtgctgaccccctgcaccgtgctgcccgtgaagctgtacagcgacgccagaaacgtgctgagcggcatcatcgacagccacgagaacctgaaggagttcaagggcgacctgatcaaggtgctggtgtggatcctggtgcagtactgcagcaagagacccggcatgaaggagaacgtgcacaacaccgagaacaagggcaaggcccccctgatgctgcccgccctgaacaccctgcccccccccaagagccccgaggacatcgacagcctgaacagcgagaccttcaacgactggagcgacgacaacatcttcgacgacgagcccaccatcaagaaggtgatcgaggagaagcaccagctgaaggacctgcccggcaccaacctgttcatccccggcagcgtggagagccagagagtgggcgaccacagcaccggcaccgtgcccgagaacgacctgtacaaggccgtgctgctgggctaccccgccgtggacaagggcaagcaggaggacatgccctacatccccctgatggagttcagctgcagccacagccacctggtgtgcctgcccgccgagtggagaaccagctgcatgcccagcagcaagatgaaggagatgagcagcctgttccccgaggactggtaccagttcgtgctgagacagctggagtgctaccacagcgaggagaaggccagcaacgtgctggaggagatcgccaaggacaaggtgctgaaggacttctacgtgcacaccgtgatgacctgctacttcagcctgttcggcatcgacaacatggcccccagccccggccacatcctgagagtgtacggcggcgtgctgccctggagcgtggccctggactggctgaccgagaagcccgagctgttccagctggccctgaaggccttcagatacaccctgaagctgatgatcgacaaggccagcctgggccccatcgaggacttcagagagctgatcaagtacctggaggagtacgagagagactggtacatcggcctggtgagcgacgagaagtggaaggaggccatcctgcaggagaagccctacctgttcagcctgggctacgacagcaacatgggcatctacaccggcagagtgctgagcctgcaggagctgctgatccaggtgggcaagctgaaccccgaggccgtgagaggccagtgggccaacctgagctgggagctgctgtacgccaccaacgacgacgaggagagatacagcatccaggcccaccccctgctgctgagaaacctgaccgtgcaggccgccgagccccccctgggctaccccatctacagcagcaagcccctgcacatccacctgtactag

SEQ ID NO: 281469 - DNA, 3519 bp, Artificial Sequence
  derived and/or modified sequence
atgagccccgacgtgcccctgctgaacgactacaagcaggacttcttcctgaagagattcccccagaccgtgctgggcggccccagattcaagctgggctactgcgcccccccctacatctacgtgaaccagatcatcctgttcctgatgccctgggtgtggggcggcgtgggcaccctgctgtaccagctgggcatcctgaaggactactacaccgccgccctgagcggcggcctgatgctgttcaccgccttcgtgatccagttcaccagcctgtacgccaagaacaagagcaccaccgtggagagaatcctgaccaccgacatcctggccgaggaggacgagcacgagttcaccagctgcaccggcgccgagaccgtgaagttcctgatccccggcaagaagtacgtggccaacaccgtgttccacagcatcctggccggcctggcctgcggcctgggcacctggtacctgctgcccaacagaatcaccctgctgtacggcagcaccggcggcaccgccctgctgttcttcttcggctggatgaccctgtgcatcgccgagtacagcctgatcgtgaacaccgccaccgagaccgccaccttccagacccaggacacctacgagatcatccccctgatgagacccctgtacatcttcttcttcgtgagcgtggacctggcccacagattcgtggtgaacatgcccgccctggagcacatgaaccagatcctgcacatcctgttcgtgttcctgcccttcctgtgggccctgggcaccctgcccccccccgacgccctgctgctgtgggccatggagcaggtgctggagttcggcctgggcggcagcagcatgagcacccacctgagactgctggtgatgttcatcatgagcgccggcaccgccatcgccagctacttcatccccagcaccgtgggcgtggtgctgttcatgaccggcttcggcttcctgctgagcctgaacctgagcgacatgggccacaagatcggcaccaagagcaaggacctgcccagcggccccgagaagcacttcagctggaaggagtgcctgttctacatcatcatcctggtgctggccctgctggagaccagcctgctgcaccacttcgccggcttcagccagatcagcaagagcaacagccaggccatcgtgggctacggcctgatgatcctgctgatcatcctgtggatcctgagagagatccagagcgtgtacatcatcggcatcttcagaaaccccttctaccccaaggacgtgcagaccgtgaccgtgttcttcgagaagcagaccagactgatgaagatcggcatcgtgagaagaatcctgctgaccctggtgagccccttcgccatgatcgccttcctgagcctggacagcagcctgcagggcctgcacagcgtgagcgtgtgcatcggcttcaccagagccttcagaatggtgtggcagaacaccgagaacgccctgctggagaccgtgatcgtgagcaccgtgcacctgatcagcagcaccgacatctggtggaacagaagcctggacaccggcctgagactgctgctggtgggcatcatcagagacagactgatccagttcatcagcaagctgcagttcgccgtgaccgtgctgctgaccagctggaccgagaagaagcagagaagaaagaccaccgccaccctgtgcatcctgaacatcgtgttcagccccttcgtgctggtgatcatcgtgttcagcaccctgctgagcagccccctgctgcccctgttcaccctgcccgtgttcctggtgggcttccccagacccatccagagctggcccggcgccgccggcaccaccgcctgcgtgtgcgccgacaccgtgtactactaccagatggtgcccagactgaccgccgtgctgcagaccgccatggccgccggcagcctgggcctgctgctgcccggcagccactacctgggcagattccaggacagactgatgtggatcatgatcctggagtgcggctacacctactgcagcatcaacatcaagggcctggagctgcaggagaccagctgccacaccgccgaggccagaagagtggacgaggtgttcgaggacgccttcgagcaggagtacaccagagtgtgcagcctgaacgagcacttcggcaacgtgctgaccccctgcaccgtgctgcccgtgaagctgtacagcgacgccagaaacgtgctgagcggcatcatcgacagccacgagaacctgaaggagttcaagggcgacctgatcaaggtgctggtgtggatcctggtgcagtactgcagcaagagacccggcatgaaggagaacgtgcacaacaccgagaacaagggcaaggcccccctgatgctgcccgccctgaacaccctgcccccccccaagagccccgaggacatcgacagcctgaacagcgagaccttcaacgactggagcgacgacaacatcttcgacgacgagcccaccatcaagaaggtgatcgaggagaagcaccagctgaaggacctgcccggcaccaacctgttcatccccggcagcgtggagagccagagagtgggcgaccacagcaccggcaccgtgcccgagaacgacctgtacaaggccgtgctgctgggctaccccgccgtggacaagggcaagcaggaggacatgccctacatccccctgatggagttcagctgcagccacagccacctggtgtgcctgcccgccgagtggagaaccagctgcatgcccagcagcaagatgaaggagatgagcagcctgttccccgaggactggtaccagttcgtgctgagacagctggagtgctaccacagcgaggagaaggccagcaacgtgctggaggagatcgccaaggacaaggtgctgaaggacttctacgtgcacaccgtgatgacctgctacttcagcctgttcggcatcgacaacatggcccccagccccggccacatcctgagagtgtacggcggcgtgctgccctggagcgtggccctggactggctgaccgagaagcccgagctgttccagctggccctgaaggccttcagatacaccctgaagctgatgatcgacaaggccagcctgggccccatcgaggacttcagagagctgatcaagtacctggaggagtacgagagagactggtacatcggcctggtgagcgacgagaagtggaaggaggccatcctgcaggagaagccctacctgttcagcctgggctacgacagcaacatgggcatctacaccggcagagtgctgagcctgcaggagctgctgatccaggtgggcaagctgaaccccgaggccgtgagaggccagtgggccaacctgagctgggagctgctgtacgccaccaacgacgacgaggagagatacagcatccaggcccaccccctgctgctgagaaacctgaccgtgcaggccgccgagccccccctgggctaccccatctacagcagcaagcccctgcacatccacctgtactag

SEQ ID NO: 281470 - DNA, 1584 bp, Artificial Sequence
  derived and/or modified sequence
ctgtgcatcctgaacatcgtgttcagccccttcgtgctggtgatcatcgtgttcagcaccctgctgagcagccccctgctgcccctgttcaccctgcccgtgttcctggtgggcttccccagacccatccagagctggcccggcgccgccggcaccaccgcctgcgtgtgcgccgacaccgtgtactactaccagatggtgcccagactgaccgccgtgctgcagaccgccatggccgccggcagcctgggcctgctgctgcccggcagccactacctgggcagattccaggacagactgatgtggatcatgatcctggagtgcggctacacctactgcagcatcaacatcaagggcctggagctgcaggagaccagctgccacaccgccgaggccagaagagtggacgaggtgttcgaggacgccttcgagcaggagtacaccagagtgtgcagcctgaacgagcacttcggcaacgtgctgaccccctgcaccgtgctgcccgtgaagctgtacagcgacgccagaaacgtgctgagcggcatcatcgacagccacgagaacctgaaggagttcaagggcgacctgatcaaggtgctggtgtggatcctggtgcagtactgcagcaagagacccggcatgaaggagaacgtgcacaacaccgagaacaagggcaaggcccccctgatgctgcccgccctgaacaccctgcccccccccaagagccccgaggacatcgacagcctgaacagcgagaccttcaacgactggagcgacgacaacatcttcgacgacgagcccaccatcaagaaggtgatcgaggagaagcaccagctgaaggacctgcccggcaccaacctgttcatccccggcagcgtggagagccagagagtgggcgaccacagcaccggcaccgtgcccgagaacgacctgtacaaggccgtgctgctgggctaccccgccgtggacaagggcaagcaggaggacatgccctacatccccctgatggagttcagctgcagccacagccacctggtgtgcctgcccgccgagtggagaaccagctgcatgcccagcagcaagatgaaggagatgagcagcctgttccccgaggactggtaccagttcgtgctgagacagctggagtgctaccacagcgaggagaaggccagcaacgtgctggaggagatcgccaaggacaaggtgctgaaggacttctacgtgcacaccgtgatgacctgctacttcagcctgttcggcatcgacaacatggcccccagccccggccacatcctgagagtgtacggcggcgtgctgccctggagcgtggccctggactggctgaccgagaagcccgagctgttccagctggccctgaaggccttcagatacaccctgaagctgatgatcgacaaggccagcctgggccccatcgaggacttcagagagctgatcaagtacctggaggagtacgagagagactggtacatcggcctggtgagcgacgagaagtggaaggaggccatcctgcaggagaagccctacctgttcagcctgggctacgacagcaacatgtacctgtag

SEQ ID NO: 281471 - DNA, 2817 bp, Artificial Sequence
  derived and/or modified sequence
atgccagccttagagcacatgaatcaaattttgcacatattgtttgtgttcctgccttttctctgggctctgggcaccctacctccgccggacgcactcttgttatgggcgatggagcaggtcctagaattcggtctgggaggcagctctatgagtacccacctgaggctgttggtgatgttcatcatgagcgccggaaccgctatagcgagctacttcatacccagcactgttggagtggtcctgtttatgacaggattcggttttttgttatccctgaacctgagcgatatggggcacaaaattggtacgaagtcaaaggaccttccgtctggacctgaaaagcacttctcctggaaggagtgcttgttctacataattattctggtgttggcattgctggaaacctcgctcctacaccacttcgcgggcttttcccagattagcaagtccaactctcaagctattgtgggctacgggctgatgattctgctcatcatactctggatacttagggagattcagtccgtctacatcatcggaatcttccgcaatccattctatcccaaggatgttcagactgtcacggtcttcttcgagaaacagaccaggttaatgaaaattgggatcgtacggagaatcctgctgactctcgtgagcccatttgcaatgattgcattcctttctctggactcatctctccaaggcttgcacagcgtgagtgtatgcatcggttttacacgtgcttttagaatggtatggcagaatactgaaaacgcactccttgagaccgtaatcgtgtccactgtccatctcatttcgtctacagatatctggtggaataggtccctcgacactggattaagacttctcctcgtaggaatcattcgggacaggctcattcagttcatttccaagctccagttcgcagtgacagtccttctgacctcctggacggagaaaaagcagagaagaaaaacaacagctacactgtgcatccttaacattgtgtttagcccattcgtgttagtgattattgtgtttagcacccttttgagttcccctctcctcccattatttacactccctgtcttccttgtcgggttcccaaggcccatccagtcttggcctggcgcagccggtacaacggcctgtgtgtgtgcggataccgtctactactatcagatggtcccccggctgactgctgtactccaaaccgcgatggctgctggttctctcggactgctgctccctggatcgcactatctgggccggttccaggatcgcctcatgtggatcatgattcttgaatgtgggtatacatattgctccattaatatcaaaggactggagttacaagagacaagctgccatacagccgaagctagacgggtcgacgaagtttttgaagatgcctttgagcaagagtacacacgtgtctgcagtcttaatgaacacttcggtaatgttttgacaccttgcaccgtgttaccagtgaagctctactcagatgcccgaaatgtgctaagtggaattattgacagtcacgagaatctgaaggaattcaagggggacctcataaaagtgttggtttggatcctagtgcagtattgttcaaaacgccctggtatgaaggagaacgtccataacactgagaataagggcaaggcacctctcatgttacctgcactgaacactctgcctcctcctaagtcgcctgaggacatcgacagccttaattccgagacttttaacgactggtccgacgacaatatatttgatgacgaacccacgattaagaaggtgatcgaagagaagcatcagcttaaggatctccctgggactaacctgttcattcccggtagcgtcgagagccagcgggtgggagatcactcgacgggaaccgtacctgagaacgacctctataaagctgtgctgctgggataccctgctgtggacaagggcaaacaggaagacatgccttatattccccttatggaattttcgtgctcacattctcacttggtgtgtcttccagcagaatggaggacctcctgcatgccatccagcaaaatgaaggagatgtcaagtctgttccccgaggattggtaccagtttgtgctgaggcagcttgagtgctatcactccgaggagaaggccagtaacgtcctggaggagatcgccaaagataaagtgctgaaggacttttatgtccacacggtgatgacgtgttacttctctctctttggtatcgacaacatggccccctctccaggccatatactccgggtgtacggcggcgtgctcccatggtcagtcgcccttgactggctgaccgaaaaacccgaactcttccagctggctctcaaggccttcagatataccttgaaattgatgatcgacaaagccagtctcggccctatagaggactttagggaactgataaagtatctagaggaatatgaaagagactggtatataggactcgtctctgacgaaaagtggaaagaggctatactccaagaaaagccctatctcttcagtctcggttatgatagcaacatgggtatatacactggtagggtcttgtcgctacaggaactgctgattcaggttggaaagctcaacccggaagcagtgcgcggccagtgggccaatctgtcctgggagttattgtatgccactaatgatgacgaggaacgttactctattcaagctcatcccctgctgctacgcaacctgacagtgcaggcagcagagcctcctctcggatacccaatctacagctctaagcccctgcatattcacctctattag

SEQ ID NO: 281472 - DNA, 3519 bp, Artificial Sequence
  derived and/or modified sequence
atgtcccccgacgtacctctgctcaatgattataaacaggactttttccttaagcgttttccccagacagtattggggggacctcgattcaagcttggctattgcgctcccccctacatctatgttaatcagatcatcctgtttttgatgccttgggtatggggaggtgtgggaacccttctataccagcttggcatactgaaggattattacaccgcggccctcagcggggggctgatgctgttcaccgcatttgtgattcagttcacttccctgtacgctaagaataagtctaccaccgtggagaggatcctcaccacagatatcttggccgaagaagacgagcacgaatttacctcgtgcactggagctgagaccgtcaagttcctgatcccaggcaaaaaatatgtggccaatactgtttttcacagtattctggctggactcgcatgtggcctgggcacatggtacctgctgcccaaccgcattaccctgttatacgggtccacaggaggcaccgcccttctgttcttcttcggctggatgactttatgcattgctgaatattccctcattgttaataccgcaactgagaccgctacattccagactcaggatacatatgagatcattccactcatgcgtcccctgtatatcttctttttcgtttcagtggatctcgcacatcgctttgtagtcaatatgcctgctctcgagcacatgaatcagatactacatatcctgtttgtattcctcccttttttatgggcccttggtacattaccgccacccgacgctttacttctatgggctatggagcaggtgctggagttcggcctgggagggagctcaatgagcacccatctgaggctgctggtgatgttcattatgtctgctggtacagctattgcttcctatttcataccgagcacagtgggcgtcgtactgtttatgacagggttcgggttccttttgtctctcaacctgagcgacatgggacacaaaattggaaccaagtctaaggatctgccaagcggccccgagaaacacttttcctggaaggagtgtctgttctacatcatcatactagtcctggccttattggaaacaagtctccttcaccacttcgctgggtttagccagatctcaaaatcaaattctcaagctattgtcggctacggactgatgatactcttgatcatcctgtggatattacgtgaaattcagagcgtgtacatcataggcatattcaggaatcctttctatccaaaggatgtgcagaccgtgaccgtgttttttgaaaagcagacaaggttgatgaagatcggtatagtacgacggatcctcttgacgctggtctctcctttcgcaatgatcgcctttctgtctctggatagtagtcttcagggtctacacagcgtgtccgtctgtatcggcttcacccgagcttttcgtatggtatggcaaaacaccgaaaatgctcttctcgaaacggtgatcgtatccacggtgcatctgatttcctccactgacatttggtggaatagatccctcgatactgggctgcggctgctgctggtcggcataattcgtgatcgactaatccagttcatcagcaagctgcagttcgctgtcacagtgttgttgacctcatggacggaaaaaaagcaacggcgaaaaacaaccgccacgctgtgtatcttgaatatcgtgttctcaccttttgtcctcgtgataatcgtgttctctacattgctaagctccccactgctgcctttattcacgctgcctgtatttctggtgggtttcccacgacccatacagagctggcctggtgccgccgggacaacagcttgcgtctgcgccgacacggtttattactaccagatggtaccacgccttactgctgtccttcaaaccgcaatggccgccggaagtctgggcttacttctgccagggtctcattacttaggacgctttcaggacagattaatgtggatcatgatactggagtgcggctacacctactgttccatcaacatcaaagggctggaactccaggaaacctcttgccacacagctgaagcccgcagagtggatgaggtttttgaagacgcttttgaacaggagtacacacgggtgtgttcccttaatgaacattttggtaatgtcctcaccccctgtactgtgttgcctgtgaaactgtactccgacgcaagaaatgtgctctctgggatcattgacagtcacgagaatctgaaagagttcaagggggatctgattaaagtcttggtctggatcctggtgcaatactgcagtaaaaggcccgggatgaaagaaaacgttcacaacacagagaataagggcaaggctcccttgatgctcccagctctgaatactctcccacccccgaagtcacccgaagatattgactctcttaacagcgaaaccttcaacgattggtccgatgacaatatcttcgatgacgaaccaaccattaaaaaggtaatagaggaaaaacatcaactgaaagacctccctggcacaaacctgtttatcccaggctccgtggaatcgcagcgcgttggggaccactcaacaggaacagttcccgaaaatgacctgtacaaggcggtgctcttgggctatcctgctgtggacaagggaaaacaagaggacatgccgtatatcccattgatggagttctcttgcagccacagccatctggtgtgcctgccagcagaatggcgcactagctgcatgccaagttcaaaaatgaaggaaatgagcagtttgttccccgaggattggtatcagttcgtgttgagacaactggagtgctatcatagcgaggagaaagccagtaacgtgctcgaggagatagctaaagacaaggttttaaaagacttctacgtgcacacggtcatgacatgctacttctctctgtttgggatcgataacatggccccatcacccggccacatcctcagggtttacggcggggtcctgccatggagtgtggctcttgactggctaactgagaaacccgaattgtttcagcttgccttgaaggcctttcgctatactcttaagctgatgatcgacaaagcatcactgggccccattgaggatttccgggagctcatcaaatacctagaggagtatgagcgtgattggtatattggcttagtgtccgatgagaagtggaaagaggcaatactgcaggagaagccgtacctcttctccctcgggtatgattccaacatgggaatctacaccgggagagtcctgtcgctgcaagaactcctgattcaagttgggaaactgaaccctgaagctgttcgcggtcagtgggccaatctgtcctgggagctgctctacgccaccaatgacgacgaggagaggtattctatccaagctcatcctctgcttcttagaaacctgaccgtccaagcggcagagccccctttaggatacccaatttatagttccaaaccccttcacatccacctatattag

SEQ ID NO: 281473 - DNA, 3519 bp, Artificial Sequence
  derived and/or modified sequence
atgagccctgacgtaccactgttgaatgattacaagcaggacttcttcctcaaacgcttcccacagacagtcctcggcgggcccaggttcaagctgggatactgtgcgcctccttacatttatgtcaaccaaataatactgttccttatgccttgggtgtggggaggagtggggactcttctttatcaattggggatccttaaggattactataccgcggctctctcgggcgggctgatgctcttcacagcattcgtgatccagtttacttccctgtatgctaaaaataaatcgacgacagtagaaaggattctaactaccgatatcttggcggaagaagacgaacacgaatttacgtcgtgcacaggggctgagacagtgaaattcctaattcccggcaaaaagtacgtagccaacacagtctttcattctatcctggcaggtctggcatgtggcttgggcacctggtatctattgcccaatcggattacactgttgtatgggagcactggcggcacagccctgctattcttcttcggatggatgaccctgtgcattgctgagtactcgttgatcgtaaacaccgccactgaaactgctactttccaaacccaggatacatatgaaatcatccctctaatgagaccgttatacatcttctttttcgtctctgtggacctagcacaccgatttgtagtgaatatgcccgctctggagcacatgaatcaaatcctccacatcctgtttgttttcctcccattcctttgggcattgggcacactgccccctcccgacgctctgcttttgtgggctatggagcaagtgctggagtttggacttgggggatcctcaatgagtacccatcttcgcctgctcgttatgttcatcatgtctgctggaactgcaatagccagctactttattccctccacggtgggtgtggttcttttcatgactgggttcggctttctgctgagcctgaaccttagtgatatgggtcacaagattggaacaaagagtaaagacctcccaagcggtccagaaaagcatttctcatggaaggagtgcctgttctatattatcatcctggttttggcactactggagactagtctacttcaccatttcgcagggttttcccagatctccaagagcaattcacaggcaatcgtgggatacggcctaatgatactgctcattatcctctggatcctccgtgagatccagtctgtttacatcatcggcatttttaggaaccccttttatcctaaggacgtgcagacggtaactgtgtttttcgaaaagcagacaaggttgatgaagatcggcattgttcgtcgcattctcttgaccctcgtgtccccgtttgcaatgatcgcattcctgtctctggactcgtcattgcagggattgcactccgtgagcgtctgcatagggttcacccgagcttttcggatggtgtggcagaatactgagaatgccctgctggaaaccgtgatagtgagtacagttcatctgatctcaagtacggacatttggtggaatcgctccctggataccggcctgagactgctgctggttggcataatcagagacagactgattcagttcatctccaagctccagttcgcagttacagttctattgaccagttggacagagaaaaaacagagaagaaagactacagcgacactttgtattctgaatatcgtgttttctcccttcgtcttagtcatcatcgtgttctcaacattgctcagttcacccctcctgcctttatttactctgccagtattcctcgtcgggttccccagacctattcagagctggcctggcgctgccggcaccaccgcatgtgtgtgcgcggatactgtgtattattaccaaatggtgcccaggcttacagctgtgctccagaccgctatggccgcggggtctttgggactactgctccctggctctcactacctgggcagattccaggacagactgatgtggatcatgatcctcgagtgtggctacacttattgttctatcaacatcaagggacttgaactccaagagacttcttgtcacaccgctgaggcacggagagtggatgaagtgttcgaggatgctttcgagcaagagtacacaagagtgtgttccttgaacgaacactttggtaacgttctgaccccttgtacagtgctgcccgtgaagttgtattcggatgctcgcaacgtgctctctggcattattgactcacacgaaaacctgaaggaatttaaaggcgaccttattaaggtgctggtttggatcttggtgcagtactgtagcaaaagaccaggcatgaaagagaacgtccacaacacagagaacaaaggcaaggctcccctgatgctgcctgcattgaataccttgcctccgccaaagtcccccgaagacatagatagcctcaatagcgagacttttaatgattggagtgacgataatattttcgatgatgaacctacaatcaagaaagtaattgaggagaagcaccagttgaaggacttgcccggcactaatctatttatccccggatcagtggagtcacagagagtaggtgaccatagtacagggaccgtcccggagaatgatttatataaagctgtgctgctcgggtatcctgcggtggacaaaggtaagcaggaagacatgccatatattcccctgatggagttcagctgctcgcattcccacctggtgtgtctgcctgctgaatggaggacgagctgcatgcctagttccaaaatgaaagagatgtcctctctttttcccgaagactggtaccagttcgtcctgcggcaactggaatgttaccacagtgaagagaaggcttcgaatgtgctggaggagatcgccaaagacaaggtgcttaaggatttttatgtccacactgttatgacctgctacttcagtttgttcggcatcgacaacatggccccatcccctgggcatatcttgagagtgtatgggggtgttcttccatggtctgtcgccctggactggctgaccgagaagccagaactcttccaacttgccctaaaagcctttcgatacacccttaagctaatgatagacaaggcctcattggggccaatcgaggactttcgggaactgattaaatacctggaggagtacgagcgggattggtacatcggcctcgtgagcgatgaaaagtggaaggaggccattctgcaagaaaagccttacctattctctctgggctatgatagcaatatgggcatttacacaggacgagttctctctctgcaggagttgctgattcaagtaggtaagttgaacccggaagctgtgcgggggcagtgggccaatttatcctgggaactcctgtacgccacgaacgacgatgaggagcggtacagtattcaagcacatcccctgcttttacgaaatttaacagtgcaagccgccgagcctcccctcggataccctatttacagctccaagcccttgcatattcacctgtattag

SEQ ID NO: 281474 - DNA, 1584 bp, Artificial Sequence
  derived and/or modified sequence
ctgtgtatccttaacatcgtgttttctcccttcgtcctcgtaattatcgttttctctactctccttagttcccctctactgcccctgttcactctcccagtcttcctggtggggtttccacggcctatacagtcctggcctggagctgctggaacgactgcctgcgtctgcgccgacacagtctactattaccagatggtaccccgtctgactgccgttctccaaacagctatggcggccggcagtcttggcctcttattgccagggtctcactacttggggcggttccaagatcggctaatgtggatcatgatactggagtgcggttatacttattgttcgattaacattaaaggcctggaactgcaggagaccagctgtcataccgccgaagcccggcgggtcgatgaagtattcgaggacgcatttgagcaggagtatactcgagtttgtagcctaaatgaacatttcggcaatgtgcttacaccctgcactgtacttcctgtcaagttatatagcgacgcccggaacgtgttaagcgggattatcgattcccatgagaatttgaaggagttcaagggcgacctgataaaggtcctggtgtggattcttgtgcaatattgttccaaaaggcccggcatgaaagagaacgtacacaacaccgaaaacaaggggaaggcgcccctgatgctgccagccctgaataccttgcctccaccaaaatctcccgaggacatcgactcactgaacagtgagacattcaacgattggtccgacgataatatttttgatgatgagcccacaattaaaaaggtcattgaagagaagcatcagctgaaggatctgccaggtactaatctgttcattcccggatcggtagagtcccaacgcgtgggagatcatagcacaggaacggtgcccgagaatgatctgtataaggcggttctattgggctaccccgcagtcgacaagggaaagcaggaggacatgccctacatccccctcatggagtttagttgcagtcattctcacctggtgtgcctgcctgccgagtggaggacctcctgtatgccgtccagcaagatgaaagagatgtcgtccttgtttcccgaagactggtaccaattcgtgctgagacagctggagtgttatcactccgaggagaaagccagtaacgtgctggaagagatcgctaaagacaaggtgttaaaggatttctacgttcacactgtcatgacatgttacttctccctgtttggcatcgacaatatggcacctagccccggacatatactgagggtgtatggaggagtgctgccttggtcggtggctctggattggctgacagagaaacctgagctctttcagttggccctgaaggcgtttcgttacactctcaagctcatgatcgacaaggcgtcgctaggccccatcgaagacttccgggaactaattaaatatctggaggaatacgaacgggattggtatattggcctggtgagcgacgagaagtggaaggaggccattctgcaggaaaagccctacttattcagcctgggttacgattctaatatgtatctctag

SEQ ID NO: 281475 - DNA, 2817 bp, Artificial Sequence
  derived and/or modified sequence
atgcctgccctggagcacatgaaccagatcctgcacatcctgtttgtgttcctgcccttcctgtgggccctgggcaccctgcccccaccagatgccctgctgctgtgggccatggagcaggtgctggagtttggcctgggcggcagctccatgagcacccacctgcggctgctggtgatgttcatcatgtctgctggaacagccatcgccagctacttcatccccagcacagtgggcgtggtgctcttcatgactggatttggcttcctgctgagcctgaacctgagtgacatgggccacaagattggcaccaagagcaaggacctgcccagcggccctgagaagcacttctcctggaaggaatgtctcttctacatcatcatcctggtgctggccctgctggagaccagcctgctgcaccactttgctggcttcagccagatcagcaagagcaacagccaggccatcgtgggctacggcctgatgatcctgctgatcatcctgtggatcctgcgggagatccagagcgtgtacatcatcggcatcttcaggaaccccttctaccccaaggatgtgcagacagtgaccgtcttctttgagaagcagacccggctgatgaagattggcatcgtgcggcgcatcctgctgaccctggtgagcccctttgccatgattgccttcctgagcctggacagcagcctgcagggcctgcacagcgtgtctgtgtgcatcggcttcacccgggccttcaggatggtgtggcagaacacagaaaatgccctgctggagaccgtcatcgtgtccacagtgcacctgatcagcagcacagacatctggtggaacagaagcctggacaccggcctgcggctgctgctggtgggcatcatccgggacaggctcatccagttcatcagcaagctgcagtttgctgtgacagtgctgctgacctcctggacagagaagaagcagaggaggaagaccacagccaccctgtgcatcctgaacatcgtgttcagcccctttgtgctggtgatcatcgtgttcagcaccctgctgagcagccccctgctgcccctcttcaccctgcctgtgttcctggtgggcttcccccggcccatccagagctggccaggagctgctggcaccacagcctgtgtgtgtgccgacacagtgtactactaccagatggtgccccggctgacagctgtgctgcagacagccatggccgccggcagcctgggcctgctgctgcccggcagccactacctgggccgcttccaggaccggctgatgtggatcatgatcctggagtgtggctacacctactgcagcatcaacatcaagggcctggagctgcaggagaccagctgccacacagctgaggccaggagagtggatgaggtgtttgaagatgcctttgagcaggagtacaccagggtgtgcagcctgaatgagcactttggaaatgtgctgaccccctgcaccgtgctgcctgtgaagctgtacagtgatgccagaaatgtgctgagcggcatcatcgacagccatgagaacctgaaggagttcaagggggacctgatcaaggtgctggtgtggatcctggtgcagtactgcagcaagaggcctggcatgaaggaaaatgtgcacaacacagagaacaagggcaaggcccccctgatgctgcctgccctgaacaccctgcccccacccaagagccctgaggacatcgacagcctgaacagcgagaccttcaatgactggagcgatgacaacatctttgatgatgagcccaccatcaagaaggtgattgaggagaagcaccagctgaaggacctgcccggcaccaacctcttcatccctggctctgtggagagccagagggtgggggaccacagcactggaacagtgcctgaaaatgacctgtacaaggctgtgctgctgggctacccagctgtggacaagggcaagcaggaggacatgccctacatccccctgatggagttcagctgcagccacagccacctggtgtgcctgcctgctgagtggaggaccagctgcatgcccagcagcaagatgaaggagatgagcagcctcttccctgaggactggtaccagtttgtgctgcggcagctggagtgctaccacagcgaggagaaggccagcaatgtgctggaggagatcgccaaggacaaggtgctgaaggacttctacgtgcacacagtgatgacctgctacttcagcctgtttggaattgacaacatggcccccagccctggccacatcctgcgggtgtatggaggagtgctgccctggagcgtggccctggactggctgacagagaagccagagctgttccagctggccctgaaggccttccgctacaccctgaagctgatgattgacaaggccagcctgggccccatcgaggacttccgggagctgatcaagtacctggaggagtatgagcgggactggtacatcggcctggtgtctgatgagaagtggaaggaggccatcctgcaggagaagccctacctgttcagcctgggctatgacagcaacatgggcatctacacaggccgggtgctgagcctgcaggagctgctgatccaggtgggcaagctgaaccctgaggccgtgcggggccagtgggccaacctgtcctgggagctgctgtatgccaccaatgatgatgaggagcgctacagcatccaggcccaccccctgctgctgaggaacctgactgtgcaggccgctgagccccccctgggctaccccatctacagcagcaagcccctgcacatccacctgtactag

SEQ ID NO: 281476 - DNA, 3519 bp, Artificial Sequence
  derived and/or modified sequence
atgagcccagatgtgcccctgctgaatgactacaagcaggacttcttcctgaagcgcttcccccagacagtgctgggcggcccccgcttcaagctgggctactgtgccccaccctacatctacgtgaaccagatcatcctcttcctgatgccctgggtgtggggcggcgtgggcaccctgctgtaccagctgggcatcctgaaggactactacacagctgccctgagcggcggcctgatgctgttcaccgcctttgtgatccagttcaccagcctgtatgccaagaacaagagcaccaccgtggagcgcatcctgaccacagacatcctggccgaggaggatgagcacgagttcaccagctgcaccggggctgagaccgtgaagttcctgatccctgggaagaagtatgtggccaacacagtgttccacagcatcctggccggcctggcctgtggcctgggcacctggtacctgctgcccaaccgcatcaccctgctgtatggcagcactggaggaacagccctgctcttcttcttcggctggatgaccctgtgcatcgccgagtacagcctcatcgtgaacacagccacagaaacagccaccttccagacccaggacacctatgagatcatccccctgatgaggcccctgtacatcttcttctttgtgtctgtggacctggcccacagatttgtggtgaacatgcctgccctggagcacatgaaccagatcctgcacatcctgtttgtgttcctgcccttcctgtgggccctgggcaccctgcccccaccagatgccctgctgctgtgggccatggagcaggtgctggagtttggcctgggcggcagctccatgagcacccacctgcggctgctggtgatgttcatcatgtctgctggaacagccatcgccagctacttcatccccagcacagtgggcgtggtgctcttcatgactggatttggcttcctgctgagcctgaacctgagtgacatgggccacaagattggcaccaagagcaaggacctgcccagcggccctgagaagcacttctcctggaaggaatgtctcttctacatcatcatcctggtgctggccctgctggagaccagcctgctgcaccactttgctggcttcagccagatcagcaagagcaacagccaggccatcgtgggctacggcctgatgatcctgctgatcatcctgtggatcctgcgggagatccagagcgtgtacatcatcggcatcttcaggaaccccttctaccccaaggatgtgcagacagtgaccgtcttctttgagaagcagacccggctgatgaagattggcatcgtgcggcgcatcctgctgaccctggtgagcccctttgccatgattgccttcctgagcctggacagcagcctgcagggcctgcacagcgtgtctgtgtgcatcggcttcacccgggccttcaggatggtgtggcagaacacagaaaatgccctgctggagaccgtcatcgtgtccacagtgcacctgatcagcagcacagacatctggtggaacagaagcctggacaccggcctgcggctgctgctggtgggcatcatccgggacaggctcatccagttcatcagcaagctgcagtttgctgtgacagtgctgctgacctcctggacagagaagaagcagaggaggaagaccacagccaccctgtgcatcctgaacatcgtgttcagcccctttgtgctggtgatcatcgtgttcagcaccctgctgagcagccccctgctgcccctcttcaccctgcctgtgttcctggtgggcttcccccggcccatccagagctggccaggagctgctggcaccacagcctgtgtgtgtgccgacacagtgtactactaccagatggtgccccggctgacagctgtgctgcagacagccatggccgccggcagcctgggcctgctgctgcccggcagccactacctgggccgcttccaggaccggctgatgtggatcatgatcctggagtgtggctacacctactgcagcatcaacatcaagggcctggagctgcaggagaccagctgccacacagctgaggccaggagagtggatgaggtgtttgaagatgcctttgagcaggagtacaccagggtgtgcagcctgaatgagcactttggaaatgtgctgaccccctgcaccgtgctgcctgtgaagctgtacagtgatgccagaaatgtgctgagcggcatcatcgacagccatgagaacctgaaggagttcaagggggacctgatcaaggtgctggtgtggatcctggtgcagtactgcagcaagaggcctggcatgaaggaaaatgtgcacaacacagagaacaagggcaaggcccccctgatgctgcctgccctgaacaccctgcccccacccaagagccctgaggacatcgacagcctgaacagcgagaccttcaatgactggagcgatgacaacatctttgatgatgagcccaccatcaagaaggtgattgaggagaagcaccagctgaaggacctgcccggcaccaacctcttcatccctggctctgtggagagccagagggtgggggaccacagcactggaacagtgcctgaaaatgacctgtacaaggctgtgctgctgggctacccagctgtggacaagggcaagcaggaggacatgccctacatccccctgatggagttcagctgcagccacagccacctggtgtgcctgcctgctgagtggaggaccagctgcatgcccagcagcaagatgaaggagatgagcagcctcttccctgaggactggtaccagtttgtgctgcggcagctggagtgctaccacagcgaggagaaggccagcaatgtgctggaggagatcgccaaggacaaggtgctgaaggacttctacgtgcacacagtgatgacctgctacttcagcctgtttggaattgacaacatggcccccagccctggccacatcctgcgggtgtatggaggagtgctgccctggagcgtggccctggactggctgacagagaagccagagctgttccagctggccctgaaggccttccgctacaccctgaagctgatgattgacaaggccagcctgggccccatcgaggacttccgggagctgatcaagtacctggaggagtatgagcgggactggtacatcggcctggtgtctgatgagaagtggaaggaggccatcctgcaggagaagccctacctgttcagcctgggctatgacagcaacatgggcatctacacaggccgggtgctgagcctgcaggagctgctgatccaggtgggcaagctgaaccctgaggccgtgcggggccagtgggccaacctgtcctgggagctgctgtatgccaccaatgatgatgaggagcgctacagcatccaggcccaccccctgctgctgaggaacctgactgtgcaggccgctgagccccccctgggctaccccatctacagcagcaagcccctgcacatccacctgtactag

SEQ ID NO: 281477 - DNA, 1584 bp, Artificial Sequence
  derived and/or modified sequence
ctctgcatcctgaacatcgtgttcagcccctttgtgctggtgatcatcgtgttcagcaccctgctgagcagccccctgctgcccctcttcaccctgcctgtgttcctggtgggcttcccccggcccatccagagctggccaggagctgctggcaccacagcctgtgtgtgtgccgacacagtgtactactaccagatggtgccccggctgacagctgtgctgcagacagccatggccgccggcagcctgggcctgctgctgcccggcagccactacctgggccgcttccaggaccggctgatgtggatcatgatcctggagtgtggctacacctactgcagcatcaacatcaagggcctggagctgcaggagaccagctgccacacagctgaggccaggagagtggatgaggtgtttgaagatgcctttgagcaggagtacaccagggtgtgcagcctgaatgagcactttggaaatgtgctgaccccctgcaccgtgctgcctgtgaagctgtacagtgatgccagaaatgtgctgagcggcatcatcgacagccatgagaacctgaaggagttcaagggggacctgatcaaggtgctggtgtggatcctggtgcagtactgcagcaagaggcctggcatgaaggaaaatgtgcacaacacagagaacaagggcaaggcccccctgatgctgcctgccctgaacaccctgcccccacccaagagccctgaggacatcgacagcctgaacagcgagaccttcaatgactggagcgatgacaacatctttgatgatgagcccaccatcaagaaggtgattgaggagaagcaccagctgaaggacctgcccggcaccaacctcttcatccctggctctgtggagagccagagggtgggggaccacagcactggaacagtgcctgaaaatgacctgtacaaggctgtgctgctgggctacccagctgtggacaagggcaagcaggaggacatgccctacatccccctgatggagttcagctgcagccacagccacctggtgtgcctgcctgctgagtggaggaccagctgcatgcccagcagcaagatgaaggagatgagcagcctcttccctgaggactggtaccagtttgtgctgcggcagctggagtgctaccacagcgaggagaaggccagcaatgtgctggaggagatcgccaaggacaaggtgctgaaggacttctacgtgcacacagtgatgacctgctacttcagcctgtttggaattgacaacatggcccccagccctggccacatcctgcgggtgtatggaggagtgctgccctggagcgtggccctggactggctgacagagaagccagagctgttccagctggccctgaaggccttccgctacaccctgaagctgatgattgacaaggccagcctgggccccatcgaggacttccgggagctgatcaagtacctggaggagtatgagcgggactggtacatcggcctggtgtctgatgagaagtggaaggaggccatcctgcaggagaagccctacctgttcagcctgggctatgacagcaacatgtacctgtag

SEQ ID NO: 281478 - DNA, 2817 bp, Artificial Sequence
  derived and/or modified sequence
atgcccgccctggagcacatgaaccagatcctgcacatcctgttcgtgtttttaccatttttgtgggcattggggacgttgccccctccagatgcactgctcctgtgggctatggaacaggttctcgagtttggtctaggcgggtctagcatgagtacacacttgagactgcttgttatgttcattatgtctgccgggactgcgatcgcctcttacttcatacctagtactgtaggggtcgttctgttcatgaccggtttcggcttcctgctcagcctgaatctttccgatatgggccacaaaatcggcacaaagagcaaggacttacccagcggaccagaaaagcacttctcctggaaggagtgtctgttctatataatcattttggtgctggctctgttggagacaagcctgctccatcactttgccggcttttcccagatcagcaaatcaaacagccaagcaatcgtggggtatggactgatgattctactgattatactatggatactgcgggaaatccagagcgtgtacataattggtatctttcggaaccccttctaccccaaggacgtgcagactgtaaccgtgtttttcgaaaagcagacaaggctaatgaagataggaattgtccggcggatcctgttaacactggtgtctccgttcgcgatgatcgcctttttgagtctcgactccagcctgcagggcctccatagcgtctctgtgtgtatcggcttcacacgggccttcagaatggtttggcagaacactgaaaacgcactgctcgaaaccgtgatcgtctcgacagtgcacctgatcagtagcactgacatctggtggaacagatcattggataccggcctacgcctcctgttggttggtattatcagggatcgactcattcagttcattagcaaactgcagttcgccgttactgtcctactgacaagctggacagagaaaaagcaaagaaggaaaacgactgccacgctgtgtatcctcaatattgtgtttagcccatttgttctggttatcatcgtgttctccaccctgctgagcagtccactcttaccattgtttacactgccggtgttcctcgtgggctttcctaggccgattcagagttggcccggggcagccgggacaacggcatgtgtctgtgcagatacagtttattactatcagatggtcccacgcctgacagccgtgctccagacagcaatggcagccggctcgttaggtctcttactacctgggagccattatcttggccggtttcaggatcggttgatgtggatcatgattctggagtgcggatacacatactgctctattaacattaaaggcttggaacttcaggagacctcgtgtcataccgccgaggcccgacgcgttgacgaggtcttcgaagatgctttcgaacaggaatatactagggtgtgctcattaaatgagcatttcgggaacgtgttgactccgtgtactgtcctgcccgttaagctgtattcggacgcaaggaatgtcctctcaggcataatcgatagccatgaaaatctgaaagaattcaagggtgacctcattaaggtactagtctggatcttggttcagtattgctcaaagaggcccggtatgaaagaaaacgtgcacaataccgagaacaagggaaaagcaccattgatgctgcctgcactgaacactctgccccctcccaagtctcctgaagatatagacagtttgaacagcgaaacctttaatgactggtccgacgacaatatctttgatgatgagcctactatcaagaaagtcatagaggaaaaacatcagctaaaagacttacctggcacaaacctttttatccctgggtccgtcgaaagtcaacgcgtgggagatcatagcaccggtacagtgccagagaatgacctatacaaagccgtgctcttgggttatcctgccgtggacaaggggaaacaagaggatatgccctatattcctctgatggaattcagctgtagccattcacatctggtttgtctgcccgccgaatggagaacatcgtgcatgccgtcttctaagatgaaagagatgtcgtcccttttccccgaggactggtaccaatttgttctgaggcagctcgagtgttaccatagtgaggagaaagcgtcaaatgtactcgaggaaatagcaaaggacaaggtgctcaaggatttctatgtgcacacggttatgacatgctacttcagcctcttcggaattgataacatggcccccagccccggacacattctaagagtgtacggcggcgtgctcccttggtctgtcgctctcgactggctgactgaaaagccggaattgtttcagctggctcttaaagcgttcaggtacaccttgaaactaatgattgataaggcttctctcggacccattgaagactttcgggagctgatcaagtacctggaggagtacgagagagattggtacatcggcttagtgtccgacgagaagtggaaggaggcaatcctacaggaaaaaccatatttgttttcgttgggctacgatagtaatatgggcatctacaccgggcgggttctaagtctgcaggaattgcttattcaggtgggaaaactgaaccctgaagcagtgagaggccagtgggctaacctttcctgggaattgctgtacgctaccaacgacgacgaggagcgttatagcattcaggcccaccctttattgcttcgcaatctgaccgtgcaagccgccgaaccccctctcggctatccgatctatagttctaagcctcttcacatccatctgtactag

SEQ ID NO: 281479 - DNA, 3519 bp, Artificial Sequence
  derived and/or modified sequence
atgagccccgacgtgcccctgctgaacgactacaagcaggacttctttctgaaacggttcccgcagacagtgctgggaggaccgaggtttaagctgggttattgcgcccctccctatatctacgttaatcaaatcatcctgtttctgatgccttgggtgtggggcggagttggcactctgctctaccagctcggcatccttaaagactactatactgcagctctctccggcggtttaatgttgtttactgcgtttgtgatccagtttacctctctctatgccaagaataagagcacaacagtggaacgcattctgactacagacatactagcagaagaagacgaacacgaatttaccagttgtaccggcgccgaaacagtgaaatttttgattcccggaaagaagtacgtggccaacacagtcttccacagcatcctcgccggcctagcatgcggtctcggaacatggtacctattaccgaaccggattactcttctatatggctccacgggcgggaccgccctacttttcttcttcggctggatgactctatgcattgctgagtatagtttgatagtgaacactgccaccgaaacggctacttttcaaacccaagacacttatgagataatccccttgatgagacccctgtacatcttctttttcgtcagcgttgacctcgcccatagatttgtagttaacatgccggcacttgaacacatgaaccagattctccacatactgtttgttttcctaccgttcctctgggcactgggtactctaccaccgccggacgcacttctgttatgggccatggaacaggtactggagtttggtctgggcgggagcagcatgtcaacacacctgcgcctcctcgtaatgttcataatgtcagctggtacggctattgccagttactttattccaagcactgtaggcgtggttctcttcatgactgggttcggctttctcctgagtcttaacctgtccgatatgggtcataaaattggcacgaaatctaaggacctgcccagcgggcctgagaagcattttagctggaaggaatgcctattttacatcatcattctggtgctcgcactgcttgaaactagtttattgcaccactttgcaggcttttcacaaatctctaaatctaattctcaggcgattgtagggtacggcttgatgatactcctcatcatcctgtggatactcagggagattcaaagtgtgtacatcatcggaatctttagaaacccattttatcccaaggacgtccaaacagttacagtgttcttcgaaaagcagactcgactgatgaagattggcattgtgcggcggattttattgaccctggtctcgccgttcgccatgattgcgttcctctcactcgacagttctctgcaagggctgcatagcgtcagcgtctgcatcggatttactagagcgttcagaatggtttggcagaatacagagaatgccttgctagagaccgtcatcgtgagtactgtgcatttgatatcctcgactgatatctggtggaacagaagtctagacaccggtctcaggctcctcctggtgggcattattcgggacaggctcatccagtttattagtaagttgcagtttgcagtcaccgtgctgctgacctcctggacagagaagaagcagagacgaaaaacaactgccactttatgtatcttgaacatagtcttctctccctttgttctggtcattattgtcttctctacattgctgagctctcccctgctgccacttttcacccttcctgtgttcttagtgggcttccccagacccattcaaagctggccgggagctgccgggactaccgcctgcgtctgtgctgacaccgtgtactattaccagatggtgccaagactgacagcagtcctccagacagctatggctgccgggtctctgggcttactgctccccggcagccattacctaggccgttttcaggataggctgatgtggatcatgatcctcgagtgcgggtacacttactgctcaattaacataaagggcctggagctgcaggagacctcttgtcacacagccgaggccaggagggtagatgaagtgttcgaagacgccttcgagcaggagtatacacgtgtgtgctccctgaatgagcatttcggcaatgtgctgactccttgtacggtgctgccagtcaagctctatagtgatgcacgtaacgtgctcagtgggattattgactcccatgagaatctgaaagagtttaaaggcgacttaatcaaagtcttggtgtggattcttgtccaatactgcagcaaacgtcccggcatgaaagaaaacgttcacaacaccgagaacaaaggcaaggcaccattgatgctgccggctttgaataccctcccacctccgaagtcaccagaagatatagattccctaaactccgaaaccttcaatgattggtccgacgataatatcttcgacgacgaacctacgataaagaaggtcatcgaagagaagcaccaattgaaggatctgcctgggacgaatctcttcatcccaggatccgtggaaagccaacgcgtgggtgatcattctactgggaccgtcccggaaaatgatctttacaaagcagtgctcttgggttaccccgcagtcgacaaaggcaaacaggaggatatgccatacattccgctcatggaattctcctgttcgcattcccacctcgtgtgtctgccagcagagtggagaacaagctgcatgcctagctcaaaaatgaaagagatgtcctcgttgttcccggaggattggtaccagtttgtgttgcgccagcttgagtgttatcactctgaggagaaagccagtaacgtgctagaggaaatcgctaaagacaaggtgcttaaggacttttatgtccacactgtaatgacatgttatttttcactcttcggcatcgataacatggcaccctcccccggccacatactgagagtgtatgggggcgtactaccctggtctgttgccctagattggcttaccgagaaaccggagctgttccagttagcactgaaagccttccgctatacactgaaactgatgatcgataaggctagcctgggacctatcgaagacttccgcgagttgatcaaatacctggaagagtacgaaagagattggtatattggccttgtctccgacgagaagtggaaggaggccattctgcaggaaaagccctatttgttttccctggggtacgattccaatatgggcatttacacaggtcgggtgctctctctgcaggaactgctaatccaggtagggaagctaaatcccgaggccgtgagaggccagtgggcaaacctgtcatgggagcttctgtacgccaccaatgacgacgaggaacggtactctatccaggcacaccccttattgttgcgtaacttaacagtgcaggctgcagagcctccactgggataccctatatatagctcaaaaccccttcatatacacctctactag

SEQ ID NO: 281480 - DNA, 3519 bp, Artificial Sequence
  derived and/or modified sequence
atgagccccgacgtgcccctgctgaacgactacaagcaggacttcttcctcaaaagatttccccagactgtactcggagggccgcgtttcaagctcggctattgcgcccctccgtatatctatgtgaatcagattatcctcttcctgatgccttgggtgtggggaggcgttggaacacttctctaccagcttggtatcctcaaagactactacacagctgcccttagcggcgggctgatgcttttcacagcctttgtgatccagtttacatccctctatgctaaaaacaaatctaccactgtagagagaattttgacaacggacatcctagcagaggaagatgagcatgaatttacttcatgcacaggtgctgaaacggtgaagtttctaatcccgggcaagaaatacgttgcaaataccgtgtttcattcgatcttagctggacttgcctgtggcctgggcacctggtatctgctgcctaacaggattacattgttgtacgggtctaccggggggaccgctctgctcttcttctttggctggatgacattatgtatcgccgaatatagcctgatagtaaacacagccacggaaactgccactttccagacacaagacacctacgaaatcatcccgttgatgagaccactctatatcttcttttttgtcagtgttgaccttgcacataggtttgtggtgaacatgcctgctctggagcacatgaaccagatcctgcacatactcttcgtgtttctaccattcctctgggccctagggacactgcctccccccgacgccctcctgctgtgggccatggaacaggtgctcgaatttggcctgggtggctcttctatgagtacccatttgcgtcttctggtgatgttcattatgtcggctggtaccgccattgcatcctattttataccctcaacagtgggagtcgtcctgtttatgactggattcggtttccttttgagtctgaacctttctgacatgggccataaaattgggacaaagtctaaagatctccctagcgggcctgagaagcacttctcttggaaagagtgcttgttctacattatcatactggtgctcgcactgttggagacgtccttgctgcaccatttcgctggcttctcccagatttctaagagtaatagccaagctatagtgggatacgggcttatgatcctcctgattatcctctggatactaagagaaatccagagcgtgtacattatcgggatcttccgcaaccctttctacccgaaggatgtccagacagtgactgtgttcttcgaaaaacagactcggctgatgaaaattggcatagtgagacgcattttgctcacgctggtctccccattcgccatgatagcatttctctctttggatagttccctgcagggactgcactcagtgtcagtctgcatagggttcactcgggccttccgtatggtctggcagaatacggagaatgccctcctagaaaccgtcatcgtcagcaccgttcacctcattagtagcacggacatttggtggaaccgatccctggacacaggtctgcgtcttctcctcgttggaatcattcgagaccggttgattcagtttatttccaagctgcaatttgcggtaacagtcttgttgaccagttggactgaaaaaaagcaacggcgcaagacgaccgccaccttgtgcattttaaatattgtcttctcacccttcgtccttgtgataattgtcttctctacgctgttgtccagccccctgcttcctctgtttaccctgcctgtgtttctcgtgggtttcccaagacctatccagtcttggcccggagccgctgggaccaccgcatgcgtttgtgccgatacagtctactactaccaaatggtgccccggctcaccgcagtcttgcagaccgccatggcggcaggatctctggggctgctcctccctgggtcacactacttagggaggttccaggaccgacttatgtggattatgatcttggagtgtggttacacctattgtagcataaacatcaagggtttagaactccaggagacaagttgtcataccgcagaggctaggcgtgtcgatgaggtcttcgaagatgctttcgaacaggaatacacacgggtctgttccctcaatgaacactttggtaatgtcttgaccccttgcaccgtattgcctgtcaaattgtatagcgatgcacgaaatgtgctaagtgggataattgacagccacgagaacctaaaagagtttaaaggtgacctcattaaagtcctggtttggatcttagttcagtactgttctaaacgccccggtatgaaggaaaatgtccataatacagaaaataaaggcaaggctcctctgatgctgcctgccttaaatacactcccaccccctaaaagtcctgaggatatcgattctctcaatagcgaaacttttaatgattggtctgacgacaatatcttcgacgatgaacccaccataaaaaaagtgatcgaggagaagcaccaactcaaggatcttcccggcaccaacctcttcattccagggtccgtggagtcccagcgtgtcggagatcatagcaccgggactgttcctgaaaacgacttgtataaggcagttctgttgggttaccccgctgtggataaaggtaagcaggaagacatgccttacatccctctgatggagttctcctgtagtcacagccatctggtctgcctgccagcagagtggcgcacgtcttgtatgcctagcagcaaaatgaaggaaatgtctagcctgtttccagaggattggtaccagtttgtgctccgtcaattagagtgttaccacagcgaggagaaagcatccaacgtattagaggagattgccaaagataaggtcctcaaagatttctatgttcacacagttatgacatgctatttttcactgtttggtattgataatatggccccaagcccaggtcatatactgcgcgtgtacggaggcgtgctcccctggtctgtggcactcgactggctgacagagaaaccagaattatttcagctagccttgaaagccttccgctacacccttaagctgatgatcgataaggcgtctctgggtcccatcgaggatttccgtgagctgattaaatatctcgaggagtacgaaagggattggtatatcggacttgtatccgacgagaagtggaaagaggccatcctccaggaaaagccctacttattcagcctggggtacgattctaacatgggtatctacacaggtagagtccttagcctacaggaactgctcattcaggtgggcaagctaaatcctgaggccgtaagggggcagtgggctaatctgtcctgggaattactgtatgctacaaacgacgatgaagaacgctacagcatacaggcccatccgcttctactgaggaatctgacagtccaagcagccgagccccctttggggtaccccatctatagcagcaagccacttcatatccacctatattag

SEQ ID NO: 281481 - DNA, 1584 bp, Artificial Sequence
  derived and/or modified sequence
ctgtgcatcctgaacatcgtgttcagccccttcgtgctggtgatcattgtcttctccacgctcctgagcagtcctctacttcccctgtttactctccctgtattcctcgtggggtttcccagacccatccagagctggcctggggccgccgggactacagcttgcgtatgtgcagacacagtatattactatcaaatggtccctaggttgactgccgttctacagactgctatggccgcaggatccttgggacttctgctccctggaagtcactacctcggcagattccaggatcgtctgatgtggatcatgatcctcgagtgcgggtacacctactgttctatcaatataaaggggctggagctccaggagacttcctgtcacactgctgaggcaagaagagtcgacgaggtgttcgaagacgccttcgaacaggagtatacccgagtgtgcagccttaacgagcattttggaaacgttctaacaccgtgtactgtgctgcctgtgaagctgtattctgatgcaaggaacgtgctgagtggtattattgacagccacgaaaacctgaaggaatttaaaggcgatctgattaaagtgctggtgtggatcctggtgcagtattgctctaaacgccccgggatgaaagaaaacgtgcacaatactgagaacaaaggaaaggccccactcatgctacctgctctgaacaccctgccaccccctaagtctccagaggatatcgattctcttaatagtgagacttttaacgactggagcgatgacaatatattcgacgacgaaccaaccattaagaaagtcatagaggagaaacaccagctgaaagatctgcccgggacaaacctgtttatacccggcagtgtcgagtcccagagggtgggcgaccactccacaggtactgttcccgagaacgatctctacaaggcagttctgctgggataccccgctgttgataagggtaaacaagaagatatgccttatattccactgatggaattcagctgttcccactcacacttggtctgtctgcccgcagagtggcgtacaagctgtatgccttcttcgaaaatgaaggaaatgtcatccctcttcccagaagattggtaccagttcgttctgcggcagctggagtgctaccacagtgaagaaaaggcctctaacgtgttagaggagatcgctaaggataaggttctgaaggacttctatgtccacacggtaatgacctgctatttctctctttttggcatagacaacatggccccctctccaggccatattctacgcgtgtacggaggtgtacttccctggtccgtagccctagattggttgaccgaaaagcctgagctgtttcagctagcactgaaggcatttagatacactctgaagctgatgatcgacaaagccagtctgggcccaatcgaggactttcgagaactgattaaatacctcgaagaatacgagcgcgattggtacattgggctcgtaagtgacgaaaaatggaaggaagccattttacaagaaaagccgtacctcttctcgctcggctatgactctaacatgtatctttag

SEQ ID NO: 281482 - DNA, 2817 bp, Artificial Sequence
  derived and/or modified sequence
atgcctgcactggaacatatgaatcaaattctgcatatcctgttcgtctttcttccatttctgtgggctcttgggaccctccctcctcccgacgctctcctgctgtgggccatggaacaagtcctggaattcgggctcggtggatcctctatgagcactcaccttaggctcctggtgatgttcattatgagtgctggcaccgcgatcgcaagttattttatacccagtaccgtgggggtggtgctgttcatgactggattcggcttccttctcagcctgaatctgagcgacatggggcataagataggcaccaaatctaaggacctgccatctggtcctgaaaaacacttctcttggaaggaatgcctgttctacattattatcttagttctagcacttttggagacatctctcctccatcactttgctgggttttcccagatcagcaaatccaactcccaagctatagtgggatatggactcatgattctcctaatcatcctatggatactgcgggagatacagtcagtctacatcatcggtatctttaggaatcccttttaccctaaagatgttcaaactgtgacagtcttcttcgaaaagcaaacccgacttatgaagatcggcattgtgagaagaatccttcttacactcgtgtctccctttgcaatgatcgcattcttgagcctagattcttctctgcagggattgcactctgtgagcgtgtgtattggctttactagggccttccgaatggtgtggcagaacaccgagaatgccctcctggagacagttatcgtttccacagtacacttgatttcctccacagatatttggtggaatcgaagtctcgatacaggactcagactcctgttagtgggtattattagagataggctcattcaatttatcagcaaactccagttcgcagtgacggttctgctgacatcatggacagaaaaaaaacagcgtagaaagactaccgccacgctgtgtattttgaatattgtcttctcaccattcgtgctcgtaatcattgtctttagcaccctgctgagttctccgctactacctctatttacgctgcccgtttttcttgtcggctttcccagacccattcagtcctggcccggtgccgcaggcacgactgcatgcgtgtgtgccgataccgtctactattatcagatggtaccgcgtttaactgccgtgctgcagacagcgatggcagcaggttctctcggcctacttctgcctgggtcccactatctgggcagatttcaggaccggctaatgtggatcatgattctagaatgcggatacacatactgctctatcaacatcaaaggtctggaactgcaagagactagctgtcacaccgctgaggcaagaagagtcgatgaggtgtttgaagacgcattcgagcaggaatacacgcgcgtttgcagtctgaatgagcatttcggaaacgtgctcactccttgtaccgtgttgcctgtcaaactgtatagcgacgcaagaaacgttctcagtggaataattgacagtcacgaaaatctcaaggaattcaagggcgacctgatcaaagtcctcgtgtggatcttagtccagtactgctcaaagcgccctggcatgaaagagaatgttcacaatactgagaataaaggtaaggcccctttaatgctccctgccctgaacactttgccacctcccaaaagcccagaagatattgatagcctgaacagcgagaccttcaatgattggagcgatgataacatctttgatgacgagccaactattaagaaagtcattgaagagaaacatcagcttaaagatttacccggaaccaaccttttcattcccggatcagtggaaagtcaaagagtaggcgaccattcaactgggaccgtgcccgagaacgatctctacaaggcagtgctgctaggatacccggctgtcgacaaagggaaacaggaagacatgccttatattcccctgatggaattctcttgtagtcatagtcacttggtctgcctgccggctgaatggcggacgtcctgcatgccctcgtcgaaaatgaaagagatgtctagtctctttcccgaggactggtaccagtttgtgctcagacagctagaatgctaccactccgaggaaaaagcttcgaatgtcctggaggagatcgccaaagataaagtgctcaaagatttttacgtccacactgtcatgacgtgttatttttccctcttcggtatcgataacatggcgccaagccctgggcacatcctcagggtatacgggggtgtgttgccatggtcggtggctctagactggctgacagagaagcccgagctgttccagttagccctgaaggctttccgctacacactcaaattaatgattgataaggcaagcttgggtccgatcgaagactttagagagctgatcaaatatctggaggaatatgagagggactggtatattgggctggtgagcgacgaaaaatggaaggaagccatcctccaggagaagccatacctcttctcgctgggatatgactccaacatgggtatttacactgggagagtcttgagcctgcaggaacttctcattcaagtgggaaaactcaacccggaagccgtgagaggccagtgggcaaacctgagctgggagctgctctacgctactaacgatgatgaggagaggtactcaattcaagcccaccccctgctgcttcgcaacttaacagttcaggctgccgagccccctcttggttacccaatttactcttctaaacccctccacattcacttatactag

SEQ ID NO: 281483 - DNA, 3519 bp, Artificial Sequence
  derived and/or modified sequence
atgtctccagacgtgccattactcaacgactacaaacaagatttcttcctcaagcggttccctcagacagtgctggggggacctagatttaagctggggtattgtgccccaccttacatttacgttaaccagattatcttattcttgatgccatgggtatgggggggtgtaggaactctgctctaccagctcgggatcctgaaagattactatactgccgctctgtcaggcggactcatgcttttcaccgccttcgttattcagttcacaagtttgtatgccaagaataagtctactacagtggaaagaattcttacgaccgacatactagccgaggaggacgaacacgaattcacttcttgtactggcgctgagactgttaaatttctgatacccggaaagaaatacgtggcgaacaccgtgttccattctattctagcgggtctcgcatgcggtttaggcacgtggtacttgctgcctaatcgcatcacgctgctgtacggttccactggaggtacagccctgctgttcttcttcgggtggatgaccctgtgtatcgcagagtactctttgattgtaaacactgcaacagagacagccacctttcagactcaggacacctacgaaatcatcccattaatgcgtccactgtacatcttttttttcgtgtcagtagacctggcacacagattcgtcgtaaacatgcctgcattagaacacatgaatcagatcctgcacattttgttcgtctttctgccattcttatgggcccttggtacacttccgccaccggatgcgctgctgctatgggccatggaacaggtgttggagtttgggctgggtggttcttcaatgtctacccacctgaggctcttggtgatgttcattatgtccgctggaaccgcaatcgcgtcttatttcatcccctccactgtgggggtggtcctctttatgacagggttcgggtttctcctgtcacttaatcttagcgatatgggccacaaaattggtactaagtcaaaagatcttccaagcggccctgagaaacatttttcatggaaggagtgtctcttctacataataatcctggtgctggccctactggagacatcactgctacaccacttcgcaggcttctcacaaatcagcaaaagcaactctcaagcaattgtgggctacggcttgatgatcctgctcataattctctggattctgagggagattcagtcggtgtacatcatcgggatctttcggaaccctttttacccaaaggatgtgcagacggtgacagtctttttcgaaaagcaaactcgcctgatgaagatcgggatcgtacgcagaatcttgctgacactggtgtcgccattcgctatgatcgctttcctgagcctggactcctcacttcagggattacattcagtgtcagtttgtattggtttcacccgagcctttcggatggtctggcagaacaccgaaaatgccctgcttgagacagtgattgtcagtacggtgcacctgattagcagcacagacatctggtggaatcgcagtctggataccggactgcgtctgcttcttgtgggtattattagggaccggctcatccagtttataagcaaacttcaatttgctgtgacggtgttgttgacaagttggaccgaaaaaaagcagcgccgaaaaacgaccgccactctgtgcattttgaatatcgtgttctccccatttgtgctggtgataatcgtgttttccactttgctctccagcccattgctgccccttttcacccttcctgtgtttttggtcggattccctcgaccaatccagagctggcctggcgctgcaggaaccacggcttgtgtatgcgccgacaccgtatactattaccaaatggtgccccgtctgactgctgttctccaaacagccatggcagccggtagcctaggactgctgttgccgggaagccactatctcgggagattccaggacagactgatgtggattatgatcttggagtgtgggtatacatactgcagcattaacatcaaaggtctagagctgcaggagaccagctgccacactgctgaagcccgaagggtcgatgaggtctttgaagacgcctttgagcaggagtacacacgggtctgctccctgaatgagcactttggaaacgtactcaccccttgcacagtactccccgtgaagctctacagtgacgctcgaaatgtgctgagcggaatcatcgatagtcacgaaaacctcaaagagttcaagggtgatctgattaaagttctggtctggatactcgttcagtattgttctaaaagacccggtatgaaggaaaacgtgcacaacactgagaataagggaaaagctcccttgatgctccccgcattgaacacgctccctccccctaaatcacccgaggacattgactcactgaactctgagaccttcaacgattggtcagatgataacattttcgacgacgaacccacaatcaagaaggtgatagaagagaagcatcagctcaaggacttgcccggaacaaatttatttattcccggatctgtcgaatcccaaagggttggggaccactcaacgggcactgtgcctgaaaatgacctctataaagctgtgctgctgggatacccggctgtagacaagggcaagcaggaggatatgccatacataccactgatggagtttagttgtagtcactctcacttagtgtgcctcccggcagaatggcgaacatcgtgcatgccgagttcaaaaatgaaggagatgtcgtctctcttcccagaggattggtaccagttcgtgctgaggcagctggaatgctaccacagcgaagagaaggcatctaacgttcttgaagagattgctaaagacaaggtccttaaggatttctacgttcacactgtcatgacctgttacttttccctgtttggtattgacaatatggccccttcacctggccacatactgagggtatacggtggcgtactgccctggtcagtggcattggattggctcaccgaaaagcccgagttatttcagctggcccttaaggctttccgttacacccttaagctaatgatagacaaagcgtccttgggcccaattgaagattttcgtgagctgatcaagtatttggaagagtacgaaagagactggtacatcggtctggtgtccgacgagaaatggaaggaggctatactacaggagaaaccctaccttttctccctcggttacgattcgaatatgggcatatatacgggcagagtgctgtctctgcaagaactgctcatacaggtcggcaagctgaatccagaggccgtgcgtggacagtgggcgaatctcagctgggaactgctctacgcaactaatgacgacgaagagaggtattccattcaagcccatcctctgctactgcgaaaccttaccgtgcaggcagcagagcccccactgggatatcctatctacagctccaaaccactgcatatacacctgtattag

SEQ ID NO: 281484 - DNA, 3519 bp, Artificial Sequence
  derived and/or modified sequence
atgagcccggacgttcctctgctcaacgactataagcaggacttcttcctgaaacggttcccccagacggtccttgggggacccaggtttaaattagggtactgcgccccaccttatatttacgtgaaccagatcattctattcctcatgccatgggtttggggcggagtcggcactctcctctaccagctaggcatcctgaaggactattatacagcagctctatccggagggttgatgctctttacggcatttgtcatccagtttacgtcgctttatgccaagaacaagagtacaacagtagagcggattctcacgaccgacattctggccgaggaggatgagcatgagttcacatcttgcacgggcgcagaaacagtcaaattccttattccaggtaagaagtacgttgccaacaccgtcttccattctatcttagctggactcgcatgtggattgggtacatggtacctgttacctaacaggataacattactgtatggatctacaggcggaacagctctcctcttctttttcggctggatgaccctgtgcattgccgaatactcgttaatagtgaatacagctacagagaccgccactttccagacacaggacacctatgagatcattccactcatgagaccactctacatctttttctttgtgagcgtggatttagcacacagattcgtggtaaatatgccggcactcgagcacatgaaccagattctgcatattctgttcgtattccttccattcctctgggctctgggtaccctccccccaccggatgctctgcttctttgggccatggaacaggtgctcgaattcggcctgggaggaagttccatgtctacccatctgcggttgttggtgatgttcatcatgagcgcaggtactgcaatcgcgtcatactttatcccatccacagttggtgtggtgctttttatgacgggattcggcttcctcctctcactcaatttatccgatatgggccacaaaataggtactaagtccaaggatttgccgtccggaccagaaaagcatttctcttggaaggaatgtctattttatattatcatcctagtcctggccctgttggaaacctctttgctccatcactttgcagggttctcccagatatctaaaagtaattcgcaggcgattgtgggttatgggctgatgattctcttaatcatcttgtggatcttgagggagatccagtctgtctacatcatcggaatctttcgaaatcctttttaccccaaagacgtgcagacggttactgtgttcttcgagaagcaaaccagacttatgaagattggtatcgtcaggagaatactgttgactttggtctcccctttcgccatgatcgcattcctgagtctggacagctccctccaggggcttcattcggtctctgtttgtattggatttacacgcgcttttcgtatggtatggcagaatacagaaaacgctctgctggaaactgtgatcgtcagtaccgtccatctcatttcaagcacggacatctggtggaatcggagcctggataccggactgaggctgctgcttgtgggtatcatccgggatagactcattcagtttatcagcaagctgcaatttgccgtgactgtactcctgaccagctggacagaaaaaaagcagagacggaaaacgacggcgacgctgtgtatcttaaatattgtcttttcacccttcgtcctagtgattatcgtgttctctacactgttgagtagccctctgttgcccctgtttaccctgcccgtgttccttgtgggcttcccccgaccaattcagtcatggcccggagccgctggtaccactgcttgtgtgtgcgccgataccgtctattattaccaaatggtaccacggctaacggccgtgttacagacagcaatggctgccggaagcttaggattgctccttccgggttcccactacctggggaggtttcaggaccgactgatgtggattatgatcctagaatgtggctatacttactgcagcatcaatataaagggccttgagctccaggaaacgagttgccatacggctgaggccagaagagtcgacgaagtgtttgaggacgcgtttgaacaggagtacacgcgtgtctgtagcctaaacgagcacttcggcaacgtcctcactccctgtactgtgctcccagtcaaattgtactctgacgcacgcaatgttctctcaggcatcatcgacagccacgagaaccttaaagagtttaagggcgacctgatcaaggtgctcgtgtggattctggtgcagtattgtagcaaaaggcccggtatgaaggaaaatgttcataataccgaaaacaagggaaaagcccctctgatgctcccggcattaaacaccctgcctccgcctaagagcccggaagatattgactcactgaactcagagacatttaatgactggtccgacgataacatctttgacgacgaacccacaatcaaaaaagtcatcgaagagaaacaccagctgaaagacttaccaggaaccaatctcttcatccctggtagcgttgaaagccagagggtgggcgatcattccactggcacagtaccagaaaatgacctgtacaaagctgtgctcttgggctaccctgcagtggacaaaggaaagcaagaggatatgccttacataccgttgatggagttctcatgctcacattcacacctggtttgcctccccgctgagtggaggacctcctgtatgccgtcaagcaaaatgaaagagatgtcttccctgttccccgaggattggtaccaattcgtgctgcgccagctggaatgctatcattctgaggagaaggcttctaatgtgctagaagaaatcgctaaggataaagtcctgaaggatttctatgttcataccgtgatgacgtgctacttttcactgttcggtattgataacatggctccatcacctggacacattctccgggtctacgggggagttctcccgtggagcgtggccctcgattggctgaccgagaaacccgaactcttccagctggccctcaaggcatttcgttacaccttaaagctgatgattgataaggcctctctcgggccaattgaggactttagggagctgataaaatacttggaggaatatgaacgtgattggtatatcggcctcgttagcgacgaaaagtggaaagaagctattctgcaggagaaaccgtaccttttctcgctcggatacgattcaaatatgggaatttacactggcagggtcttaagcctacaggagctgttaattcaagtcggtaagctgaatccagaagctgtaagagggcagtgggctaacctgagttgggagctactctatgcgactaacgacgacgaagagcgctactcaattcaagctcacccactgctgctgcgtaatttaaccgttcaggccgcagagccccctcttggctaccccatttattcgtcgaagcccctgcacatacacctatactag

SEQ ID NO: 281485 - DNA, 1584 bp, Artificial Sequence
  derived and/or modified sequence
ctctgtattcttaacattgtcttctcaccatttgtcctggttatcatcgtctttagcacactgctatcttccccactgctccccctgttcaccttgcctgtgtttctcgtgggctttccgaggccgatccagtcctggcccggagccgcagggaccaccgcatgcgtatgcgccgatacagtctattactaccaaatggtgccccgtcttaccgctgtgcttcagacagcaatggccgcaggaagcttgggattactgctgcctggttcacactatctgggacggttccaagatagactgatgtggattatgatcctggagtgtgggtatacttactgctccattaacataaaaggcctcgaactacaagaaacctcttgtcacactgcagaggcacgtagagtggacgaggtcttcgaggacgcgtttgagcaggagtacacgagggtgtgctcccttaacgaacattttggcaatgtattgactccctgtacagtccttcccgtgaagttgtacagtgacgcacgtaatgtgctgtccgggatcattgactctcacgagaacctgaaggagttcaaaggcgatctgattaaagtgttagtgtggattctcgtgcagtactgcagcaagagaccaggcatgaaggaaaacgtacacaataccgagaataaaggtaaggctcccctcatgctaccagcactgaatacattgcctcctcctaaatctcctgaggacattgactcactgaattctgagacgtttaacgattggagcgacgacaacatttttgacgatgaaccgaccattaaaaaggtgatcgaggaaaaacaccagctgaaggatctgcccggaactaatctcttcattcccggaagcgtagaatctcagagggtgggtgatcactccacgggtacagtgccagaaaatgatctgtataaagccgtgctgctcgggtaccccgctgttgataagggaaagcaagaggatatgccttatatcccactaatggagttctcgtgcagccacagtcatctagtgtgccttccagccgagtggcgcacatcgtgtatgcctagttcaaagatgaaagagatgagcagtctctttcctgaagattggtaccagtttgttctccgacagctggagtgctatcattccgaagagaaagcttccaacgtattagaagagatcgctaaagataaggtgctgaaggacttctatgtccatacagtgatgacctgctattttagcctctttggaatcgacaatatggccccaagtcctggtcatattctgcgcgtctatggcggtgtactcccatggtccgtggctctagattggctcactgagaaacccgaactgtttcagcttgcactgaaagcctttcgttacaccctaaaactaatgatcgacaaagctagcctcggacctatcgaagactttagagaactaataaagtacctggaagaatatgaaagggattggtacatcggcctagtgtcagacgagaaatggaaagaagccattctgcaagagaagccgtacctgtttagcctcggctatgactctaacatgtatctgtag

SEQ ID NO: 281486 - protein, 2627 aa, Artificial Sequence
  derived and/or modified sequence
MEKLHGHVSAHPDILSLENRCLAMLPDLQPLEKLHQHVSTHSDILSLKNQCLATLPDLKTMEKPHGYVSAHPDILSLENQCLATLSDLKTMEKPHGHVSAHPDILSLENRCLATLSSLKSTVSASPLFQSLQISHMTQADLYRVNNSNCLLSEPPSWRAQHFSKGLDLSTCPIALKSISATETAQEATLGRWFDSEEKKGAETQMPSYSLSLGEEEEVEDLAVKLTSGDSESHPEPTDHVLQEKKMALLSLLCSTLVSEVNMNNTSDPTLAAIFEICRELALLEPEFILKASLYARQQLNVRNVANNILAIAAFLPACRPHLRRYFCAIVQLPSDWIQVAELYQSLAEGDKNKLVPLPACLRTAMTDKFAQFDEYQLAKYNPRKHRAKRHPRRPPRSPGMEPPFSHRCFPRYIGFLREEQRKFEKAGDTVSEKKNPPRFTLKKLVQRLHIHKPAQHVQALLGYRYPSNLQLFSRSRLPGPWDSSRAGKRMKLSRPETWERELSLRGNKASVWEELIENGKLPFMAMLRNLCNLLRVGISSRHHELILQRLQHAKSVIHSRQFPFRFLNAHDAIDALEAQLRNQALPFPSNITLMRRILTRNEKNRPRRRFLCHLSRQQLRMAMRIPVLYEQLKREKLRVHKARQWKYDGEMLNRYRQALETAVNLSVKHSLPLLPGRTVLVYLTDANADRLCPKSNPQGPPLNYALLLIGMMITRAEQVDVVLCGGDTLKTAVLKAEEGILKTAIKLQAQVQEFDENDGWSLNTFGKYLLSLAGQRVPVDRVILLGQSMDDGMINVAKQLYWQRVNSKCLFVGILLRRVQYLSTDLNPNDVTLSGCTDAILKFIAEHGASHLLEHVGQMDKIFKIPPPPGKTGVQSLRPLEEDTPSPLAPVSQQGWRSIRLFISSTFRDMHGERDLLLRSVLPALQARAAPHRISLHGIDLRWGVTEEETRRNRQLEVCLGEVENAQLFVGILGSRYGYIPPSYNLPDHPHFHWAQQYPSGRSVTEMEVMQFLNRNQRLQPSAQALIYFRDSSFLSSVPDAWKSDFVSESEEAARRISELKSYLSRQKGITCRRYPCEWGGVAAGRPYVGGLEEFGQLVLQDVWNMIQKLYLQPGALLEQPVSIPDDDLVQATFQQLQKPPSPARPRLLQDTVQRLMLPHGRLSLVTGQSGQGKTAFLASLVSALQAPDGAKVASLVFFHFSGARPDQGLALTLLRRLCTYLRGQLKEPGALPSTYRSLVWELQQRLLPKSAESLHPGQTQVLIIDGADRLVDQNGQLISDWIPKKLPRCVHLVLSVSSDAGLGETLEQSQGAHVLALGPLEASARARLVREELALYGKRLEESPFNNQMRLLLVKRESGRPLYLRLVTDHLRLFTLYEQVSERLRTLPATVPLLLQHILSTLEKEHGPDVLPQALTALEVTRSGLTVDQLHGVLSVWRTLPKGTKSWEEAVAAGNSGDPYPMGPFACLVQSLRSLLGEGPLERPGARLCLPDGPLRTAAKRCYGKRPGLEDTAHILIAAQLWKTCDADASGTFRSCPPEALGDLPYHLLQSGNRGLLSKFLTNLHVVAAHLELGLVSRLLEAHALYASSVPKEEQKLPEADVAVFRTFLRQQASILSQYPRLLPQQAANQPLDSPLCHQASLLSRRWHLQHTLRWLNKPRTMKNQQSSSLSLAVSSSPTAVAFSTNGQRAAVGTANGTVYLLDLRTWQEEKSVVSGCDGISACLFLSDDTLFLTAFDGLLELWDLQHGCRVLQTKAHQYQITGCCLSPDCRLLATVCLGGCLKLWDTVRGQLAFQHTYPKSLNCVAFHPEGQVIATGSWAGSISFFQVDGLKVTKDLGAPGASIRTLAFNVPGGVVAVGRLDSMVELWAWREGARLAAFPAHHGFVAAALFLHAGCQLLTAGEDGKVQVWSGSLGRPRGHLGSLSLSPALSVALSPDGDRVAVGYRADGIRIYKISSGSQGAQGQALDVAVSALAWLSPKVLVSGAEDGSLQGWALKECSLQSLWLLSRFQKPVLGLATSQELLASASEDFTVQLWPRQLLTRPHKAEDFPCGTELRGHEGPVSCCSFSTDGGSLATGGRDRSLLCWDVRTPKTPVLIHSFPACHRDWVTGCAWTKDNLLISCSSDGSVGLWDPESGQRLGQFLGHQSAVSAVAAVEEHVVSVSRDGTLKVWDHQGVELTSIPAHSGPISHCAAAMEPRAAGQPGSELLVVTVGLDGATRLWHPLLVCQTHTLLGHSGPVRAAAVSETSGLMLTASEDGSVRLWQVPKEADDTCIPRSSAAVTAVAWAPDGSMAVSGNQAGELILWQEAKAVATAQAPGHIGALIWSSAHTFFVLSADEKISEWQVKLRKGSAPGNLSLHLNRILQEDLGVLTSLDWAPDGHFLILAKADLKLLCMKPGDAPSEIWSSYTENPMILSTHKEYGIFVLQPKDPGVLSFLRQKESGEFEERLNFDINLENPSRTLISITQAKPESESSFLCASSDGILWNLAKCSPEGEWTTGNMWQKKANTPETQTPGTDPSTCRESDASMDSDASMDSEPTPHLKTRQRRKIHSGSVTALHVLPELLVTASKDRDVKLWERPSMQLLGLFRCEGSVSCLEPWLGANSTLQLAVGDVQGNVYFLNWE

SEQ ID NO: 281487 - protein, 2619 aa, Artificial Sequence
  derived and/or modified sequence
MEKLHGHVSAHPDILSLENRCLAMLPDLQPLEKLHQHVSTHSDILSLKNQCLATLPDLKTMEKPHGYVSAHPDILSLENQCLATLSDLKTMEKPHGHVSAHPDILSLENRCLATLSSLKSTVSASPLFQSLQISHMTQADLYRVNNSNCLLSEPPSWRAQHFSKGLDLSTCPIALKSISATETAQEATLGRWFDSEEKKGAETQMPSYSLSLGEEEEVEDLAVKLTSGDSESHPEPTDHVLQEKKMALLSLLCSTLVSEVNMNNTSDPTLAAIFEICRELALLEPEFILKASLYARQQLNVRNVANNILAIAAFLPACRPHLRRYFCAIVQLPSDWIQVAELYQSLAEGDKNKLVPLPACLRTAMTDKFAQFDEYQLAKYNPRKHRAKRHPRRPPRSPGMEPPFSHRCFPRYIGFLREEQRKFEKAGDTVSEKKNPPRFTLKKLVQRLHIHKPAQHVQALLGYRYPSNLQLFSRSRLPGPWDSSRAGKRMKLSRPETWERELSLRGNKASVWEELIENGKLPFMAMLRNLCNLLRVGISSRHHELILQRLQHAKSVIHSRQFPFRFLNAHDAIDALEAQLRNQALPFPSNITLMRRILTRNEKNRPRRRFLCHLSRQQLRMAMRIPVLYEQLKREKLRVHKARQWKYDGEMLNRYRQALETAVNLSVKHSLPLLPGRTVLVYLTDANADRLCPKSNPQGPPLNYALLLIGMMITRAEQVDVVLCGGDTLKTAVLKAEEGILKTAIKLQAQVQEFDENDGWSLNTFGKYLLSLAGQRVPVDRVILLGQSMDDGMINVAKQLYWQRVNSKCLFVGILLRRVQYLSTDLNPNDVTLSGCTDAILKFIAEHGASHLLEHVGQMDKIFKIPPPPGKTGVQSLRPLEEDTPSPLAPVSQQGWRSIRLFISSTFRDMHGERDLLLRSVLPALQARAAPHRISLHGIDLRWGVTEEETRRNRQLEVCLGEVENAQLFVGILGSRYGYIPPSYNLPDHPHFHWAQQYPSGRSVTEMEVMQFLNRNQRLQPSAQALIYFRDSSFLSSVPDAWKSDFVSESEEAARRISELKSYLSRQKGITCRRYPCEWGGVAAGRPYVGGLEEFGQLVLQDVWNMIQKLYLQPGALLEQPVSIPDDDLVQATFQQLQKPPSPARPRLLQDTVQRLMLPHGRLSLVTGQSGQGKTAFLASLVSALQAPDGAKVASLVFFHFSGARPDQGLALTLLRRLCTYLRGQLKEPGALPSTYRSLVWELQQRLLPKSAESLHPGQTQVLIIDGADRLVDQNGQLISDWIPKKLPRCVHLVLSVSSDAGLGETLEQSQGAHVLALGPLEASARARLVREELALYGKRLEESPFNNQMRLLLVKRESGRPLYLRLVTDHLRLFTLYEQVSERLRTLPATVPLLLQHILSTLEKEHGPDVLPQALTALEVTRSGLTVDQLHGVLSVWRTLPKGTKSWEEAVAAGNSGDPYPMGPFACLVQSLRSLLGEGPLERPGARLCLPDGPLRTAAKRCYGKRPGLEDTAHILIAAQLWKTCDADASGTFRSCPPEALGDLPYHLLQSGNRGLLSKFLTNLHVVAAHLELGLVSRLLEAHALYASSVPKEEQKLPEADVAVFRTFLRQQASILSQYPRLLPQQAANQPLDSPLCHQASLLSRRWHLQHTLRWLNKPRTMKNQQSSSLSLAVSSSPTAVAFSTNGQRAAVGTANGTVYLLDLRTWQEEKSVVSGCDGISACLFLSDDTLFLTAFDGLLELWDLQHGCRVLQTKAHQYQITGCCLSPDCRLLATVCLGGCLKLWDTVRGQLAFQHTYPKSLNCVAFHPEGQVIATGSWAGSISFFQVDGLKVTKDLGAPGASIRTLAFNVPGGVVAVGRLDSMVELWAWREGARLAAFPAHHGFVAAALFLHAGCQLLTAGEDGKVQVWSGSLGRPRGHLGSLSLSPALSVALSPDGDRVAVGYRADGIRIYKISSGSQGAQGQALDVAVSALAWLSPKVLVSGAEDGSLQGWALKECSLQSLWLLSRFQKPVLGLATSQELLASASEDFTVQLWPRQLLTRPHKAEDFPCGTELRGHEGPVSCCSFSTDGGSLATGGRDRSLLCWDVRTPKTPVLIHSFPACHRDWVTGCAWTKDNLLISCSSDGSVGLWDPESGQRLGQFLGHQSAVSAVAAVEEHVVSVSRDGTLKVWDHQGVELTSIPAHSGPISHCAAAMEPRAAGQPGSELLVVTVGLDGATRLWHPLLVCQTHTLLGHSGPVRAAAVSETSGLMLTASEDGSVRLWQVPKEADDTCIPRSSAAVTAVAWAPDGSMAVSGNQAGELILWQEAKAVATAQAPGHIGALIWSSAHTFFVLSADEKISEWQVKLRKGSAPGNLSLHLNRILQEDLGVLTSLDWAPDGHFLILAKADLKLLCMKPGDAPSEIWSSYTENPMILSTHKEYGIFVLQPKDPGVLSFLRQKESGEFEERLNFDINLENPSRTLISITQAKPESALMGSYGTWPNAAQKENGPQVTCGRKKNTPETQTPGTDPSTCRESDASMDSDASMDSEPTPHLKTRQRRKIHSGSVTALHVLPELLVTASKDRDVKLWERPSMQLLGLFRCEGSVSCLEPWLGANSTLQLAVGDVQGNVYFLNWE

SEQ ID NO: 281488 - protein, 676 aa, Artificial Sequence
  derived and/or modified sequence
MKNQQSSSLSLAVSSSPTAVAFSTNGQRAAVGTANGTVYLLDLRTWQEEKSVVSGCDGISACLFLSDDTLFLTAFDGLLELWDLQHGCRVLQTKAHQYQITGCCLSPDCRLLATVCLGGCLKLWDTVRGQLAFQHTYPKSLNCVAFHPEGQVIATGSWAGSISFFQVDGLKVTKDLGAPGASIRTLAFNVPGGVVAVGRLDSMVELWAWREGARLAAFPAHHGFVAAALFLHAGCQLLTAGEDGKVQVWSGSLGRPRGHLGSLSLSPALSVALSPDGDRVAVGYRADGIRIYKISSGSQGAQGQALDVAVSALAWLSPKVLVSGAEDGSLQGWALKECSLQSLWLLSRFQKPVLGLATSQELLASASEDFTVQLWPRQLLTRPHKAEDFPCGTELRGHEGPVSCCSFSTDGGSLATGGRDRSLLCWDVRTPKTPVLIHSFPACHRDWVTGCAWTKDNLLISCSSDGSVGLWDPESGQRLGQFLGHQSAVSAVAAVEEHVVSVSRDGTLKVWDHQGVELTSIPAHSGPISHCAAAMEPRAAGQPGSELLVVTVGLDGATRLWHPLLVCQTHTLLGHSGPVRAAAVSETSGLMLTASEDGSVRLWQVPKEADDTCIPRSSAAVTAVAWAPDGSMAVSGNQAGELILWQEAKAVATAQSSPEPNSTGGLRGADKSGLGS

SEQ ID NO: 281489 - protein, 166 aa, Artificial Sequence
  derived and/or modified sequence
MEKLHGHVSAHPDILSLENRCLAMLPDLQPLEKLHQHVSTHSDILSLKNQCLATLPDLKTMEKPHGYVSAHPDILSLENQCLATLSDLKTMEKPHGHVSAHPDILSLENRCLATLSSLKSTVSASPLFQSLQISHMTQADLYRVNNSNCLLSEPPSWRAQHFSKGL

SEQ ID NO: 281490 - DNA, 7884 bp, Artificial Sequence
  derived and/or modified sequence
atggagaagctgcacggccacgtgagcgcccaccccgacatcctgagcctggagaacagatgcctggccatgctgcccgacctgcagcccctggagaagctgcaccagcacgtgagcacccacagcgacatcctgagcctgaagaaccagtgcctggccaccctgcccgacctgaagaccatggagaagccccacggctacgtgagcgcccaccccgacatcctgagcctggagaaccagtgcctggccaccctgagcgacctgaagaccatggagaagccccacggccacgtgagcgcccaccccgacatcctgagcctggagaacagatgcctggccaccctgagcagcctgaagagcaccgtgagcgccagccccctgttccagagcctgcagatcagccacatgacccaggccgacctgtacagagtgaacaacagcaactgcctgctgagcgagccccccagctggagagcccagcacttcagcaagggcctggacctgagcacctgccccatcgccctgaagagcatcagcgccaccgagaccgcccaggaggccaccctgggcagatggttcgacagcgaggagaagaagggcgccgagacccagatgcccagctacagcctgagcctgggcgaggaggaggaggtggaggacctggccgtgaagctgaccagcggcgacagcgagagccaccccgagcccaccgaccacgtgctgcaggagaagaagatggccctgctgagcctgctgtgcagcaccctggtgagcgaggtgaacatgaacaacaccagcgaccccaccctggccgccatcttcgagatctgcagagagctggccctgctggagcccgagttcatcctgaaggccagcctgtacgccagacagcagctgaacgtgagaaacgtggccaacaacatcctggccatcgccgccttcctgcccgcctgcagaccccacctgagaagatacttctgcgccatcgtgcagctgcccagcgactggatccaggtggccgagctgtaccagagcctggccgagggcgacaagaacaagctggtgcccctgcccgcctgcctgagaaccgccatgaccgacaagttcgcccagttcgacgagtaccagctggccaagtacaaccccagaaagcacagagccaagagacaccccagaagaccccccagaagccccggcatggagccccccttcagccacagatgcttccccagatacatcggcttcctgagagaggagcagagaaagttcgagaaggccggcgacaccgtgagcgagaagaagaacccccccagattcaccctgaagaagctggtgcagagactgcacatccacaagcccgcccagcacgtgcaggccctgctgggctacagataccccagcaacctgcagctgttcagcagaagcagactgcccggcccctgggacagcagcagagccggcaagagaatgaagctgagcagacccgagacctgggagagagagctgagcctgagaggcaacaaggccagcgtgtgggaggagctgatcgagaacggcaagctgcccttcatggccatgctgagaaacctgtgcaacctgctgagagtgggcatcagcagcagacaccacgagctgatcctgcagagactgcagcacgccaagagcgtgatccacagcagacagttccccttcagattcctgaacgcccacgacgccatcgacgccctggaggcccagctgagaaaccaggccctgcccttccccagcaacatcaccctgatgagaagaatcctgaccagaaacgagaagaacagacccagaagaagattcctgtgccacctgagcagacagcagctgagaatggccatgagaatccccgtgctgtacgagcagctgaagagagagaagctgagagtgcacaaggccagacagtggaagtacgacggcgagatgctgaacagatacagacaggccctggagaccgccgtgaacctgagcgtgaagcacagcctgcccctgctgcccggcagaaccgtgctggtgtacctgaccgacgccaacgccgacagactgtgccccaagagcaacccccagggcccccccctgaactacgccctgctgctgatcggcatgatgatcaccagagccgagcaggtggacgtggtgctgtgcggcggcgacaccctgaagaccgccgtgctgaaggccgaggagggcatcctgaagaccgccatcaagctgcaggcccaggtgcaggagttcgacgagaacgacggctggagcctgaacaccttcggcaagtacctgctgagcctggccggccagagagtgcccgtggacagagtgatcctgctgggccagagcatggacgacggcatgatcaacgtggccaagcagctgtactggcagagagtgaacagcaagtgcctgttcgtgggcatcctgctgagaagagtgcagtacctgagcaccgacctgaaccccaacgacgtgaccctgagcggctgcaccgacgccatcctgaagttcatcgccgagcacggcgccagccacctgctggagcacgtgggccagatggacaagatcttcaagatcccccccccccccggcaagaccggcgtgcagagcctgagacccctggaggaggacacccccagccccctggcccccgtgagccagcagggctggagaagcatcagactgttcatcagcagcaccttcagagacatgcacggcgagagagacctgctgctgagaagcgtgctgcccgccctgcaggccagagccgccccccacagaatcagcctgcacggcatcgacctgagatggggcgtgaccgaggaggagaccagaagaaacagacagctggaggtgtgcctgggcgaggtggagaacgcccagctgttcgtgggcatcctgggcagcagatacggctacatcccccccagctacaacctgcccgaccacccccacttccactgggcccagcagtaccccagcggcagaagcgtgaccgagatggaggtgatgcagttcctgaacagaaaccagagactgcagcccagcgcccaggccctgatctacttcagagacagcagcttcctgagcagcgtgcccgacgcctggaagagcgacttcgtgagcgagagcgaggaggccgccagaagaatcagcgagctgaagagctacctgagcagacagaagggcatcacctgcagaagatacccctgcgagtggggcggcgtggccgccggcagaccctacgtgggcggcctggaggagttcggccagctggtgctgcaggacgtgtggaacatgatccagaagctgtacctgcagcccggcgccctgctggagcagcccgtgagcatccccgacgacgacctggtgcaggccaccttccagcagctgcagaagccccccagccccgccagacccagactgctgcaggacaccgtgcagagactgatgctgccccacggcagactgagcctggtgaccggccagagcggccagggcaagaccgccttcctggccagcctggtgagcgccctgcaggcccccgacggcgccaaggtggccagcctggtgttcttccacttcagcggcgccagacccgaccagggcctggccctgaccctgctgagaagactgtgcacctacctgagaggccagctgaaggagcccggcgccctgcccagcacctacagaagcctggtgtgggagctgcagcagagactgctgcccaagagcgccgagagcctgcaccccggccagacccaggtgctgatcatcgacggcgccgacagactggtggaccagaacggccagctgatcagcgactggatccccaagaagctgcccagatgcgtgcacctggtgctgagcgtgagcagcgacgccggcctgggcgagaccctggagcagagccagggcgcccacgtgctggccctgggccccctggaggccagcgccagagccagactggtgagagaggagctggccctgtacggcaagagactggaggagagccccttcaacaaccagatgagactgctgctggtgaagagagagagcggcagacccctgtacctgagactggtgaccgaccacctgagactgttcaccctgtacgagcaggtgagcgagagactgagaaccctgcccgccaccgtgcccctgctgctgcagcacatcctgagcaccctggagaaggagcacggccccgacgtgctgccccaggccctgaccgccctggaggtgaccagaagcggcctgaccgtggaccagctgcacggcgtgctgagcgtgtggagaaccctgcccaagggcaccaagagctgggaggaggccgtggccgccggcaacagcggcgacccctaccccatgggccccttcgcctgcctggtgcagagcctgagaagcctgctgggcgagggccccctggagagacccggcgccagactgtgcctgcccgacggccccctgagaaccgccgccaagagatgctacggcaagagacccggcctggaggacaccgcccacatcctgatcgccgcccagctgtggaagacctgcgacgccgacgccagcggcaccttcagaagctgcccccccgaggccctgggcgacctgccctaccacctgctgcagagcggcaacagaggcctgctgagcaagttcctgaccaacctgcacgtggtggccgcccacctggagctgggcctggtgagcagactgctggaggcccacgccctgtacgccagcagcgtgcccaaggaggagcagaagctgcccgaggccgacgtggccgtgttcagaaccttcctgagacagcaggccagcatcctgagccagtaccccagactgctgccccagcaggccgccaaccagcccctggacagccccctgtgccaccaggccagcctgctgagcagaagatggcacctgcagcacaccctgagatggctgaacaagcccagaaccatgaagaaccagcagagcagcagcctgagcctggccgtgagcagcagccccaccgccgtggccttcagcaccaacggccagagagccgccgtgggcaccgccaacggcaccgtgtacctgctggacctgagaacctggcaggaggagaagagcgtggtgagcggctgcgacggcatcagcgcctgcctgttcctgagcgacgacaccctgttcctgaccgccttcgacggcctgctggagctgtgggacctgcagcacggctgcagagtgctgcagaccaaggcccaccagtaccagatcaccggctgctgcctgagccccgactgcagactgctggccaccgtgtgcctgggcggctgcctgaagctgtgggacaccgtgagaggccagctggccttccagcacacctaccccaagagcctgaactgcgtggccttccaccccgagggccaggtgatcgccaccggcagctgggccggcagcatcagcttcttccaggtggacggcctgaaggtgaccaaggacctgggcgcccccggcgccagcatcagaaccctggccttcaacgtgcccggcggcgtggtggccgtgggcagactggacagcatggtggagctgtgggcctggagagagggcgccagactggccgccttccccgcccaccacggcttcgtggccgccgccctgttcctgcacgccggctgccagctgctgaccgccggcgaggacggcaaggtgcaggtgtggagcggcagcctgggcagacccagaggccacctgggcagcctgagcctgagccccgccctgagcgtggccctgagccccgacggcgacagagtggccgtgggctacagagccgacggcatcagaatctacaagatcagcagcggcagccagggcgcccagggccaggccctggacgtggccgtgagcgccctggcctggctgagccccaaggtgctggtgagcggcgccgaggacggcagcctgcagggctgggccctgaaggagtgcagcctgcagagcctgtggctgctgagcagattccagaagcccgtgctgggcctggccaccagccaggagctgctggccagcgccagcgaggacttcaccgtgcagctgtggcccagacagctgctgaccagaccccacaaggccgaggacttcccctgcggcaccgagctgagaggccacgagggccccgtgagctgctgcagcttcagcaccgacggcggcagcctggccaccggcggcagagacagaagcctgctgtgctgggacgtgagaacccccaagacccccgtgctgatccacagcttccccgcctgccacagagactgggtgaccggctgcgcctggaccaaggacaacctgctgatcagctgcagcagcgacggcagcgtgggcctgtgggaccccgagagcggccagagactgggccagttcctgggccaccagagcgccgtgagcgccgtggccgccgtggaggagcacgtggtgagcgtgagcagagacggcaccctgaaggtgtgggaccaccagggcgtggagctgaccagcatccccgcccacagcggccccatcagccactgcgccgccgccatggagcccagagccgccggccagcccggcagcgagctgctggtggtgaccgtgggcctggacggcgccaccagactgtggcaccccctgctggtgtgccagacccacaccctgctgggccacagcggccccgtgagagccgccgccgtgagcgagaccagcggcctgatgctgaccgccagcgaggacggcagcgtgagactgtggcaggtgcccaaggaggccgacgacacctgcatccccagaagcagcgccgccgtgaccgccgtggcctgggcccccgacggcagcatggccgtgagcggcaaccaggccggcgagctgatcctgtggcaggaggccaaggccgtggccaccgcccaggcccccggccacatcggcgccctgatctggagcagcgcccacaccttcttcgtgctgagcgccgacgagaagatcagcgagtggcaggtgaagctgagaaagggcagcgcccccggcaacctgagcctgcacctgaacagaatcctgcaggaggacctgggcgtgctgaccagcctggactgggcccccgacggccacttcctgatcctggccaaggccgacctgaagctgctgtgcatgaagcccggcgacgcccccagcgagatctggagcagctacaccgagaaccccatgatcctgagcacccacaaggagtacggcatcttcgtgctgcagcccaaggaccccggcgtgctgagcttcctgagacagaaggagagcggcgagttcgaggagagactgaacttcgacatcaacctggagaaccccagcagaaccctgatcagcatcacccaggccaagcccgagagcgagagcagcttcctgtgcgccagcagcgacggcatcctgtggaacctggccaagtgcagccccgagggcgagtggaccaccggcaacatgtggcagaagaaggccaacacccccgagacccagacccccggcaccgaccccagcacctgcagagagagcgacgccagcatggacagcgacgccagcatggacagcgagcccaccccccacctgaagaccagacagagaagaaagatccacagcggcagcgtgaccgccctgcacgtgctgcccgagctgctggtgaccgccagcaaggacagagacgtgaagctgtgggagagacccagcatgcagctgctgggcctgttcagatgcgagggcagcgtgagctgcctggagccctggctgggcgccaacagcaccctgcagctggccgtgggcgacgtgcagggcaacgtgtacttcctgaactgggagtag

SEQ ID NO: 281491 - DNA, 7860 bp, Artificial Sequence
  derived and/or modified sequence
atggagaagctgcacggccacgtgagcgcccaccccgacatcctgagcctggagaacagatgcctggccatgctgcccgacctgcagcccctggagaagctgcaccagcacgtgagcacccacagcgacatcctgagcctgaagaaccagtgcctggccaccctgcccgacctgaagaccatggagaagccccacggctacgtgagcgcccaccccgacatcctgagcctggagaaccagtgcctggccaccctgagcgacctgaagaccatggagaagccccacggccacgtgagcgcccaccccgacatcctgagcctggagaacagatgcctggccaccctgagcagcctgaagagcaccgtgagcgccagccccctgttccagagcctgcagatcagccacatgacccaggccgacctgtacagagtgaacaacagcaactgcctgctgagcgagccccccagctggagagcccagcacttcagcaagggcctggacctgagcacctgccccatcgccctgaagagcatcagcgccaccgagaccgcccaggaggccaccctgggcagatggttcgacagcgaggagaagaagggcgccgagacccagatgcccagctacagcctgagcctgggcgaggaggaggaggtggaggacctggccgtgaagctgaccagcggcgacagcgagagccaccccgagcccaccgaccacgtgctgcaggagaagaagatggccctgctgagcctgctgtgcagcaccctggtgagcgaggtgaacatgaacaacaccagcgaccccaccctggccgccatcttcgagatctgcagagagctggccctgctggagcccgagttcatcctgaaggccagcctgtacgccagacagcagctgaacgtgagaaacgtggccaacaacatcctggccatcgccgccttcctgcccgcctgcagaccccacctgagaagatacttctgcgccatcgtgcagctgcccagcgactggatccaggtggccgagctgtaccagagcctggccgagggcgacaagaacaagctggtgcccctgcccgcctgcctgagaaccgccatgaccgacaagttcgcccagttcgacgagtaccagctggccaagtacaaccccagaaagcacagagccaagagacaccccagaagaccccccagaagccccggcatggagccccccttcagccacagatgcttccccagatacatcggcttcctgagagaggagcagagaaagttcgagaaggccggcgacaccgtgagcgagaagaagaacccccccagattcaccctgaagaagctggtgcagagactgcacatccacaagcccgcccagcacgtgcaggccctgctgggctacagataccccagcaacctgcagctgttcagcagaagcagactgcccggcccctgggacagcagcagagccggcaagagaatgaagctgagcagacccgagacctgggagagagagctgagcctgagaggcaacaaggccagcgtgtgggaggagctgatcgagaacggcaagctgcccttcatggccatgctgagaaacctgtgcaacctgctgagagtgggcatcagcagcagacaccacgagctgatcctgcagagactgcagcacgccaagagcgtgatccacagcagacagttccccttcagattcctgaacgcccacgacgccatcgacgccctggaggcccagctgagaaaccaggccctgcccttccccagcaacatcaccctgatgagaagaatcctgaccagaaacgagaagaacagacccagaagaagattcctgtgccacctgagcagacagcagctgagaatggccatgagaatccccgtgctgtacgagcagctgaagagagagaagctgagagtgcacaaggccagacagtggaagtacgacggcgagatgctgaacagatacagacaggccctggagaccgccgtgaacctgagcgtgaagcacagcctgcccctgctgcccggcagaaccgtgctggtgtacctgaccgacgccaacgccgacagactgtgccccaagagcaacccccagggcccccccctgaactacgccctgctgctgatcggcatgatgatcaccagagccgagcaggtggacgtggtgctgtgcggcggcgacaccctgaagaccgccgtgctgaaggccgaggagggcatcctgaagaccgccatcaagctgcaggcccaggtgcaggagttcgacgagaacgacggctggagcctgaacaccttcggcaagtacctgctgagcctggccggccagagagtgcccgtggacagagtgatcctgctgggccagagcatggacgacggcatgatcaacgtggccaagcagctgtactggcagagagtgaacagcaagtgcctgttcgtgggcatcctgctgagaagagtgcagtacctgagcaccgacctgaaccccaacgacgtgaccctgagcggctgcaccgacgccatcctgaagttcatcgccgagcacggcgccagccacctgctggagcacgtgggccagatggacaagatcttcaagatcccccccccccccggcaagaccggcgtgcagagcctgagacccctggaggaggacacccccagccccctggcccccgtgagccagcagggctggagaagcatcagactgttcatcagcagcaccttcagagacatgcacggcgagagagacctgctgctgagaagcgtgctgcccgccctgcaggccagagccgccccccacagaatcagcctgcacggcatcgacctgagatggggcgtgaccgaggaggagaccagaagaaacagacagctggaggtgtgcctgggcgaggtggagaacgcccagctgttcgtgggcatcctgggcagcagatacggctacatcccccccagctacaacctgcccgaccacccccacttccactgggcccagcagtaccccagcggcagaagcgtgaccgagatggaggtgatgcagttcctgaacagaaaccagagactgcagcccagcgcccaggccctgatctacttcagagacagcagcttcctgagcagcgtgcccgacgcctggaagagcgacttcgtgagcgagagcgaggaggccgccagaagaatcagcgagctgaagagctacctgagcagacagaagggcatcacctgcagaagatacccctgcgagtggggcggcgtggccgccggcagaccctacgtgggcggcctggaggagttcggccagctggtgctgcaggacgtgtggaacatgatccagaagctgtacctgcagcccggcgccctgctggagcagcccgtgagcatccccgacgacgacctggtgcaggccaccttccagcagctgcagaagccccccagccccgccagacccagactgctgcaggacaccgtgcagagactgatgctgccccacggcagactgagcctggtgaccggccagagcggccagggcaagaccgccttcctggccagcctggtgagcgccctgcaggcccccgacggcgccaaggtggccagcctggtgttcttccacttcagcggcgccagacccgaccagggcctggccctgaccctgctgagaagactgtgcacctacctgagaggccagctgaaggagcccggcgccctgcccagcacctacagaagcctggtgtgggagctgcagcagagactgctgcccaagagcgccgagagcctgcaccccggccagacccaggtgctgatcatcgacggcgccgacagactggtggaccagaacggccagctgatcagcgactggatccccaagaagctgcccagatgcgtgcacctggtgctgagcgtgagcagcgacgccggcctgggcgagaccctggagcagagccagggcgcccacgtgctggccctgggccccctggaggccagcgccagagccagactggtgagagaggagctggccctgtacggcaagagactggaggagagccccttcaacaaccagatgagactgctgctggtgaagagagagagcggcagacccctgtacctgagactggtgaccgaccacctgagactgttcaccctgtacgagcaggtgagcgagagactgagaaccctgcccgccaccgtgcccctgctgctgcagcacatcctgagcaccctggagaaggagcacggccccgacgtgctgccccaggccctgaccgccctggaggtgaccagaagcggcctgaccgtggaccagctgcacggcgtgctgagcgtgtggagaaccctgcccaagggcaccaagagctgggaggaggccgtggccgccggcaacagcggcgacccctaccccatgggccccttcgcctgcctggtgcagagcctgagaagcctgctgggcgagggccccctggagagacccggcgccagactgtgcctgcccgacggccccctgagaaccgccgccaagagatgctacggcaagagacccggcctggaggacaccgcccacatcctgatcgccgcccagctgtggaagacctgcgacgccgacgccagcggcaccttcagaagctgcccccccgaggccctgggcgacctgccctaccacctgctgcagagcggcaacagaggcctgctgagcaagttcctgaccaacctgcacgtggtggccgcccacctggagctgggcctggtgagcagactgctggaggcccacgccctgtacgccagcagcgtgcccaaggaggagcagaagctgcccgaggccgacgtggccgtgttcagaaccttcctgagacagcaggccagcatcctgagccagtaccccagactgctgccccagcaggccgccaaccagcccctggacagccccctgtgccaccaggccagcctgctgagcagaagatggcacctgcagcacaccctgagatggctgaacaagcccagaaccatgaagaaccagcagagcagcagcctgagcctggccgtgagcagcagccccaccgccgtggccttcagcaccaacggccagagagccgccgtgggcaccgccaacggcaccgtgtacctgctggacctgagaacctggcaggaggagaagagcgtggtgagcggctgcgacggcatcagcgcctgcctgttcctgagcgacgacaccctgttcctgaccgccttcgacggcctgctggagctgtgggacctgcagcacggctgcagagtgctgcagaccaaggcccaccagtaccagatcaccggctgctgcctgagccccgactgcagactgctggccaccgtgtgcctgggcggctgcctgaagctgtgggacaccgtgagaggccagctggccttccagcacacctaccccaagagcctgaactgcgtggccttccaccccgagggccaggtgatcgccaccggcagctgggccggcagcatcagcttcttccaggtggacggcctgaaggtgaccaaggacctgggcgcccccggcgccagcatcagaaccctggccttcaacgtgcccggcggcgtggtggccgtgggcagactggacagcatggtggagctgtgggcctggagagagggcgccagactggccgccttccccgcccaccacggcttcgtggccgccgccctgttcctgcacgccggctgccagctgctgaccgccggcgaggacggcaaggtgcaggtgtggagcggcagcctgggcagacccagaggccacctgggcagcctgagcctgagccccgccctgagcgtggccctgagccccgacggcgacagagtggccgtgggctacagagccgacggcatcagaatctacaagatcagcagcggcagccagggcgcccagggccaggccctggacgtggccgtgagcgccctggcctggctgagccccaaggtgctggtgagcggcgccgaggacggcagcctgcagggctgggccctgaaggagtgcagcctgcagagcctgtggctgctgagcagattccagaagcccgtgctgggcctggccaccagccaggagctgctggccagcgccagcgaggacttcaccgtgcagctgtggcccagacagctgctgaccagaccccacaaggccgaggacttcccctgcggcaccgagctgagaggccacgagggccccgtgagctgctgcagcttcagcaccgacggcggcagcctggccaccggcggcagagacagaagcctgctgtgctgggacgtgagaacccccaagacccccgtgctgatccacagcttccccgcctgccacagagactgggtgaccggctgcgcctggaccaaggacaacctgctgatcagctgcagcagcgacggcagcgtgggcctgtgggaccccgagagcggccagagactgggccagttcctgggccaccagagcgccgtgagcgccgtggccgccgtggaggagcacgtggtgagcgtgagcagagacggcaccctgaaggtgtgggaccaccagggcgtggagctgaccagcatccccgcccacagcggccccatcagccactgcgccgccgccatggagcccagagccgccggccagcccggcagcgagctgctggtggtgaccgtgggcctggacggcgccaccagactgtggcaccccctgctggtgtgccagacccacaccctgctgggccacagcggccccgtgagagccgccgccgtgagcgagaccagcggcctgatgctgaccgccagcgaggacggcagcgtgagactgtggcaggtgcccaaggaggccgacgacacctgcatccccagaagcagcgccgccgtgaccgccgtggcctgggcccccgacggcagcatggccgtgagcggcaaccaggccggcgagctgatcctgtggcaggaggccaaggccgtggccaccgcccaggcccccggccacatcggcgccctgatctggagcagcgcccacaccttcttcgtgctgagcgccgacgagaagatcagcgagtggcaggtgaagctgagaaagggcagcgcccccggcaacctgagcctgcacctgaacagaatcctgcaggaggacctgggcgtgctgaccagcctggactgggcccccgacggccacttcctgatcctggccaaggccgacctgaagctgctgtgcatgaagcccggcgacgcccccagcgagatctggagcagctacaccgagaaccccatgatcctgagcacccacaaggagtacggcatcttcgtgctgcagcccaaggaccccggcgtgctgagcttcctgagacagaaggagagcggcgagttcgaggagagactgaacttcgacatcaacctggagaaccccagcagaaccctgatcagcatcacccaggccaagcccgagagcgccctgatgggcagctacggcacctggcccaacgccgcccagaaggagaacggcccccaggtgacctgcggcagaaagaagaacacccccgagacccagacccccggcaccgaccccagcacctgcagagagagcgacgccagcatggacagcgacgccagcatggacagcgagcccaccccccacctgaagaccagacagagaagaaagatccacagcggcagcgtgaccgccctgcacgtgctgcccgagctgctggtgaccgccagcaaggacagagacgtgaagctgtgggagagacccagcatgcagctgctgggcctgttcagatgcgagggcagcgtgagctgcctggagccctggctgggcgccaacagcaccctgcagctggccgtgggcgacgtgcagggcaacgtgtacttcctgaactgggagtag

SEQ ID NO: 281492 - DNA, 7884 bp, Artificial Sequence
  derived and/or modified sequence
atggaaaaactccacggtcacgtcagcgcccatcccgatatactgagcctagaaaatcggtgtcttgcaatgctcccagacctccagccccttgagaaactgcaccagcatgtgtctactcactccgacatcctgagtctcaaaaatcaatgcctggccacactgcctgacctcaaaacaatggagaagccgcacggctatgtctccgcccatcctgacatcttatctctggagaaccagtgtctggcaaccttaagtgatttaaagacgatggaaaaacctcatggtcatgtctctgcccaccccgacatcttgagcctagagaacagatgtctcgcaaccctctcttctctcaagagcacagttagcgccagcccattgtttcagtccctccagatttcgcacatgactcaggccgacctctaccgagtgaacaactctaactgtctgttgtcggaacccccaagctggagggcccagcacttctctaagggcctggacttgtccacatgccctatcgccctgaagtctatcagtgccacggaaaccgcccaagaggccaccctgggccgttggttcgatagcgaggagaagaagggggcggagacacagatgcccagctactcccttagcctgggtgaggaggaggaggtagaggatcttgccgtgaagcttacctccggggactctgagagtcacccagagcccacagatcacgtgttacaggaaaagaaaatggctctgctcagtctcctctgcagcaccctggtgtccgaggtcaacatgaataacactagtgaccccactctggcggctatttttgagatttgcagggaactggcccttttggagcccgaattcatcctaaaagcttccctgtatgcaagacagcagctgaacgttaggaatgtggcaaacaatatcctcgccatagctgcgtttctacctgcttgccgccctcacctgagacggtacttctgcgctatagtgcagctcccctccgactggatccaggtggctgaactttatcagtctcttgccgaaggcgataagaataaacttgtaccattgcccgcttgcctccggacagcaatgactgacaagttcgctcagtttgatgagtatcagttggcgaaatataatccaaggaaacatcgggcgaagcggcaccctcggcgcccccctaggagccccggtatggagccaccatttagccaccggtgcttcccgaggtatattggctttctccgtgaggagcaacgtaagttcgaaaaagcgggcgacaccgtctcagagaagaagaatccaccacggtttacactgaagaagctggttcaacggcttcacattcataaacccgcccagcatgtacaggcactcctcgggtatagatacccgagcaatctccagctgttttcgcgctctaggctcccaggcccttgggatagctcacgagcaggtaagcgcatgaagctctcccgccccgaaacttgggagagggagctctccctgcgtggcaacaaggcaagtgtgtgggaggaactgatagagaatgggaagctaccttttatggccatgcttagaaacctctgtaatttactgcgcgtcggtatttcgagtcggcaccacgagctcatactgcagcgactgcaacatgcaaagtctgtcatccactctagacagttccccttcagatttctaaatgcgcatgacgctatcgatgccttggaagctcaactgcgcaaccaggctctcccctttcccagcaacatcacgctgatgcgacgaattctgacacggaacgagaaaaatagaccacgtaggaggtttttgtgtcacctgagtagacaacagctgaggatggccatgcgcatccccgtgctctacgaacagctcaaacgcgagaaactgcgtgtccataaggctcggcagtggaagtatgatggagagatgctgaatagatatagacaagccttggaaaccgccgtgaacctgtccgtgaagcacagcctgcctctgctgcccgggcgaacggtgctggtatacctaacagacgccaacgccgacagactttgcccgaaatccaatcctcagggaccccctctgaactacgcattactgctaataggtatgatgataacacgtgccgagcaggtggacgtggtcctgtgtgggggagacaccctgaagaccgcagtgctcaaagccgaagaaggtatcctcaagaccgccatcaaactgcaggcccaagtgcaggagtttgacgagaatgatggttggtccctgaatacattcgggaagtaccttttaagcctcgctgggcagagggtcccagtggatagggtgatcctgttggggcaatctatggacgacggaatgatcaacgtcgccaaacagctctactggcaaagggtcaattctaagtgtcttttcgtgggtatcctcctcaggcgtgtgcagtacctttcgacagatttaaaccctaacgatgtcacactaagcggttgtacagatgccatcttaaagttcatcgctgaacacggcgcgtctcacctgttggagcatgttggtcagatggacaagatatttaaaattcctccgcctcctgggaaaactggtgtccagagcctacgtcccttggaggaggacacccctagccctttggcccctgtcagccaacagggctggcgttccatccgtctttttatttctagtacatttcgagatatgcacggtgaaagagatctcttactccgctctgtgctgccagcccttcaggctagggctgcccctcaccgtatcagtctgcatggcatcgacctcaggtggggagtgaccgaggaagagactagaaggaacagacagctcgaggtctgcctcggtgaggtcgaaaacgctcaattatttgtcggtatcctgggctcccggtacggatacatcccacccagctacaacctgcctgaccatccacatttccactgggcacaacagtacccttctggccggagtgtcactgagatggaggtcatgcagtttctgaaccggaatcaacgcctgcagcctagcgctcaggctctgatttatttcagagatagttctttcctgtctagcgtgcccgacgcctggaagagcgatttcgtctccgagagcgaggaagctgccagacgaatctctgaattaaagtcatacctatcccggcagaagggcatcacatgtaggcggtacccttgtgaatggggtggggtggccgctgggcgcccttacgtgggaggtctcgaggagtttgggcagcttgtgctgcaggacgtgtggaatatgattcagaagctgtacctgcagcctggcgccttgctggagcagccggtgtctatccctgatgacgatttggtgcaggccacctttcagcaactgcaaaagccgccctctccggcccggccaaggttgcttcaggacactgtgcaaagattgatgctccctcacgggcgtctgtcactagtaactggacagtctgggcagggcaaaaccgccttcttagcgagcttggtcagcgccctgcaggctccggatggggcgaaagttgcgagcttagtgttcttccactttagtggcgcacggcccgatcagggcctagctctgactcttttgcgccgactttgcacctatcttcggggacagttaaaggaaccaggagcactgccctccacatacagaagcctggtatgggagttgcagcagcgactcctgccaaaatcagcggaatccctacatcccgggcagacccaggtcctgatcattgatggggctgatcggctggtcgatcagaacggacagcttatttccgattggatacctaaaaaactgccgcggtgcgtgcacctcgtcctcagtgtgagtagcgatgcaggactgggggagacgctggagcaatcacaaggagcgcacgtgctggcattgggtccgcttgaggccagcgcccgcgctcgcttggtgcgtgaagagctggcactgtacggcaaacggctagaagagtctccctttaataatcaaatgcgccttttgctggttaagagggagagcgggcggcccctctacctgcgtctagtaactgaccatcttcgattatttaccctgtatgaacaggtatcagagcggctgaggaccctgcccgctaccgtgcctctgctgctgcagcacattctgagcactttggaaaaagagcacggccctgacgtactcccacaagctctaacagccctggaggtaactcgcagtgggctgacagtggatcaacttcatggagtgctgtccgtgtggcgcacactaccgaagggtactaaaagctgggaagaagctgtcgcagccggcaacagcggtgacccataccccatgggtcctttcgcctgcctagtgcagagcctgcgctccctgttaggtgaagggcccctagagagacccggcgctagactttgtctgcctgacggacctctcagaacggctgctaagcggtgctatgggaagaggcccggattggaggacaccgcccatattcttattgctgctcagctgtggaaaacttgcgacgcagacgccagcggtacattccgcagctgtcctcccgaagcgttgggagacctgccctatcatcttcttcagtccgggaacagaggcctcctgtctaagtttctgactaacctgcacgtggtggcagcccacctcgagttgggcctggtgtctcggttactggaagctcatgccctatatgcttcctccgttcctaaggaggaacagaagctgcccgaggcagacgtggctgtgtttcgcactttcctgaggcagcaagcttctatcctgtcccagtatccaagattgctgccccagcaagcagcaaatcagcctttggatagccctctttgccaccaggcctcccttctgagccgccggtggcatctccagcacacactcaggtggttgaacaagcctcggactatgaaaaatcagcagtcctccagcttgtccctggccgtgtcctcatctcccactgccgttgcctttagcaccaatggacagagggccgctgtaggcaccgcgaacgggacagtttacctgctcgatttgaggacatggcaagaagaaaaatctgtggtttccggatgcgatggaatttccgcctgtttgttcctcagtgacgatacactgttcctcacagccttcgatgggctgttagaactatgggatctgcagcacgggtgcagagttctccagacgaaggcccatcagtaccagattacaggttgctgtttgagccctgactgccgcttgctcgccaccgtgtgcctcggaggctgtctgaaattgtgggacactgttagaggccaattggcattccagcatacgtatccaaaatcattgaactgtgttgcctttcacccggaaggccaggtaattgcaactggatcatgggctgggagtattagtttctttcaggtagacggccttaaagtgacgaaggaccttggggctcctggagcatctattagaactttggccttcaacgtgcccgggggtgtggtggcagtcggcaggctggacagtatggtagagttgtgggcttggcgcgagggggcccgcttggctgcttttcctgcccatcacggcttcgttgcagccgccctgttcctgcatgctggatgccagctgctgacagccggggaggacggtaaggtgcaggtatggtctggaagcttgggtcgccccagaggacaccttgggtcactgagcctgtcacctgccttgagcgtggcattaagccccgatggtgatagggtggcggttggctaccgggccgacggaattaggatctacaagatctcctcaggaagtcaaggtgcacagggccaagccctcgacgtggcggtgtccgctctcgcttggctcagcccaaaagttctggtatcaggcgccgaggatggttccctccaggggtgggctctgaaagaatgttccttgcaatctctctggctactgtctagattccagaaaccagtcctaggattagctacgtctcaggagctgcttgctagtgccagcgaggatttcacggtccaattgtggccgcgccagcttctgactcggcctcacaaggccgaggactttccatgtggaacggagctgagggggcacgagggtccagtgtcctgctgctccttcagtacagatggaggcagtctagcaaccggaggaagagataggagcctcctgtgttgggacgtcagaacacctaagacccctgtcttgatacatagcttccccgcttgtcatcgggactgggtcacggggtgcgcatggactaaagacaatctgctcatcagctgctcatctgatggttcagtcggtctgtgggacccggagtctgggcaacggctgggccagttcctgggacaccaatccgccgtatccgccgttgctgctgtagaagaacacgtcgttagtgtcagtcgagacggcacactgaaggtttgggatcaccagggagtggagctcaccagcattccagctcactcagggcccataagccattgtgctgctgcgatggagccgagagccgccggacagccaggttcagaattgctggtggtcactgtcggcctggacggggctacgcggttgtggcaccccctcttggtgtgccaaactcacaccttgctgggtcattctggccctgtgcgggcagctgccgtttctgaaacctcaggcttaatgcttacggcatcagaggatggttctgtgaggctatggcaggtcccaaaggaagctgatgacacctgcatcccccggagctcggctgcagtcaccgccgtggcctgggctccagacggatctatggcagtgtccggaaatcaggcaggggaacttatcctatggcaagaagcgaaagcagtggccaccgctcaagcccctggtcacatcggagcactgatctggagtagcgctcatacttttttcgtgctttccgccgacgaaaaaatctctgagtggcaggtgaagctgagaaagggaagcgcaccaggaaacctgtcgctgcatctcaacaggattcttcaggaggatttgggcgtgctcaccagtttagattgggctccagacggtcattttttgatcctggcaaaagccgatcttaagctgctctgcatgaagcccggggacgcccctagcgagatctggtcctcttacacagagaatccaatgattctatctactcataaggagtacggcatttttgtgctccagccaaaggatcccggtgtcctgtccttcctgcggcagaaagagagcggggaatttgaggagcgcttgaacttcgacatcaatcttgagaacccctccaggacattgattagcataactcaggccaaaccggagtctgagtcctctttcctgtgtgccagcagcgacggaatcctgtggaatctcgccaagtgtagccctgagggagaatggacgacaggaaatatgtggcagaaaaaagctaatacgcctgagacacagacacctgggacggacccttcaacatgccgggaatctgacgcctcaatggatagcgacgctagcatggactctgagcctactcctcatttaaagacccgacagaggagaaagatacattccgggtccgtgacagctctccacgtcttacctgaactcctcgtgacagcttcaaaggatcgggacgtcaaattatgggagcggccgagcatgcagctgttggggctgtttcggtgcgaaggtagcgtctcatgtctggaaccttggctcggagccaattctacactgcaactggcagtcggtgacgtccaaggaaacgtgtacttcctgaactgggagtag

SEQ ID NO: 281493 - DNA, 7860 bp, Artificial Sequence
  derived and/or modified sequence
atggagaagctgcacggccacgtgtctgcgcatcctgatattctcagcctcgagaatcgatgtctggctatgcttccggacttacagcccctggaaaaactgcaccagcatgtgagcacccattccgacatactgtcactaaaaaatcagtgcctcgctacactgccagatttaaagactatggagaagcctcacggatatgtctcagctcacccagatatattaagcctggagaaccagtgtctggctactctatccgatctgaagacaatggaaaagccccatggccacgtttctgcacatcctgatatcttatctctggagaatcgctgcctggctactctctcttccctcaaatcaacagttagcgcgtcccccctcttccagtcccttcagattagccacatgacacaagctgacctttaccgtgtgaacaatagtaactgtttattgtctgagccccccagctggagggcacagcatttttcaaaaggtcttgacttgagcacatgtccaatagctcttaaaagtattagtgcaacagagaccgcccaagaggctacactgggaagatggttcgactctgaagaaaagaaaggggccgagacccagatgccaagctatagcttgtcactgggcgaagaagaggaagtggaagaccttgctgtgaaattaacctctggggatagtgaatcacaccctgaacccacagaccatgtgctgcaggaaaagaaaatggcgttattgtcactgctttgctccactcttgttagtgaggtgaatatgaataataccagcgatccgaccttggcagccatctttgagatatgccgggagctcgctctgctcgaacccgagtttatcctgaaggcctcactgtacgcccggcagcagctaaatgttagaaacgtggccaataatatcctggccatagccgccttcctgccagcctgtcggccgcacctgcggcggtacttttgcgcgatcgtccagcttccctccgactggatccaggtggcggaactgtaccaatctttggccgaaggggacaagaacaagctggtgcccctgcccgcctgtctgcgaaccgcaatgacagacaaatttgcccagtttgacgagtatcagctggccaagtacaaccctcgaaagcacagggcaaagcggcatcccaggcgcccgcctcggagccccgggatggagcccccctttagccaccgatgttttccccgatatattggctttctgcgtgaagagcagaggaaatttgagaaggcaggggacacagtgtcagagaaaaagaacccacctcggttcaccctgaaaaaactggtccagagattgcatatccataagccagcgcagcatgtgcaggccctactgggatatcggtaccccagcaacctgcagctgtttagccgcagcagactgcctggcccttgggactctagcagagccggtaaaagaatgaagctttccagacccgaaacttgggaaagagaactgtctttgcgcggcaacaaagccagcgtgtgggaagagctgatcgagaatggcaaactgcctttcatggcaatgctgagaaacctgtgcaacttactccgagttggcatttcctcacgacaccacgagctgattctccagagactgcagcatgccaaatctgtcatccactcccgacagttcccctttcgcttcctgaatgcacacgatgccatagacgcattggaagcacagttaagaaaccaggcgttgcccttcccgtctaacatcaccttaatgaggcgcattttgaccaggaacgagaagaaccgcccaaggagacgcttcttatgtcacctctctcggcagcagctgcggatggccatgcggatccccgttttgtatgagcagctgaaacgcgaaaaacttcgcgttcataaagctcggcagtggaaatatgatggagaaatgctaaataggtacagacaagccctggagacagctgtcaatctgtcagtgaagcactccctccccttgctgcccggtcggactgtgctggtgtacctaacagacgccaacgcagatcggctgtgccccaagtctaatccacagggaccccccctaaattatgctctccttctaattgggatgatgatcaccagggccgagcaggtagacgtcgtgctgtgtggcggcgatactttgaaaactgccgtgctgaaagctgaggaagggatccttaagacagccattaagcttcaggcacaggtccaggaatttgatgagaacgatgggtggtcgcttaacacatttggcaagtacctgctgagcctcgctggacagcgggtgccagttgatcgggtgatccttttggggcaaagcatggatgacggaatgatcaatgttgctaagcagctatactggcaacgtgtgaattcaaaatgtctgtttgtgggcattttgttgcgcagagtccagtatcttagtacagatctgaacccaaatgatgtgaccctgtctggatgtacagatgctatacttaagtttatcgctgagcatggggcttcccacctgctcgaacacgtcggacagatggataagatcttcaagatcccacccccccctggcaaaactggagtgcagtccttgcggcccctagaggaagacacccccagtccccttgccccagtctcgcagcagggatggagatctatcaggctgttcatatcttcaacatttcgcgacatgcacggggagcgggacttgttgctgcgcagtgtcctgcccgctctgcaggcccgagctgcaccacaccgtataagtctacacgggattgacctgcggtggggcgttacagaggaggaaacacgcagaaaccgccagttagaagtttgtctaggagaggtggagaacgcacagctgtttgttggaatcctcggctctcgatatgggtatatccccccttcttacaatcttcctgatcacccgcactttcactgggcccaacaatacccaagtggccggtcagtgaccgagatggaagtgatgcagttcttgaaccgcaaccaaagactgcagcccagcgctcaggccctgatctacttccgggatagtagcttcctcagctccgtgccagatgcttggaagtctgacttcgtgtctgaaagtgaagaagctgcgcgcaggatcagtgaattaaagtcatatctgtcccggcagaagggaattacctgtcgacgctacccttgtgaatggggtggagtcgcagccggacgcccctacgtgggcgggctagaggagtttggacaactcgtgctgcaggatgtatggaatatgatccaaaaattgtacttacagccaggagccctgctggaacagccggtctctattccggatgacgatctggtgcaggcgactttccagcagctccagaagccccccagccccgcccgccctcggcttctacaggataccgtgcagagacttatgctacctcacggcagactttctttggtcacaggtcaatcaggccagggcaaaactgccttccttgcgtcactggtttctgccttgcaagcaccggacggagccaaagtcgcctccctggtgtttttccatttctcaggagctaggcccgatcagggactggccttgacactgcttcggaggctttgcacttacctgaggggccagctaaaagaaccaggcgcacttccttccacgtaccgaagcctggtatgggagcttcaacagcgcctactccctaaaagcgctgaaagtctgcacccagggcagacgcaggtgttaattatcgacggcgccgatcgcctcgtagatcaaaatggccagctcatctccgactggattccaaagaagctgccccggtgtgtgcacctggtgctgtcagtgtcctcagatgctgggttgggagagaccctggaacaaagccagggcgcgcacgtgctggccttaggacctctagaggcatcggcccgggcccgactggttcgagaagagctagccctctatgggaaaagactcgaagagtccccatttaacaatcagatgcgcctgcttctggtcaagagggaaagcgggaggccgctctatctgcgcctggtgactgatcacctgcgcttatttacactgtatgagcaggtgagtgagagactcagaacactcccagctacagttcctctcctgcttcagcatattctgtccacactggaaaaagagcacgggccagatgtgctgcctcaggctctcacagcgctcgaggttactagaagcggtctcacagtcgaccagttgcacggtgtgctgtcagtatggagaacattgcctaaggggaccaagtcatgggaagaagcagtggcagctggaaattccggcgatccatatccaatggggccctttgcctgtttagtgcagtctttgaggagcctactgggggaggggccccttgaaaggccaggcgccagattatgcctgcccgacggaccactgcgcacagctgcaaagaggtgctatggcaagaggcctggcttagaagacaccgcacatatcttgatagccgcgcagctgtggaagacttgtgacgctgatgcgagtggaacttttaggtcatgcccgcctgaagctctcggcgacttgccataccacctgcttcagagcggaaacagggggttactgtcaaaatttttgactaacttacacgtggtcgccgctcatttggagctaggcttggtctcacggcttttagaggcgcatgccctttacgcctcttccgtcccaaaggaggaacagaagttacctgaggccgacgtggccgttttcaggacatttttacgacagcaggcaagcattctgtctcaatatcccagattgctgcctcaacaagctgcgaatcaacccctggactctcctttgtgtcatcaggcatcactcctgtcacggcggtggcatctgcagcacaccctacgctggctaaataagccacgcactatgaagaaccaacagtccagttcactgagtctggcagtgtcgtcgagccccactgccgttgctttctcgacaaatggccagagggcagcggtgggcacagccaacggaacagtttatctgctggacctaaggacttggcaggaggagaagtcagtagtgagcggttgtgatggcatcagcgcttgcctgttcctgtctgacgacacattattcctgactgcctttgacggcctgttggagctgtgggatttacaacacggctgtcgcgtgctgcagaccaaggcacaccagtatcagatcactggctgttgtctctcccctgactgccgcctgcttgccacagtttgtttgggcggatgtcttaagctctgggacacagttaggggacagctggcattccagcacacctaccctaaatcccttaactgcgtggcctttcaccccgaggggcaggtgatcgctaccggatcgtgggctggaagtatctcattctttcaagtcgatggcttgaaggttacaaaagaccttggagccccaggtgccagcatccggacattggcattcaatgtgcccggaggcgtggtcgccgtgggtcgtcttgattctatggtggagctctgggcatggagagagggagctaggctggcggcatttcccgcccaccacggcttcgtagcggccgctttgttcctacacgccggctgtcagctactgacagccggggaagacggcaaggtgcaggtgtggagcggttcactgggccgcccccgagggcatctgggctcattgagtctctcccccgcgctgagtgtcgctctctcaccagacggagatagggttgcagttggttatcgcgctgacggtatccgcatctacaaaatatcaagcggcagccagggtgcccagggacaggctctcgatgtcgctgtctccgccctcgcctggctgtcccccaaagtcctggtgtcgggcgcagaggacggaagcctacaggggtgggcgctcaaggaatgctcacttcagtcactctggctgctgtcacgttttcagaaaccagtgctgggcctagccacttcccaggaattattagcgtcagcatccgaagactttactgttcagctgtggccacgccagctgctgacccgaccccataaggctgaggatttcccctgcggaactgagttgcgtggtcacgagggcccagtttcgtgttgtagcttttcaactgacggagggagtttagccacaggcggcagagatagaagtctcctttgttgggacgtgcggacgcctaaaacccctgttctcatccatagctttccagcatgccaccgagattgggtcaccggttgtgcctggacaaaggataacctgctgatctcttgctcctctgatggaagcgtaggcttgtgggatccagagagcggtcagagactcggacagttcttgggacaccagtctgctgtgtcagctgtggcagccgtggaagagcatgttgtgtcagtgagccgcgacggtaccctcaaggtatgggaccaccagggggtggaactgacttctataccagcccactccggaccaatctcccactgcgccgccgcgatggagccgcgggccgccgggcagcctggcagcgagctgctggttgtgactgtgggcttggatggagccaccaggctgtggcatcctctactggtgtgccaaacccatactctcctgggtcacagtggaccggtgcgtgccgccgcagtcagcgagaccagcggactcatgctcacggcttccgaagatgggtcggtcagactgtggcaggtgcccaaggaagctgacgacacctgcataccgcgcagttccgcggccgtcaccgccgtggcctgggcccctgacggcagtatggcagtgagcggcaaccaggccggagagctgatcctctggcaggaagcaaaagccgtagcaacggcccaagcccctggccacataggagccctgatctggtcctccgctcatacattctttgtcctttccgccgatgagaaaatttccgagtggcaggtgaaacttcgcaagggaagcgctccggggaatctgtctctgcacctgaatcggatactccaggaggatttaggcgtactgacgtcattggattgggcaccagatggacatttcttgatcctggccaaggccgatcttaagttgctgtgcatgaagccaggggatgcaccgagtgaaatctggagcagctatactgagaaccctatgattttgtcgacccataaggaatatggcatattcgtgttacagccgaaggatccgggcgttctcagctttttacggcagaaagagtccggcgagtttgaggagagacttaatttcgacataaatctagaaaatccttcccgtaccttgatttctattacacaggccaagcctgagtcagctctgatgggctcttacggaacctggccgaatgccgcccagaaagagaatggaccacaggtgacctgcgggagaaagaaaaacacacccgagacacagacaccaggcacagacccctctacttgccgtgagtcagacgcgtcaatggactccgatgcatctatggacagtgagccgaccccccatctcaaaacaagacagcggcgcaaaattcatagtggctctgttaccgccttacacgtgttacctgagcttctcgtgacagcctcaaaagaccgggatgtgaagctgtgggagagaccatccatgcagctcctgggtttattccgttgtgagggctccgtctcttgtttggaaccttggctgggggcaaatagcacactccagcttgccgtgggggacgtgcaggggaatgtgtatttccttaattgggaatag

SEQ ID NO: 281494 - DNA, 7884 bp, Artificial Sequence
  derived and/or modified sequence
atggagaagctgcacggccacgtgtctgcccacccagacatcctgagcctggagaaccgctgcctggccatgctgcctgacctgcagcccctggagaagctgcaccagcacgtgtccacccacagcgacatcctgagcctgaagaaccagtgcctggccaccctgcctgacctgaagaccatggagaagccccacggctacgtgtctgcccacccagacatcctgagcctggagaaccagtgcctggccaccctgagtgacctgaagaccatggagaagccccacggccacgtgtctgcccacccagacatcctgagcctggagaaccgctgcctggccaccctgagcagcctgaagagcacagtgtctgccagccccctcttccagagcctgcagatcagccacatgacccaggccgacctgtacagagtgaacaacagcaactgcctgctgtctgagccccccagctggagggcccagcacttcagcaagggcctggacctgagcacctgccccatcgccctgaagagcatcagcgccacagaaacagcccaggaggccaccctgggccgctggtttgattctgaggagaagaagggagctgagacccagatgcccagctacagcctgagcctgggggaggaggaggaggtggaggacctggccgtgaagctgaccagcggggacagcgagagccaccctgagcccacagaccacgtgctgcaggagaagaagatggccctgctgagcctgctgtgcagcaccctggtgtctgaggtgaacatgaacaacaccagtgaccccaccctggccgccatctttgagatctgccgggagctggccctgctggagcctgagttcatcctgaaggccagcctgtatgcccggcagcagctgaatgtgagaaatgtggccaacaacatcctggccatcgccgccttcctgcctgcctgccggccccacctgcggcgctacttctgtgccatcgtgcagctgcccagcgactggatccaggtggccgagctgtaccagagcctggccgagggggacaagaacaagctggtgcccctgcctgcctgcctgaggacagccatgacagacaagtttgcccagtttgatgagtaccagctggccaagtacaaccccaggaagcaccgggccaagaggcacccccggcggccccccaggagccctggcatggagccccccttcagccaccgctgcttcccccgctacatcggcttcctgcgggaggagcagaggaagtttgagaaggccggggacacagtgtctgagaagaagaaccccccacgcttcaccctgaagaagctggtgcagaggctgcacatccacaagccagcccagcacgtgcaggccctgctgggctaccgctaccccagcaacctgcagctgttcagccgcagccggctgcccggcccctgggacagcagccgggccggcaagaggatgaagctgagcaggcctgagacctgggagcgggagctgagcctgcggggcaacaaggcctctgtgtgggaggagctgattgaaaatggcaagctgcccttcatggccatgctgaggaacctgtgcaacctgctgcgggtgggcatcagcagccgccaccacgagctgatcctgcagaggctgcagcacgccaagagcgtcatccacagccggcagttccccttccgcttcctgaatgcccatgatgccattgatgccctggaggcccagctgaggaaccaggccctgcccttccccagcaacatcaccctgatgaggcgcatcctgaccagaaatgagaagaaccggccccggcggcgcttcctgtgccacctgagccggcagcagctgaggatggccatgagaattcctgtgctgtatgagcagctgaagcgggagaagctgcgggtgcacaaggcccggcagtggaagtatgatggagagatgctgaaccgctaccggcaggccctggagacagctgtgaacctgtctgtgaagcacagcctgcccctgctgcccggccgcacagtgctggtgtacctgacagatgccaatgctgaccggctgtgccccaagagcaacccccagggcccccccctgaactatgccctgctgctgattggcatgatgatcaccagggctgagcaggtggatgtggtgctgtgtggcggggacaccctgaagacagctgtgctgaaggccgaggagggcatcctgaagacagccatcaagctgcaggcccaggtgcaggagtttgatgaaaatgatggctggagcctgaacaccttcggcaagtacctgctgagcctggccggccagagggtgcctgtggacagagtcatcctgctgggccagagcatggatgatggcatgatcaacgtggccaagcagctgtactggcagagggtgaacagcaagtgcctgtttgtgggcatcctgctgcggcgggtgcagtacctgagcacagacctgaaccccaatgatgtgaccctgagcggctgcacagatgccatcctgaagttcatcgccgagcacggggccagccacctgctggagcacgtgggccagatggacaagatcttcaagatccccccacctcctgggaagacaggagtgcagagcctgcggcccctggaggaggacacccccagccccctggcccctgtgtcccagcagggctggaggagcatccgcctcttcatcagcagcaccttccgggacatgcatggagagcgggacctgctgctgcggtctgtgctgcctgccctgcaggcccgggccgccccccaccgcatcagcctgcatggaattgacctgcgctggggcgtgacagaggaggagaccaggaggaaccggcagctggaggtgtgcctgggggaggtggagaatgcccagctgtttgtgggcatcctgggcagccgctatggctacatccccccatcctacaacctgcctgaccacccccacttccactgggcccagcagtaccccagcggccgctctgtgacagagatggaggtgatgcagttcctgaacagaaaccagaggctgcagcccagcgcccaggccctgatctacttccgggacagcagcttcctgagctctgtgcctgatgcctggaagagtgactttgtgtctgagagcgaggaggccgcccggcgcatcagcgagctgaagagctacctgagccggcagaagggcatcacctgccgccgctacccctgtgagtggggcggcgtggccgccggccggccctacgtgggcggcctggaggagtttggccagctggtgctgcaggatgtgtggaacatgatccagaagctgtacctgcagcccggggccctgctggagcagcctgtgtccatcccagatgatgacctggtgcaggccaccttccagcagctgcagaagccacccagccctgcccggccccggctgctgcaggacacagtgcagaggctgatgctgccccacggccgcctgagcctggtgacaggccagagcggccagggcaagacagccttcctggccagcctggtgtctgccctgcaggccccagatggagccaaggtggccagcctggtgttcttccacttcagcggggcccggccagaccagggcctggccctgaccctgctgcggcggctgtgcacctacctgcggggccagctgaaggagcccggggccctgcccagcacctaccgcagcctggtgtgggagctgcagcagaggctgctgcccaagtctgctgagagcctgcaccctggccagacccaggtgctgatcattgatggagctgaccggctggtggaccagaatggccagctgatcagtgactggatccccaagaagctgccccgctgtgtgcacctggtgctgtctgtgtccagtgatgctggcctgggggagaccctggagcagagccagggcgcccacgtgctggccctgggccccctggaggccagcgcccgggcccggctggtgcgggaggagctggccctgtatggcaagaggctggaggagagccccttcaacaaccagatgaggctgctgctggtgaagcgggagagcggccggcccctgtacctgcggctggtgacagaccacctgcggctcttcaccctgtatgagcaggtgtctgagcggctgcggaccctgcctgccaccgtgcccctgctgctgcagcacatcctgagcaccctggagaaggagcacggcccagatgtgctgccccaggccctgacagccctggaggtgaccaggagcggcctgactgtggaccagctgcacggcgtgctgtctgtgtggaggaccctgcccaagggcaccaagtcctgggaggaggccgtggccgccggcaacagcggggacccctaccccatgggcccctttgcctgcctggtgcagagcctgcggagcctgctgggggagggccccctggagaggcctggggcccggctgtgcctgcctgatggccccctgaggacagctgccaagcgctgctacggcaagaggcctggcctggaggacacagcccacatcctgattgctgcccagctgtggaagacctgtgatgctgatgccagcggcaccttccgcagctgccccccagaggccctgggggacctgccctaccacctgctgcagagcggcaacagaggcctgctgagcaagttcctgaccaacctgcacgtggtggccgcccacctggagctgggcctggtgtcccggctgctggaggcccacgccctgtatgccagctctgtgcccaaggaggagcagaagctgcctgaggctgatgtggccgtgttccgcaccttcctgcggcagcaggccagcatcctgagccagtacccccggctgctgccccagcaggccgccaaccagcccctggacagccccctgtgccaccaggccagcctgctgagccgccgctggcacctgcagcacaccctgcgctggctgaacaagcccaggaccatgaagaaccagcagagcagcagcctgagcctggccgtgagcagcagccccacagctgtggccttcagcaccaacggccagagagctgctgtgggcacagccaatggaacagtgtacctgctggacctgcggacctggcaggaggagaagtctgtggtgtctggctgtgatggcatcagcgcctgcctcttcctgagtgatgacaccctcttcctgacagcctttgatggcctgctggagctgtgggacctgcagcacggctgccgggtgctgcagaccaaggcccaccagtaccagatcaccggctgctgcctgagcccagactgccgcctgctggccaccgtgtgcctgggcggctgcctgaagctgtgggacacagtgcggggccagctggccttccagcacacctaccccaagagcctgaactgtgtggccttccaccctgagggccaggtgattgccaccggctcctgggccggcagcatctccttcttccaggtggatggcctgaaggtgaccaaggacctgggcgcccctggggccagcatccgcaccctggccttcaacgtgcctggaggagtggtggccgtgggccgcctggacagcatggtggagctgtgggcctggagggagggcgcccggctggccgccttccctgcccaccacggctttgtggccgccgccctcttcctgcatgctggctgccagctgctgacagctggggaggatggcaaggtgcaggtgtggagcggcagcctgggccggccccggggccacctgggcagcctgagcctgagccctgccctgtctgtggccctgagcccagatggagacagagtggccgtgggctacagagcagatggcatccgcatctacaagatcagcagcggcagccagggcgcccagggccaggccctggatgtggccgtgtctgccctggcctggctgagccccaaggtgctggtgtctggagcagaagatggcagcctgcagggctgggccctgaaggaatgttccctgcagagcctgtggctgctgagccgcttccagaagcctgtgctgggcctggccaccagccaggagctgctggccagcgccagcgaggacttcaccgtgcagctgtggccccggcagctgctgacccggccccacaaggccgaggacttcccctgtggcacagagctgcggggccacgagggccctgtgtcctgctgcagcttcagcacagatggcggcagcctggccaccggcggccgggacaggagcctgctgtgctgggatgtgaggacccccaagacccctgtgctgatccacagcttccctgcctgccaccgggactgggtgacaggctgtgcctggaccaaggacaacctgctgatcagctgcagcagtgatggctctgtgggcctgtgggaccctgagagcggccagaggctgggccagttcctgggccaccagagcgctgtgtctgctgtggccgctgtggaggagcacgtggtgtctgtgtccagagatggcaccctgaaggtgtgggaccaccagggcgtggagctgaccagcatcccagcccacagcggccccatcagccactgtgccgccgccatggagcccagggctgctggccagcccggcagcgagctgctggtggtgacagtgggcctggatggagccacccggctgtggcaccccctgctggtgtgccagacccacaccctgctgggccacagcggccctgtgcgggctgctgctgtgtctgagaccagcggcctgatgctgacagcctctgaagatggctctgtgcggctgtggcaggtgcccaaggaggctgatgacacctgcatccccaggagcagcgctgctgtgacagctgtggcctgggccccagatggctccatggctgtgtctggcaaccaggccggggagctgatcctgtggcaggaggccaaggctgtggccacagcccaggcccctggccacatcggggccctgatctggagcagcgcccacaccttctttgtgctgtctgcagatgagaagatcagcgagtggcaggtgaagctgaggaaaggaagtgcccctggcaacctgagcctgcacctgaaccgcatcctgcaggaggacctgggcgtgctgaccagcctggactgggccccagatggccacttcctgatcctggccaaggctgacctgaagctgctgtgcatgaagccaggagatgcccccagcgagatctggagcagctacacagagaaccccatgatcctgagcacccacaaggagtatggcatctttgtgctgcagcccaaggaccccggggtgctgtccttcctgcggcagaaggagagcggggagtttgaggagcggctgaactttgacatcaacctggagaaccccagcaggaccctcatcagcatcacccaggccaagccagagagcgagagcagcttcctgtgtgccagcagtgatggcatcctgtggaacctggccaagtgcagccctgagggggagtggaccactggaaacatgtggcagaagaaggccaacaccccagagacccagaccccaggcacagaccccagcacctgccgggagagtgatgcctccatggacagtgatgcctccatggattctgagcccaccccccacctgaagacccggcagaggaggaagatccacagcggctctgtgacagccctgcacgtgctgcctgagctgctggtgacagccagcaaggacagagatgtgaagctgtgggagcggcccagcatgcagctgctgggcctcttccgctgtgagggctctgtgtcctgcctggagccctggctgggcgccaacagcaccctgcagctggccgtgggagatgtgcagggcaatgtgtacttcctgaactgggagtag

SEQ ID NO: 281495 - DNA, 7860 bp, Artificial Sequence
  derived and/or modified sequence
atggagaagctgcacggccacgtgtctgcccacccagacatcctgagcctggagaaccgctgcctggccatgctgcctgacctgcagcccctggagaagctgcaccagcacgtgtccacccacagcgacatcctgagcctgaagaaccagtgcctggccaccctgcctgacctgaagaccatggagaagccccacggctacgtgtctgcccacccagacatcctgagcctggagaaccagtgcctggccaccctgagtgacctgaagaccatggagaagccccacggccacgtgtctgcccacccagacatcctgagcctggagaaccgctgcctggccaccctgagcagcctgaagagcacagtgtctgccagccccctcttccagagcctgcagatcagccacatgacccaggccgacctgtacagagtgaacaacagcaactgcctgctgtctgagccccccagctggagggcccagcacttcagcaagggcctggacctgagcacctgccccatcgccctgaagagcatcagcgccacagaaacagcccaggaggccaccctgggccgctggtttgattctgaggagaagaagggagctgagacccagatgcccagctacagcctgagcctgggggaggaggaggaggtggaggacctggccgtgaagctgaccagcggggacagcgagagccaccctgagcccacagaccacgtgctgcaggagaagaagatggccctgctgagcctgctgtgcagcaccctggtgtctgaggtgaacatgaacaacaccagtgaccccaccctggccgccatctttgagatctgccgggagctggccctgctggagcctgagttcatcctgaaggccagcctgtatgcccggcagcagctgaatgtgagaaatgtggccaacaacatcctggccatcgccgccttcctgcctgcctgccggccccacctgcggcgctacttctgtgccatcgtgcagctgcccagcgactggatccaggtggccgagctgtaccagagcctggccgagggggacaagaacaagctggtgcccctgcctgcctgcctgaggacagccatgacagacaagtttgcccagtttgatgagtaccagctggccaagtacaaccccaggaagcaccgggccaagaggcacccccggcggccccccaggagccctggcatggagccccccttcagccaccgctgcttcccccgctacatcggcttcctgcgggaggagcagaggaagtttgagaaggccggggacacagtgtctgagaagaagaaccccccacgcttcaccctgaagaagctggtgcagaggctgcacatccacaagccagcccagcacgtgcaggccctgctgggctaccgctaccccagcaacctgcagctgttcagccgcagccggctgcccggcccctgggacagcagccgggccggcaagaggatgaagctgagcaggcctgagacctgggagcgggagctgagcctgcggggcaacaaggcctctgtgtgggaggagctgattgaaaatggcaagctgcccttcatggccatgctgaggaacctgtgcaacctgctgcgggtgggcatcagcagccgccaccacgagctgatcctgcagaggctgcagcacgccaagagcgtcatccacagccggcagttccccttccgcttcctgaatgcccatgatgccattgatgccctggaggcccagctgaggaaccaggccctgcccttccccagcaacatcaccctgatgaggcgcatcctgaccagaaatgagaagaaccggccccggcggcgcttcctgtgccacctgagccggcagcagctgaggatggccatgagaattcctgtgctgtatgagcagctgaagcgggagaagctgcgggtgcacaaggcccggcagtggaagtatgatggagagatgctgaaccgctaccggcaggccctggagacagctgtgaacctgtctgtgaagcacagcctgcccctgctgcccggccgcacagtgctggtgtacctgacagatgccaatgctgaccggctgtgccccaagagcaacccccagggcccccccctgaactatgccctgctgctgattggcatgatgatcaccagggctgagcaggtggatgtggtgctgtgtggcggggacaccctgaagacagctgtgctgaaggccgaggagggcatcctgaagacagccatcaagctgcaggcccaggtgcaggagtttgatgaaaatgatggctggagcctgaacaccttcggcaagtacctgctgagcctggccggccagagggtgcctgtggacagagtcatcctgctgggccagagcatggatgatggcatgatcaacgtggccaagcagctgtactggcagagggtgaacagcaagtgcctgtttgtgggcatcctgctgcggcgggtgcagtacctgagcacagacctgaaccccaatgatgtgaccctgagcggctgcacagatgccatcctgaagttcatcgccgagcacggggccagccacctgctggagcacgtgggccagatggacaagatcttcaagatccccccacctcctgggaagacaggagtgcagagcctgcggcccctggaggaggacacccccagccccctggcccctgtgtcccagcagggctggaggagcatccgcctcttcatcagcagcaccttccgggacatgcatggagagcgggacctgctgctgcggtctgtgctgcctgccctgcaggcccgggccgccccccaccgcatcagcctgcatggaattgacctgcgctggggcgtgacagaggaggagaccaggaggaaccggcagctggaggtgtgcctgggggaggtggagaatgcccagctgtttgtgggcatcctgggcagccgctatggctacatccccccatcctacaacctgcctgaccacccccacttccactgggcccagcagtaccccagcggccgctctgtgacagagatggaggtgatgcagttcctgaacagaaaccagaggctgcagcccagcgcccaggccctgatctacttccgggacagcagcttcctgagctctgtgcctgatgcctggaagagtgactttgtgtctgagagcgaggaggccgcccggcgcatcagcgagctgaagagctacctgagccggcagaagggcatcacctgccgccgctacccctgtgagtggggcggcgtggccgccggccggccctacgtgggcggcctggaggagtttggccagctggtgctgcaggatgtgtggaacatgatccagaagctgtacctgcagcccggggccctgctggagcagcctgtgtccatcccagatgatgacctggtgcaggccaccttccagcagctgcagaagccacccagccctgcccggccccggctgctgcaggacacagtgcagaggctgatgctgccccacggccgcctgagcctggtgacaggccagagcggccagggcaagacagccttcctggccagcctggtgtctgccctgcaggccccagatggagccaaggtggccagcctggtgttcttccacttcagcggggcccggccagaccagggcctggccctgaccctgctgcggcggctgtgcacctacctgcggggccagctgaaggagcccggggccctgcccagcacctaccgcagcctggtgtgggagctgcagcagaggctgctgcccaagtctgctgagagcctgcaccctggccagacccaggtgctgatcattgatggagctgaccggctggtggaccagaatggccagctgatcagtgactggatccccaagaagctgccccgctgtgtgcacctggtgctgtctgtgtccagtgatgctggcctgggggagaccctggagcagagccagggcgcccacgtgctggccctgggccccctggaggccagcgcccgggcccggctggtgcgggaggagctggccctgtatggcaagaggctggaggagagccccttcaacaaccagatgaggctgctgctggtgaagcgggagagcggccggcccctgtacctgcggctggtgacagaccacctgcggctcttcaccctgtatgagcaggtgtctgagcggctgcggaccctgcctgccaccgtgcccctgctgctgcagcacatcctgagcaccctggagaaggagcacggcccagatgtgctgccccaggccctgacagccctggaggtgaccaggagcggcctgactgtggaccagctgcacggcgtgctgtctgtgtggaggaccctgcccaagggcaccaagtcctgggaggaggccgtggccgccggcaacagcggggacccctaccccatgggcccctttgcctgcctggtgcagagcctgcggagcctgctgggggagggccccctggagaggcctggggcccggctgtgcctgcctgatggccccctgaggacagctgccaagcgctgctacggcaagaggcctggcctggaggacacagcccacatcctgattgctgcccagctgtggaagacctgtgatgctgatgccagcggcaccttccgcagctgccccccagaggccctgggggacctgccctaccacctgctgcagagcggcaacagaggcctgctgagcaagttcctgaccaacctgcacgtggtggccgcccacctggagctgggcctggtgtcccggctgctggaggcccacgccctgtatgccagctctgtgcccaaggaggagcagaagctgcctgaggctgatgtggccgtgttccgcaccttcctgcggcagcaggccagcatcctgagccagtacccccggctgctgccccagcaggccgccaaccagcccctggacagccccctgtgccaccaggccagcctgctgagccgccgctggcacctgcagcacaccctgcgctggctgaacaagcccaggaccatgaagaaccagcagagcagcagcctgagcctggccgtgagcagcagccccacagctgtggccttcagcaccaacggccagagagctgctgtgggcacagccaatggaacagtgtacctgctggacctgcggacctggcaggaggagaagtctgtggtgtctggctgtgatggcatcagcgcctgcctcttcctgagtgatgacaccctcttcctgacagcctttgatggcctgctggagctgtgggacctgcagcacggctgccgggtgctgcagaccaaggcccaccagtaccagatcaccggctgctgcctgagcccagactgccgcctgctggccaccgtgtgcctgggcggctgcctgaagctgtgggacacagtgcggggccagctggccttccagcacacctaccccaagagcctgaactgtgtggccttccaccctgagggccaggtgattgccaccggctcctgggccggcagcatctccttcttccaggtggatggcctgaaggtgaccaaggacctgggcgcccctggggccagcatccgcaccctggccttcaacgtgcctggaggagtggtggccgtgggccgcctggacagcatggtggagctgtgggcctggagggagggcgcccggctggccgccttccctgcccaccacggctttgtggccgccgccctcttcctgcatgctggctgccagctgctgacagctggggaggatggcaaggtgcaggtgtggagcggcagcctgggccggccccggggccacctgggcagcctgagcctgagccctgccctgtctgtggccctgagcccagatggagacagagtggccgtgggctacagagcagatggcatccgcatctacaagatcagcagcggcagccagggcgcccagggccaggccctggatgtggccgtgtctgccctggcctggctgagccccaaggtgctggtgtctggagcagaagatggcagcctgcagggctgggccctgaaggaatgttccctgcagagcctgtggctgctgagccgcttccagaagcctgtgctgggcctggccaccagccaggagctgctggccagcgccagcgaggacttcaccgtgcagctgtggccccggcagctgctgacccggccccacaaggccgaggacttcccctgtggcacagagctgcggggccacgagggccctgtgtcctgctgcagcttcagcacagatggcggcagcctggccaccggcggccgggacaggagcctgctgtgctgggatgtgaggacccccaagacccctgtgctgatccacagcttccctgcctgccaccgggactgggtgacaggctgtgcctggaccaaggacaacctgctgatcagctgcagcagtgatggctctgtgggcctgtgggaccctgagagcggccagaggctgggccagttcctgggccaccagagcgctgtgtctgctgtggccgctgtggaggagcacgtggtgtctgtgtccagagatggcaccctgaaggtgtgggaccaccagggcgtggagctgaccagcatcccagcccacagcggccccatcagccactgtgccgccgccatggagcccagggctgctggccagcccggcagcgagctgctggtggtgacagtgggcctggatggagccacccggctgtggcaccccctgctggtgtgccagacccacaccctgctgggccacagcggccctgtgcgggctgctgctgtgtctgagaccagcggcctgatgctgacagcctctgaagatggctctgtgcggctgtggcaggtgcccaaggaggctgatgacacctgcatccccaggagcagcgctgctgtgacagctgtggcctgggccccagatggctccatggctgtgtctggcaaccaggccggggagctgatcctgtggcaggaggccaaggctgtggccacagcccaggcccctggccacatcggggccctgatctggagcagcgcccacaccttctttgtgctgtctgcagatgagaagatcagcgagtggcaggtgaagctgaggaaaggaagtgcccctggcaacctgagcctgcacctgaaccgcatcctgcaggaggacctgggcgtgctgaccagcctggactgggccccagatggccacttcctgatcctggccaaggctgacctgaagctgctgtgcatgaagccaggagatgcccccagcgagatctggagcagctacacagagaaccccatgatcctgagcacccacaaggagtatggcatctttgtgctgcagcccaaggaccccggggtgctgtccttcctgcggcagaaggagagcggggagtttgaggagcggctgaactttgacatcaacctggagaaccccagcaggaccctcatcagcatcacccaggccaagccagagagcgccctgatgggcagctatggcacctggcccaatgctgcccagaaggaaaatggcccccaggtgacctgtggcaggaagaagaacaccccagagacccagaccccaggcacagaccccagcacctgccgggagagtgatgcctccatggacagtgatgcctccatggattctgagcccaccccccacctgaagacccggcagaggaggaagatccacagcggctctgtgacagccctgcacgtgctgcctgagctgctggtgacagccagcaaggacagagatgtgaagctgtgggagcggcccagcatgcagctgctgggcctcttccgctgtgagggctctgtgtcctgcctggagccctggctgggcgccaacagcaccctgcagctggccgtgggagatgtgcagggcaatgtgtacttcctgaactgggagtag

SEQ ID NO: 281496 - DNA, 7884 bp, Artificial Sequence
  derived and/or modified sequence
atggagaagctgcacggccacgtgagcgcccaccccgacatcctgtctctcgaaaaccgctgcctggctatgttgcccgacctgcagccgctcgaaaaacttcatcagcatgtctctactcacagcgacatcctgtctctcaagaatcaatgcctggctacacttccagacctcaagaccatggagaagcctcacggctatgtcagtgctcatccagatatcctgtctctcgagaaccagtgtctagctaccctgtctgatctgaagactatggagaaaccacatggacacgtctctgctcaccctgacatcttgtctttggagaatagatgccttgccacactcagtagcctcaaaagtaccgtttcagcatctccgctgtttcagagcttacagatctctcatatgacgcaggcagacttataccgcgttaataattctaactgtctgctgagcgagcctcccagctggagggcccagcatttctcaaaaggtctggatctcagcacctgcccaatagccctaaaatccataagcgcaaccgaaacggcccaggaagccaccctcgggcgctggtttgattcagaggaaaagaagggcgctgagactcagatgccctcgtattctctaagcctaggggaggaagaggaggtggaggacctagccgttaagctgacaagtggcgatagcgaaagtcaccctgagcccaccgaccacgtacttcaagagaagaagatggcactgctgtcactgctttgcagcacgctggtgagcgaagtcaacatgaacaatacctctgacccaaccctggccgctatttttgagatttgtcgggagctagcacttctcgaacctgagtttatcttaaaggcctcactgtatgccagacagcaactgaacgtccggaatgtagcaaacaatatactggcaatcgccgctttccttccagcttgccgtcctcacttgagacggtatttttgcgcgatcgtgcagctcccctcagattggatccaagtcgccgaattgtaccaaagtttagctgaaggcgataagaacaagttggtgccccttcccgcctgcttgcgaaccgccatgacggacaagttcgcccagttcgatgagtaccagctcgcgaaatacaacccaagaaagcatagagccaagcggcaccctagacgccctccccggtctcccgggatggaaccaccatttagccacaggtgcttccctaggtacattggttttctgagagaggaacagcggaaattcgagaaggcaggggatacagtgtctgaaaaaaagaaccctccgcgcttcaccctgaagaagctggtgcagcgacttcacatacacaagccagctcagcatgtccaggcactccttgggtataggtatccgagtaatctccagttgttttctcgttcacgactgcccggaccttgggattcttctcgggctgggaaacgcatgaaacttagccgaccggagacttgggagagagagttgtcacttaggggtaataaggctagtgtctgggaggagcttatagaaaatggcaaactcccctttatggctatgttgagaaacctctgtaatctcctaagagtgggcatttcctcccgtcaccacgagctgatcttgcagagactgcaacacgcaaagagtgtgatccacagccgacagtttcctttcaggttcctgaacgcacacgacgcgatagacgctctggaggcccagctccgaaaccaggctctcccttttccgtcaaatatcacactgatgagaagaattctcacacgaaacgaaaaaaaccgcccacgtcggcggtttttgtgccacctttctcgccagcagctccggatggccatgagaatccctgtcctctacgagcaactgaaacgtgagaaacttcgagtgcataaagcaaggcaatggaagtacgacggtgagatgcttaaccgctaccggcaagctcttgagaccgccgtgaacctctctgtgaagcattctctgccactgctgccggggcgaacggtcctggtgtacctgaccgatgcaaatgccgatcggctgtgccccaaaagtaatcctcagggtccacctctcaattatgcactgctgttgataggaatgatgattaccagagcagagcaggtggatgttgtgctgtgcgggggtgataccctgaaaacagccgtcctgaaagcagaggaggggatacttaagaccgccatcaaactacaagcacaggtgcaggagttcgacgagaacgatggctggtctctgaatacattcgggaagtacctgctcagcctggcaggccagcgagtgcctgtcgatcgggtgatattgttggggcagtcgatggacgacggtatgataaatgtggcaaagcaactttattggcaaagagtcaatagtaaatgcctgtttgttggtatcctgctccgccgcgtgcagtacctcagcacggacctcaatcctaatgatgtcaccctgagcggttgcaccgatgcgattttaaagtttatcgccgagcatggtgctagtcatctgctggagcacgtcgggcaaatggataagatctttaagatcccacctccccctggaaagacaggtgtacagagcctaaggcctctggaggaggacactccctcgccattggcaccggtgagtcaacaggggtggcgcagtatccgactgtttattagtagtacattcagagacatgcacggagaaagagatctcctcttacgatccgtgctaccagccctgcaggcacgggcagctccacataggatttcattgcatggtatcgacctccgttggggcgtcaccgaggaagagaccagaagaaaccgccagctcgaagtttgtctgggcgaagtggagaatgcccagttgtttgtggggattttaggaagtagatatggatacatcccgccctcatacaaccttcccgatcaccctcattttcactgggcccagcagtacccaagtgggcgaagcgtcacagaaatggaagtgatgcaatttctgaatcgcaaccagcggctccagccttcagcccaggctttgatctattttagggattccagcttcctgagctcagtgccagatgcctggaagagcgatttcgtgtctgagtcagaagaagctgcacgccgtatttctgagctgaagtcttatctaagccgccaaaagggcatcacctgcagacggtatccatgcgaatggggcggggtggccgccggccgtccctacgtgggcggtctcgaagaatttggacagttagtgcttcaggatgtgtggaacatgatacagaagctataccttcagccgggtgctctgctcgaacagcccgttagcatacctgatgatgacctcgtccaggccacttttcaacagctgcagaagccaccctctccagcaaggccgagattactgcaggacaccgttcaacgtttgatgctcccccacggacgcctgtctttagtgacaggtcaatccggccagggcaagactgccttcctcgcctctctggtgagtgccctgcaggcaccggacggagccaaggtcgctagtctggtgtttttccacttttcaggagctcggcctgatcaaggcctggcactgacgctgctgcgtcggctctgtacatacttgcggggccagctcaaggagcctggcgccttgccctccacatatcggtccctggtgtgggaactgcaacaacgtctgctcccgaaatcagccgaaagcctgcatcctggccagactcaggtgcttattattgacggcgcagatcgcctcgttgaccagaatggacaattaattagtgactggataccaaagaaacttccccggtgcgtccacctcgttctctcggtgtcctccgacgcaggcctgggagagacactggagcagtctcagggagcgcacgtactcgctctcggacctctggaggcgtctgcccgagccagattggtccgggaggaacttgccctctatggtaaaagactggaagagtccccctttaataaccaaatgcgcttgctcctcgttaaaagggaatctggccgccctttatacttgcggttagtaaccgatcatttgaggctgtttaccctgtacgagcaggtgagcgaacggctgcggactttaccagccactgtccctctgctactgcagcacatccttagcacgctagaaaaagaacacggcccagacgtgctcccccaagctctgactgctctcgaagtcacccgctctggcttgacagtggaccagcttcatggggtgctctcagtgtggcggacccttccaaagggcaccaagagttgggaagaggctgttgccgcgggcaattctggcgacccctacccaatgggtccattcgcttgccttgtgcaaagtctccgctccctgctaggcgaagggccccttgagcgtccgggagcccgattgtgcctgccagatggcccactgcgcacagccgcaaagcgctgctacggtaagagaccaggcctggaagataccgctcatattctcatcgccgcacagctttggaaaacgtgcgacgctgatgccagcggaacgttcaggtcctgcccaccagaggccttgggcgacctgccttatcacctgcttcagtccggaaaccgcgggcttctcagtaagtttttaaccaacttgcacgtggtggcagcgcaccttgagctgggcttggtgtctaggctgttagaggctcacgcactgtacgcttcctctgtgcctaaagaagaacagaaacttccagaagcagacgtcgctgtatttcgtacctttctgcgccaacaagccagtatcctgagtcagtaccccagacttctgccccagcaggcagctaaccaaccgttagattcccctctgtgtcaccaagcctccttgcttagcaggcgttggcaccttcaacacactctgcgttggctgaacaagccccggaccatgaagaaccagcagtcctcctctctttcactggctgtcagcagttcaccgacggccgtggcgttcagcaccaacggccagagagccgcagttggaactgctaatggaacggtctacctccttgatctcagaacctggcaggaggagaagtccgtggtctccggttgcgatgggatcagcgcctgcctttttctctctgatgatactctgttccttactgcgttcgatggtttgctcgaactctgggacctgcagcatgggtgcagggtcctgcagacaaaagcacaccagtatcagattaccggatgttgcctgagtcccgattgcaggctgctggccaccgtctgcctgggagggtgtctgaagttgtgggacactgtgaggggtcagcttgctttccaacatacatatcctaagtccttgaactgtgtggccttccaccccgaggggcaggtcatagcaactggctcttgggcgggatcaatctctttcttccaggttgacgggttgaaagtgactaaagatcttggggccccaggggcatcaatccgaacgttggccttcaacgtgccaggtggcgttgtggccgtgggtcgcctggactcaatggtcgaattgtgggcctggcgagagggcgcacgcctggccgccttccctgctcatcatggcttcgtcgccgccgccctcttcctccacgccggttgccagctgttaacagccggggaagacgggaaggtgcaggtatggtctggaagcctaggacgccccagagggcacctgggttctttgtcactttcccccgcattgtcagttgccctgtcaccagatggagaccgggtggccgtgggctaccgggcagacggtatcaggatctacaaaattagctcaggatcccaaggcgctcagggccaagctctcgatgttgcggtaagcgctctggcatggctgagtccaaaggtgttggtctccggggccgaggatggtagcttgcagggctgggctcttaaggagtgctccctgcagtctctgtggcttctcagtcgctttcagaaacccgtactcggcctggctacatcacaggaactgctggctagtgccagcgaagacttcaccgtccagctgtggcctagacagctgctgacacgcccccataaggcagaggattttccgtgcggaacagagctgcgcggacatgagggaccagtgtcttgctgtagtttttccaccgacggaggcagcctagcaaccggcggcagggatcgctcactcctctgctgggatgtgcggacccccaaaacgcctgtcctgattcatagcttcccagcctgccatcgggactgggtgaccggctgtgcgtggaccaaggacaaccttctgatttcctgctctagcgacggaagcgtggggctgtgggacccagaaagtgggcaacgcctgggacagtttctcggccaccaaagtgcagtgtccgctgtcgcggccgtggaagaacacgtggtctccgtgtctagagatggcactctcaaggtttgggatcaccagggcgtcgaactaacctctatccctgcccactcagggcctatctcacattgtgctgcagctatggagcccagagcagccgggcagcctggctctgaactcctggttgtaactgtgggcttggatggcgcaacgcggctgtggcacccattactagtgtgccaaactcatacattactgggtcattcaggtcccgtaagggccgcagccgtatcagagactagcggcctcatgttgactgcttcagaggatggctcagtgagactgtggcaagtccccaaagaggccgacgatacctgcatccctaggagctcagctgccgtgacagctgttgcttgggccccggacggatctatggcagtcagtggcaatcaggctggtgaactgatcttgtggcaggaagcaaaggcagtggccaccgcgcaggctcctggtcacatcggggcactaatttggtcctctgcccatacattcttcgtgctgtccgcagacgagaagatctcagagtggcaggtgaagttgcgcaagggatccgccccaggcaacttgtccctgcatcttaatcgtatactacaagaagatcttggagtgctgacctccctcgattgggcgcctgatggtcatttcctcatcctggccaaggccgacctgaagctgctctgcatgaagcccggcgacgccccctccgagatctggtcatcctacactgagaatcccatgatactgagcactcacaaagagtatggtattttcgtgctgcagcctaaggatcctggggtgctcagcttcctcagacaaaaggagagcggggagtttgaagagagactgaatttcgacattaaccttgaaaatccatcccggacgctcatcagtatcacgcaggcgaaaccagagtccgaatcttcgtttctttgcgcctcctcagatggaattctgtggaaccttgccaagtgcagtccggagggcgagtggacaaccggaaatatgtggcaaaagaaggccaataccccagagactcagactccaggcacagatccctctacctgcagggaatcggacgcatccatggacagcgatgccagtatggactctgaacctacaccccacctgaaaacgcgacagaggcgcaagatccattctggcagtgtgacagcgttgcacgtgctcccggaattgttggtgacagccagcaaggatcgggatgttaaactttgggaaagaccttccatgcaactactcggtctttttagatgcgaaggttctgttagctgcctggagccatggctgggagccaacagtacattgcagctcgctgtcggcgatgttcagggtaatgtgtatttcctcaattgggagtag

SEQ ID NO: 281497 - DNA, 7860 bp, Artificial Sequence
  derived and/or modified sequence
atggagaagctgcacggccacgtgagcgcccaccccgacatcctgagcctggaaaataggtgcctggcgatgttgccagatcttcagcccctagaaaagcttcatcagcacgtctctacccactccgacatcctcagtttgaaaaatcaatgcctggccactttacctgacctgaaaacgatggagaagcctcacggctacgtgtccgcccatcctgacatcctttccctggaaaatcagtgtttggcaaccctgagcgatctcaagacaatggagaagccccatgggcatgtgtcggctcaccccgatatcctgtcactcgaaaaccggtgtttggccacattatcctctctcaagagtacggtgtccgcctcacctctgtttcagagcctacagatttcccacatgacccaagctgacctttatcgggtgaataacagcaattgcctcctgtccgagccaccgagctggagggcccagcatttttccaaaggactcgatctgtcaacttgtcccatcgcgctgaaatccattagcgcaaccgagacagctcaggaagccaccctgggccgatggttcgattcagaagagaaaaagggcgcagagacgcagatgccgagttacagcctttctctgggagaggaggaagaggtcgaagacctggccgtcaagctaacaagtggcgactctgagtctcatccagagccaaccgaccacgtgctccaagaaaagaagatggctctgctgagtcttctctgttccactttggtctctgaggttaacatgaacaacacatccgacccaactctcgctgccatctttgaaatttgcagagagctggcccttttggaacctgagttcatactaaaggcctccttgtacgcacgtcaacagctcaatgttagaaatgtggcgaacaatattcttgccatagctgcctttctgccagcttgtcgcccacacctgagacgctacttttgtgccatcgtgcagttaccatccgactggatccaggttgctgaactgtatcagagcttggcggaaggcgacaaaaataagttggtcccccttccagcgtgtctgcgcactgctatgacagataaattcgcccagtttgacgagtatcaacttgcaaagtacaaccctcgaaaacacagggcgaagcggcatcccaggagacctcctcgatctcctggaatggagcctcctttctctcatcgctgttttccaaggtatatcgggtttctgcgggaggaacagagaaagtttgaaaaagctggcgacaccgtaagcgagaaaaagaaccccccccgattcactttgaagaagttggtgcagcgtctccacatccacaaacccgcccagcatgtgcaagcgctcctcggctaccgatacccgagtaacctgcagctgttttccaggtctcgactgcccgggccatgggattccagtcgcgccggcaagaggatgaagctctctcgaccggagacatgggaacgggagctcagtcttcggggcaataaagcttctgtctgggaagagctgatagaaaacggaaaactaccctttatggctatgcttaggaatctctgtaacctcctccgcgtgggaatctccagtcgccatcatgagttaatcctgcagagactgcagcacgctaagtccgtgatacacagccggcagttcccgttcagatttctcaatgcgcacgatgccatcgacgcgttagaggcacagctacgcaaccaagccctgcctttcccgagtaatatcactttgatgcgcaggatccttacccgaaatgagaaaaaccgcccaagaagaaggttcctgtgtcacctaagtcggcagcagctacgcatggctatgaggatccctgtgctgtatgaacagcttaagagggagaagctgagggtgcataaggccagacaatggaaatacgacggtgagatgctcaaccggtatcgacaggcattggagacagctgtaaacctgagtgtgaagcactcgctgccattgttaccaggacggacagtgctagtttacttaaccgacgctaatgcggacaggttatgcccaaagagcaacccacaaggacctcctcttaattacgcgctgctcctgatcggtatgatgatcacacgggccgagcaggtggatgttgtgctctgcggtggagacactctaaagacggcagtcctgaaggccgaggaaggcattcttaagaccgccatcaagcttcaggctcaggtccaggaattcgacgagaacgatggctggtctctaaacactttcggcaagtacctgttaagtttggccggacaacgcgtgcccgtggacagggtgatcctactggggcagtctatggatgatggcatgattaacgtggcaaaacaactctattggcaacgggtcaatagtaaatgtcttttcgtgggcatcctacttagacgcgtccagtaccttagtactgaccttaaccccaacgacgttaccctatcaggctgcaccgatgccatcttgaagttcatcgccgaacacggggccagccatctactggagcacgtagggcagatggacaagatcttcaagatcccgccgcctccaggcaaaaccggcgtgcaatccctgcggccactcgaagaagacacgcccagtccgctggcccccgtctctcagcagggctggcgcagcataagattgttcatctcatctacatttcgcgacatgcacggcgagcgcgacctcctcttgagaagtgtcttaccagctcttcaggctcgtgccgcaccgcaccgaatatcactccatggcattgatctccgttggggcgtcaccgaggaagagacccgccgaaaccgccaattggaggtctgcctaggggaagtggagaacgcgcaattatttgtaggcatcctggggtcgagatatgggtatattcctccaagttacaatttgccagaccacccgcactttcactgggctcagcagtatccttctgggagatcagtgaccgaaatggaggtcatgcagttcctcaacaggaatcaacggctccaaccctccgcgcaagctctcatctacttcagggattcttctttcctatcttccgtacccgatgcctggaaaagcgactttgtgagtgaatccgaggaagcagcccgtcgcatctcagagctgaagtcttacctttccagacaaaaaggaattacgtgccgcagatatccatgtgaatggggtggtgtggcagccgggcggccctacgtaggaggcttagaggagtttggacaactggtgttgcaggacgtttggaatatgatacagaaactctatctgcagcccggagcgctactcgaacagcctgtgagcatcccagatgatgacctggtgcaggcgacatttcagcagttacagaaacctccgagccctgcaagacccaggctgttacaggacacagttcaaaggctgatgttgccacatgggcgcctctcattggttaccggccagagcggccagggaaaaacagctttccttgcatctctggtctcggcgctacaggctccggatggagctaaagtcgcgagtctcgtgttctttcatttctcaggtgcccgccctgaccaaggtctggcccttactctgctgcggaggctctgtacttacctgcggggccagctaaaggaacctggcgctttgccttcaacctaccggtcactggtctgggagcttcagcaacgtctgcttcccaaatctgcagagagcctgcaccctgggcagactcaagtcctgattatcgatggtgccgatcgcttagtcgatcagaacggtcagctgatttcagactggatccctaagaaactccctagatgtgtgcacctggttttgtctgtgtcctccgatgccggcttaggcgagactctagaacagagccaaggagcccatgtcctggcccttggccccctggaagcgtcggcccgggcacgcctggtaagggaggagctggcactgtacggaaaacggctggaagaaagccctttcaataaccagatgcggctgttactggttaaacgcgagagcggcaggcccctgtatctccgcctcgtgacagaccacctccgactgtttacactgtatgagcaggtgtctgagagattgcgcacgctgcccgctacggtgcccctgctcctccagcacatcctgagtactctggaaaaagaacatggcccagacgtactccctcaggccctgacagccctggaagtgactaggtccggactcactgtggatcagctccacggggtacttagcgtatggaggactctgccgaagggcactaagagttgggaagaagcagttgcagctggtaacagtggagacccctaccccatgggtccctttgcctgcctggtgcagagtctgagatcccttctcggcgagggtcctttggaacgccccggagctaggttgtgcttaccagacggacccctgcgtactgctgccaaacggtgctacggaaagagaccagggctagaagacacggcccacatactgatcgccgctcaactctggaagacctgcgacgccgacgcctccgggacgtttcgatcatgccccccagaagcgctgggtgaccttccgtaccacctgctgcagagtggtaatcggggcctcctgtccaagttcctgaccaacctgcatgttgtagcagctcacctggagctcggccttgtcagcaggctgttggaggctcacgctttgtacgcatcgtctgtcccgaaagaagaacaaaaactgcccgaagcagacgtcgcagtgtttcggacgttcctgagacagcaggcttctatactgagccaataccccaggcttctcccacaacaagcggccaaccaaccattggatagtcccctgtgtcaccaggcatccttgctttctagacgctggcacctgcagcacacactgcgctggctgaataaaccgcgaactatgaagaatcagcagagttcatcactttccctggccgtctcctcctcccctaccgccgtggcattcagtaccaacggacagcgagctgccgtagggactgccaatggaactgtgtatctgctggacttaagaacctggcaggaggagaaatctgttgtgtctggatgcgacggcattagcgcatgtttattcttaagtgacgacacccttttcctgacggcttttgacggcctgcttgagctgtgggatctccagcacggctgtcgggttcttcagactaaagcacatcaatatcagataaccggatgttgcctgtcacccgactgccggctgttagcaaccgtgtgcctaggaggctgccttaaactgtgggatacagtgagaggccagcttgcgttccaacatacttacccaaagtcccttaactgtgttgccttccatccggaggggcaggtaatagccactggaagttgggccggttcaatcagctttttccaggttgacggattaaaagttactaaagatttgggagctcccggggcctcaatcaggaccctggcctttaacgtacctggaggcgtggtagccgtcggtcggcttgatagtatggttgagctgtgggcatggcgcgagggagcacgtctggccgctttcccagctcaccatggcttcgtggcagcagccctctttttgcatgccggatgtcaactccttacagcaggggaagacgggaaagttcaggtgtggagcggttccctgggcaggcccagagggcatctcggatcattgtccctatcaccagctctgagtgtggcgctatctccggatggcgaccgggtagcagtggggtacagagccgacggaatacgaatttataaaatctcttccggaagtcaaggggcccagggacaggccttggatgtcgccgtaagtgcccttgcctggttgagtcctaaggtgttagtttctggagctgaggatggcagtctgcagggctgggctcttaaggaatgctcactgcagtccctatggctgttgtccagattccaaaagccagtcctcggattggccaccagccaggagctgctcgcatctgcttccgaagacttcacagtgcagctgtggcctcgccagcttttgacaagaccccataaagcagaagattttccttgtggcaccgagctgcggggacacgaagggcctgtgagttgctgttctttttcaacagatggcggttccctcgccacagggggtcgcgacaggtcactgctgtgctgggatgtcaggacccccaagacacccgtgttgatccactcatttccggcctgccacagggattgggtcacaggatgcgcatggaccaaagacaacctactgatcagttgctcaagcgacggatctgtcggactgtgggatcccgagtctggtcaacgactgggccaatttctgggacaccaaagcgctgtgtccgccgtggctgccgtggaagagcatgtggtaagtgtcagccgcgatggtaccctgaaagtgtgggatcatcagggtgtggagcttacaagcattccggctcactcagggcctattagtcattgtgctgccgccatggagcccagggcagctggtcaacctggctctgagttgcttgtcgtcactgtgggtctcgacggggcaactcgactatggcatcctttgcttgtgtgccagacccacacgctgcttgggcattctggcccagttcgggccgccgccgtttctgagacgagcggcctcatgctgaccgcctctgaagatgggtccgtgagactgtggcaggtgcccaaagaggccgacgatacttgcattcctcgctctagtgctgcagtcaccgccgtggcctgggcgccagatggctcaatggctgtgagtggaaaccaggctggggagttaatcttatggcaggaggctaaggccgtcgcaactgcccaggcgcccggacacatcggggccctcatttggagcagcgcacacactttctttgttctgagcgctgatgaaaaaatcagtgagtggcaggtgaaattgcggaagggctctgcacctgggaacctgagcctgcacctgaacaggatattgcaggaggatctgggtgtgctgacttctctcgattgggcccctgatggtcatttcctcatactggccaaggcggatctgaaactattatgtatgaaaccaggcgacgccccaagcgagatctggagcagttacacagaaaatccaatgatcctgagcacgcacaaggagtacggcattttcgtgctgcaacctaaggatccaggggtgcttagctttctcagacagaaggagtcaggagagtttgaggaacgccttaattttgatatcaacctcgaaaaccccagtcggactcttatcagcatcacccaggctaagcccgaatctgctctgatgggctcgtatgggacctggcccaatgccgcccagaaggaaaatgggccacaagtcacttgcggaagaaagaagaacacgccagaaacccagacccccggaaccgaccctagtacatgtagggaatccgatgcttcaatggatagtgacgcctcaatggatagcgagcccactccccacctgaaaacccgccaaaggcgaaagatccatagtggatcggtaaccgccttgcatgtcttacctgagctgctggtgaccgcatccaaggatcgggacgtgaagctctgggagaggccttccatgcagctgctgggcctgttccggtgtgaagggtccgtgtcgtgtctggagccctggcttggggccaattcaaccctacaactcgccgtcggggatgttcaaggcaacgtttattttcttaactgggaatag

SEQ ID NO: 281498 - DNA, 7884 bp, Artificial Sequence
  derived and/or modified sequence
atggagaagctccatgggcacgtctcggcacatccggacatcctctctctggagaacagatgcctggcaatgctgcctgacctgcagccactcgagaagttgcaccaacatgtgagcacccactccgatattttgagccttaagaatcagtgtttagccacactgcctgatttgaagaccatggaaaaaccacacggctatgtaagtgctcaccctgacattctctccctcgaaaaccagtgcctggctaccctttcagacctgaagacaatggaaaagcctcacggtcacgtctcagctcatccagatatacttagcctggagaacagatgcttagcgactctgagcagtctcaaaagcacagtgtctgccagtccgttattccaatctctccagatctctcatatgacacaggcggacctgtatcgcgtgaataattccaattgcctgctgtctgaaccgccatcttggcgagctcagcattttagcaaagggctggatttgagtacctgtccaattgctctcaagtccatctccgccactgaaacagcccaggaggcaacgctggggagatggttcgattctgaggaaaagaagggagctgaaacacagatgccttcatattcattatcattaggggaggaagaggaggttgaggatttggccgtaaaacttactagcggggacagcgaatctcacccagaacccaccgaccacgtgcttcaggagaaaaagatggcacttctttccctgctctgcagtacactggtgtccgaagtgaatatgaacaacaccagtgaccctactctggctgctatatttgagatttgtcgggaacttgctttgctggaacccgagttcatcctgaaggctagtctgtacgcaagacagcagcttaacgtcagaaacgtggcaaataatattttagctatcgctgccttcctgccggcttgtcggcctcaccttaggcggtatttctgcgccatagtgcagctccccagcgactggatccaggtggctgagctgtatcaatctttggctgaaggggacaagaataagcttgtacccctgccagcctgcttgcgtaccgcaatgactgacaagttcgctcagtttgatgagtaccagctagccaaatacaaccctaggaagcacagggcaaagaggcaccccagacgcccaccacggtcccctggtatggagccacctttttcacataggtgtttccccaggtatattggcttccttagagaagaacagcggaagttcgaaaaggcaggggacacagtgtccgagaagaagaacccacctagatttacactgaagaaattagtgcagagacttcatatccataaaccagcccaacatgtgcaggccctgttggggtaccggtacccatccaacctgcagctcttttcacggagccgactgccgggaccatgggattcatcccgagctggtaaacggatgaaactgtcaagacctgagacttgggagagggaattaagtctgcgaggcaataaggcctctgtgtgggaagagttaatcgagaatgggaagctacccttcatggctatgttacgcaacctgtgcaatttgctccgggtgggaattagctcacgccaccatgagctgatcttgcaaaggttacagcacgctaaatcagtgatacacagccggcagtttccattcagattcttgaacgcacacgacgcaatcgatgccctcgaggcccaactgcgcaatcaggccctgccatttccttctaatatcactctgatgcgaagaattttgacccgtaatgagaaaaacaggcccagacgacgctttctgtgccacctgagtaggcaacagctgaggatggccatgaggataccagtgctatacgaacaactgaaacgagagaagctacgcgtgcataaggcgaggcagtggaagtatgacggcgagatgctgaatagatataggcaagcactggagacggctgtgaacctgagtgtgaaacactccttaccactgcttccgggacgaactgttttggtctaccttacagacgccaatgccgatagattgtgccctaagtctaatcctcaagggcctccactcaactatgctttactcctgattggcatgatgatcactcgcgctgaacaggtggatgtcgttttgtgcgggggagatacgctgaaaacagctgtcctgaaagctgaagaagggattctgaagaccgctattaagctgcaggctcaagttcaagagttcgatgagaacgatggctggagcctcaatacatttgggaaatacctgctgtcactcgccggtcagcgtgtgccggtggaccgggtcatcctcctgggacagtccatggacgatggtatgatcaacgtcgctaaacagttgtactggcaaagggtaaacagtaagtgcctatttgtaggtatcctactgcgcagagtacagtacctcagcactgacttgaatcctaatgatgtaactctctccggatgtaccgacgctattctgaagttcatcgcagagcatggtgcgtctcatctcttggagcacgtcggtcagatggacaagatcttcaagattccacctcctcctggcaaaaccggcgtgcagagtcttcggccacttgaagaagacactccgtcccctctggccccagtcagtcagcagggatggagatcaatacgtctgttcatttctagcacgtttcgcgatatgcatggtgagagagatctgcttctgcgttccgtgctgccagcattacaggccagggccgctccccatagaatcagtttgcacggtatagacctccggtggggagtgacggaagaagagacccggaggaacagacagctagaggtttgtttaggcgaagtggagaacgcccagttgtttgtgggaattctgggatctcgatatggatacatacctccctcttacaaccttcctgaccaccctcattttcactgggcccaacagtacccaagcgggcgtagtgtgaccgaaatggaagttatgcagtttctcaaccgcaaccagagactccaaccatctgcgcaggctctcatttacttcagggatagcagctttcttagctccgttccagacgcctggaaaagtgactttgtgtccgagtcagaagaagcagccagacgtatctcagagctgaagtcctatctaagtcgacagaaggggataacttgtaggagatacccttgtgagtggggcggagtggccgcaggcagaccctatgttggaggattggaggagttcggacaactcgtactacaggacgtgtggaacatgattcaaaaactatatttacaaccgggagccctccttgagcagccagttagcatccctgacgacgacctcgtgcaggctacattccagcaactgcaaaaaccgcctagtccggctcgccctcgcttgctccaggatactgtgcaaagactaatgctccctcacggacgcctttcgctggtgacaggccaatctggacagggaaaaacagcattcctggcatctttggtgtccgccctgcaggcacccgacggagccaaagtagcctccctggtcttttttcatttctctggtgccagacccgaccaaggtctggctctgactcttctgcggcgactctgtacatatttgagaggacaattgaaggagcccggagccctgccatcaacttacaggagcctggtctgggagttgcaacagcgcttgttgcctaaatccgccgaatccctccaccccggacagactcaggtgttgataattgatggggctgatcgattggtcgaccagaacggacaactgatctccgactggatacccaaaaaattgcccaggtgcgtgcatctcgtgctgagtgttagctctgatgcaggactgggagagacactcgagcagtcccagggggctcacgtgcttgcacttggcccactggaggcttctgcccgtgcaagactggttcgggaggaactggctctctacgggaagcgactggaagagagcccttttaataaccagatgcggttattgctggtcaagcgggaaagtggacgtcctttatatcttaggctggttactgatcacctaaggttattcactctgtacgagcaggtttccgaacgtctgagaacccttcctgccacggttcctctgctgctgcaacacatcttgtccactctggaaaaagaacacgggcctgatgtgctgccgcaggctctgaccgcgctggaggtcaccaggagtggtttgactgtggatcagctgcacggcgtgctgtcagtttggagaaccctccccaagggtactaagagttgggaagaggcagttgcagccggaaacagcggagacccttaccccatgggcccatttgcttgtctcgtacagagcctccgcagtctcctgggtgagggtccccttgaacgaccaggcgctcgtctatgcttgccagacggcccactcaggactgcggcaaagagatgttacggcaaaagaccgggacttgaggacacagctcacatcctcattgctgcccaactgtggaagacgtgtgacgcagatgcttcagggactttccgctcctgtcctcctgaggcacttggtgatctaccctaccacctgctccagtctggcaaccgcggtttgctcagcaaatttcttaccaacttgcacgttgtcgcggctcacctcgaactcggactcgtcagtcgcttgctggaggcccatgcactctatgcaagttccgttccaaaggaggagcagaaactgccagaagcggacgtcgcagtgttcagaacgtttctgcgccagcaggccagtatcctcagccagtaccctcggctgttgccacagcaggccgctaaccagccgttagactccccgctgtgccaccaagcctcattgcttagtagacgatggcacttgcagcataccctgcggtggcttaataaacccaggactatgaaaaaccagcagtcctcctccttatctcttgccgtgagcagttcacccactgcagtggctttttctacaaacggccagagggctgcggtcgggactgccaacggcacagtatacctgttggacctgcgcacttggcaagaagagaagagtgtagtgagcggctgtgacgggatttccgcgtgccttttcctttctgacgataccttgtttttaaccgcattcgatgggctgctggagctgtgggatctgcaacacgggtgccgggttctgcagacaaaggctcaccagtatcagattacagggtgctgtctgtccccagactgtagactgctggccacagtgtgccttggagggtgtcttaagctgtgggatactgttagaggccaactggccttccagcatacttaccccaagtcacttaattgcgttgcattccaccccgagggccaggttatagccaccggttcgtgggccggttccatatcttttttccaggtcgatggattaaaagtgacgaaggaccttggcgcaccgggtgcctcaatacgcaccctggccttcaacgtgcctggcggagtggtggcagtgggacggctggatagcatggttgagctatgggcctggcgggaaggggcaaggcttgctgcgtttcctgcacatcacggctttgtggccgcagccttgtttcttcacgcaggatgccaactgctaactgcgggagaagacgggaaggtccaagtgtggtctgggagcctgggacggcctcgaggccacctgggctcactttcgctgtctcctgccctgtctgtggcccttagtcccgacggcgatcgcgtggccgtggggtatagagctgatggcattcgcatttacaagatttcttccggttcccaaggggcacagggacaagcgctggacgtggcagtctctgctctagcttggctgtccccaaaggtcctagtgtccggcgctgaggatgggtctctacagggatgggctctgaaggaatgctctctgcagagcctctggctgctgagccgtttccaaaaacccgtgcttggtcttgcgaccagccaggagctgctggccagtgcttccgaggatttcactgtgcagctctggcctcggcagctgctcaccagacctcacaaggcggaggacttcccctgtgggacagagctccgcggacacgagggaccagtgtcctgctgctccttctctaccgatggaggatccttggcaactgggggtagagaccgatcactcctttgttgggacgtgaggacccccaagactccagtactcatacactcatttcctgcctgtcaccgggactgggtcacagggtgtgcctggaccaaggacaatctgctgatttcctgcagttcagatggaagcgttgggctgtgggatcctgaatccggccagagactaggccagtttttgggccaccagagcgcggtttccgcagtcgctgcagtggaggagcatgtggtatctgtgtcaagggacggcactctgaaggtttgggatcatcagggtgtggagctcacttccatcccagcacactccggccctatcagccattgcgcagcggctatggaaccacgggcagcgggacaaccaggctcggaactgctggtcgtgactgttggtctggacggagccacacgcctctggcatcctctcctagtatgccagacccacaccctgcttggacactccgggcctgttcgcgctgcggcagtctccgaaacaagcggcctcatgctgacagcttccgaagacggctcagtgcgactgtggcaggttcctaaggaggcggatgatacgtgcatacccagaagcagcgctgcggtgactgctgtagcttgggcaccggacggttctatggccgtgagtgggaaccaggccggagagctgatactctggcaggaggcgaaggcggtggccacagcacaggcccctgggcatattggagcactgatttggagtagtgcccacaccttcttcgttctgagcgccgacgagaagatctcagagtggcaagtcaagctgcgaaagggctcagctccaggaaacctgtcactccacttaaatagaattctccaagaagacctgggggtgctgacttccctcgattgggcgccagatggccacttcctgatactcgctaaggcagacctcaagctgctttgcatgaagcctggggacgccccaagcgaaatttggtcatcctatacggaaaaccccatgatcctttcaactcacaaggagtatgggatcttcgtgttgcaacctaaggaccccggagttctaagctttctgcgacagaaggaaagcggagagtttgaagaacggttaaacttcgacattaatttggagaacccctcaaggacgctcatctccattactcaggccaagccggaatctgagagcagtttcctgtgcgcatccagcgatggaatactgtggaatctcgcaaaatgttcccccgagggcgagtggacaacagggaatatgtggcagaagaaggcaaacactcccgaaacacagacccctggaacagatcccagcacctgtcgagagtccgatgccagcatggacagcgatgcgagcatggacagcgaacccactccccatctgaagactcgccagagaagaaagatacattccggcagtgtcactgccctgcatgtcctgccagagctgttggtgacagcttccaaagacagggatgtaaaactgtgggagagaccatctatgcagctcttgggcctgttccggtgtgaaggctccgtgtcctgtctggagccctggctgggagcgaacagtacactacagctggcggtaggcgatgttcagggcaacgtctactttctcaactgggaataa

SEQ ID NO: 281499 - DNA, 7859 bp, Artificial Sequence
  derived and/or modified sequence
atggaaaagctccacggacacgtcagtgctcaccctgacattctcagtctcgagaaccgatgtctggccatgctgcccgatctccaaccacttgagaaattgcaccaacacgtgagcactcattccgacatcctttctcttaaaaaccagtgcctggcaacactaccggatctcaagactatggagaagccccatggatacgtatccgcccaccccgacattctgagccttgagaatcagtgtctggccactttatctgatttgaaaacgatggagaaaccccatggacacgtgagcgcacatcccgacatcctgtctctggagaaccggtgcctcgctacgctgagttctctgaagagcaccgtgagcgcaagtccgctgttccagagcctacagatcagccacatgacacaggctgacctctacagagtcaataacagcaactgccttttatcagagccccctagctggagagcacaacacttcagtaagggcctggacctgagcacttgcccaatcgcactcaaaagcattagtgctactgagacagcccaagaggcgactctcggcagatggttcgatagcgaagagaaaaaaggtgccgagacccagatgccatcatacagtttaagtctgggcgaagaagaagaggtagaagacctggcagtgaaactgacatctggggattctgagtcccatcctgagccaaccgaccatgtgcttcaggagaagaagatggccctgctgagcctgctgtgttctaccttggtctcagaggtgaacatgaataatacatcagatccaacccttgccgctatcttcgaaatatgtcgggagcttgccctgttagagccagagtttattctgaaggcctctctgtatgccaggcagcaactgaacgtaagaaacgtggcgaataatatcctggctatcgccgcattcttacccgcatgccgcccacatcttaggagatacttttgcgccatcgtgcagttgccttccgactggatacaggtggctgagctgtaccagtccttagctgagggggacaaaaataagctggtgccactacctgcgtgcctgaggaccgctatgactgacaaattcgcacagttcgacgaatatcagttggctaaatacaatccacgcaagcaccgagcaaagcgtcaccctcgtcggcctccacggtcccccggaatggaaccaccattttctcaccgttgcttcccgagatacatcggattcctgcgtgaagagcagagaaagttcgagaaagccggtgatacagtaagcgagaagaagaaccctccgaggtttacattaaagaaacttgtccagcgactgcacatccataaaccagcacaacatgtccaggccctgcttggatatcggtacccttcgaacctccagctgttctccagaagtcggctgccgggtccctgggattcaagccgcgcaggcaaacgtatgaaactgagcaggccagaaacgtgggagcgcgaattaagcttgcgcggtaataaggcgtccgtgtgggaggaactcattgaaaacggaaagctcccgtttatggctatgctgaggaacttgtgcaaccttctgagagtcggtatttctagccgacatcacgagctaattctgcagcggttacaacatgcgaagagcgtgattcatagccgtcagttccccttccgatttctcaatgctcacgatgccatcgatgcgttggaggcacagctgaggaaccaggcactgccatttccttccaatataactctgatgagacggatcttgacacgcaacgaaaaaaatagacccaggaggaggtttttatgccatctgtctcgccaacagctgcggatggcaatgagaattcctgtgctgtacgagcaactcaagcgcgagaaacttagagttcacaaagctcggcagtggaagtacgatggcgagatgcttaatagataccgccaggctctagagactgctgtcaacttgtctgtgaaacacagcctccctcttctgccgggtcgcacagtcctcgtgtacctgactgacgcgaatgccgaccgattgtgccctaaatcaaacccgcagggcccaccgcttaactacgctttactcctgattgggatgatgattaccagggctgaacaggttgacgtggtgctgtgcgggggagacacactgaaaaccgcagtgttgaaggccgaagaaggaattctgaaaacggccatcaaattacaagcccaggtccaggaatttgacgagaatgacggatggagcttgaatacctttgggaagtacctactgagcctagccggacagcgcgtcccggttgaccgcgtcatcctgttagggcagagtatggatgatggaatgatcaacgtcgctaaacagctctactggcagcgcgtcaacagtaaatgtctgtttgtgggcatcctgctgcgcagagtgcagtaccttagcactgatttgaacccgaatgatgtgactttatcaggctgcactgacgccatcctcaaatttatcgcggaacatggggcaagccaccttctggagcacgttggtcagatggataaaatctttaagattccaccccctcctggaaagaccggcgtccagtccctgaggcccctggaagaggataccccttctccactcgctccagtctcacagcagggatggcggtcgattcgattattcatctcatccaccttcagagatatgcacggggaaagagacctgctactccgatcggtgctgcccgcactacaggccagagccgctcctcacagaatatccctgcacggcatcgatttgaggtggggggtgaccgaagaagagacaaggcgcaacaggcagctcgaagtgtgcctgggggaagtggagaacgcccaactctttgtcggcatcctgggcagccgttacgggtacattccaccctcttataacctcccagatcatccacactttcactgggctcagcagtatccttcaggaagaagcgtgacagaaatggaggtaatgcaattcctgaatcgtaatcagagactgcaaccctcagcgcaggctctgatctatttccgggacagctccttcttatcttccgtgcccgacgcttggaagtcggactttgtaagtgagagcgaagaggccgcacggagaataagcgagttaaaatcctatctctctcggcagaaagggatcacctgtcggcgatacccttgtgaatggggcggagtggccgctggacgtccctatgtggggggacttgaagagttcggtcaactggtcctgcaggacgtgtggaacatgatacagaagctgtacttgcagccgggagcgctgcttgagcagccggtgtctatacccgacgacgatcttgttcaggctaccttccagcagctacagaagcctccgagtcccgcacggcctcgcttgctccaagataccgtgcagaggctaatgttgccccatggcaggctgagcctggtcacaggccaatctggccagggaaagactgctttcctggcatcgctggtcagcgcgcttcaggctccggacggcgcaaaagtcgccagtttagtgttctttcatttcagcggcgcacgcccagatcaaggcctcgcgctaacactgctgagaagactatgcacttacctccgcggtcagctaaaagaaccaggcgctttgccaagtacttatcgctcccttgtgtgggagctgcagcagaggctgctgccaaaatcagctgaatcccttcaccctggtcagactcaggtgttgatcattgatggagccgaccgactggttgaccaaaacggacagttaatctcagattggattcccaagaaactgcccagatgtgtgcacctagtcctctcagtctcttctgacgcagggctcggggaaaccctggagcagagccagggcgctcatgttctagccctgggccctctcgaggcctcagctagagcaagactggttcgtgaagagctcgctctgtacggcaaacgtcttgaagaaagccctttcaataaccagatgcggctgctcctggtgaagagggagtctggtcgccctttatatctcaggctggtgactgatcatctcaggctgtttactttgtacgaacaggtgagcgaacgtctgcggacacttcccgcaactgtgccactactcttacaacatatccttagcacactggaaaaggagcacgggcctgacgtacttccccaggctctgacagccctggaggtgactcggtccggtttaaccgtggatcagctgcacggagtgctcagcgtttggcgcaccttacccaaaggcactaaaagctgggaggaggccgtggccgctgggaattcaggggacccttatccgatggggcctttcgcctgcttagtccagtccctgcgatcgctattgggtgagggccctcttgagagacccggagctcgtctttgcctccctgacggccctctaaggacggcagctaaacgatgctacgggaaacggccaggcctggaggataccgcccacattcttatagccgctcagctctggaaaacttgcgacgccgatgcatcaggtacgtttaggagctgcccacccgaggctcttggcgacttgccataccacctgctccagagcggaaaccgcggattactgagcaagtttctgaccaacctgcacgtggtagccgctcacctcgagctcggactggttagcaggctgctcgaagcccacgccctctacgcatcctctgtccccaaggaggaacagaagttgcccgaggccgatgtggccgtttttcggacattccttcgccagcaggcctccatcctgagccagtatcccaggctcctccctcaacaggccgctaaccaaccactggactcacccctgtgccaccaagcctccctcctgtccagacggtggcacctccagcacacattgcgatggctgaacaagcccaggacgatgaagaaccaacagagttccagtctgagtctggcagtgtccagttcccccacagccgtggcattttctactaacgggcaacgtgccgctgtggggaccgctaacggcacagtgtatctcctcgatctgaggacttggcaggaagaaaaaagtgtggtctcaggctgcgatggcatctcagcctgcctctttttaagcgacgatactcttttcctgacagccttcgacggtctgttggagctctgggatcttcagcacgggtgcagagtcttgcagaccaaggcccaccagtaccagatcaccgggtgctgcttgtcgccggattgtcggctgcttgctactgtgtgccttggtggctgcctgaaactgtgggatacagtccgaggccagctggccttccaacacacctatccaaagagcctcaattgtgtggccttccacccagagggccaagttattgctaccggctcctgggctggctccatctcattttttcaagttgatggactcaaggtaaccaaagacctgggggctcccggagcatccatccgtaccctggcatttaacgtgcccggaggagtagtggcagtgggccgtctcgacagtatggtggaattgtgggcgtggcgagagggcgctcggcttgccgcatttcccgctcatcatggattcgtggcagcagccctctttctccatgctggctgtcagttgctgacagcaggagaagatggcaaagtccaggtttggtcgggatctcttgggagacccaggggccatctgggatccctgagcctttctccagcgctgtccgtagccctcagccccgatggcgacagggtcgcagtcgggtacagggctgatggcatccgcatctacaagatttcatctgggagccagggcgcacaggggcaagccctggatgtggctgtcagcgcattggcttggctctcccccaaagtcctcgttagcggggcagaggacggctccctgcaaggatgggctctcaaagaatgctcgctccaatctttgtggctactgtccagatttcagaaacccgtgttagggcttgccaccagtcaggaattgttagcgtcagcctctgaggactttacagtgcaactgtggcccaggcaactgctgacaagacctcataaagcagaagacttcccctgtgggaccgaacttcgcggtcacgaaggaccggtaagctgttgctccttctctacagatggtggctcgcttgcaacggggggtcgagaccggtctctgctgtgctgggacgtgcggacccctaagacgcccgttctaattcactcatttcctgcttgccaccgggactgggttaccggatgtgcgtggaccaaggataacctgctgatcagttgttcctccgacggctcagtgggcttgtgggaccccgagtctggtcagaggctgggtcagtttctggggcaccaaagtgcagtctctgctgtggccgcagttgaagagcatgtggttagcgtgagcagagatgggacgctgaaagtctgggatcatcagggagtagagcttacctccatccccgctcatagcggaccaatttcccattgcgctgctgctatggaaccacgagctgctgggcagcctggaagcgagctgctcgtcgttacagtgggcttggatggggctactaggctgtggcaccccctgttggtttgccagacccatactctgctgggacattccggcccagttcgggctgccgctgtgagcgagactagtggcctgatgctaaccgcgtctgaggacggttcggtgagactgtggcaggtgcctaaggaagcagacgacacttgcatccccaggtctagtgcggcagtgacggcagttgcatgggctcccgatggatctatggcggtgtctggcaaccaggcaggcgaactgattctgtggcaggaagccaaggcagtggctaccgctcaggccccaggtcacattggagcactgatctggagctcagcacacacctttttcgtgctcagtgctgatgagaaaatctccgagtggcaggttaaacttaggaaaggcagtgcccctggaaatctcagcctgcatctgaaccgaatcctgcaggaggatcttggggtcttgacaagcttggattgggctccagacggccattttctcattcttgccaaggccgatctgaagctattatgtatgaagcctggtgacgcccctagcgagatatggagctcctacactgagaaccctatgatcttgagtacgcataaagagtatggtatattcgtgttgcagcctaaagaccctggggttctttcgttcttacgccagaaggagagcggggagttcgaagaacgccttaactttgacataaatctggaaaacccttcgaggactctgattagcatcactcaggccaagcccgaatccgcgctgatgggaagctacggtacatggccaaatgccgcacagaaggagaacgggcctcaggtcacctgcgggagaaaaaagaatacccccgagacccagacacctggtactgacccctctacctgcagagaatcagacgctagtatggattctgacgccagtatggacagtgagcccaccccccacctgaaaacccgtcagcgtcggaaaatacatagtggatcagtcactgccctgcacgtccttcccgaattgctcgtgaccgcatctaaggacagggacgtcaagctatgggaacggccatcaatgcagctgttaggactttttaggtgtgaggggagcgtgtcttgcctcgagccttggctgggggctaatagtaccctgcaacttgccgtcggagacgttcagggaaacgtgtacttcttgaattgggagta

SEQ ID NO: 281500 - DNA, 10695 bp, Artificial Sequence
  derived and/or modified sequence
ggaatcggacgccccaggcatatacaagctgagtttcagccatggaaaaactccatgggcatgtgtctgcccatccagacatcctctccttggagaaccggtgcctggctatgctccctgacttacagcccttggagaaactacatcagcatgtatctacccactcagatatcctctccttgaagaaccagtgcctagccacgcttcctgacctgaagaccatggaaaaaccacatggatatgtgtctgcccacccagacatcctctccttggagaaccagtgcctggccacactttctgacctgaagaccatggagaaaccacatggacatgtttctgcccacccagacatcctctccttggagaaccggtgcctggccaccctctctagtctaaagagcactgtgtctgccagccccttgttccagagtctacagatatctcacatgacgcaagctgatttgtaccgtgtgaacaacagcaattgcctgctctctgagcctccaagttggagggctcagcatttctctaagggactagacctttcaacctgccctatagccctgaaatccatctctgccacagagacagctcaggaagcaactttgggtcgttggtttgattcagaagagaagaaaggggcagagacccaaatgccttcttatagtctgagcttgggagaggaggaggaggtggaggatctggccgtgaagctcacctctggagactctgaatctcatccagagcctactgaccatgtccttcaggaaaagaagatggctctactgagcttgctgtgctctactctggtctcagaagtaaacatgaacaatacatctgaccccaccctggctgccatttttgaaatctgtcgtgaacttgccctcctggagcctgagtttatcctcaaggcatctttgtatgccaggcagcagctgaacgtccggaatgtggccaataacatcttggccattgctgctttcttgccggcgtgtcgcccccacctgcgacgatatttctgtgccattgtccagctgccttctgactggatccaggtggctgagctttaccagagcctggctgagggagataagaataagctggtgcccctgcccgcctgtctccgtactgccatgacggacaaatttgcccagtttgacgagtaccagctggctaagtacaaccctcggaagcaccgggccaagagacacccccgccggccaccccgctctccagggatggagcctccattttctcacagatgttttccaaggtacatagggtttctcagagaagagcagagaaagtttgagaaggccggtgatacagtgtcagagaaaaagaatcctccaaggttcaccctgaagaagctggttcagcgactgcacatccacaagcctgcccagcacgttcaagccctgctgggttacagatacccctccaacctacagctcttttctcgaagtcgccttcctgggccttgggattctagcagagctgggaagaggatgaagctgtctaggccagagacctgggagcgggagctgagcctacgggggaacaaagcgtcggtctgggaggaactcattgaaaatgggaagcttcccttcatggccatgcttcggaacctgtgcaacctgctgcgggttggaatcagttcccgccaccatgagctcattctccagagactccagcatgcgaagtcggtgatccacagtcggcagtttccattcagatttcttaacgcccatgatgccattgatgccctcgaggctcaactcagaaatcaagcattgccctttccttcgaatataacactgatgaggcggatactaactagaaatgaaaagaaccgtcccaggcggaggtttctttgccacctaagccgtcagcagcttcggatggcaatgaggatacctgtgttgtatgagcagctcaagagggagaagctgagagtacacaaggccagacagtggaaatatgatggtgagatgctgaacaggtaccgacaggccctagagacagctgtgaacctctctgtgaagcacagcctgcccctgctgccaggccgcactgtcttggtctatctgacagatgctaatgcagacaggctctgtccaaagagcaacccacaagggcccccgctgaactatgcactgctgttgattgggatgatgatcacgagggcggagcaggtggacgtcgtgctgtgtggaggtgacactctgaagactgcagtgcttaaggcagaagaaggcatcctgaagactgccatcaagctccaggctcaagtccaggagtttgatgaaaatgatggatggtccctgaatacttttgggaaatacctgctgtctctggctggccaaagggttcctgtggacagggtcatcctccttggccaaagcatggatgatggaatgataaatgtggccaaacagctttactggcagcgtgtgaattccaagtgcctctttgttggtatcctcctaagaagggtacaatacctgtcaacagatttgaatcccaatgatgtgacactctcaggctgtactgatgcgatactgaagttcattgcagagcatggggcctcccatcttctggaacatgtgggccaaatggacaaaatattcaagattccaccacccccaggaaagacaggggtccagtctctccggccactggaagaggacactccaagccccttggctcctgtttcccagcaaggatggcgcagcatccggcttttcatttcatccactttccgagacatgcatggggagcgggacctgctgctgaggtctgtgctgccagcactgcaggcccgagcggcccctcaccgtatcagccttcacggaatcgacctccgctggggcgtcactgaggaggagacccgtaggaacagacaactggaagtgtgccttggggaggtggagaacgcacagctgtttgtggggattctgggctcccgttatggatacattccccccagctacaaccttcctgaccatccacacttccactgggcccagcagtacccttcagggcgctctgtgacagagatggaggtgatgcagttcctgaaccggaaccaacgtctgcagccctctgcccaagctctcatctacttccgggattccagcttcctcagctctgtgccagatgcctggaaatctgactttgtttctgagtctgaagaggccgcacgtcggatctcagaactgaagagctacctaagcagacagaaagggatcacctgccgcagatacccctgtgagtgggggggtgtggcagctggccggccctatgttggcgggctggaggagtttgggcagttggttctgcaggatgtatggaatatgatccagaagctctacctgcagcctggggccctgctggagcagccagtgtccatcccagacgatgacttggtccaggccaccttccagcagctgcagaagccaccgagtcctgcccggccacgccttcttcaggacacagtgcaacggctgatgctgccccacggaaggctgagcctggtgacggggcagtcaggacagggcaagacagccttcctggcatctcttgtgtcagccctgcaggctcctgatggggccaaggtggcatcattagtcttcttccacttttctggggctcgtcctgaccagggtcttgccctcactctgctcagacgcctctgtacctatctgcgtggccaactaaaagagccaggtgccctccccagcacctaccgaagcctggtgtgggagctgcagcagaggctgctgcccaagtctgctgagtccctgcatcctggccagacccaggtcctgatcatcgatggggctgataggttagtggaccagaatgggcagctgatttcagactggatcccaaagaagcttccccggtgtgtacacctggtgctgagtgtgtctagtgatgcaggcctaggggagacccttgagcagagccagggtgcccacgtgctggccttggggcctctggaggcctctgctcgggcccggctggtgagagaggagctggccctgtacgggaagcggctggaggagtcaccatttaacaaccagatgcgactgctgctggtgaagcgggaatcaggccggccgctctacctgcgcttggtcaccgatcacctgaggctcttcacgctgtatgagcaggtgtctgagagactccggaccctgcctgccactgtccccctgctgctgcagcacatcctgagcacactggagaaggagcacgggcctgatgtccttccccaggccttgactgccctagaagtcacacggagtggtttgactgtggaccagctgcacggagtgctgagtgtgtggcggacactaccgaaggggactaagagctgggaagaagcagtggctgctggtaacagtggagacccctaccccatgggcccgtttgcctgcctcgtccagagtctgcgcagtttgctaggggagggccctctggagcgccctggtgcccggctgtgcctccctgatgggcccctgagaacagcagctaaacgttgctatgggaagaggccagggctagaggacacggcacacatcctcattgcagctcagctctggaagacatgtgacgctgatgcctcaggcaccttccgaagttgccctcctgaggctctgggagacctgccttaccacctgctccagagcgggaaccgtggacttctttcgaagttccttaccaacctccatgtggtggctgcacacttggaattgggtctggtctctcggctcttggaggcccatgccctctatgcttcttcagtccccaaagaggaacaaaagctccccgaggctgacgttgcagtgtttcgcaccttcctgaggcagcaggcttcaatcctcagccagtacccccggctcctgccccagcaggcagccaaccagcccctggactcacctctttgccaccaagcctcgctgctctcccggagatggcacctccaacacacactacgatggcttaataaaccccggaccatgaaaaatcagcaaagctccagcctgtctctggcagtttcctcatcccctactgctgtggccttctccaccaatgggcaaagagcagctgtgggcactgccaatgggacagtttacctgttggacctgagaacttggcaggaggagaagtctgtggtgagtggctgtgatggaatctctgcttgtttgttcctctccgatgatacactctttcttactgccttcgacgggctcctggagctctgggacctgcagcatggttgtcgggtgctgcagactaaggctcaccagtaccaaatcactggctgctgcctgagcccagactgccggctgctagccaccgtgtgcttgggaggatgcctaaagctgtgggacacagtccgtgggcagctggccttccagcacacctaccccaagtccctgaactgtgttgccttccacccagaggggcaggtaatagccacaggcagctgggctggcagcatcagcttcttccaggtggatgggctcaaagtcaccaaggacctgggggcacccggagcctctatccgtaccttggccttcaatgtgcctgggggggttgtggctgtgggccggctggacagtatggtggagctgtgggcctggcgagaaggggcacggctggctgccttccctgcccaccatggctttgttgctgctgcgcttttcctgcatgcgggttgccagttactgacggctggagaggatggcaaggttcaggtgtggtcagggtctctgggtcggccccgtgggcacctgggttccctttctctctctcctgccctctctgtggcactcagcccagatggtgatcgggtggctgttggatatcgagcggatggcattaggatctacaaaatctcttcaggttcccagggggctcagggtcaggcactggatgtggcagtgtccgccctggcctggctaagccccaaggtattggtgagtggtgcagaagatgggtccttgcagggctgggcactcaaggaatgctcccttcagtccctctggctcctgtccagattccagaagcctgtgctaggactggccacttcccaggagctcttggcttctgcctcagaggatttcacagtgcagctgtggccaaggcagctgctgacgcggccacacaaggcagaagactttccctgtggcactgagctgcggggacatgagggccctgtgagctgctgtagtttcagcactgatggaggcagcctggccaccgggggccgggatcggagtctcctctgctgggacgtgaggacacccaaaacccctgttttgatccactccttccctgcctgtcaccgtgactgggtcactggctgtgcctggaccaaagataacctactgatatcctgctccagtgatggctctgtggggctctgggacccagagtcaggacagcggcttggtcagttcctgggtcatcagagtgctgtgagcgctgtggcagctgtggaggagcacgtggtgtctgtgagccgggatgggaccttgaaagtgtgggaccatcaaggcgtggagctgaccagcatccctgctcactcaggacccattagccactgtgcagctgccatggagccccgtgcagctggacagcctgggtcagagcttctggtggtaaccgtcgggctagatggggccacacggttatggcatccactcttggtgtgccaaacccacaccctcctgggacacagcggcccagtccgtgctgctgctgtttcagaaacctcaggcctcatgctgaccgcctctgaggatggttctgtacggctctggcaggttcctaaggaagcagatgacacatgtataccaaggagttctgcagccgtcactgctgtggcttgggcaccagatggttccatggcagtatctggaaatcaagctggggaactaatcttgtggcaggaagctaaggctgtggccacagcacaggctccaggccacattggtgctctgatctggtcctcggcacacaccttttttgtcctcagtgctgatgagaaaatcagcgagtggcaagtgaaactgcggaagggttcggcacccggaaatttgagtcttcacctgaaccgaattctacaggaggacttaggggtgctgacaagtctggattgggctcctgatggtcactttctcatcttggccaaagcagatttgaagttactttgcatgaagccaggggatgctccatctgaaatctggagcagctatacagaaaatcctatgatattgtccacccacaaggagtatggcatatttgtcctgcagcccaaggatcctggagttctttctttcttgaggcaaaaggaatcaggagagtttgaagagaggctgaactttgatataaacttagagaatcctagtaggaccctaatatcgataactcaagccaaacctgaatctgagtcctcatttttgtgtgccagctctgatgggatcctatggaacctggccaaatgcagcccagaaggagaatggaccacaggtaacatgtggcagaaaaaagcaaacactccagaaacccaaactccagggacagacccatctacctgcagggaatctgatgccagcatggatagtgatgccagcatggatagtgagccaacaccacatctaaagacacggcagcgtagaaagattcactcgggctctgtcacagccctccatgtgctacctgagttgctggtgacagcttcgaaggacagagatgttaagctatgggagagacccagtatgcagctgctgggcctgttccgatgcgaagggtcagtgagctgcctggaaccttggctgggcgctaactccaccctgcagcttgccgtgggagacgtgcagggcaatgtgtactttctgaattgggaatgaagatgtgccactcgggaataatgataccccttgtgctagagatgcaaagcctgaagacactggtagcttttaataattataaaattaataatttcttgataattataaaaatgaagtgtcaaaaaatctcaagtgtaggcctgcctgtgttctcatgtggatttagaacaggaggatattctatgtgtatgtatatgtacattctaatgtgtgtctcttcttattcaacattaatccttactagaaccacaagaaagtgaatgaaatctttagtaggtactcttttgaaactaggttttagaattcttgcatcactcgcgggccctaggaccctaggatgccattcttgccaggaggaggaatgagagtgatgttggccaacattcaatttgaacagagcatggaagacctttcagttcatcgggaaagaatgagggagggagaataagtcagtcatgcatcagggcatttagaaagagctatgtttctgtcacagagacagcccttttctcagaactacccagaggaggccgggcatggtggctcacgcttgtaatcccagcactttgggaggccgaggtgggcagatcacgaggtcaggagatcaagaccatcctggctaacatagtgaaaccctgtctctactaaaaaatacaaaaagttagccaggtgtggcggcgggcacctgtagtcccagctacttgggaggctgaggcaggagaatggcgtgaacccaggaggcggagcttgcagtgagccgagacaccactgcactccagcctgggcaacagagcgagactctgtctaaaaaaaaaaaaaaagaactacccagatgagaggtgaggagccaagccattgaaagcggaacaaaccttctggttttcccaacttctgacacgactttcaactttagtcaatatggtaattggcattctcagaagagatcacgaaagtgtcttactctctctcaaattgaaattcacaaagattaaaactaattgagaggtggcacaatcatagccatgaactctgattttcttaagtaaaaaaccttttttttttttttttgtttttgagatagagtctggctctgtcacctaggctggagtgcaatggtgcaatctcagctcagtgcaacctctgcttcctgggttcaagcgattctcctgccttagcctcccgagtagctgggattacaggtgcccaccaccacgcccagctaatttttgtatttcagtagagacgaagtttcaccatgttggccaggtgggtctcaaactcctgacctcaggttatctgcacacctcagcctcttaaagttctgggattacaggcgtgagccattgtgcccggcccataaaagaactttattatatttctaaaattcaatcatatggaagaatctattgagcaggttagcctttgcttaactttcctcctctgttactccagccttagctggggtgttttgtagaattttcagagcatgggagacagacaactagagcttcctcctgcccttggcccatgcttttaggagagcaaaaggcaaaagattgaaaccactgactttagtttcctcaggccctttctttctgagggttaaagaagaaggaaatgtcttctgtggccaagaattcaaggacttgtaggagataagtgaaggctattacagggattttgtcctggtttggtaggtttctcttggagaaataccactacaccctggtctagaaatgagttttgaagacttggggagttaaagggcactgagttttactctcactgtaccctgattccaggttttacatggagaaataacctgagggactttatttctatccaatgccctggtttccatcctgaccagaggatgatgacatccgctgataggccatgcttctgtcttctcttatgtgcctcatgccaagcctcgaaatataccttctggaccatcatttccacatctaccttgtgactagaagtcctagttatggtattttgaaatttatgatccataatccttgccagaaatcctgcagcgaactatggcatggcatcatcctagtcattgatttcaatcttttgccttttgctcccctaaaatcttgggccaattgcaggaggaagctctatttgtctctcttccatgctctgaaaattatataaaagcatcccagctaaggctggagtgaaggggttggggaaagttaagcaaaggctaacttgaccaataggctcaatagattcagtcttgttggccaggcccacttgaagggttttttgtttcatcttggagaaggacagtgaggtcatggtataattgttatgagtaaagtcaagaacagcttctaggtaaaagtaattatgtacccaaaaggagttgaagggaaaatcaatttaggtttacattaaacatccttcaagttcttatctttaaatggagtttcagtgtctcccaaaggctggatgagttttacagttataaccactggattgtgagaccataggacatttgaacaatcttttcttctacccatctagaaaagcatcttttttatataccaaatttttacacatatatccacatctgtttttgaaatctagagcagaggtactcaaagtttggttcatggactagtgccagttcacaaattgttaatgttttataatgagataagtacggaagttgagagtaaccatttagaaactgtgtaggaatttaaaaagtaatatctgacaaatttaataataaaaatggaggcttgta

SEQ ID NO: 281501 - DNA, 10670 bp, Artificial Sequence
  derived and/or modified sequence
gaatcggacgccccaggcatatacaagctgagtttcagccatggaaaaactccatgggcatgtgtctgcccatccagacatcctctccttggagaaccggtgcctggctatgctccctgacttacagcccttggagaaactacatcagcatgtatctacccactcagatatcctctccttgaagaaccagtgcctagccacgcttcctgacctgaagaccatggaaaaaccacatggatatgtgtctgcccacccagacatcctctccttggagaaccagtgcctggccacactttctgacctgaagaccatggagaaaccacatggacatgtttctgcccacccagacatcctctccttggagaaccggtgcctggccaccctctctagtctaaagagcactgtgtctgccagccccttgttccagagtctacagatatctcacatgacgcaagctgatttgtaccgtgtgaacaacagcaattgcctgctctctgagcctccaagttggagggctcagcatttctctaagggactagacctttcaacctgccctatagccctgaaatccatctctgccacagagacagctcaggaagcaactttgggtcgttggtttgattcagaagagaagaaaggggcagagacccaaatgccttcttatagtctgagcttgggagaggaggaggaggtggaggatctggccgtgaagctcacctctggagactctgaatctcatccagagcctactgaccatgtccttcaggaaaagaagatggctctactgagcttgctgtgctctactctggtctcagaagtaaacatgaacaatacatctgaccccaccctggctgccatttttgaaatctgtcgtgaacttgccctcctggagcctgagtttatcctcaaggcatctttgtatgccaggcagcagctgaacgtccggaatgtggccaataacatcttggccattgctgctttcttgccggcgtgtcgcccccacctgcgacgatatttctgtgccattgtccagctgccttctgactggatccaggtggctgagctttaccagagcctggctgagggagataagaataagctggtgcccctgcccgcctgtctccgtactgccatgacggacaaatttgcccagtttgacgagtaccagctggctaagtacaaccctcggaagcaccgggccaagagacacccccgccggccaccccgctctccagggatggagcctccattttctcacagatgttttccaaggtacatagggtttctcagagaagagcagagaaagtttgagaaggccggtgatacagtgtcagagaaaaagaatcctccaaggttcaccctgaagaagctggttcagcgactgcacatccacaagcctgcccagcacgttcaagccctgctgggttacagatacccctccaacctacagctcttttctcgaagtcgccttcctgggccttgggattctagcagagctgggaagaggatgaagctgtctaggccagagacctgggagcgggagctgagcctacgggggaacaaagcgtcggtctgggaggaactcattgaaaatgggaagcttcccttcatggccatgcttcggaacctgtgcaacctgctgcgggttggaatcagttcccgccaccatgagctcattctccagagactccagcatgcgaagtcggtgatccacagtcggcagtttccattcagatttcttaacgcccatgatgccattgatgccctcgaggctcaactcagaaatcaagcattgccctttccttcgaatataacactgatgaggcggatactaactagaaatgaaaagaaccgtcccaggcggaggtttctttgccacctaagccgtcagcagcttcggatggcaatgaggatacctgtgttgtatgagcagctcaagagggagaagctgagagtacacaaggccagacagtggaaatatgatggtgagatgctgaacaggtaccgacaggccctagagacagctgtgaacctctctgtgaagcacagcctgcccctgctgccaggccgcactgtcttggtctatctgacagatgctaatgcagacaggctctgtccaaagagcaacccacaagggcccccgctgaactatgcactgctgttgattgggatgatgatcacgagggcggagcaggtggacgtcgtgctgtgtggaggtgacactctgaagactgcagtgcttaaggcagaagaaggcatcctgaagactgccatcaagctccaggctcaagtccaggagtttgatgaaaatgatggatggtccctgaatacttttgggaaatacctgctgtctctggctggccaaagggttcctgtggacagggtcatcctccttggccaaagcatggatgatggaatgataaatgtggccaaacagctttactggcagcgtgtgaattccaagtgcctctttgttggtatcctcctaagaagggtacaatacctgtcaacagatttgaatcccaatgatgtgacactctcaggctgtactgatgcgatactgaagttcattgcagagcatggggcctcccatcttctggaacatgtgggccaaatggacaaaatattcaagattccaccacccccaggaaagacaggggtccagtctctccggccactggaagaggacactccaagccccttggctcctgtttcccagcaaggatggcgcagcatccggcttttcatttcatccactttccgagacatgcatggggagcgggacctgctgctgaggtctgtgctgccagcactgcaggcccgagcggcccctcaccgtatcagccttcacggaatcgacctccgctggggcgtcactgaggaggagacccgtaggaacagacaactggaagtgtgccttggggaggtggagaacgcacagctgtttgtggggattctgggctcccgttatggatacattccccccagctacaaccttcctgaccatccacacttccactgggcccagcagtacccttcagggcgctctgtgacagagatggaggtgatgcagttcctgaaccggaaccaacgtctgcagccctctgcccaagctctcatctacttccgggattccagcttcctcagctctgtgccagatgcctggaaatctgactttgtttctgagtctgaagaggccgcacgtcggatctcagaactgaagagctacctaagcagacagaaagggatcacctgccgcagatacccctgtgagtgggggggtgtggcagctggccggccctatgttggcgggctggaggagtttgggcagttggttctgcaggatgtatggaatatgatccagaagctctacctgcagcctggggccctgctggagcagccagtgtccatcccagacgatgacttggtccaggccaccttccagcagctgcagaagccaccgagtcctgcccggccacgccttcttcaggacacagtgcaacggctgatgctgccccacggaaggctgagcctggtgacggggcagtcaggacagggcaagacagccttcctggcatctcttgtgtcagccctgcaggctcctgatggggccaaggtggcatcattagtcttcttccacttttctggggctcgtcctgaccagggtcttgccctcactctgctcagacgcctctgtacctatctgcgtggccaactaaaagagccaggtgccctccccagcacctaccgaagcctggtgtgggagctgcagcagaggctgctgcccaagtctgctgagtccctgcatcctggccagacccaggtcctgatcatcgatggggctgataggttagtggaccagaatgggcagctgatttcagactggatcccaaagaagcttccccggtgtgtacacctggtgctgagtgtgtctagtgatgcaggcctaggggagacccttgagcagagccagggtgcccacgtgctggccttggggcctctggaggcctctgctcgggcccggctggtgagagaggagctggccctgtacgggaagcggctggaggagtcaccatttaacaaccagatgcgactgctgctggtgaagcgggaatcaggccggccgctctacctgcgcttggtcaccgatcacctgaggctcttcacgctgtatgagcaggtgtctgagagactccggaccctgcctgccactgtccccctgctgctgcagcacatcctgagcacactggagaaggagcacgggcctgatgtccttccccaggccttgactgccctagaagtcacacggagtggtttgactgtggaccagctgcacggagtgctgagtgtgtggcggacactaccgaaggggactaagagctgggaagaagcagtggctgctggtaacagtggagacccctaccccatgggcccgtttgcctgcctcgtccagagtctgcgcagtttgctaggggagggccctctggagcgccctggtgcccggctgtgcctccctgatgggcccctgagaacagcagctaaacgttgctatgggaagaggccagggctagaggacacggcacacatcctcattgcagctcagctctggaagacatgtgacgctgatgcctcaggcaccttccgaagttgccctcctgaggctctgggagacctgccttaccacctgctccagagcgggaaccgtggacttctttcgaagttccttaccaacctccatgtggtggctgcacacttggaattgggtctggtctctcggctcttggaggcccatgccctctatgcttcttcagtccccaaagaggaacaaaagctccccgaggctgacgttgcagtgtttcgcaccttcctgaggcagcaggcttcaatcctcagccagtacccccggctcctgccccagcaggcagccaaccagcccctggactcacctctttgccaccaagcctcgctgctctcccggagatggcacctccaacacacactacgatggcttaataaaccccggaccatgaaaaatcagcaaagctccagcctgtctctggcagtttcctcatcccctactgctgtggccttctccaccaatgggcaaagagcagctgtgggcactgccaatgggacagtttacctgttggacctgagaacttggcaggaggagaagtctgtggtgagtggctgtgatggaatctctgcttgtttgttcctctccgatgatacactctttcttactgccttcgacgggctcctggagctctgggacctgcagcatggttgtcgggtgctgcagactaaggctcaccagtaccaaatcactggctgctgcctgagcccagactgccggctgctagccaccgtgtgcttgggaggatgcctaaagctgtgggacacagtccgtgggcagctggccttccagcacacctaccccaagtccctgaactgtgttgccttccacccagaggggcaggtaatagccacaggcagctgggctggcagcatcagcttcttccaggtggatgggctcaaagtcaccaaggacctgggggcacccggagcctctatccgtaccttggccttcaatgtgcctgggggggttgtggctgtgggccggctggacagtatggtggagctgtgggcctggcgagaaggggcacggctggctgccttccctgcccaccatggctttgttgctgctgcgcttttcctgcatgcgggttgccagttactgacggctggagaggatggcaaggttcaggtgtggtcagggtctctgggtcggccccgtgggcacctgggttccctttctctctctcctgccctctctgtggcactcagcccagatggtgatcgggtggctgttggatatcgagcggatggcattaggatctacaaaatctcttcaggttcccagggggctcagggtcaggcactggatgtggcagtgtccgccctggcctggctaagccccaaggtattggtgagtggtgcagaagatgggtccttgcagggctgggcactcaaggaatgctcccttcagtccctctggctcctgtccagattccagaagcctgtgctaggactggccacttcccaggagctcttggcttctgcctcagaggatttcacagtgcagctgtggccaaggcagctgctgacgcggccacacaaggcagaagactttccctgtggcactgagctgcggggacatgagggccctgtgagctgctgtagtttcagcactgatggaggcagcctggccaccgggggccgggatcggagtctcctctgctgggacgtgaggacacccaaaacccctgttttgatccactccttccctgcctgtcaccgtgactgggtcactggctgtgcctggaccaaagataacctactgatatcctgctccagtgatggctctgtggggctctgggacccagagtcaggacagcggcttggtcagttcctgggtcatcagagtgctgtgagcgctgtggcagctgtggaggagcacgtggtgtctgtgagccgggatgggaccttgaaagtgtgggaccatcaaggcgtggagctgaccagcatccctgctcactcaggacccattagccactgtgcagctgccatggagccccgtgcagctggacagcctgggtcagagcttctggtggtaaccgtcgggctagatggggccacacggttatggcatccactcttggtgtgccaaacccacaccctcctgggacacagcggcccagtccgtgctgctgctgtttcagaaacctcaggcctcatgctgaccgcctctgaggatggttctgtacggctctggcaggttcctaaggaagcagatgacacatgtataccaaggagttctgcagccgtcactgctgtggcttgggcaccagatggttccatggcagtatctggaaatcaagctggggaactaatcttgtggcaggaagctaaggctgtggccacagcacaggctccaggccacattggtgctctgatctggtcctcggcacacaccttttttgtcctcagtgctgatgagaaaatcagcgagtggcaagtgaaactgcggaagggttcggcacccggaaatttgagtcttcacctgaaccgaattctacaggaggacttaggggtgctgacaagtctggattgggctcctgatggtcactttctcatcttggccaaagcagatttgaagttactttgcatgaagccaggggatgctccatctgaaatctggagcagctatacagaaaatcctatgatattgtccacccacaaggagtatggcatatttgtcctgcagcccaaggatcctggagttctttctttcttgaggcaaaaggaatcaggagagtttgaagagaggctgaactttgatataaacttagagaatcctagtaggaccctaatatcgataactcaagccaaacctgaatctgctctgatgggatcctatggaacctggccaaatgcagcccagaaggagaatggaccacaggtaacatgtggcagaaaaaagaacactccagaaacccaaactccagggacagacccatctacctgcagggaatctgatgccagcatggatagtgatgccagcatggatagtgagccaacaccacatctaaagacacggcagcgtagaaagattcactcgggctctgtcacagccctccatgtgctacctgagttgctggtgacagcttcgaaggacagagatgttaagctatgggagagacccagtatgcagctgctgggcctgttccgatgcgaagggtcagtgagctgcctggaaccttggctgggcgctaactccaccctgcagcttgccgtgggagacgtgcagggcaatgtgtactttctgaattgggaatgaagatgtgccactcgggaataatgataccccttgtgctagagatgcaaagcctgaagacactggtagcttttaataattataaaattaataatttcttgataattataaaaatgaagtgtcaaaaaatctcaagtgtaggcctgcctgtgttctcatgtggatttagaacaggaggatattctatgtgtatgtatatgtacattctaatgtgtgtctcttcttattcaacattaatccttactagaaccacaagaaagtgaatgaaatctttagtaggtactcttttgaaactaggttttagaattcttgcatcactcgcgggccctaggaccctaggatgccattcttgccaggaggaggaatgagagtgatgttggccaacattcaatttgaacagagcatggaagacctttcagttcatcgggaaagaatgagggagggagaataagtcagtcatgcatcagggcatttagaaagagctatgtttctgtcacagagacagcccttttctcagaactacccagaggaggccgggcatggtggctcacgcttgtaatcccagcactttgggaggccgaggtgggcagatcacgaggtcaggagatcaagaccatcctggctaacatagtgaaaccctgtctctactaaaaaatacaaaaagttagccaggtgtggcggcgggcacctgtagtcccagctacttgggaggctgaggcaggagaatggcgtgaacccaggaggcggagcttgcagtgagccgagacaccactgcactccagcctgggcaacagagcgagactctgtctaaaaaaaaaaaaaaagaactacccagatgagaggtgaggagccaagccattgaaagcggaacaaaccttctggttttcccaacttctgacacgactttcaactttagtcaatatggtaattggcattctcagaagagatcacgaaagtgtcttactctctctcaaattgaaattcacaaagattaaaactaattgagaggtggcacaatcatagccatgaactctgattttcttaagtaaaaaaccttttttttttttttttgtttttgagatagagtctggctctgtcacctaggctggagtgcaatggtgcaatctcagctcagtgcaacctctgcttcctgggttcaagcgattctcctgccttagcctcccgagtagctgggattacaggtgcccaccaccacgcccagctaatttttgtatttcagtagagacgaagtttcaccatgttggccaggtgggtctcaaactcctgacctcaggttatctgcacacctcagcctcttaaagttctgggattacaggcgtgagccattgtgcccggcccataaaagaactttattatatttctaaaattcaatcatatggaagaatctattgagcaggttagcctttgcttaactttcctcctctgttactccagccttagctggggtgttttgtagaattttcagagcatgggagacagacaactagagcttcctcctgcccttggcccatgcttttaggagagcaaaaggcaaaagattgaaaccactgactttagtttcctcaggccctttctttctgagggttaaagaagaaggaaatgtcttctgtggccaagaattcaaggacttgtaggagataagtgaaggctattacagggattttgtcctggtttggtaggtttctcttggagaaataccactacaccctggtctagaaatgagttttgaagacttggggagttaaagggcactgagttttactctcactgtaccctgattccaggttttacatggagaaataacctgagggactttatttctatccaatgccctggtttccatcctgaccagaggatgatgacatccgctgataggccatgcttctgtcttctcttatgtgcctcatgccaagcctcgaaatataccttctggaccatcatttccacatctaccttgtgactagaagtcctagttatggtattttgaaatttatgatccataatccttgccagaaatcctgcagcgaactatggcatggcatcatcctagtcattgatttcaatcttttgccttttgctcccctaaaatcttgggccaattgcaggaggaagctctatttgtctctcttccatgctctgaaaattatataaaagcatcccagctaaggctggagtgaaggggttggggaaagttaagcaaaggctaacttgaccaataggctcaatagattcagtcttgttggccaggcccacttgaagggttttttgtttcatcttggagaaggacagtgaggtcatggtataattgttatgagtaaagtcaagaacagcttctaggtaaaagtaattatgtacccaaaaggagttgaagggaaaatcaatttaggtttacattaaacatccttcaagttcttatctttaaatggagtttcagtgtctcccaaaggctggatgagttttacagttataaccactggattgtgagaccataggacatttgaacaatcttttcttctacccatctagaaaagcatcttttttatataccaaatttttacacatatatccacatctgtttttgaaatctagagcagaggtactcaaagtttggttcatggactagtgccagttcacaaattgttaatgttttataatgagataagtacggaagttgagagtaaccatttagaaactgtgtaggaatttaaaaagtaatatctgacaaatttaataataaaaatggaggcttgta

SEQ ID NO: 281502 - protein, 764 aa, Artificial Sequence
  derived and/or modified sequence
MRPADLLQLVLLLDLPRDLGGMGCSSPPCECHQEEDFRVTCKDIQRIPSLPPSTQTLKLIETHLRTIPSHAFSNLPNISRIYVSIDVTLQQLESHSFYNLSKVTHIEIRNTRNLTYIDPDALKELPLLKFLGIFNTGLKMFPDLTKVYSTDIFFILEITDNPYMTSIPVNAFQGLCNETLTLKLYNNGFTSVQGYAFNGTKLDAVYLNKNKYLTVIDKDAFGGVYSGPSLLDVSQTSVTALPSKGLEHLKELIARNTWTLKKLPLSLSFLHLTRADLSYPSHCCAFKNQKKIRGILESLMCNESSMQSLRQRKSVNALNSPLHQEYEENLGDSIVGYKEKSKFQDTHNNAHYYVFFEEQEDEIIGFGQELKNPQEETLQAFDSHYDYTICGDSEDMVCTPKSDEFNPCEDIMGYKFLRIVVWFVSLLALLGNVFVLLILLTSHYKLNVPRFLMCNLAFADFCMGMYLLLIASVDLYTHSEYYNHAIDWQTGPGCNTAGFFTVFASELSVYTLTVITLERWYAITFAMRLDRKIRLRHACAIMVGGWVCCFLLALLPLVGISSYAKVSICLPMDTETPLALAYIVFVLTLNIVAFVIVCCCYVKIYITVRNPQYNPGDKDTKIAKRMAVLIFTDFICMAPISFYALSAILNKPLITVSNSKILLVLFYPLNSCANPFLYAIFTKAFQRDVFILLSKFGICKRQAQAYRGQRVPPKNSTDIQVQKVTHEMRQGLHNMEDVYELIENSHLTPKKQGQISEEYMQTVL

SEQ ID NO: 281503 - protein, 411 aa, Artificial Sequence
  derived and/or modified sequence
MRPADLLQLVLLLDLPRDLGGMGCSSPPCECHQEEDFRVTCKDIQRIPSLPPSTQTLKLIETHLRIVVWFVSLLALLGNVFVLLILLTSHYKLNVPRFLMCNLAFADFCMGMYLLLIASVDLYTHSEYYNHAIDWQTGPGCNTAGFFTVFASELSVYTLTVITLERWYAITFAMRLDRKIRLRHACAIMVGGWVCCFLLALLPLVGISSYAKVSICLPMDTETPLALAYIVFVLTLNIVAFVIVCCCYVKIYITVRNPQYNPGDKDTKIAKRMAVLIFTDFICMAPISFYALSAILNKPLITVSNSKILLVLFYPLNSCANPFLYAIFTKAFQRDVFILLSKFGICKRQAQAYRGQRVPPKNSTDIQVQKVTHEMRQGLHNMEDVYELIENSHLTPKKQGQISEEYMQTVL

SEQ ID NO: 281504 - DNA, 2295 bp, Artificial Sequence
  derived and/or modified sequence
atgagacccgccgacctgctgcagctggtgctgctgctggacctgcccagagacctgggcggcatgggctgcagcagccccccctgcgagtgccaccaggaggaggacttcagagtgacctgcaaggacatccagagaatccccagcctgccccccagcacccagaccctgaagctgatcgagacccacctgagaaccatccccagccacgccttcagcaacctgcccaacatcagcagaatctacgtgagcatcgacgtgaccctgcagcagctggagagccacagcttctacaacctgagcaaggtgacccacatcgagatcagaaacaccagaaacctgacctacatcgaccccgacgccctgaaggagctgcccctgctgaagttcctgggcatcttcaacaccggcctgaagatgttccccgacctgaccaaggtgtacagcaccgacatcttcttcatcctggagatcaccgacaacccctacatgaccagcatccccgtgaacgccttccagggcctgtgcaacgagaccctgaccctgaagctgtacaacaacggcttcaccagcgtgcagggctacgccttcaacggcaccaagctggacgccgtgtacctgaacaagaacaagtacctgaccgtgatcgacaaggacgccttcggcggcgtgtacagcggccccagcctgctggacgtgagccagaccagcgtgaccgccctgcccagcaagggcctggagcacctgaaggagctgatcgccagaaacacctggaccctgaagaagctgcccctgagcctgagcttcctgcacctgaccagagccgacctgagctaccccagccactgctgcgccttcaagaaccagaagaagatcagaggcatcctggagagcctgatgtgcaacgagagcagcatgcagagcctgagacagagaaagagcgtgaacgccctgaacagccccctgcaccaggagtacgaggagaacctgggcgacagcatcgtgggctacaaggagaagagcaagttccaggacacccacaacaacgcccactactacgtgttcttcgaggagcaggaggacgagatcatcggcttcggccaggagctgaagaacccccaggaggagaccctgcaggccttcgacagccactacgactacaccatctgcggcgacagcgaggacatggtgtgcacccccaagagcgacgagttcaacccctgcgaggacatcatgggctacaagttcctgagaatcgtggtgtggttcgtgagcctgctggccctgctgggcaacgtgttcgtgctgctgatcctgctgaccagccactacaagctgaacgtgcccagattcctgatgtgcaacctggccttcgccgacttctgcatgggcatgtacctgctgctgatcgccagcgtggacctgtacacccacagcgagtactacaaccacgccatcgactggcagaccggccccggctgcaacaccgccggcttcttcaccgtgttcgccagcgagctgagcgtgtacaccctgaccgtgatcaccctggagagatggtacgccatcaccttcgccatgagactggacagaaagatcagactgagacacgcctgcgccatcatggtgggcggctgggtgtgctgcttcctgctggccctgctgcccctggtgggcatcagcagctacgccaaggtgagcatctgcctgcccatggacaccgagacccccctggccctggcctacatcgtgttcgtgctgaccctgaacatcgtggccttcgtgatcgtgtgctgctgctacgtgaagatctacatcaccgtgagaaacccccagtacaaccccggcgacaaggacaccaagatcgccaagagaatggccgtgctgatcttcaccgacttcatctgcatggcccccatcagcttctacgccctgagcgccatcctgaacaagcccctgatcaccgtgagcaacagcaagatcctgctggtgctgttctaccccctgaacagctgcgccaaccccttcctgtacgccatcttcaccaaggccttccagagagacgtgttcatcctgctgagcaagttcggcatctgcaagagacaggcccaggcctacagaggccagagagtgccccccaagaacagcaccgacatccaggtgcagaaggtgacccacgagatgagacagggcctgcacaacatggaggacgtgtacgagctgatcgagaacagccacctgacccccaagaagcagggccagatcagcgaggagtacatgcagaccgtgctgtag

SEQ ID NO: 281505 - DNA, 2295 bp, Artificial Sequence
  derived and/or modified sequence
atgcgcccagcggatttgctgcagctagttctcctgctcgatttgccccgggatctgggtggaatgggatgctcttccccaccatgcgaatgccatcaggaggaggattttagagtaacctgtaaagacatacagcgcatcccatccctgccgccctctactcagactctgaagttaatcgagacccatctccggacaattccaagccatgcgttttctaatctgcctaacattagtagaatatatgtgtcaattgatgtgacactgcagcagttagagagtcatagcttctacaatttgagcaaggtcacccacattgagattcggaacacccgtaacctgacatatatcgaccccgacgccctgaaagagctccctctactaaaatttttgggtattttcaatactggtctgaagatgttccccgaccttaccaaagtgtactccactgatatattttttatactcgagatcactgacaatccatatatgacctctatcccagtgaatgcatttcaaggcctgtgtaatgaaactctgaccctcaagttgtacaataatgggtttactagcgtgcagggctatgctttcaatggcactaagcttgatgccgtgtacctgaataagaataagtatcttacagtaattgataaagacgccttcgggggcgtgtactcaggtcctagcctgctcgatgtaagtcaaacttctgtcacggccctgccatccaagggtcttgagcacctgaaggagttgattgcccgcaatacttggacactgaaaaagctgcccctcagcctttcctttctgcacctgactagagccgaccttagctacccatcccactgctgcgcctttaagaaccaaaaaaaaatccgcggtatactggaatcgttaatgtgcaatgagagttctatgcaaagcctgagacagaggaaatctgtcaacgcgctcaattcacccctccatcaggagtatgaggaaaatctgggagacagcatagtgggttacaaggaaaaaagcaagttccaagatactcacaataatgcccactactatgttttctttgaagaacaggaggatgaaatcatcggcttcggccaggaactcaaaaacccccaggaagagacacttcaggccttcgattctcattacgactacacgatatgcggcgatagcgaagatatggtttgtactcctaagtcagatgaattcaacccgtgtgaggacatcatggggtataaattcttgcggattgtggtgtggttcgtaagtcttctcgccctcttgggcaatgtcttcgttcttctgatcttgttaaccagccactataagctcaatgtgccaaggttcttgatgtgtaatctggcctttgcggacttttgcatgggaatgtacctgctcttgatagcttccgtcgacctgtatacacatagtgaatattacaaccatgcaattgattggcagaccgggcccgggtgcaacaccgccggatttttcactgtatttgcctccgaactgtcagtttatacacttactgtgatcactctcgagaggtggtatgcgatcacttttgcaatgcgactcgacaggaaaatacgactccggcatgcatgtgcgattatggtcggcggctgggtgtgttgtttcctactcgccctcctgccccttgtaggaattagcagctacgccaaggtatccatctgcttgccaatggatacagaaactccactcgcattggcttatatcgtctttgtgcttaccctgaatatcgtcgctttcgtgatagtctgttgttgttatgtgaaaatctatattactgttagaaaccctcagtataatcccggagataaggacacaaaaattgcaaaacggatggctgtgctgatctttacagactttatctgcatggctcccatatctttttatgcactgagcgccatattgaacaagccgttaatcactgtttctaattcgaaaatcctgctagtcctgttctatccgttaaactcctgcgctaatcccttcctctacgccatatttacaaaggctttccagagggacgtatttattttgctctcaaagttcggtatttgcaaacggcaggcacaggcatatcgcggacagcgggttccgcccaagaattcaacagacatccaggttcagaaagtgacccacgagatgcgacagggactccataatatggaggacgtctacgaactgatcgagaactctcatctcacccccaagaaacaggggcagatttccgaagaatatatgcagacggtgctgtag

SEQ ID NO: 281506 - DNA, 2295 bp, Artificial Sequence
  derived and/or modified sequence
atgcgcccggccgacctgctacaactcgtgctgttactcgacctgccccgggatctcggggggatgggttgctcctcacccccctgtgagtgtcatcaagaggaagactttcgagtgacttgcaaagacattcaaaggattccttctctaccaccctccactcagaccctgaaattaattgaaactcacctgagaactattccctcccatgccttcagcaacctcccgaacattagtcgtatttacgtatccatcgatgtgactctccagcagctggagagccattccttctataatctgtccaaggttactcatatcgaaattagaaacactcgcaatcttacctatattgaccctgacgctttgaaggagctccccctgctaaagtttctcggcatattcaacacgggactgaaaatgttccctgatttaacaaaagtttatagtactgatattttcttcatcttggaaattaccgataacccttatatgacttctatccctgtcaatgcttttcagggtttgtgcaatgaaaccctgacacttaagctctacaataatggtttcacaagcgttcaagggtacgccttcaacggcactaaattggacgcagtgtacctcaataaaaataagtacctcacagttattgataaggacgcttttggtggcgtgtattccgggccatctctgctagacgtgagtcaaacatcagtgaccgcgcttccttcaaagggtcttgagcatctgaaggagctgattgctaggaacacttggacgctgaagaaactgcccctatctttgagctttctgcacctgacgagagccgacctgtcatatccttctcactgctgcgccttcaagaaccagaaaaagatacggggtatcctggaatctctgatgtgtaatgagagctccatgcagtcattgagacagaggaagagcgtgaatgccttaaattctccgctgcatcaggagtatgaggaaaacctgggagactctatcgttggttacaaagaaaaatcgaaatttcaggatacacataacaacgcccactactatgttttttttgaggagcaagaagatgagattattggattcggtcaggagttgaagaacccacaggaagagactctccaggcgtttgattcccactacgactacaccatttgtggtgattcagaggacatggtgtgtaccccaaagagcgacgagtttaacccctgtgaggatatcatgggttacaagtttctcaggattgtcgtgtggttcgtgagcttgctggctctgctgggtaatgtgttcgttcttctgattttgctcaccagccactataagctaaatgtccccaggtttctgatgtgcaacctggcttttgctgacttttgcatgggcatgtacctgctcttaatcgctagcgttgacctgtatacacattctgagtactacaaccatgcgatcgattggcaaacaggacccggatgcaataccgccggtttttttacggtctttgcctcggagctctcagtttacacattgaccgtcatcactctggagcggtggtatgccatcactttcgccatgcgactggaccgaaaaattagactgcggcacgcctgcgccatcatggtgggtggctgggtctgctgcttcttactggcgctcctgcctctcgttggaatctcatcttatgcgaaagtctctatctgcttaccaatggatacagagacccccctggccctcgcctacattgtgtttgtgctaactcttaatatagtggctttcgtgattgtgtgttgctgctatgtgaagatctatatcactgttagaaaccctcagtacaaccccggggacaaagacacaaagatagccaagagaatggccgtcctgatcttcacagacttcatctgcatggccccaatctccttctatgccttgagcgctatcctgaataagccactgattacagtgagcaacagtaagattctgctagtattgttctacccactgaatagctgtgccaatccattcctatacgccatttttacaaaggcttttcaaagggatgtatttatcctgctatctaagttcgggatctgcaagagacaagcacaagcataccgtggccagagagttccccccaaaaactccactgacatccaggttcagaaggtcacacacgaaatgcgacaaggtctgcataacatggaggatgtctatgaactgatcgagaatagccatcttacaccaaagaagcagggtcagatttccgaggagtatatgcagacagtgctgtag

SEQ ID NO: 281507 - DNA, 2295 bp, Artificial Sequence
  derived and/or modified sequence
atgaggcctgctgacctgctgcagctggtgctgctgctggacctgccccgggacctgggcggcatgggctgcagcagccccccctgtgagtgccaccaggaggaggacttccgggtgacctgcaaggacatccagaggatccccagcctgccccccagcacccagaccctgaagctgattgagacccacctgcggaccatccccagccacgccttcagcaacctgcccaacatcagccgcatctacgtgtccattgatgtgaccctgcagcagctggagagccacagcttctacaacctgagcaaggtgacccacatcgagatccggaacaccaggaacctgacctacattgatcctgatgccctgaaggagctgcccctgctgaagttcctgggcatcttcaacacaggcctgaagatgtttcctgacctgaccaaggtgtacagcacagacatcttcttcatcctggagatcacagacaacccctacatgaccagcatccctgtgaatgccttccagggcctgtgcaatgagaccctgaccctgaagctgtacaacaacggcttcacctctgtgcagggctacgccttcaacggcaccaagctggatgctgtgtacctgaacaagaacaagtacctgaccgtcatcgacaaggatgcctttggaggagtgtacagcggccccagcctgctggatgtgtcccagacctctgtgacagccctgcccagcaagggcctggagcacctgaaggagctgattgccaggaacacctggaccctgaagaagctgcccctgagcctgtccttcctgcacctgaccagggctgacctgagctaccccagccactgctgtgccttcaagaaccagaagaagatccggggcatcctggagagcctgatgtgcaatgaaagctccatgcagagcctgcggcagaggaagtctgtgaatgccctgaacagccccctgcaccaggagtatgaggagaacctgggggacagcatcgtgggctacaaggagaagagcaagttccaggacacccacaacaatgcccactactacgtgttctttgaggagcaggaggatgagatcatcggcttcggccaggagctgaagaacccccaggaggagaccctgcaggcctttgacagccactatgactacaccatctgtggggacagcgaggacatggtgtgcacccccaagagtgatgagttcaacccctgtgaggacatcatgggctacaagttcctgagaattgtggtgtggtttgtgtccctgctggccctgctgggcaatgtgtttgtgctgctgatcctgctgaccagccactacaagctgaatgtgccccgcttcctgatgtgcaacctggcctttgctgacttctgcatgggcatgtacctgctgctgattgcctctgtggacctgtacacccacagcgagtactacaaccacgccatcgactggcagacaggccctggctgcaacacagctggcttcttcaccgtgtttgccagcgagctgtctgtgtacaccctgaccgtcatcaccctggagcgctggtacgccatcacctttgccatgaggctggacaggaagatccggctgcggcatgcctgtgccatcatggtgggcggctgggtgtgctgcttcctgctggccctgctgcccctggtgggcatcagcagctatgccaaggtgtccatctgcctgcccatggacacagagacccccctggccctggcctacatcgtgtttgtgctgaccctgaacatcgtggccttcgtcatcgtgtgctgctgctacgtgaagatctacatcaccgtgaggaacccccagtacaaccctggggacaaggacaccaagatcgccaagaggatggctgtgctgatcttcacagacttcatctgcatggcccccatctccttctacgccctgagcgccatcctgaacaagcccctcatcaccgtgagcaacagcaagatcctgctggtgctcttctaccccctgaacagctgtgccaaccccttcctgtatgccatcttcaccaaggccttccagagagatgtgttcatcctgctgagcaagtttggcatctgcaagaggcaggcccaggcctaccggggccagagggtgccccccaagaacagcacagacatccaggtgcagaaggtgacccatgagatgaggcagggcctgcacaacatggaggatgtgtatgagctgattgagaacagccacctgacccccaagaagcagggccagatcagcgaggagtacatgcagacagtgctgtag

SEQ ID NO: 281508 - DNA, 2295 bp, Artificial Sequence
  derived and/or modified sequence
atgcggcccgccgacctgctgcagctggtgctgctgctggacctgccccgtgacctcggtggcatgggatgttccagtcccccatgtgagtgccatcaggaagaggacttcagagtcacctgcaaggatatacaacgtattccttccttgcctccaagtacacagaccctcaaactcatcgaaacccatctgcgcaccatcccctcgcacgctttttcaaacctgcctaacataagcagaatctacgtttcaattgacgtcactttgcaacagttagagtcccatagtttttataatttgtctaaggtgacacatattgagattcgtaatacaagaaacctcacttatatcgacccagatgcccttaaagagcttccgttgctgaagtttctcggcattttcaacaccggcctcaagatgttcccagatttaacgaaggtgtatagtaccgacatcttttttatcctggaaattactgacaacccatacatgacctcgattcctgttaacgcatttcaaggtctctgcaatgaaactctgaccctgaaactctataacaatgggttcacatccgtgcagggttatgcttttaacgggaccaaacttgacgctgtgtatctcaataaaaacaaatacctgacagtcattgacaaggatgccttcggtggcgtctactctggcccttcccttctggatgtcagtcagacgtctgttactgctctccccagcaagggcttggagcacctcaaagagctcatcgcacggaacacctggaccctgaagaaattgccgctgtcactcagcttcctgcatctgactcgagcagacttgtcttacccctctcactgttgcgcgttcaagaatcagaagaagatacgcgggatccttgagtcattaatgtgcaacgagagttctatgcagtccttgcgccagcggaaatcggtcaatgccttgaattcacctctgcatcaggaatacgaggaaaatctgggcgactccatcgtggggtacaaagagaaatccaagtttcaggatactcacaacaacgcccactattatgtcttcttcgaggagcaggaagacgagataatcggcttcgggcaggagctcaagaatcctcaggaggaaacgctgcaagccttcgactcacattatgattatactatttgtggtgattccgaagatatggtgtgcacccctaagtccgatgaattcaacccctgtgaggatatcatgggctataaatttctgcgcatcgtggtatggtttgtcagtctgcttgccctgctgggtaacgtgttcgtcctgctgattttgctcaccagccactacaagcttaatgttccccggtttcttatgtgtaacctagcattcgctgatttctgcatggggatgtacctcctactgattgctagcgttgacttgtatacacatagtgaatattataaccacgcaatagattggcagactgggccaggatgcaacaccgccgggttctttacggtgttcgcctccgaactgtccgtgtacaccctaaccgttattacactagagcggtggtatgcaatcaccttcgctatgcgtttggatcgcaaaatccgactgaggcatgcctgcgccataatggtgggaggctgggtgtgctgcttcctgcttgctctcctgccattagtggggatttcctcttacgctaaggtgtcaatatgcctccccatggataccgagaccccactagccctggcctatatcgtatttgtgctgaccctgaatattgtcgccttcgtcatcgtctgctgttgctatgtgaaaatatacatcacagtgaggaatccccagtataatcctggcgacaaggacacaaagatagccaagaggatggctgtgctcatctttactgattttatctgcatggctcctatttccttctatgccctttcagctatcttgaacaagcccctcatcactgtgagcaattctaagatccttcttgtattattctacccactgaactcgtgtgccaacccatttctgtatgcaattttcaccaaggcctttcaacgagatgttttcattctgctcagtaagtttggtatttgcaagcggcaggcccaagcctatcgaggccaaagagtgccccccaaaaattctactgacatccaggttcagaaggttacgcacgagatgaggcaggggctgcataacatggaagatgtctatgaactgatagagaattcccatcttaccccaaaaaaacagggccagatctccgaagagtatatgcagacagtcctctag

SEQ ID NO: 281509 - DNA, 2295 bp, Artificial Sequence
  derived and/or modified sequence
atgcggcccgccgacctgctgcagctggtgctgctgctggacctgccaagagatctggggggcatgggctgctccagtcccccctgcgaatgccatcaggaggaagactttcgcgtaacatgcaaagacatccagcgaatcccctctctgcctccctcaactcagactctcaagcttatagagacccatctgcgcactatcccctcccacgccttttcaaacctcccaaacatcagtcggatatacgtgtccatcgacgtgacacttcagcagttggaatcccatagcttctacaacctgagcaaggtgactcacattgagattaggaatactcgtaatctgacttatatcgatccagatgccctcaaagaactgcctctcctcaaattcctgggcattttcaatacggggctcaagatgttcccagacctgacaaaagtttactccaccgatatattcttcatacttgaaattaccgataacccttacatgacaagcattccggtcaacgccttccaagggctctgtaatgagacactgacattgaagttatataacaatggattcacgagtgtgcaaggctatgcatttaatggaaccaagctcgatgccgtgtacctgaataaaaacaaatatctaacagtcatcgacaaggatgccttcgggggggtatactccggaccgagtttgctggacgtctcccagacctccgtgactgcattgccttctaaaggtctcgagcatttgaaagaactgattgccagaaacacgtggaccctcaagaaattgccccttagcctctcttttctgcacttgacccgggctgatttgagctacccgtctcattgttgcgcatttaaaaatcaaaagaaaatccgggggattttggaatcactgatgtgtaacgagagttctatgcaatctctgcggcagaggaagtccgtgaatgcattgaacagtcccctgcatcaggagtacgaggaaaacctgggagatagcatcgttggatacaaggagaaaagcaagtttcaagatacacataacaacgcccattactacgtcttctttgaggagcaggaagacgagatcattggctttggtcaggaacttaaaaaccctcaagaggagacgctgcaggccttcgactcccactatgactacaccatatgtggggactctgaagacatggtgtgcaccccaaaatccgatgaatttaacccttgtgaggacatcatgggttataagtttctgcgtatagtggtctggttcgtgagcctcctggccctcctgggaaacgtcttcgtccttctgatactgctgacaagccattacaagctgaacgtgccaaggttcctgatgtgcaatctggcatttgccgatttctgcatgggcatgtatctcctgctcattgcttccgttgatctctacacccactcagaatattacaaccacgcaatcgattggcagactgggcccggttgtaataccgccggtttcttcaccgtcttcgcttcagagctgagtgtttataccctgacagtaattacactggagagatggtatgctataacttttgctatgaggctggacaggaaaattaggctgcgacatgcctgtgccattatggtgggcggatgggtctgctgctttctgttagccttgctcccgctcgttggcataagctcttacgcgaaagtctctatctgccttccaatggacacagaaactcctctcgccctcgcttacatagtgtttgtcttaaccctcaacatagtggccttcgttattgtgtgctgttgctacgtgaagatctacatcaccgtgcggaacccacagtacaaccctggagacaaggataccaagattgctaaaaggatggccgtgctaatttttaccgacttcatctgtatggcccccatctcattttacgccctgagcgctattcttaataagcctcttattacggtcagcaacagcaagattctccttgtactcttctatccgttaaactcatgtgccaatccttttctgtatgcaatctttacgaaggcattccagagggacgtctttatcttactatctaagttcggcatttgcaaaagacaagcacaggcctacagaggtcagcgcgttccgccaaagaattccacagacattcaggttcaaaaggtgacccacgagatgagacaagggctccacaacatggaggatgtgtatgaactcatcgagaactcccacctaacccccaagaagcagggccagatctccgaagagtatatgcagacagtgctgtag

SEQ ID NO: 281510 - DNA, 2295 bp, Artificial Sequence
  derived and/or modified sequence
atgcggcctgccgacctcctacaactggtgctactgctggatctgcccagagatcttggcggtatgggatgtagctctccaccttgtgagtgccatcaagaggaagactttcgagtgacctgtaaggacattcagcggatcccatcactgccaccatcaactcagactcttaaacttatcgagacgcacttacggaccattcctagtcacgcattttcaaacctcccgaatatttctaggatttacgtttctatagatgtgaccctgcagcagctagaatcgcacagcttctacaacttgagtaaagtgacccatattgaaatccggaacaccaggaatctgacttacatcgaccctgacgccctgaaggagctgccgttacttaaattcctgggcattttcaacaccggcctaaaaatgtttccagacctgactaaggtatactctacggacattttcttcattctggagattaccgacaacccatatatgacctccatccccgtcaatgccttccagggcctgtgcaatgagaccttgacactgaaactgtacaacaacgggtttacttccgtacaggggtacgcatttaatggtactaagctcgacgccgtgtacctgaacaaaaacaagtacttaactgtcatcgataaggacgcgtttggtggtgtgtatagtggcccaagcttactggatgtttcccagacaagcgtcaccgccctgccttctaaaggactggagcatctcaaggaactgatcgctcgcaacacctggactttgaagaaactgccactgtctcttagcttcctgcatctgactagagccgacctaagctatcctagccattgctgcgccttcaagaaccaaaagaagatccggggtattctggagagcctgatgtgtaatgagagttctatgcagagcctcaggcagcgaaagtctgtgaatgccctgaacagtccactccaccaagaatatgaagagaatctcggagactctattgtgggctataaggaaaaatccaaattccaggatacacacaacaatgcccactactacgttttcttcgaagaacaggaggacgaaatcataggattcggccaggaactaaagaacccccaagaggagactcttcaagcttttgattcacactacgattacaccatctgtggtgattccgaagatatggtctgcactcctaaaagcgacgaattcaatccgtgtgaggatatcatggggtataagtttctgaggatcgtggtgtggttcgtcagcctcttggcgctgttggggaatgtgtttgttctccttatcctgctcaccagccactacaagcttaacgtcccaagatttctgatgtgtaaccttgcttttgccgatttctgcatgggcatgtacctactcctcattgcctccgttgacctatatacccactcggaatactacaaccacgccatagattggcaaacagggcctggctgcaacactgctggtttttttaccgtgtttgctagtgagctgtctgtgtacacactgacagtgattacactggagcggtggtacgccataaccttcgccatgcggctagacaggaagatccgactgaggcatgcctgcgcaatcatggtgggcggatgggtctgctgcttcctgttagccctgttgcccctggtcggcatctcatcctacgccaaagtgtctatttgtttgccaatggacacagagacccccttagcccttgcctacattgttttcgtcctgactctcaatatagtggcattcgtgattgtttgctgttgctacgtcaaaatttacatcacagtacgtaacccccagtataacccaggcgacaaagataccaaaatcgctaaacgcatggcggtgctgatctttaccgatttcatctgtatggccccaatctcattttatgccctgtccgccattctgaacaagcctctcatcacggtgtcaaattcaaagatcctgctggtactattctatcccctgaactcctgtgccaatcctttcctttatgccatctttaccaaggccttccagagagatgtatttatcctgctgagcaaatttggtatttgtaagcgccaggcccaagcgtatcgtggtcaacgcgtgccccctaaaaacagtactgatatacaggtgcaaaaagttacacacgagatgcgccaagggcttcacaacatggaggacgtgtacgagttaatagaaaattctcacctaactcctaagaaacagggtcagatctcagaggagtacatgcagacggttctctag

SEQ ID NO: 281511 - DNA, 2295 bp, Artificial Sequence
  derived and/or modified sequence
atgaggcctgccgatctcctccagcttgtcctgttgctagatctacctcgggatctggggggtatggggtgctcttctcctccatgcgaatgtcatcaggaggaggactttcgagtgacttgtaaagacatccagcgaataccctcactcccaccatctactcagacactcaaacttattgagacccacttgcgaaccattccatcccatgccttttctaatcttcccaacatttccaggatctacgtgtctatcgacgtcaccctgcagcagctggagtcacactcgttctacaatctgtcaaaagtgacgcacatcgagattagaaacacaaggaacctgacatacatcgaccctgacgcgctgaaagaactgccccttctgaagttcttaggaatctttaacacgggtctgaagatgttccctgatctaaccaaggtgtatagtacagacattttttttatcctagagattaccgacaatccctatatgacaagcattcccgtgaatgccttccagggactatgcaacgagacgcttacactcaaactgtataacaacggattcacctcggttcaggggtacgcgttcaacggcaccaaacttgacgccgtatacctcaacaaaaataaatacctaacggtcatcgataaagatgcttttggcggtgtgtactctgggcctagcctgcttgacgtgagtcagacttccgtgaccgctctgccaagcaaggggctggagcatctgaaggaactgatcgccaggaacacctggactttgaaaaagctgcctctttcactgagcttcctgcatttaacacgtgcagacctgtcatatccctcacactgttgcgccttcaagaaccagaaaaaaattagaggaatactggaatccctaatgtgtaacgagtcttctatgcagtcactgcgtcaacgaaagagcgtgaacgcacttaacagtcccctgcaccaagaatacgaggaaaaccttggtgactccatcgtgggttacaaagagaaatctaagttccaggatacccataataacgcccactactacgtgtttttcgaggaacaggaagacgagatcattggcttcggtcaggagctgaagaacccccaggaagagacccttcaagctttcgacagccattacgattacactatctgcggcgacagtgaggatatggtctgtactcccaaatcagatgaattcaacccttgtgaagatatcatggggtacaagttcctgcgtatagtagtgtggttcgtctccctactggccctgctgggtaatgtgtttgttctcctgattctgctgacttcccactacaaactgaacgtcccacggttcctaatgtgcaacctggcctttgcagatttctgcatgggtatgtacctcctgttgatcgcaagcgtggacttgtatactcattccgaatactataatcatgccattgattggcagactgggcctggatgtaatactgcaggattctttaccgtgttcgcgtcagaactcagtgtttacactcttactgtgatcactttggagcggtggtatgccataacctttgcaatgcgcctggaccgtaagataagactccgacatgcttgcgcaatcatggtgggcggttgggtgtgttgcttcctgttagccctgctgccactcgttggcatctcctcgtatgccaaggtgtcgatatgtctgcccatggacacagagactcctctcgccctcgcctacattgttttcgtgctgacccttaacatcgtcgcctttgtcattgtgtgttgctgctatgtgaagatctacataaccgtcaggaacccccaatataacccaggcgacaaagacacaaaaatcgccaagagaatggcagtactcattttcactgactttatttgcatggctccaatatccttctacgctctgtccgccatcctgaataagcccctcattactgtgtcaaatagtaagattctcctggtgctcttctaccccctgaactcctgcgccaatcccttcctttacgccatttttactaaagcatttcagagggacgtctttatcctactctctaagtttggaatctgcaagcgccaggctcaggcataccggggtcagcgagtgcccccaaaaaattccaccgacattcaggtccaaaaagtaactcacgagatgcgccagggactacataatatggaggatgtctatgagcttattgagaactcccatctgaccccaaagaaacagggacaaataagtgaagaatacatgcagacagtcctatag

SEQ ID NO: 281512 - DNA, 4400 bp, Artificial Sequence
  derived and/or modified sequence
cctcctccacagtggtgaggtcacagccccttggagccctccctcttcccacccctcccgctcccgggtctcctttggcctggggtaacccgaggtgcagagctgagaatgaggcgatttcggaggatggagaaatagccccgagtcccgtggaaaatgaggccggcggacttgctgcagctggtgctgctgctcgacctgcccagggacctgggcggaatggggtgttcgtctccaccctgcgagtgccatcaggaggaggacttcagagtcacctgcaaggatattcaacgcatccccagcttaccgcccagtacgcagactctgaagcttattgagactcacctgagaactattccaagtcatgcattttctaatctgcccaatatttccagaatctacgtatctatagatgtgactctgcagcagctggaatcacactccttctacaatttgagtaaagtgactcacatagaaattcggaataccaggaacttaacttacatagaccctgatgccctcaaagagctccccctcctaaagttccttggcattttcaacactggacttaaaatgttccctgacctgaccaaagtttattccactgatatattctttatacttgaaattacagacaacccttacatgacgtcaatccctgtgaatgcttttcagggactatgcaatgaaaccttgacactgaagctgtacaacaatggctttacttcagtccaaggatatgctttcaatgggacaaagctggatgctgtttacctaaacaagaataaatacctgacagttattgacaaagatgcatttggaggagtatacagtggaccaagcttgctggacgtgtctcaaaccagtgtcactgcccttccatccaaaggcctggagcacctgaaggaactgatagcaagaaacacctggactcttaagaaacttccactttccttgagtttccttcacctcacacgggctgacctttcttacccaagccactgctgtgcttttaagaatcagaagaaaatcagaggaatccttgagtccttgatgtgtaatgagagcagtatgcagagcttgcgccagagaaaatctgtgaatgccttgaatagccccctccaccaggaatatgaagagaatctgggtgacagcattgttgggtacaaggaaaagtccaagttccaggatactcataacaacgctcattattacgtcttctttgaagaacaagaggatgagatcattggttttggccaggagctcaaaaacccccaggaagagactctacaagcttttgacagccattatgactacaccatatgtggggacagtgaagacatggtgtgtacccccaagtccgatgagttcaacccgtgtgaagacataatgggctacaagttcctgagaattgtggtgtggttcgttagtctgctggctctcctgggcaatgtctttgtcctgcttattctcctcaccagccactacaaactgaacgtcccccgctttctcatgtgcaacctggcctttgcggatttctgcatggggatgtacctgctcctcatcgcctctgtagacctctacactcactctgagtactacaaccatgccatcgactggcagacaggccctgggtgcaacacggctggtttcttcactgtctttgcaagcgagttatcggtgtatacgctgacggtcatcaccctggagcgctggtatgccatcaccttcgccatgcgcctggaccggaagatccgcctcaggcacgcatgtgccatcatggttgggggctgggtttgctgcttccttctcgccctgcttcctttggtgggaataagtagctatgccaaagtcagtatctgcctgcccatggacaccgagacccctcttgctctggcatatattgtttttgttctgacgctcaacatagttgccttcgtcatcgtctgctgctgttatgtgaagatctacatcacagtccgaaatccgcagtacaacccaggggacaaagataccaaaattgccaagaggatggctgtgttgatcttcaccgacttcatatgcatggccccaatctcattctatgctctgtcagcaattctgaacaagcctctcatcactgttagcaactccaaaatcttgctggtactcttctatccacttaactcctgtgccaatccattcctctatgctattttcaccaaggccttccagagggatgtgttcatcctactcagcaagtttggcatctgtaaacgccaggctcaggcataccgggggcagagggttcctccaaagaacagcactgatattcaggttcaaaaggttacccacgagatgaggcagggtctccacaacatggaagatgtctatgaactgattgaaaactcccatctaaccccaaagaagcaaggccaaatctcagaagagtatatgcaaacggttttgtaagttaacactacactactcacaatggtaggggaacttacaaaataatagtttcttgaatatgcattccaatcccatgacacccccaacacatagctgccctcactcttgtgcaggcgatgtttcaatgtttcatggggcaagagtttatctctggagagtgattagtattaacctaatcattgcccccaagaaggaagttaggctaccagcatatttgaatgccaggtgaaatcaaaataatctacactatctagaagactttcttgatgccaagtccagagatgtcattgtgtaggatgttcagtaaatattaactgagctatgtcaatatagagcttctcagttttgtataacatttcatactaaagattcagcaaatggaaaatgctattaatttggttggtgaccacaagataaaatcagtcccacgttggctcagttcaactagatgttccctgatacaaagagaacttgatttccttaaaactgaaaagccaaacacagctagctgtcatacaagaaacagctattatgagacatgaaggagggtaagaattagctttaagttttgttttgctttgttttgttttttaactcaacctattaatcatctcttcacaagaatccacctgatgtgaccaagctattatgtgttgcctggaaaaactggcaagatttcagcttatgtggcctagcaaactaagaattgctcttcttggccagcctcatagcataaaagatgtgaactctaggaagtctttctgagtagcaataagtgggaattatgggcagagcacactcaatcccctgttgattaataaaacaggctggacactaattaactatgggacttaaatctgtagaaatgaaggagtccaatagcttcttccaattttaaaactctagtacatccctttccctcaaatatatatttctaagataaagagaaagaagagcactaagtaagtagaatctgtttttcctattttgtagggctgctgactcctagtccttgaagcctagacacatgacccaggaaatttttcctttgtttcacttttgattatgatgtctgagccaaaaattcaattaagtaaacatactcgcctggatctgaatcattcatttaattactagatctacccagctgttatatcaggccaaaaacagattcgtgtttatataaaagagtaaacgatggttgcaaattttggctatttagagttgctacttcactatgaagagtcacttcaaaacacttcgcttgtctttagggatgatttttgccatttccagtccacggtatgatactaaagctgtcaagagaggtttcttcttttctgaaactgccagctctttccagccctgttgatcactggacataaagcttcttttccccaataattcttctttacttaaaatagtcaggatctttatctacagatgtactctccaggttacctgtgatgatagccccctaatgtcctgctagaaaagtctccaagcagagatgacattacttctgaatgctcataaaccacaccatgaaataaaagctctttgttgttttaagattgtgaagtgtcgttaatgggtccccacagatggtccctgctggactcacctggaatctctccacagccatacccactcatcactatcattgagacctgcacatcttaatagaaatattataaacatcgaaaatcatgacttacctagaagttcgcttgtaactaatgaaattaaacaaatgtgttgccttttgtcatgtgtttctctcctgtgacatttcaaaatatcacatcttgataaataatgtgtttcatcttgaatagctgaactaattgctttggaaacagagtcctagaaaagtgacttcaacagaattgttactaaaatttgcactcacaacatgaaataaattttcttcctatggaataatcgtg

SEQ ID NO: 281513 - DNA, 4566 bp, Artificial Sequence
  derived and/or modified sequence
caggggtgcagggcgacggcttcggccgcaccgcgggctagccagggctgcgtgcccgcctctgaccctcagcagaggtgtctctggccaggaggagctgaagttctgcaggacattggtccgcccgcggacagtccactccgcggggactttctctggataaggacctcctccacagtggtgaggtcacagccccttggagccctccctcttcccacccctcccgctcccgggtctcctttggcctggggtaacccgaggtgcagagctgagaatgaggcgatttcggaggatggagaaatagccccgagtcccgtggaaaatgaggccggcggacttgctgcagctggtgctgctgctcgacctgcccagggacctgggcggaatggggtgttcgtctccaccctgcgagtgccatcaggaggaggacttcagagtcacctgcaaggatattcaacgcatccccagcttaccgcccagtacgcagactctgaagcttattgagactcacctgagaactattccaagtcatgcattttctaatctgcccaatatttccagaatctacgtatctatagatgtgactctgcagcagctggaatcacactccttctacaatttgagtaaagtgactcacatagaaattcggaataccaggaacttaacttacatagaccctgatgccctcaaagagctccccctcctaaagttccttggcattttcaacactggacttaaaatgttccctgacctgaccaaagtttattccactgatatattctttatacttgaaattacagacaacccttacatgacgtcaatccctgtgaatgcttttcagggactatgcaatgaaaccttgacactgaagctgtacaacaatggctttacttcagtccaaggatatgctttcaatgggacaaagctggatgctgtttacctaaacaagaataaatacctgacagttattgacaaagatgcatttggaggagtatacagtggaccaagcttgctggacgtgtctcaaaccagtgtcactgcccttccatccaaaggcctggagcacctgaaggaactgatagcaagaaacacctggactcttaagaaacttccactttccttgagtttccttcacctcacacgggctgacctttcttacccaagccactgctgtgcttttaagaatcagaagaaaatcagaggaatccttgagtccttgatgtgtaatgagagcagtatgcagagcttgcgccagagaaaatctgtgaatgccttgaatagccccctccaccaggaatatgaagagaatctgggtgacagcattgttgggtacaaggaaaagtccaagttccaggatactcataacaacgctcattattacgtcttctttgaagaacaagaggatgagatcattggttttggccaggagctcaaaaacccccaggaagagactctacaagcttttgacagccattatgactacaccatatgtggggacagtgaagacatggtgtgtacccccaagtccgatgagttcaacccgtgtgaagacataatgggctacaagttcctgagaattgtggtgtggttcgttagtctgctggctctcctgggcaatgtctttgtcctgcttattctcctcaccagccactacaaactgaacgtcccccgctttctcatgtgcaacctggcctttgcggatttctgcatggggatgtacctgctcctcatcgcctctgtagacctctacactcactctgagtactacaaccatgccatcgactggcagacaggccctgggtgcaacacggctggtttcttcactgtctttgcaagcgagttatcggtgtatacgctgacggtcatcaccctggagcgctggtatgccatcaccttcgccatgcgcctggaccggaagatccgcctcaggcacgcatgtgccatcatggttgggggctgggtttgctgcttccttctcgccctgcttcctttggtgggaataagtagctatgccaaagtcagtatctgcctgcccatggacaccgagacccctcttgctctggcatatattgtttttgttctgacgctcaacatagttgccttcgtcatcgtctgctgctgttatgtgaagatctacatcacagtccgaaatccgcagtacaacccaggggacaaagataccaaaattgccaagaggatggctgtgttgatcttcaccgacttcatatgcatggccccaatctcattctatgctctgtcagcaattctgaacaagcctctcatcactgttagcaactccaaaatcttgctggtactcttctatccacttaactcctgtgccaatccattcctctatgctattttcaccaaggccttccagagggatgtgttcatcctactcagcaagtttggcatctgtaaacgccaggctcaggcataccgggggcagagggttcctccaaagaacagcactgatattcaggttcaaaaggttacccacgagatgaggcagggtctccacaacatggaagatgtctatgaactgattgaaaactcccatctaaccccaaagaagcaaggccaaatctcagaagagtatatgcaaacggttttgtaagttaacactacactactcacaatggtaggggaacttacaaaataatagtttcttgaatatgcattccaatcccatgacacccccaacacatagctgccctcactcttgtgcaggcgatgtttcaatgtttcatggggcaagagtttatctctggagagtgattagtattaacctaatcattgcccccaagaaggaagttaggctaccagcatatttgaatgccaggtgaaatcaaaataatctacactatctagaagactttcttgatgccaagtccagagatgtcattgtgtaggatgttcagtaaatattaactgagctatgtcaatatagagcttctcagttttgtataacatttcatactaaagattcagcaaatggaaaatgctattaatttggttggtgaccacaagataaaatcagtcccacgttggctcagttcaactagatgttccctgatacaaagagaacttgatttccttaaaactgaaaagccaaacacagctagctgtcatacaagaaacagctattatgagacatgaaggagggtaagaattagctttaagttttgttttgctttgttttgttttttaactcaacctattaatcatctcttcacaagaatccacctgatgtgaccaagctattatgtgttgcctggaaaaactggcaagatttcagcttatgtggcctagcaaactaagaattgctcttcttggccagcctcatagcataaaagatgtgaactctaggaagtctttctgagtagcaataagtgggaattatgggcagagcacactcaatcccctgttgattaataaaacaggctggacactaattaactatgggacttaaatctgtagaaatgaaggagtccaatagcttcttccaattttaaaactctagtacatccctttccctcaaatatatatttctaagataaagagaaagaagagcactaagtaagtagaatctgtttttcctattttgtagggctgctgactcctagtccttgaagcctagacacatgacccaggaaatttttcctttgtttcacttttgattatgatgtctgagccaaaaattcaattaagtaaacatactcgcctggatctgaatcattcatttaattactagatctacccagctgttatatcaggccaaaaacagattcgtgtttatataaaagagtaaacgatggttgcaaattttggctatttagagttgctacttcactatgaagagtcacttcaaaacacttcgcttgtctttagggatgatttttgccatttccagtccacggtatgatactaaagctgtcaagagaggtttcttcttttctgaaactgccagctctttccagccctgttgatcactggacataaagcttcttttccccaataattcttctttacttaaaatagtcaggatctttatctacagatgtactctccaggttacctgtgatgatagccccctaatgtcctgctagaaaagtctccaagcagagatgacattacttctgaatgctcataaaccacaccatgaaataaaagctctttgttgttttaagattgtgaagtgtcgttaatgggtccccacagatggtccctgctggactcacctggaatctctccacagccatacccactcatcactatcattgagacctgcacatcttaatagaaatattataaacatcgaaaatcatgacttacctagaagttcgcttgtaactaatgaaattaaacaaatgtgttgccttttgtcatgtgtttctctcctgtgacatttcaaaatatcacatcttgataaataatgtgtttcatcttgaatagctgaactaattgctttggaaacagagtcctagaaaagtgacttcaacagaattgttactaaaatttgcactcacaacatgaaataaattttcttcctatggaataatcgtg

SEQ ID NO: 281514 - protein, 253 aa, Artificial Sequence
  derived and/or modified sequence
MRPADLLQLVLLLDLPRDLGGMGCSSPPCECHQEEDFRVTCKDIQRIPSLPPSTQTLKLIETHLRTIPSHAFSNLPNISRIYVSIDVTLQQLESHSFYNLSKVTHIEIRNTRNLTYIDPDALKELPLLKFLGIFNTGLKMFPDLTKVYSTDIFFILEITDNPYMTSIPVNAFQGLCNETLTLKLYNNGFTSVQGYAFNGTKLDAVYLNKNKYLTVIDKDAFGGVYSGPSLLLPLGRKSLSFETQKAPRSSMPS

SEQ ID NO: 281515 - DNA, 762 bp, Artificial Sequence
  derived and/or modified sequence
atgagacccgccgacctgctgcagctggtgctgctgctggacctgcccagagacctgggcggcatgggctgcagcagccccccctgcgagtgccaccaggaggaggacttcagagtgacctgcaaggacatccagagaatccccagcctgccccccagcacccagaccctgaagctgatcgagacccacctgagaaccatccccagccacgccttcagcaacctgcccaacatcagcagaatctacgtgagcatcgacgtgaccctgcagcagctggagagccacagcttctacaacctgagcaaggtgacccacatcgagatcagaaacaccagaaacctgacctacatcgaccccgacgccctgaaggagctgcccctgctgaagttcctgggcatcttcaacaccggcctgaagatgttccccgacctgaccaaggtgtacagcaccgacatcttcttcatcctggagatcaccgacaacccctacatgaccagcatccccgtgaacgccttccagggcctgtgcaacgagaccctgaccctgaagctgtacaacaacggcttcaccagcgtgcagggctacgccttcaacggcaccaagctggacgccgtgtacctgaacaagaacaagtacctgaccgtgatcgacaaggacgccttcggcggcgtgtacagcggccccagcctgctgctgcccctgggcagaaagagcctgagcttcgagacccagaaggcccccagaagcagcatgcccagctag

SEQ ID NO: 281516 - DNA, 762 bp, Artificial Sequence
  derived and/or modified sequence
atgcggcctgcagatctgctccagctggtgcttctgctggacctgccacgagaccttgggggcatggggtgttccagtccgccctgcgaatgccatcaggaggaagacttcagagttacctgcaaggacatccagcggatcccatctttgcctcccagcacacaaaccctgaagcttattgaaacacacctcaggacgatcccctcgcacgcattcagcaatctgcccaacatctcgcgaatttatgtaagcattgatgttacactgcagcaactcgaatctcatagcttttataatctgagcaaggttacacacattgagatacggaatacacgtaatctaacctacatcgacccagatgcattgaaagagcttccactcctgaaatttctagggatcttcaacactggtcttaaaatgtttcccgatctgacaaaagtgtattccactgacatcttttttattctagagatcacggataatccttacatgacctccattccagtaaatgctttccagggcctgtgcaacgagactcttacgttgaagctttacaacaatggcttcacctcagttcagggctacgcattcaacggcacaaagctcgacgccgtgtatttgaacaaaaacaagtatttgaccgtgattgacaaggacgcttttgggggtgtctattcggggccctcactgctgctgcccctcgggcggaaaagccttagctttgagacccagaaagctcccaggtcatccatgccctcctag

SEQ ID NO: 281517 - DNA, 762 bp, Artificial Sequence
  derived and/or modified sequence
atgaggcctgctgacctgctgcagctggtgctgctgctggacctgccccgggacctgggcggcatgggctgcagcagccccccctgtgagtgccaccaggaggaggacttccgggtgacctgcaaggacatccagaggatccccagcctgccccccagcacccagaccctgaagctgattgagacccacctgcggaccatccccagccacgccttcagcaacctgcccaacatcagccgcatctacgtgtccattgatgtgaccctgcagcagctggagagccacagcttctacaacctgagcaaggtgacccacatcgagatccggaacaccaggaacctgacctacattgatcctgatgccctgaaggagctgcccctgctgaagttcctgggcatcttcaacacaggcctgaagatgtttcctgacctgaccaaggtgtacagcacagacatcttcttcatcctggagatcacagacaacccctacatgaccagcatccctgtgaatgccttccagggcctgtgcaatgagaccctgaccctgaagctgtacaacaacggcttcacctctgtgcagggctacgccttcaacggcaccaagctggatgctgtgtacctgaacaagaacaagtacctgaccgtcatcgacaaggatgcctttggaggagtgtacagcggccccagcctgctgctgcccctgggcaggaagagcctgagctttgagacccagaaggcccccaggagctccatgcccagctag

SEQ ID NO: 281518 - DNA, 762 bp, Artificial Sequence
  derived and/or modified sequence
atgcggcccgccgacctgctgcagctggtgctgctgctggacctgccacgagatctgggaggcatgggttgctcaagccctccctgtgaatgccaccaagaggaggacttccgcgtcacatgtaaggacatacagcgaattccatccctgccgcccagcacccagactctgaaactaattgagacacacttacgaacaatcccctctcacgctttctcaaatctgccaaacatcagcaggatatatgtgtcaatagatgtcacgctgcagcagcttgagtctcacagcttctacaacctgtctaaggtgacacacattgagatccgcaacactcgcaatcttacatacatcgacccagatgcactaaaggagctgcctctgctcaagtttctaggaatttttaatacaggcctgaagatgttccctgacctgactaaagtgtacagtactgacatcttctttatcctggaaatcactgacaatccatacatgacttctattcctgttaacgctttccagggtctatgtaatgaaaccctgacgctcaaattatataacaacgggtttactagcgtgcaggggtacgcattcaatggaaccaagcttgacgcagtgtatctcaataagaacaaataccttactgttatcgataaagatgcttttgggggcgtgtacagtggcccatcactgctgttgcctctgggaagaaaatccttatcctttgagactcagaaagcacctcggtcttccatgccctcttag

SEQ ID NO: 281519 - DNA, 762 bp, Artificial Sequence
  derived and/or modified sequence
atgcgacctgccgatcttctgcaactggttttgttgctcgacttacccagagacctgggcggaatgggatgctctagcccaccatgcgaatgtcaccaggaggaggacttcagagtcacatgcaaggatattcaacggataccaagtttgcccccttccactcaaaccctgaagctgatagagacgcatcttagaactattccatctcacgccttttcaaacctgcctaatatctctcggatttatgtgtcgatcgatgtgacactgcagcaactcgagtcccacagcttctataatctctccaaagtgacccatatcgagatacgcaacacgcgcaacctgacctatattgaccccgacgctctgaaggagctcccactgctgaagttcctgggaatttttaatacaggcctgaagatgttccccgaccttactaaagtgtactctacagatatcttctttatcctggaaatcaccgataatccatatatgacttcaatccctgtcaacgctttccagggtctctgcaacgagaccttaacccttaagttgtacaacaatggtttcacaagcgttcagggctatgcatttaacggcaccaaactggacgcggtctacctgaataaaaataagtatctcacggtgatcgacaaagacgcatttggcggagtgtatagcggtccttcactccttcttcccctcgggcgtaaaagcctgtcatttgagacccagaaggccccacggagcagcatgccctcatag

SEQ ID NO: 281520 - DNA, 1281 bp, Artificial Sequence
  derived and/or modified sequence
gtccagccaaggaaagtgaagcaagcagacttgtttgggtcaaggttgcctagggaagcggagcacttaagtgcctctttttccccttctccagcctcctccacagtggtgaggtcacagccccttggagccctccctcttcccacccctcccgctcccgggtctcctttggcctggggtaacccgaggtgcagagctgagaatgaggcgatttcggaggatggagaaatagccccgagtcccgtggaaaatgaggccggcggacttgctgcagctggtgctgctgctcgacctgcccagggacctgggcggaatggggtgttcgtctccaccctgcgagtgccatcaggaggaggacttcagagtcacctgcaaggatattcaacgcatccccagcttaccgcccagtacgcagactctgaagcttattgagactcacctgagaactattccaagtcatgcattttctaatctgcccaatatttccagaatctacgtatctatagatgtgactctgcagcagctggaatcacactccttctacaatttgagtaaagtgactcacatagaaattcggaataccaggaacttaacttacatagaccctgatgccctcaaagagctccccctcctaaagttccttggcattttcaacactggacttaaaatgttccctgacctgaccaaagtttattccactgatatattctttatacttgaaattacagacaacccttacatgacgtcaatccctgtgaatgcttttcagggactatgcaatgaaaccttgacactgaagctgtacaacaatggctttacttcagtccaaggatatgctttcaatgggacaaagctggatgctgtttacctaaacaagaataaatacctgacagttattgacaaagatgcatttggaggagtatacagtggaccaagcttgctgctacctcttggaagaaagtccttgtcctttgagactcagaaggccccacgctccagtatgccatcatgatgcctgctaaggcagccaccttggtgtacatgctcacagaggctctgttcatggagcagctgctgtttgaaaaattttgaaatgcaagatccacaactagatggaaggcactctagtctttgcagaaaaaaatgtacctgaatgtacattgcacaatgcctggcacaaagaaggaagaatataaatgatagttcgactcgtctgtggaagaacttacaatcatggggaaagatggaataaaaacattttttaaacagcatgaaaacata

SEQ ID NO: 281521 - protein, 346 aa, Artificial Sequence
  derived and/or modified sequence
MDLDLLDLNPRIIAAIKKAKLKSVKEVLHFSGPDLKRLTNLSSPEVWHLLRTASLHLRGSSILTALQLHQQKERFPTQHQRLSLGCPVLDALLRGGLPLDGITELAGRSSAGKTQLALQLCLAVQFPRQHGGLEAGAVYICTEDAFPHKRLQQLMAQQPRLRTDVPGELLQKLRFGSQIFIEHVADVDTLLECVNKKVPVLLSRGMARLVVIDSVAAPFRCEFDSQASAPRARHLQSLGATLRELSSAFQSPVLCINQVTEAMEEQGAAHGPLGFWDERVSPALGITWANQLLVRLLADRLREEEAALGCPARTLRVLSAPHLPPSSCSYTISAEGVRGTPGTQSH

SEQ ID NO: 281522 - protein, 47 aa, Artificial Sequence
  derived and/or modified sequence
MDLDLLDLNPRIIAAIKKAKLKSVKEVLHFSGPDLKRLTNLSSPEVW

SEQ ID NO: 281523 - protein, 45 aa, Artificial Sequence
  derived and/or modified sequence
MDLDLLDLNPRIIAAIKKAKLKSVKEVLHFSGPDLKRLTNLSSPE

SEQ ID NO: 281524 - protein, 102 aa, Artificial Sequence
  derived and/or modified sequence
MDLDLLDLNPRIIAAIKKAKLKSVKEVLHFSGPDLKRLTNLSSPEVWHLLRTASLHLRGSSILTALQLHQQKERFPTQHQRLSLGCPVLDALLRGGLPLDGI

SEQ ID NO: 281525 - protein, 61 aa, Artificial Sequence
  derived and/or modified sequence
MDLDLLDLNPRIIAAIKKAKLKSVKEVLHFSGPDLKRLTNLSSPEVWHLLRTASLHLRGSS

SEQ ID NO: 281526 - protein, 112 aa, Artificial Sequence
  derived and/or modified sequence
MDLDLLDLNPRIIAAIKKAKLKSVKEVLHFSGPDLKRLTNLSSPEVWHLLRTASLHLRGSSILTALQLHQQKERFPTQHQRLSLGCPVLDALLRGGLPLDGITELAGRSSAG

SEQ ID NO: 281527 - DNA, 1041 bp, Artificial Sequence
  derived and/or modified sequence
atggacctggacctgctggacctgaaccccagaatcatcgccgccatcaagaaggccaagctgaagagcgtgaaggaggtgctgcacttcagcggccccgacctgaagagactgaccaacctgagcagccccgaggtgtggcacctgctgagaaccgccagcctgcacctgagaggcagcagcatcctgaccgccctgcagctgcaccagcagaaggagagattccccacccagcaccagagactgagcctgggctgccccgtgctggacgccctgctgagaggcggcctgcccctggacggcatcaccgagctggccggcagaagcagcgccggcaagacccagctggccctgcagctgtgcctggccgtgcagttccccagacagcacggcggcctggaggccggcgccgtgtacatctgcaccgaggacgccttcccccacaagagactgcagcagctgatggcccagcagcccagactgagaaccgacgtgcccggcgagctgctgcagaagctgagattcggcagccagatcttcatcgagcacgtggccgacgtggacaccctgctggagtgcgtgaacaagaaggtgcccgtgctgctgagcagaggcatggccagactggtggtgatcgacagcgtggccgcccccttcagatgcgagttcgacagccaggccagcgcccccagagccagacacctgcagagcctgggcgccaccctgagagagctgagcagcgccttccagagccccgtgctgtgcatcaaccaggtgaccgaggccatggaggagcagggcgccgcccacggccccctgggcttctgggacgagagagtgagccccgccctgggcatcacctgggccaaccagctgctggtgagactgctggccgacagactgagagaggaggaggccgccctgggctgccccgccagaaccctgagagtgctgagcgccccccacctgccccccagcagctgcagctacaccatcagcgccgagggcgtgagaggcacccccggcacccagagccactag

SEQ ID NO: 281528 - DNA, 144 bp, Artificial Sequence
  derived and/or modified sequence
atggacctggacctgctggacctgaaccccagaatcatcgccgccatcaagaaggccaagctgaagagcgtgaaggaggtgctgcacttcagcggccccgacctgaagagactgaccaacctgagcagccccgaggtgtggtag

SEQ ID NO: 281529 - DNA, 138 bp, Artificial Sequence
  derived and/or modified sequence
atggacctggacctgctggacctgaaccccagaatcatcgccgccatcaagaaggccaagctgaagagcgtgaaggaggtgctgcacttcagcggccccgacctgaagagactgaccaacctgagcagccccgagtag

SEQ ID NO: 281530 - DNA, 309 bp, Artificial Sequence
  derived and/or modified sequence
atggacctggacctgctggacctgaaccccagaatcatcgccgccatcaagaaggccaagctgaagagcgtgaaggaggtgctgcacttcagcggccccgacctgaagagactgaccaacctgagcagccccgaggtgtggcacctgctgagaaccgccagcctgcacctgagaggcagcagcatcctgaccgccctgcagctgcaccagcagaaggagagattccccacccagcaccagagactgagcctgggctgccccgtgctggacgccctgctgagaggcggcctgcccctggacggcatctag

SEQ ID NO: 281531 - DNA, 186 bp, Artificial Sequence
  derived and/or modified sequence
atggacctggacctgctggacctgaaccccagaatcatcgccgccatcaagaaggccaagctgaagagcgtgaaggaggtgctgcacttcagcggccccgacctgaagagactgaccaacctgagcagccccgaggtgtggcacctgctgagaaccgccagcctgcacctgagaggcagcagctag

SEQ ID NO: 281532 - DNA, 339 bp, Artificial Sequence
  derived and/or modified sequence
atggacctggacctgctggacctgaaccccagaatcatcgccgccatcaagaaggccaagctgaagagcgtgaaggaggtgctgcacttcagcggccccgacctgaagagactgaccaacctgagcagccccgaggtgtggcacctgctgagaaccgccagcctgcacctgagaggcagcagcatcctgaccgccctgcagctgcaccagcagaaggagagattccccacccagcaccagagactgagcctgggctgccccgtgctggacgccctgctgagaggcggcctgcccctggacggcatcaccgagctggccggcagaagcagcgccggctag

SEQ ID NO: 281533 - DNA, 1041 bp, Artificial Sequence
  derived and/or modified sequence
atggaccttgaccttctggatctaaacccacgaattatagctgccatcaagaaagcgaaattgaaaagcgtgaaggaggtgctccacttctctggaccagatctgaagcgccttaccaatctgtcctctccagaagtgtggcatctgcttcgcaccgcctcactgcacctgcgcggcagctctattttaaccgcccttcaactgcaccagcaaaaagaaagatttcctacccaacaccagaggctttctctgggctgtccggtcctggacgccctgctccgcggagggctgcctctggacggaatcaccgagctcgctggacgcagttcagccggcaagacccagctcgcgttgcagctctgccttgccgttcagtttcctcgccagcacggaggtctcgaggcaggcgctgtgtatatttgcactgaggacgcctttccccataagagactgcagcagctgatggcacaacagcctaggttgaggacagacgtgcccggcgagctactgcagaagctccgcttcggaagtcagatttttatcgagcacgttgctgacgtggatacactgcttgaatgcgtcaacaagaaggtccctgtgctgctgtcccggggaatggcacgactcgtggttattgattccgtggctgcccctttcaggtgtgaattcgatagtcaggcatccgcccctcgggcacggcacctacagagtttaggagcgacactgcgggagctgtcttccgctttccaatccccagttctctgtattaaccaggtgactgaggccatggaggaacagggagctgcccacggtcctttgggcttttgggacgaacgcgtgtcccccgcccttgggataacgtgggctaaccaactgctggtcaggctcttggccgaccggttgcgcgaagaagaggcggccctgggctgcccggccagaacgttacgcgtgctctctgcccctcatctgccaccaagctcgtgctcctatactattagcgcggaaggcgtgaggggtaccccggggacccagtcacactag

SEQ ID NO: 281534 - DNA, 1041 bp, Artificial Sequence
  derived and/or modified sequence
atggacctcgatcttctggatttgaatccaaggatcatcgccgctataaagaaggccaaacttaaaagcgtaaaagaggttttgcacttttcaggtccggatctaaagaggctgaccaacttgtcgagtcctgaggtatggcacctccttagaacagcctctttacatctgcgggggtcatcaatcctgactgcactccaactgcatcagcagaaggagaggtttccaacccagcatcaaaggctctccctgggctgccctgtcttggacgccctcttgcgcggtggtctccctctcgatggcataacggagctggccgggcggtcgagcgccggcaaaacccagttagcactgcagttgtgtctggccgttcagttccccaggcagcacggggggctggaagcaggcgccgtatacatctgtaccgaggacgcgttccctcacaaacgcctgcagcaactgatggctcagcagcccagacttcggactgacgtacctggcgaattgctacaaaaacttaggttcggtagccaaatttttattgaacacgtggccgacgtggataccttactggaatgtgtcaataaaaaagtgcctgtgctcttgagcaggggaatggcaagactggtggtgatagactccgtggctgcccccttcagatgtgaattcgatagtcaggcttctgccccccgcgctcgacacttgcaatctttgggggctaccttacgggagctctcctcagctttccagagcccagttctgtgcataaaccaggttactgaggctatggaagagcagggcgctgcccacgggccgctggggttttgggacgagagggtcagtcctgcactaggcattacttgggccaatcagctccttgtacgcctactggcagataggctgagggaggaagaagctgcacttggctgtccagctcgcaccctcagagtgctgtcagcacctcacctgcctccatcgtcatgctcctacactatttcagctgagggggtaaggggcaccccgggcactcagtcgcattag

SEQ ID NO: 281535 - DNA, 1041 bp, Artificial Sequence
  derived and/or modified sequence
atggatctggatctcctcgacctgaaccctaggattatcgccgctatcaaaaaagctaagctgaagtccgtcaaggaggttctccacttttctggcccagatctgaagcggctgacgaatctgtccagccccgaggtgtggcatttacttcgcactgcgtccctgcacctccgcggcagctcgattctcaccgcgttgcagctccaccagcaaaaggaaaggttccccactcaacaccaacggctgtctctgggctgtcccgtactggatgccctgcttcggggcgggctccccctcgacggaatcactgagctagcagggagaagctctgctggcaagacccaactggccctgcagctatgtctcgcggtgcagtttccaaggcaacatggggggttggaagctggagctgtctatatttgtacggaggacgcctttccccataaacgactccagcaactaatggcccaacagccgcgactgcgtaccgatgttccgggggaattactgcagaagctccgatttgggagccaaatatttatagagcatgtggccgacgttgacactctcctcgagtgtgttaacaagaaggttcccgttctgcttagcagaggaatggcgcggttggttgtcatcgactctgtcgccgctccttttagatgcgaattcgattcacaggcatcagcaccacgcgccagacacctacaaagccttggcgccaccctaagggaactctcctcagcattccagagccccgtgctgtgtatcaatcaggtgaccgaggccatggaggagcagggcgccgcccatgggccactgggattttgggacgaaagggtttcccccgcacttggtattacctgggcgaatcagctgctggtgcgcctgcttgcggaccggctacgcgaagaggaggccgccctgggctgtcctgcgagaacgttgcgggtactaagcgctcctcacctgccgcccagctcatgctcatataccatcagtgcagagggcgtccgtggcacaccaggaacacaaagccactag

SEQ ID NO: 281536 - DNA, 144 bp, Artificial Sequence
  derived and/or modified sequence
atggacctcgatctcctagatctcaacccacggattatcgcagccatcaaaaaggctaagctaaaaagcgtgaaagaagtcctccatttttcagggccggacctcaagcgcctcacaaacttgtcctcccccgaagtctggtag

SEQ ID NO: 281537 - DNA, 138 bp, Artificial Sequence
  derived and/or modified sequence
atggacctggacttgctagatctgaaccctagaattatcgctgccatcaagaaagctaagctgaagtcggtgaaagaagtgctccacttttctggccccgatctcaagagacttacaaacttgtcctctcctgagtag

SEQ ID NO: 281538 - DNA, 1041 bp, Artificial Sequence
  derived and/or modified sequence
atggacctggacctgctcgatcttaacccaagaataatcgctgccatcaagaaggccaagctgaaaagcgtgaaagaggtgttgcatttctctggacctgaccttaagagattgaccaatctctcatctcctgaggtctggcacttgttacgtactgcctctctgcatttgagaggcagctccatcttaaccgcgctgcagttgcatcaacagaaggaacggtttcccacccagcaccagaggctctccctggggtgtcccgtacttgacgccctgctcaggggaggactcccactggacggcattactgagttggcaggtaggtcgagcgctggcaaaacccagcttgctcttcagctgtgtctggcggtgcaattcccacgccagcatggaggcctggaagccggcgccgtgtatatttgtaccgaggacgcgtttccccataaaaggttacagcaactgatggcacaacagcctcgtctgcgaaccgacgtgccgggagaactactacagaaacttcgcttcgggagtcaaatctttattgaacacgtggccgacgtggataccttattggaatgcgtgaacaagaaagtccctgtcctgctcagcaggggtatggcccgcctggtggtcatcgatagtgtggcagctccgttcaggtgtgagttcgactctcaggcatctgcacctcgtgcccggcatcttcaatctctgggggcaaccttgcgtgagctcagttcggcatttcagtcgcccgttctgtgcatcaaccaggtgaccgaggcaatggaagagcagggagccgctcacggacctctggggttttgggacgaaagagtgtcccctgccctgggaattacatgggctaatcagctgctggtcaggcttctggccgaccgactgagggaggaggaggccgctctgggctgcccagcgcgcaccctccgggtgttgtcggcacctcaccttcccccgtcttcttgctcctacacaattagcgccgagggagtgcggggcacccccggaacgcagtcacattag

SEQ ID NO: 281539 - DNA, 1041 bp, Artificial Sequence
  derived and/or modified sequence
atggatttggacttgctggacctgaatccccgcatcatcgcagccatcaagaaggccaagctgaagtctgtaaaagaagtcctgcacttctcaggtcccgacctgaagcggctgactaatctctcgagtcccgaggtgtggcatctccttcgcacagcttctctgcaccttcgaggttcatccatcctaacagccctgcagctgcatcagcagaaggagcgttttcccacacagcaccagaggctgtccctgggctgcccagtgttagatgcgttgctgagaggcgggcttcccctggacgggattactgagttagctggacgatcctcagccgggaagacccaacttgccctgcaactgtgcctggcagtgcaattcccccggcagcacggaggtctagaggccggcgccgtttacatttgtacagaagatgcattcccccacaagagactacaacaattaatggcccaacagcccagattgaggacggacgtgccaggtgagctcctgcagaagctgcgcttcggatcacagatatttatagaacatgtcgcggacgtcgacacactgctggagtgtgttaataaaaaagtcccagtgcttctgtcacgtggtatggccagactggttgttattgactctgtggccgcaccatttcgttgtgagtttgactcgcaggccagcgccccccgtgcccgccatctgcagtccctgggggctaccctaagggaactctcctctgccttccagagccccgttctatgtatcaatcaggtaacagaggcgatggaagaacagggagcggcccacggccctcttggattctgggatgaacgggtgagtccagcgctcgggatcacttgggcaaaccaacttttggtacggctgctcgctgacagacttagagaggaagaggcagcgctgggctgtcccgcccgtactttgcgcgtcttgtccgccccacatctacctccatcctcctgtagttacactatctcggctgagggtgtaaggggtacccccgggacccagtcacattag

SEQ ID NO: 281540 - DNA, 309 bp, Artificial Sequence
  derived and/or modified sequence
atggatttggacctccttgatctaaatccccgcattattgccgctataaaaaaggcgaaattgaagtcagtcaaggaggtacttcatttttctggacccgacctcaaaagacttacgaacctctcctctccagaggtgtggcatctcctgaggaccgcgtctctacacctgcgtgggagcagcatactgaccgccctgcaactgcaccagcagaaggagcgatttcctacacaacaccagaggcttagcttggggtgtcccgttcttgacgccttattgcgcgggggcttgccgctggacgggatctag

SEQ ID NO: 281541 - DNA, 186 bp, Artificial Sequence
  derived and/or modified sequence
atggatctagacctgctggacttgaatccacggattatagctgccataaagaaggctaagctgaaatccgtgaaggaggtgctccatttttcagggccagacctgaagcgactaactaacctttcatcgcctgaggtgtggcacctcttacgaactgcttccctacacttaaggggatcttcttag

SEQ ID NO: 281542 - DNA, 339 bp, Artificial Sequence
  derived and/or modified sequence
atggatctagaccttcttgaccttaacccaagaatcatagctgcaatcaagaaggccaaactgaagagtgtaaaagaagtgctccacttctctggcccagacctgaagaggctcacaaatctttctagccctgaggtatggcacttactgaggaccgcctccctgcacttgagggggagctccattttgactgcccttcagctgcaccagcagaaggaacgcttccccacccagcaccagcgactatcgctggggtgcccagtgcttgacgctctattgaggggaggcctcccactggacggtataacagagcttgcgggccgatcctcagctggatag

SEQ ID NO: 281543 - DNA, 1041 bp, Artificial Sequence
  derived and/or modified sequence
atggacctggacctgctggacctgaacccccgcatcatcgccgccatcaagaaggccaagctgaagtctgtgaaggaggtgctgcacttcagcggccctgacctgaagaggctgaccaacctgagcagccctgaggtgtggcacctgctgaggacagccagcctgcacctgcggggcagcagcatcctgacagccctgcagctgcaccagcagaaggagcgcttccccacccagcaccagaggctgagcctgggctgccctgtgctggatgccctgctgcggggcggcctgcccctggatggcatcacagagctggccggccgcagcagcgctgggaagacccagctggccctgcagctgtgcctggccgtgcagttcccccggcagcacggcggcctggaggccggggctgtgtacatctgcacagaagatgccttcccccacaagaggctgcagcagctgatggcccagcagccccggctgaggacagatgtgcctggagagctgctgcagaagctgcgcttcggcagccagatcttcattgaacatgtggctgatgtggacaccctgctggagtgtgtgaacaagaaggtgcctgtgctgctgagccggggcatggcccggctggtggtgattgacagcgtggccgcccccttccgctgtgaatttgacagccaggccagcgccccccgggcccggcacctgcagagcctgggcgccaccctgcgggagctgagcagcgccttccagagccctgtgctgtgcatcaaccaggtgacagaggccatggaggagcagggcgccgcccacggccccctgggcttctgggatgagcgggtgtccccagccctgggcatcacctgggccaaccagctgctggtgcggctgctggccgaccggctgcgggaggaggaggccgccctgggctgcccagcccggaccctgcgggtgctgagcgccccccacctgccccccagcagctgcagctacaccatctctgctgagggcgtgcggggcaccccaggcacccagagccactag

SEQ ID NO: 281544 - DNA, 144 bp, Artificial Sequence
  derived and/or modified sequence
atggacctggacctgctggacctgaacccccgcatcatcgccgccatcaagaaggccaagctgaagtctgtgaaggaggtgctgcacttcagcggccctgacctgaagaggctgaccaacctgagcagccctgaggtgtggtag

SEQ ID NO: 281545 - DNA, 138 bp, Artificial Sequence
  derived and/or modified sequence
atggacctggacctgctggacctgaacccccgcatcatcgccgccatcaagaaggccaagctgaagtctgtgaaggaggtgctgcacttcagcggccctgacctgaagaggctgaccaacctgagcagccctgagtag

SEQ ID NO: 281546 - DNA, 309 bp, Artificial Sequence
  derived and/or modified sequence
atggacctggacctgctggacctgaacccccgcatcatcgccgccatcaagaaggccaagctgaagtctgtgaaggaggtgctgcacttcagcggccctgacctgaagaggctgaccaacctgagcagccctgaggtgtggcacctgctgaggacagccagcctgcacctgcggggcagcagcatcctgacagccctgcagctgcaccagcagaaggagcgcttccccacccagcaccagaggctgagcctgggctgccctgtgctggatgccctgctgcggggcggcctgcccctggatggcatctag

SEQ ID NO: 281547 - DNA, 186 bp, Artificial Sequence
  derived and/or modified sequence
atggacctggacctgctggacctgaacccccgcatcatcgccgccatcaagaaggccaagctgaagtctgtgaaggaggtgctgcacttcagcggccctgacctgaagaggctgaccaacctgagcagccctgaggtgtggcacctgctgaggacagccagcctgcacctgcggggcagcagctag

SEQ ID NO: 281548 - DNA, 339 bp, Artificial Sequence
  derived and/or modified sequence
atggacctggacctgctggacctgaacccccgcatcatcgccgccatcaagaaggccaagctgaagtctgtgaaggaggtgctgcacttcagcggccctgacctgaagaggctgaccaacctgagcagccctgaggtgtggcacctgctgaggacagccagcctgcacctgcggggcagcagcatcctgacagccctgcagctgcaccagcagaaggagcgcttccccacccagcaccagaggctgagcctgggctgccctgtgctggatgccctgctgcggggcggcctgcccctggatggcatcacagagctggccggccgcagcagcgctggatag

SEQ ID NO: 281549 - DNA, 1041 bp, Artificial Sequence
  derived and/or modified sequence
atggacctggacctgctggacctgaacccccggatcatcgccgccatcaaaaaggccaagctgaaaagcgttaaggaggtcctgcacttttccggacctgacctcaagcgcttaactaacctcagcagtcccgaagtctggcatctcttacggaccgcatccctacacttaagaggatcatcaattctgacagctctgcagctgcaccagcagaaggagaggtttcccactcagcatcaaaggctgagtcttgggtgtcccgtcctggatgctttgctccgcggcggtctgcctctggatggcatcactgagctggccggaagatcctccgcagggaagacgcagcttgccctgcagttatgcctcgccgtgcagttcccgagacagcacggcggacttgaggccggcgcggtatatatttgtacagaggatgcgtttccccataagcgactgcagcagctgatggctcagcagccaagactacgcactgatgtgccgggtgaactgctgcaaaagttgaggttcggcagccaaatctttatagagcatgtagccgatgtcgacacccttttagagtgtgtgaacaaaaaggtgccggtgctgctgtcaaggggaatggctcgcctggtcgtgattgattctgttgccgctcccttcaggtgcgaatttgattctcaggcgtcggcgccccgggcccgacatctgcagtctctgggagctacactgcgagaactgtcgagcgcttttcagagccccgttctctgcattaaccaggtaaccgaagctatggaagagcagggggctgctcatggtccacttggattttgggacgagagagtgtcccccgcactggggattacttgggcgaatcagctgttggtccgtctcttggcagatcgtttgagagaagaggaggccgccctgggctgtccagcacgaaccctgcgagtgctgtccgcaccccatctaccacctagctcgtgctcatacaccataagcgcagaaggggtcaggggcactcctggtacccaatcgcattag

SEQ ID NO: 281550 - DNA, 1041 bp, Artificial Sequence
  derived and/or modified sequence
atggacctggacctgctggacctgaacccccggatcatcgccgccatcaagaaagccaagctcaagtctgtgaaggaggtgttacatttttccgggcctgatctgaaacgcctgactaatctatccagcccagaggtctggcacctgctaagaaccgcatcactgcacctgagagggtctagcatcctcacggcgttgcaactgcatcagcaaaaggagcgtttcccaacacagcatcagcgactgagcctagggtgtcccgtgctagatgcactgctgcggggcggcctccccctagatggtatcacggagttggccgggagaagctccgcggggaagacccaactggctctccagctatgtctggctgtacagttccccagacaacacgggggccttgaagctggcgcagtgtacatttgtactgaagacgcatttccacataagaggctgcagcagctcatggcgcagcagccacgacttagaaccgacgttcctggtgagcttttgcaaaaactgcgcttcggttcccagatatttattgaacatgtggctgatgtggacaccctcctggaatgcgtgaataagaaggttcctgttcttctcagccgggggatggcccggctggtggtgatcgacagcgtggctgctcccttccggtgtgagttcgactcacaagccagcgcgcccagggcccgacaccttcagagtctgggtgctacactcagagagttaagcagcgcattccaatctcccgtgctctgcataaatcaggtgacagaggccatggaagagcagggagctgcccacggtccactcggtttttgggatgagagggtgtccccagcccttggaataacatgggcaaaccaactcctggtgaggctgctggccgacagattgcgagaggaagaggcggcactgggctgcccagcccgcactctgcgcgtcctgagcgccccccacttgcccccgtcttcatgctcatacacaatttctgcagagggcgtcagaggcacacccggcactcaatcccattag

SEQ ID NO: 281551 - DNA, 1041 bp, Artificial Sequence
  derived and/or modified sequence
atggacctggacctgctggacctgaacccccggatcatcgccgccatcaaaaaggcaaaactgaagtcagtgaaggaggtgctgcactttagcggcccagacctcaaaaggctgacaaacctctcttctcccgaggtttggcacttgctgcgtactgcgagcctccacttgaggggaagctctatcttaactgcgctgcagctgcaccagcagaaagagcgatttcccacccagcaccagcgcctgagcctggggtgtcccgtgctggatgccctcctacgagggggtcttcctctggatggcattaccgagttagcagggaggagtagcgcaggcaaaacacagcttgccctgcaattatgcctggcagtccagtttccccgccagcacggcggccttgaagctggggccgtatacatctgcaccgaggacgcatttccccacaagcgcctccagcaacttatggctcagcagcccagattaaggactgatgttcctggcgaactactccagaaactgcggtttggatcccagattttcatagagcatgttgctgacgttgataccctgctagagtgcgtcaataagaaagtgcctgttctgctgtcccgaggtatggcccggctagtggtaattgattccgtcgcagcaccatttcgctgcgagtttgatagccaggcatccgcccctcgagcaaggcatcttcaaagcctgggagccacgttgagagagctgtctagcgctttccagtctccagtcctctgtatcaaccaggtgaccgaagcgatggaagaacaaggagcagcacacgggccccttggcttctgggacgaaagggtcagtcccgctcttggcataacatgggcaaaccagcttctggtgcgccttcttgccgatcgtcttagagaagaagaggcggccctcgggtgccctgcacgcacattaagggttctcagtgccccacacctgccccccagcagctgctcttacacaatttcagcggagggtgtgagaggtactccggggacccaaagccactag

SEQ ID NO: 281552 - DNA, 144 bp, Artificial Sequence
  derived and/or modified sequence
atggacctggacctgctggacctgaacccccggatcatcgccgccataaaaaaggccaagctgaaaagtgtgaaggaagtcttgcacttttccggaccagatctcaagcgccttacgaatctgtcctcccctgaggtttggtag

SEQ ID NO: 281553 - DNA, 138 bp, Artificial Sequence
  derived and/or modified sequence
atggacctggacctgctggacctgaacccccggatcatcgccgccattaaaaaagcgaaactgaaaagcgttaaagaggtactccatttcagcggccctgacctaaagaggctgaccaacctctctagcccagagtag

SEQ ID NO: 281554 - DNA, 1041 bp, Artificial Sequence
  derived and/or modified sequence
atggacctggacctgctggacctgaacccccggatcatcgccgccatcaagaaagcaaagctgaaaagtgtcaaggaggtgctccatttctctggaccagacctcaaacgcctgacaaacctctctagccccgaagtttggcacctcctccgtaccgcatctcttcacctgaggggctcatccatcctgactgctctccaattgcatcaacaaaaggaaagattccccacacagcatcagaggctcagcttgggctgtccagtgctggacgcactgctccgtggagggctgccactggacggcattacagaactggccggacgaagtagcgcggggaagacccagctggcgctgcagttgtgtcttgccgtgcagttccctcgacagcacggagggttagaagctggagccgtgtacatctgcacggaagatgcatttccgcacaaaagattgcaacagctgatggcccagcagccccgcctgcgcacagatgtgcccggggaattactgcagaaactgcggttcggatcacagattttcatcgagcacgttgctgacgtcgacactcttcttgagtgtgtgaataaaaaggtaccagtgcttctctctcgaggcatggctcgcctcgtggtgatcgattccgtcgccgccccgttccgatgtgaattcgattcccaggcatcagctcctcgggctcgacacctacagagcctgggtgcaaccctgagagaactgtcctcagcattccagtctcctgttctgtgtataaatcaggtgacagaggcaatggaggaacagggcgccgcacacgggcctctgggcttctgggatgagcgggtgagccctgcccttggcatcacctgggctaatcagctgctggttcgtctgcttgctgatcgactccgagaggaagaggcagcccttgggtgccccgccaggactcttagggttcttagcgcccctcatctcccaccctcgagctgtagctacaccatctctgccgagggagtccggggtactccaggcacacagagccactag

SEQ ID NO: 281555 - DNA, 1041 bp, Artificial Sequence
  derived and/or modified sequence
atggacctggacctgctggacctgaacccccggatcatcgccgccattaagaaggcaaagctcaagtccgttaaggaagtgctccacttttccggacctgacctgaagcgtctgacaaacctgagctcccccgaggtgtggcatctcttgagaacagcttctcttcacctcaggggctcatctattctgactgcccttcagcttcaccagcaaaaggaacgcttcccaacgcagcaccagaggctctcactcggttgccccgtcctcgacgccctcctgagaggtggcctcccccttgatggtattacagaattagctgggcgctctagcgctggcaaaacccagttggccctgcagttgtgtctcgcagtacagtttccccgccagcatggggggctggaagccggggctgtctatatttgcacggaggatgctttcccacacaagagattacagcagctgatggcccagcagccaagactgcgcactgacgtgccaggggaactccttcagaaattacgctttggctctcagatcttcatcgagcacgtagccgatgtagacacactgctggagtgcgtgaataagaaggtgcctgtactgctcagcagagggatggcccggctcgtggtaatcgactcagttgccgccccttttagatgcgaatttgactcccaagcatcagcccctagggccaggcacctgcagagtcttggcgccacactgcgggagttgagctccgcttttcagagtccagtgctctgtatcaaccaagtgaccgaggccatggaagagcagggtgcggcccatgggcccctgggcttctgggacgaaagagtttctccagccttgggtatcacctgggcaaatcaattgctagtccgtctccttgccgataggctgcgtgaagaggaagcagccttgggatgtcccgcacgaaccttgcgcgttctttcagcgcctcacctgcccccctcttcttgttcatacacgataagtgccgagggcgtgagggggaccccaggcacacagagtcactag

SEQ ID NO: 281556 - DNA, 309 bp, Artificial Sequence
  derived and/or modified sequence
atggacctggacctgctggacctgaacccccggatcatcgccgccatcaaaaaagctaaactaaagtcagtcaaggaggtcctgcacttttcaggccccgacctgaagaggctaaccaacttgtcttccccggaggtttggcaccttctccgaacagcatctctgcatttgcgcggttctagtatcctgacggcgctgcagcttcaccagcaaaaagagcgctttcctactcagcatcagaggttatcgctgggctgtccggtcttggatgcccttctccggggggggctgcccttggacggcatctag

SEQ ID NO: 281557 - DNA, 186 bp, Artificial Sequence
  derived and/or modified sequence
atggacctggacctgctggacctgaacccccggatcatcgccgccatcaagaaagcgaagctcaagtccgttaaggaagtgctgcacttctccggacccgacctgaaaagactcacaaatctgtccagtcctgaggtctggcatctgctgagaactgcgtctctgcacctgcgagggtctagctag

SEQ ID NO: 281558 - DNA, 339 bp, Artificial Sequence
  derived and/or modified sequence
atggacctggacctgctggacctgaacccccggatcatcgccgccatcaagaaggcgaaacttaaaagtgtcaaggaagttctgcacttttccggccctgacctgaaacggcttacaaatctgtccagtccagaggtttggcatctgctgaggaccgcttccctgcacctcagggggtccagcatcctgacagcactgcagctgcatcagcaaaaagaacgctttcccacccaacaccagcgcctatctctgggctgcccagttctagatgccctgctgcggggaggactgcctcttgatgggatcacagaacttgccggacgcagctctgcaggttag

SEQ ID NO: 281559 - DNA, 1041 bp, Artificial Sequence
  derived and/or modified sequence
atggacctagatcttctcgacttgaatccgcgtatcattgcagctatcaagaaggcaaaactcaagagcgtgaaggaggtgttgcatttttccggcccagaccttaaaagactcactaacctgagcagtcccgaagtctggcatcttctcagaacagcctccctgcatttgcggggatcttccatactgactgcattgcaactccaccaacagaaggagagatttcccacacagcatcagaggttgagtctgggatgtcccgtgctggatgcgctgctgagaggcggactgcccttagacggaatcactgagctcgctggacgctctagcgcaggcaagacgcagctggcactccagctctgcctagcagtgcaattccctagacagcacgggggattagaggctggcgctgtttatatttgcaccgaggacgcgtttcctcacaaaaggttgcagcagctcatggctcagcagcctcgtctaaggacagatgtgccaggggaactgctgcagaagctaagattcggctcacaaatttttatcgaacacgtagccgacgtcgatactttgttggagtgcgtgaacaagaaagtgcccgtgttgctgagccggggaatggccagactggtcgtaattgatagtgtcgccgctcctttcaggtgtgagttcgatagtcaggctagcgcacctagagcccgtcacttgcagtctttaggagcgactttgcgggagcttagcagcgcgtttcaatcccccgtgctgtgcatcaaccaggtcacagaagccatggaagagcagggcgcagcccacggccctctgggattttgggacgaaagagtgtcacccgctctgggcattacatgggccaatcagctattggtgcgactgcttgcagacaggcttagagaagaagaggccgctctgggatgtcccgcaaggaccttaagggtgctcagtgcgccacacctcccacccagctcatgttcttacacaatctcagctgagggcgtgcgcggaacacccggaacccagtcacactag

SEQ ID NO: 281560 - DNA, 1041 bp, Artificial Sequence
  derived and/or modified sequence
atggatttagacctgctcgacctgaatcccaggataattgctgcgattaagaaagctaaactgaagtcagtgaaggaggtgttgcacttctctggccctgacctgaaacgactcacaaatctgtctagtcccgaagtttggcacctgctgagaactgcgtccctccacctgcggggttcatcaatactcactgccctccaactccatcagcagaaggagcggtttccaactcagcatcagaggttgtcgctggggtgtcccgtgctggatgcattattacgcggagggctacctctggatggtattaccgaattagcaggtaggagttctgcaggaaaaacacagcttgcactgcagctgtgccttgcagtccaatttcctcgacagcacggaggcttagaagcaggggcagtttacatatgcactgaggatgcctttccccacaaacgcctccaacaactgatggcacaacagcccagactgaggaccgacgtcccaggcgaactgctacagaaactgcgcttcgggagccagatctttattgagcacgtagccgacgtggataccctcctcgaatgtgtgaataagaaagtacccgttctgctcagccgcggtatggcccgattggtcgttattgattcggtggctgccccatttcggtgcgagttcgatagccaggcaagtgccccaagagctcgacacctgcaatctctaggtgccactctaagggagctctctagtgccttccagtcacctgttctgtgtatcaaccaggtcacagaggcaatggaagaacagggggcagcccacggtcctctgggtttctgggacgaacgtgtctcgcccgcacttggtattacatgggcgaaccaattgctggtgagactgttggctgaccgtctgcgggaagaggaagctgcactggggtgcccagccagaactctccgcgtgctgtccgcgcctcacctgccacccagctcctgttcttatactatcagcgcggagggggtgcgaggaacaccgggaactcagagtcattag

SEQ ID NO: 281561 - DNA, 1041 bp, Artificial Sequence
  derived and/or modified sequence
atggatctcgacttgctcgacttaaatccacggattatcgctgctatcaagaaagcaaagctgaagagcgtcaaagaggtgctgcattttagtggtccagatctgaaaagactgacaaatcttagttccccagaagtttggcacctgcttaggaccgccagcctacaccttagggggtcaagcatattgactgcactgcagttgcatcagcagaaagagaggttccccacacaacatcagaggttgagccttggatgtccagtcctggacgcgctcctgcgcggtggactgcccctcgacggcataacggaactggccggtaggtccagcgctgggaaaacccagctggcactacagctgtgcctggccgtccagtttcccaggcaacatggcggtctagaagcaggagcagtgtacatttgtactgaggacgcctttcctcataaacgtcttcagcaactcatggcacagcaacccagattacgcactgacgtccccggtgaacttcttcagaagctgcgctttggctcccagatatttatcgaacacgtggccgatgtggataccctgttagaatgtgtcaacaaaaaggtgcctgtgctactctcacgcggtatggcccgactagtagtgatagacagcgtggccgctcccttcagatgcgaattcgatagccaagcttcggcccctcgcgctaggcacctccagagtctgggggcaacgcttagagagctgagtagcgcgttccagagtcctgttttgtgcatcaaccaggttaccgaagcaatggaggaacagggggctgcccacggcccactgggcttctgggatgagagagtaagtcctgctctcgggattacctgggcgaaccaactgcttgtgcgtcttctggcagatagactgcgcgaagaagaggcagccttgggctgccctgcaagaaccttgagagtgttgtctgctcctcaccttcccccaagttcctgtagctacactatcagtgcagagggagttaggggaacccctggaacccaatcccactag

SEQ ID NO: 281562 - DNA, 144 bp, Artificial Sequence
  derived and/or modified sequence
atggatctggatctgctggatctgaaccctagaataatcgcggctattaagaaagcaaagttgaaatctgtaaaggaggttctccacttctctggacccgacttgaaaaggctgacaaatctctcatcccccgaagtttggtag

SEQ ID NO: 281563 - DNA, 138 bp, Artificial Sequence
  derived and/or modified sequence
atggatctggatttgttggacctgaatcccaggatcattgctgcaatcaagaaggctaaactgaagagcgtcaaggaggtgctgcattttagcggacccgacttaaaacgtttaaccaatctctcatctcccgagtag

SEQ ID NO: 281564 - DNA, 1041 bp, Artificial Sequence
  derived and/or modified sequence
atggacctggatctgctggatttaaatccaaggattatcgccgcaattaagaaagccaagttaaaaagcgttaaagaagtgctccacttcagcggacccgacttaaagaggttaacaaacttgtccagccctgaggtctggcacctcctgcgaaccgcaagcctgcacctgcgcggatcttcaatcttgactgccctgcagctccaccagcagaaagagcgcttccccacccagcaccaacggctgtccctgggatgccccgtgctggatgcacttctccggggaggcttgccgcttgatggaatcaccgaactggctgggaggtcaagcgctgggaagactcaactggctctgcagctctgcctggccgtccagtttcccaggcaacacggcggactggaggcaggggctgtctacatctgtacagaagatgcttttccgcacaaacgcctccagcagctgatggcacagcagccacgtctcaggaccgacgttccaggggaactgctacagaaattaagattcggctctcagatttttatcgagcatgttgctgatgtggatacgctcctcgaatgtgtgaacaaaaaagtgcctgtgctgctttcccgcggtatggctcgccttgtggtcatcgacagtgtcgccgctcctttcaggtgcgaatttgacagtcaagcctctgcacctcgggctcggcacctgcagtctctaggtgccaccctgcgagagctttctagcgctttccagtccccggttctctgtattaatcaggtgaccgaagctatggaagaacagggggcagcgcatggcccactcggcttctgggacgagcgtgtgtcccccgctttagggataacatgggccaaccaactacttgttagactcctggccgacaggctgagggaagaagaagccgctctgggctgtcctgctcgcaccctgcgcgtgctcagtgcacctcatctgcctccgtcctcatgttcgtacacaatctccgctgaaggggtgcgaggaacaccaggaacgcagtcacattag

SEQ ID NO: 281565 - DNA, 1041 bp, Artificial Sequence
  derived and/or modified sequence
atggacttggaccttttagatcttaatcccagaattatcgccgctattaaaaaggcaaagctgaagagtgttaaggaggtgcttcacttttcaggaccagatttaaaacgcctgactaacttatcatctccagaagtttggcacctgctgcggaccgccagtctccacttgcggggaagcagcattttaaccgcactccagctgcaccaacagaaagagcgctttccgactcagcaccaacgcctgagtctggggtgccctgtcctggatgccttgttaagagggggactacctctggacggcattactgagctggccggacgttcctcagccggaaagacacagctggctctgcaactgtgtctggccgtgcagttcccacgacagcatggaggcctggaagctggggctgtatacatttgtactgaggacgcattcccccacaagcgattgcaacaactgatggcccaacaaccaagattgcggacggacgtcccaggggaactgctgcagaagttgaggttcggctcacaaatatttatagaacacgtggctgacgtcgatacactacttgagtgcgtcaataagaaggtcccagtgcttctcagtagaggcatggctcgactggtggttatcgactctgtggctgccccttttcgttgtgagttcgactcccaggcaagtgccccacgcgctagacacctacagtcactgggagcaaccctgcgggagcttagctccgcctttcagtctcctgtcctttgcattaatcaggtgacagaagcaatggaagaacagggcgcagcgcacggcccactcggcttctgggacgaaagggtgagtcctgccctggggatcacatgggccaatcagctgctggtacgtctgctcgccgaccgcctgcgggaggaggaagccgctctgggttgccctgccaggacactccgtgtgctgagcgcccctcacttgccgcctagctcttgttcatacactataagcgctgagggggttagaggaacgcccggaactcaatctcattag

SEQ ID NO: 281566 - DNA, 309 bp, Artificial Sequence
  derived and/or modified sequence
atggatctggatctcctggacctgaatccgagaatcatagcagctataaagaaagccaaactgaagtctgtgaaagaagtgttacacttctcggggcctgacctgaagcgactgacgaatctgtctagccccgaggtgtggcatcttctccggaccgccagcctgcacttaaggggctctagcatacttactgccctccaactccaccaacagaaggagagatttcccactcagcaccagcgcctgtctcttggctgcccagtgttagacgctctgttgcggggaggactgcccctcgacggcatctag

SEQ ID NO: 281567 - DNA, 186 bp, Artificial Sequence
  derived and/or modified sequence
atggaccttgacttgctcgatctgaaccccagaataattgccgcaatcaaaaaggcaaagctcaagtccgttaaggaggtactgcatttttcgggccctgacctgaagcgtctgaccaacctgagtagcccagaagtctggcacctgctccgaacggcgagcctccaccttcgcggttcttcgtag

SEQ ID NO: 281568 - DNA, 339 bp, Artificial Sequence
  derived and/or modified sequence
atggacctggatcttcttgatctgaacccacggatcatcgcagcgataaagaaggctaagctgaagtctgtcaaagaagtacttcacttctccggccctgatctgaaaagactgacaaatctgtcttcacctgaagtgtggcacctgctgagaacggcgtcgttacacctcagagggtcatcaattctcaccgcgttgcagttacatcagcagaaagaacgattccccactcagcaccagagattgtcccttggctgccccgtcttagacgcccttttgagggggggactaccccttgatgggattaccgagctggccggacggagttccgcgggatag

SEQ ID NO: 281569 - DNA, 2563 bp, Artificial Sequence
  derived and/or modified sequence
actcagggtgctaggcgcctattggaggagaaggccgagaggagcaggacggcgggaagaggagtgcggaacccgcgggagagtccccagggagacacttaagggaaattaaactgcagagtgcaagagatgcctcagtcaagtcagccaaaaacacgcgggtcatccccaagccccagagagtgacagagccccgatgacacggacacctcggctgctgtcacttccctggttcgggcctcccacaggctttgaattgaaggcgagtgcctcagaatttgcatccattgttctgtctttcctgggaagttattcatcctggtggccagcccaccgacaaaatggatttggatctactggacctgaatcccagaattattgctgcaattaagaaagccaaactgaaatcggtaaaggaggttttacacttttctggaccagacttgaagagactgaccaacctctccagccccgaggtctggcacttgctgagaacggcctccttacacttgcggggaagcagcatccttacagcactgcagctgcaccagcagaaggagcggttccccacgcagcaccagcgcctgagcctgggctgcccggtgctggacgcgctgctccgcggtggcctgcccctggacggcatcactgagctggccggacgcagctcggcagggaagacccagctggcgctgcagctctgcctggctgtgcagttcccgcggcagcacggaggcctggaggctggagccgtctacatctgcacggaagacgccttcccgcacaagcgcctgcagcagctcatggcccagcagccgcggctgcgcactgacgttccaggagagctgcttcagaagctccgatttggcagccagatcttcatcgagcacgtggccgatgtggacaccttgttggagtgtgtgaataagaaggtccccgtactgctgtctcggggcatggctcgcctggtggtcatcgactcggtggcagccccattccgctgtgaatttgacagccaggcctccgcccccagggccaggcatctgcagtccctgggggccacgctgcgtgagctgagcagtgccttccagagccctgtgctgtgcatcaaccaggtgacagaggccatggaggagcagggcgcagcacacgggccgctggggttctgggacgaacgtgtttccccagcccttggcataacctgggctaaccagctcctggtgagactgctggctgaccggctccgcgaggaagaggctgccctcggctgcccagcccggaccctgcgggtgctctctgccccccacctgcccccctcctcctgttcctacacgatcagtgccgaaggggtgcgagggacacctgggacccagtcccactgacacggtggcggctgcacaacagccctgcctgagaagccccgacacacggggctcgggcctttaaaacgcgtctgcctgggccgtggcacagctgggagcctggttcagacacagctcttccagggcagcggctccactttctcatccgaagatggtggccacagactgacccccatctgagctggggggatgttctgcctctccctgggtctggggacaggcccgcttgctgggtacctggtccccactgctgagctggcccttggggagaggtgattctcagggctggagcctggggtgtcctacagtgactccctgggagccgcctgcttcttctctccacatggaagcccaactggggttgcgtctgaggcctgccccctgggctggggcctcagaccccctcagccttgggaccgtgcccacgagggtctcccctcctgcacacagggcagtccttactcccccaccactcaggccacagtggggctgcaggcaggcggctcctcctcacccacctctgggtccttggctcccgggggccccacctcggcacacactgtgccccacaaaacttcagtgtggtacaaggtggagaaagcatatcccaccaacctccagtgtcagggtccaggagagcctgggggtggggggactgccttgtctctagtagtgtggcctgtgccagcaccacagccggtcagaggagcgcaggcagcgcagggctggcacgtgacaggctcgtcagccacctgggaacacagttctgggcaaagaggatccgaggttgagaggaaggagggtcccggtgtatcctggccctgggggtctgggcgtccagctcagccctggcctggctgggtggtattctggtagggatatggcaggactcctggcagggccacctgcaggaccctgtcctgcagtcccacactgtgcagacccagtcccacactgtggccaggccttacatctggctggaaagcagagcctcctgggaacacatctggctgcacaggctgaaatatccacccagcaggcagagtggcgtggcctccccatgggcacagtggtgacccccttgattcccaccgtacaaccccctccaccccccactcagtgcctccacatgctgcctggcacagaccaggcctttgacaaataaatgttcaatggatgca

SEQ ID NO: 281570 - DNA, 2622 bp, Artificial Sequence
  derived and/or modified sequence
ctattggaggagaaggccgagaggagcaggacggcgggaagaggagtgcggaacccgcgggaggtgaggcccgccgagccgggctgcgagccgggctgcgagccgggcggcagcggggtcggaggtcgtgggcggcagcggagtccccagggagacacttaagggaaattaaactgcagagtgcaagagatgcctcagtcaagtcagccaaaaacacgcgggtcatccccaagccccagagagtgacagagccccgatgacacggacacctcggctgctgtcacttccctggttcgggcctcccacaggctttgaattgaaggcgagtgcctcagaatttgcatccattgttctgtctttcctgggaagttattcatcctggtggccagcccaccgacaaaatggatttggatctactggacctgaatcccagaattattgctgcaattaagaaagccaaactgaaatcggtaaaggaggttttacacttttctggaccagacttgaagagactgaccaacctctccagccccgaggtctggcacttgctgagaacggcctccttacacttgcggggaagcagcatccttacagcactgcagctgcaccagcagaaggagcggttccccacgcagcaccagcgcctgagcctgggctgcccggtgctggacgcgctgctccgcggtggcctgcccctggacggcatcactgagctggccggacgcagctcggcagggaagacccagctggcgctgcagctctgcctggctgtgcagttcccgcggcagcacggaggcctggaggctggagccgtctacatctgcacggaagacgccttcccgcacaagcgcctgcagcagctcatggcccagcagccgcggctgcgcactgacgttccaggagagctgcttcagaagctccgatttggcagccagatcttcatcgagcacgtggccgatgtggacaccttgttggagtgtgtgaataagaaggtccccgtactgctgtctcggggcatggctcgcctggtggtcatcgactcggtggcagccccattccgctgtgaatttgacagccaggcctccgcccccagggccaggcatctgcagtccctgggggccacgctgcgtgagctgagcagtgccttccagagccctgtgctgtgcatcaaccaggtgacagaggccatggaggagcagggcgcagcacacgggccgctggggttctgggacgaacgtgtttccccagcccttggcataacctgggctaaccagctcctggtgagactgctggctgaccggctccgcgaggaagaggctgccctcggctgcccagcccggaccctgcgggtgctctctgccccccacctgcccccctcctcctgttcctacacgatcagtgccgaaggggtgcgagggacacctgggacccagtcccactgacacggtggcggctgcacaacagccctgcctgagaagccccgacacacggggctcgggcctttaaaacgcgtctgcctgggccgtggcacagctgggagcctggttcagacacagctcttccagggcagcggctccactttctcatccgaagatggtggccacagactgacccccatctgagctggggggatgttctgcctctccctgggtctggggacaggcccgcttgctgggtacctggtccccactgctgagctggcccttggggagaggtgattctcagggctggagcctggggtgtcctacagtgactccctgggagccgcctgcttcttctctccacatggaagcccaactggggttgcgtctgaggcctgccccctgggctggggcctcagaccccctcagccttgggaccgtgcccacgagggtctcccctcctgcacacagggcagtccttactcccccaccactcaggccacagtggggctgcaggcaggcggctcctcctcacccacctctgggtccttggctcccgggggccccacctcggcacacactgtgccccacaaaacttcagtgtggtacaaggtggagaaagcatatcccaccaacctccagtgtcagggtccaggagagcctgggggtggggggactgccttgtctctagtagtgtggcctgtgccagcaccacagccggtcagaggagcgcaggcagcgcagggctggcacgtgacaggctcgtcagccacctgggaacacagttctgggcaaagaggatccgaggttgagaggaaggagggtcccggtgtatcctggccctgggggtctgggcgtccagctcagccctggcctggctgggtggtattctggtagggatatggcaggactcctggcagggccacctgcaggaccctgtcctgcagtcccacactgtgcagacccagtcccacactgtggccaggccttacatctggctggaaagcagagcctcctgggaacacatctggctgcacaggctgaaatatccacccagcaggcagagtggcgtggcctccccatgggcacagtggtgacccccttgattcccaccgtacaaccccctccaccccccactcagtgcctccacatgctgcctggcacagaccaggcctttgacaaataaatgttcaatggatgc

SEQ ID NO: 281571 - DNA, 3018 bp, Artificial Sequence
  derived and/or modified sequence
ctccctgagcaggctgaacatgggcatacgagtgaccagcgtgatcgtgtccaggccagtgccgcattctgtgtggtccaagggaaaaccttctccaagtccacggcccgccctttcctctgctgggttacggccaagggcgccaggcctcactggaggacatggatcctggacccggccctcgaggctgctgccttccagtttccccatgtcctggacactcttggtctcaccatttgggaggccgacaggggatgcagagtggcctgttggaaaggccttatgtgaccccaggctgagtccctgagcagcctgctgaggccggaggggagaagagctgagcttctcccttgctgggccaggctcgggctgtggaatggctgccagctcccttcctgggagaggctgggtggggtccacagcaccttcctcccgtcccacaggaagctgtcttctgctgttggctgctgggggcgactgatgtttggatccctgagcaccctgccaatcccagactcaccttcccactctttccagagtccccagggagacacttaagggaaattaaactgcagagtgcaagagatgcctcagtcaagtcagccaaaaacacgcgggtcatccccaagccccagagagtgacagagccccgatgacacggacacctcggctgctgtcacttccctggttcgggcctcccacaggctttgaattgaaggcgagtgcctcagaatttgcatccattgttctgtctttcctgggaagttattcatcctggtggccagcccaccgacaaaatggatttggatctactggacctgaatcccagaattattgctgcaattaagaaagccaaactgaaatcggtaaaggaggttttacacttttctggaccagacttgaagagactgaccaacctctccagccccgaggtctggcacttgctgagaacggcctccttacacttgcggggaagcagcatccttacagcactgcagctgcaccagcagaaggagcggttccccacgcagcaccagcgcctgagcctgggctgcccggtgctggacgcgctgctccgcggtggcctgcccctggacggcatcactgagctggccggacgcagctcggcagggaagacccagctggcgctgcagctctgcctggctgtgcagttcccgcggcagcacggaggcctggaggctggagccgtctacatctgcacggaagacgccttcccgcacaagcgcctgcagcagctcatggcccagcagccgcggctgcgcactgacgttccaggagagctgcttcagaagctccgatttggcagccagatcttcatcgagcacgtggccgatgtggacaccttgttggagtgtgtgaataagaaggtccccgtactgctgtctcggggcatggctcgcctggtggtcatcgactcggtggcagccccattccgctgtgaatttgacagccaggcctccgcccccagggccaggcatctgcagtccctgggggccacgctgcgtgagctgagcagtgccttccagagccctgtgctgtgcatcaaccaggtgacagaggccatggaggagcagggcgcagcacacgggccgctggggttctgggacgaacgtgtttccccagcccttggcataacctgggctaaccagctcctggtgagactgctggctgaccggctccgcgaggaagaggctgccctcggctgcccagcccggaccctgcgggtgctctctgccccccacctgcccccctcctcctgttcctacacgatcagtgccgaaggggtgcgagggacacctgggacccagtcccactgacacggtggcggctgcacaacagccctgcctgagaagccccgacacacggggctcgggcctttaaaacgcgtctgcctgggccgtggcacagctgggagcctggttcagacacagctcttccagggcagcggctccactttctcatccgaagatggtggccacagactgacccccatctgagctggggggatgttctgcctctccctgggtctggggacaggcccgcttgctgggtacctggtccccactgctgagctggcccttggggagaggtgattctcagggctggagcctggggtgtcctacagtgactccctgggagccgcctgcttcttctctccacatggaagcccaactggggttgcgtctgaggcctgccccctgggctggggcctcagaccccctcagccttgggaccgtgcccacgagggtctcccctcctgcacacagggcagtccttactcccccaccactcaggccacagtggggctgcaggcaggcggctcctcctcacccacctctgggtccttggctcccgggggccccacctcggcacacactgtgccccacaaaacttcagtgtggtacaaggtggagaaagcatatcccaccaacctccagtgtcagggtccaggagagcctgggggtggggggactgccttgtctctagtagtgtggcctgtgccagcaccacagccggtcagaggagcgcaggcagcgcagggctggcacgtgacaggctcgtcagccacctgggaacacagttctgggcaaagaggatccgaggttgagaggaaggagggtcccggtgtatcctggccctgggggtctgggcgtccagctcagccctggcctggctgggtggtattctggtagggatatggcaggactcctggcagggccacctgcaggaccctgtcctgcagtcccacactgtgcagacccagtcccacactgtggccaggccttacatctggctggaaagcagagcctcctgggaacacatctggctgcacaggctgaaatatccacccagcaggcagagtggcgtggcctccccatgggcacagtggtgacccccttgattcccaccgtacaaccccctccaccccccactcagtgcctccacatgctgcctggcacagaccaggcctttgacaaataaatgttcaatggatgc

SEQ ID NO: 281572 - DNA, 560 bp, Artificial Sequence
  derived and/or modified sequence
ctattggaggagaaggccgagaggagcaggacggcgggaagaggagtgcggaacccgcgggaggaagctgtcttctgctgttggctgctgggggcgactgatgtttggatccctgagcaccctgccaatcccagactcaccttcccactctttccagagtccccagggagacacttaagggaaattaaactgcagagtgcaagagatgcctcagtcaagtcagccaaaaacacgcgggtcatccccaagccccagagagtgacagagccccgatgacacggacacctcggctgctgtcacttccctggttcgggcctcccacaggctttgaattgaaggcgagtgcctcagaatttgcatccattgttctgtctttcctgggaagttattcatcctggtggccagcccaccgacaaaatggatttggatctactggacctgaatcccagaattattgctgcaattaagaaagccaaactgaaatcggtaaaggaggttttacacttttctggaccagacttgaagagactgaccaacctctccagccccgaggtctggca

SEQ ID NO: 281573 - DNA, 572 bp, Artificial Sequence
  derived and/or modified sequence
agatttgttctcgggttcacagtgctcagaggggaggagaggggaggaggtgaagacacctggcagggaagcagggcctccatggatggggtgcattcacggcagggagttctcagcaggatgtgcacagagggcccaggaggagcctcaggagccggactgccgttggccaaccgagtccccagggagacacttaagggaaattaaactgcagagtgcaagagatgcctcagtcaagtcagccaaaaacacgcgggtcatccccaagccccagagagtgacagagccccgatgacacggacacctcggctgctgtcacttccctggttcgggcctcccacaggctttgaattgaaggcgagtgcctcagaatttgcatccattgttctgtctttcctgggaagttattcatcctggtggccagcccaccgacaaaatggatttggatctactggacctgaatcccagaattattgctgcaattaagaaagccaaactgaaatcggtaaaggaggttttacacttttctggaccagacttgaagagactgaccaacctctccagccccgagg

SEQ ID NO: 281574 - DNA, 2539 bp, Artificial Sequence
  derived and/or modified sequence
gagtgcggaacccgcgggagactttgagccaggcctgttaaaccaagttctcagcaggatgtgcacagagggcccaggaggagcctcaggagccggactgccgttggccaaccgagtccccagggagacacttaagggaaattaaactgcagagtgcaagagatgcctcagtcaagtcagccaaaaacacgcgggtcatccccaagccccagagaggctttgaattgaaggcgagtgcctcagaatttgcatccattgttctgtctttcctgggaagttattcatcctggtggccagcccaccgacaaaatggatttggatctactggacctgaatcccagaattattgctgcaattaagaaagccaaactgaaatcggtaaaggaggttttacacttttctggaccagacttgaagagactgaccaacctctccagccccgaggtctggcacttgctgagaacggcctccttacacttgcggggaagcagcatccttacagcactgcagctgcaccagcagaaggagcggttccccacgcagcaccagcgcctgagcctgggctgcccggtgctggacgcgctgctccgcggtggcctgcccctggacggcatcactgagctggccggacgcagctcggcagggaagacccagctggcgctgcagctctgcctggctgtgcagttcccgcggcagcacggaggcctggaggctggagccgtctacatctgcacggaagacgccttcccgcacaagcgcctgcagcagctcatggcccagcagccgcggctgcgcactgacgttccaggagagctgcttcagaagctccgatttggcagccagatcttcatcgagcacgtggccgatgtggacaccttgttggagtgtgtgaataagaaggtccccgtactgctgtctcggggcatggctcgcctggtggtcatcgactcggtggcagccccattccgctgtgaatttgacagccaggcctccgcccccagggccaggcatctgcagtccctgggggccacgctgcgtgagctgagcagtgccttccagagccctgtgctgtgcatcaaccaggtgacagaggccatggaggagcagggcgcagcacacgggccgctggggttctgggacgaacgtgtttccccagcccttggcataacctgggctaaccagctcctggtgagactgctggctgaccggctccgcgaggaagaggctgccctcggctgcccagcccggaccctgcgggtgctctctgccccccacctgcccccctcctcctgttcctacacgatcagtgccgaaggggtgcgagggacacctgggacccagtcccactgacacggtggcggctgcacaacagccctgcctgagaagccccgacacacggggctcgggcctttaaaacgcgtctgcctgggccgtggcacagctgggagcctggttcagacacagctcttccagggcagcggctccactttctcatccgaagatggtggccacagactgacccccatctgagctggggggatgttctgcctctccctgggtctggggacaggcccgcttgctgggtacctggtccccactgctgagctggcccttggggagaggtgattctcagggctggagcctggggtgtcctacagtgactccctgggagccgcctgcttcttctctccacatggaagcccaactggggttgcgtctgaggcctgccccctgggctggggcctcagaccccctcagccttgggaccgtgcccacgagggtctcccctcctgcacacagggcagtccttactcccccaccactcaggccacagtggggctgcaggcaggcggctcctcctcacccacctctgggtccttggctcccgggggccccacctcggcacacactgtgccccacaaaacttcagtgtggtacaaggtggagaaagcatatcccaccaacctccagtgtcagggtccaggagagcctgggggtggggggactgccttgtctctagtagtgtggcctgtgccagcaccacagccggtcagaggagcgcaggcagcgcagggctggcacgtgacaggctcgtcagccacctgggaacacagttctgggcaaagaggatccgaggttgagaggaaggagggtcccggtgtatcctggccctgggggtctgggcgtccagctcagccctggcctggctgggtggtattctggtagggatatggcaggactcctggcagggccacctgcaggaccctgtcctgcagtcccacactgtgcagacccagtcccacactgtggccaggccttacatctggctggaaagcagagcctcctgggaacacatctggctgcacaggctgaaatatccacccagcaggcagagtggcgtggcctccccatgggcacagtggtgacccccttgattcccaccgtacaaccccctccaccccccactcagtgcctccacatgctgcctggcacagaccaggcctttgacaaataaatgttcaatggatgcagttccagg

SEQ ID NO: 281575 - DNA, 2584 bp, Artificial Sequence
  derived and/or modified sequence
cgagaggagcaggacggcgggaagaggagtgcggaacccgcgggaggatgtgcacagagggcccaggaggagcctcaggagccggactgccgttggccaaccgagtccccagggagacacttaagggaaattaaactgcagagtgcaagagatgcctcagtcaagtcagccaaaaacacgcgggtcatccccaagccccagagagtgacagagccccgatgacacggacacctcggctgctgtcacttccctggttcgggcctcccacaggctttgaattgaaggcgagtgcctcagaatttgcatccattgttctgtctttcctgggaagttattcatcctggtggccagcccaccgacaaaatggatttggatctactggacctgaatcccagaattattgctgcaattaagaaagccaaactgaaatcggtaaaggaggttttacacttttctggaccagacttgaagagactgaccaacctctccagccccgaggtctggcacttgctgagaacggcctccttacacttgcggggaagcagcatccttacagcactgcagctgcaccagcagaaggagcggttccccacgcagcaccagcgcctgagcctgggctgcccggtgctggacgcgctgctccgcggtggcctgcccctggacggcatcactgagctggccggacgcagctcggcagggaagacccagctggcgctgcagctctgcctggctgtgcagttcccgcggcagcacggaggcctggaggctggagccgtctacatctgcacggaagacgccttcccgcacaagcgcctgcagcagctcatggcccagcagccgcggctgcgcactgacgttccaggagagctgcttcagaagctccgatttggcagccagatcttcatcgagcacgtggccgatgtggacaccttgttggagtgtgtgaataagaaggtccccgtactgctgtctcggggcatggctcgcctggtggtcatcgactcggtggcagccccattccgctgtgaatttgacagccaggcctccgcccccagggccaggcatctgcagtccctgggggccacgctgcgtgagctgagcagtgccttccagagccctgtgctgtgcatcaaccaggtgacagaggccatggaggagcagggcgcagcacacgggccgctggggttctgggacgaacgtgtttccccagcccttggcataacctgggctaaccagctcctggtgagactgctggctgaccggctccgcgaggaagaggctgccctcggctgcccagcccggaccctgcgggtgctctctgccccccacctgcccccctcctcctgttcctacacgatcagtgccgaaggggtgcgagggacacctgggacccagtcccactgacacggtggcggctgcacaacagccctgcctgagaagccccgacacacggggctcgggcctttaaaacgcgtctgcctgggccgtggcacagctgggagcctggttcagacacagctcttccagggcagcggctccactttctcatccgaagatggtggccacagactgacccccatctgagctggggggatgttctgcctctccctgggtctggggacaggcccgcttgctgggtacctggtccccactgctgagctggcccttggggagaggtgattctcagggctggagcctggggtgtcctacagtgactccctgggagccgcctgcttcttctctccacatggaagcccaactggggttgcgtctgaggcctgccccctgggctggggcctcagaccccctcagccttgggaccgtgcccacgagggtctcccctcctgcacacagggcagtccttactcccccaccactcaggccacagtggggctgcaggcaggcggctcctcctcacccacctctgggtccttggctcccgggggccccacctcggcacacactgtgccccacaaaacttcagtgtggtacaaggtggagaaagcatatcccaccaacctccagtgtcagggtccaggagagcctgggggtggggggactgccttgtctctagtagtgtggcctgtgccagcaccacagccggtcagaggagcgcaggcagcgcagggctggcacgtgacaggctcgtcagccacctgggaacacagttctgggcaaagaggatccgaggttgagaggaaggagggtcccggtgtatcctggccctgggggtctgggcgtccagctcagccctggcctggctgggtggtattctggtagggatatggcaggactcctggcagggccacctgcaggaccctgtcctgcagtcccacactgtgcagacccagtcccacactgtggccaggccttacatctggctggaaagcagagcctcctgggaacacatctggctgcacaggctgaaatatccacccagcaggcagagtggcgtggcctccccatgggcacagtggtgacccccttgattcccaccgtacaaccccctccaccccccactcagtgcctccacatgctgcctggcacagaccaggcctttgacaaataaatgttcaatggatgc

SEQ ID NO: 281576 - DNA, 562 bp, Artificial Sequence
  derived and/or modified sequence
attggaggagaaggccgagaggagcaggacggcgggaagaggagtgcggaacccgcgggagagtccccagggagacacttaagggaaattaaactgcagagtgcaagagatgcctcagtcaagtcagccaaaaacacgcgggtcatccccaagccccagagaggctttgaattgaaggcgagtgcctcagaatttgcatccattgttctgtctttcctgggaagttattcatcctggtggccagcccaccgacaaaatggatttggatctactggacctgaatcccagaattattgctgcaattaagaaagccaaactgaaatcggtaaaggaggttttacacttttctggaccagacttgaagagactgaccaacctctccagccccgaggtctggcacttgctgagaacggcctccttacacttgcggggaagcagcatccttacagcactgcagctgcaccagcagaaggagcggttccccacgcagcaccagcgcctgagcctgggctgcccggtgctggacgcgctgctccgcggtggcctgcccctggacggcatc

SEQ ID NO: 281577 - DNA, 535 bp, Artificial Sequence
  derived and/or modified sequence
attggaggagaaggccgagaggagcaggacggcgggaagaggagtgcggaacccgcgggaggaagctgtcttctgctgttggctgctgggggcgactgatgtttggatccctgagcaccctgccaatcccagactcaccttcccactctttccagagtccccagggagacacttaagggaaattaaactgcagagtgcaagagatgcctcagtcaagtcagccaaaaacacgcgggtcatccccaagccccagagaggctttgaattgaaggcgagtgcctcagaatttgcatccattgttctgtctttcctgggaagttattcatcctggtggccagcccaccgacaaaatggatttggatctactggacctgaatcccagaattattgctgcaattaagaaagccaaactgaaatcggtaaaggaggttttacacttttctggaccagacttgaagagactgaccaacctctccagccccgaggtctggcacttgctgagaacggcctccttacacttgcggggaagcagcat

SEQ ID NO: 281578 - DNA, 801 bp, Artificial Sequence
  derived and/or modified sequence
gtatgattccacgaatcacacggtttattgtcaaagaagatttgttctcgggttcacagtgctcagaggggaggagaggggaggaggtgaagacacctggcagggaagcagggcctccatggatggggtgcattcacggcagggaggatgtgcacagagggcccaggaggagcctcaggagccggactgccgttggccaaccgagtccccagggagacacttaagggaaattaaactgcagagtgcaagagatgcctcagtcaagtcagccaaaaacacgcgggtcatccccaagccccagagagtgacagagccccgatgacacggacacctcggctgctgtcacttccctggttcgggcctcccacaggctttgaattgaaggcgagtgcctcagaatttgcatccattgttctgtctttcctgggaagttattcatcctggtggccagcccaccgacaaaatggatttggatctactggacctgaatcccagaattattgctgcaattaagaaagccaaactgaaatcggtaaaggaggttttacacttttctggaccagacttgaagagactgaccaacctctccagccccgaggtctggcacttgctgagaacggcctccttacacttgcggggaagcagcatccttacagcactgcagctgcaccagcagaaggagcggttccccacgcagcaccagcgcctgagcctgggctgcccggtgctggacgcgctgctccgcggtggcctgcccctggacggcatcactgagctggccggacgcagctcggcagggaa

SEQ ID NO: 281579 - protein, 673 aa, Artificial Sequence
  derived and/or modified sequence
MEIGTEISRKIRSAIKGKLQELGAYIDEELPDYIMVMVANKKSQDQMTEDLSLFLGNNTIRFTVWLHGVLDKLRSVTTEPSSLKSSDTNIFDSNVPSNKSNFSRGDERRHEAAVPPLAIPSARPEKRDSRVSTSSQESKTTNVRQTYDDGAATRLMSTVKPLREPAPSEDVIDIKPEPDDLIDEDLNFVQENPLSQKKPTVTLTYGSSRPSIEIYRPPASRNADSGVHLNRLQFQQQQNSIHAAKQLDMQSSWVYETGRLCEPEVLNSLEETYSPFFRNNSEKMSMEDENFRKRKLPVVSSVVKVKKFNHDGEEEEEDDDYGSRTGSISSSVSVPAKPERRPSLPPSKQANKNLILKAISEAQESVTKTTNYSTVPQKQTLPVAPRTRTSQEELLAEVVQGQSRTPRISPPIKEEETKGDSVEKNQGTQQRQLLSRLQIDPVMAETLQMSQDYYDMESMVHADTRSFILKKPKLSEEVVVAPNQESGMKTADSLRVLSGHLMQTRDLVQPDKPASPKFIVTLDGVPSPPGYMSDQEEDMCFEGMKPVNQTAASNKGLRGLLHPQQLHLLSRQLEDPNCKYDAKCTKPDCPFTHVSRRIPVLSPKPAVAPPAPPSSSQLCRYFPACKKMECPFYHPKHCRFNTQCTRPDCTFYHPTINVPPRHALKWIRPQTSE

SEQ ID NO: 281580 - DNA, 2022 bp, Artificial Sequence
  derived and/or modified sequence
atggagatcggcaccgagatcagcagaaagatcagaagcgccatcaagggcaagctgcaggagctgggcgcctacatcgacgaggagctgcccgactacatcatggtgatggtggccaacaagaagagccaggaccagatgaccgaggacctgagcctgttcctgggcaacaacaccatcagattcaccgtgtggctgcacggcgtgctggacaagctgagaagcgtgaccaccgagcccagcagcctgaagagcagcgacaccaacatcttcgacagcaacgtgcccagcaacaagagcaacttcagcagaggcgacgagagaagacacgaggccgccgtgccccccctggccatccccagcgccagacccgagaagagagacagcagagtgagcaccagcagccaggagagcaagaccaccaacgtgagacagacctacgacgacggcgccgccaccagactgatgagcaccgtgaagcccctgagagagcccgcccccagcgaggacgtgatcgacatcaagcccgagcccgacgacctgatcgacgaggacctgaacttcgtgcaggagaaccccctgagccagaagaagcccaccgtgaccctgacctacggcagcagcagacccagcatcgagatctacagaccccccgccagcagaaacgccgacagcggcgtgcacctgaacagactgcagttccagcagcagcagaacagcatccacgccgccaagcagctggacatgcagagcagctgggtgtacgagaccggcagactgtgcgagcccgaggtgctgaacagcctggaggagacctacagccccttcttcagaaacaacagcgagaagatgagcatggaggacgagaacttcagaaagagaaagctgcccgtggtgagcagcgtggtgaaggtgaagaagttcaaccacgacggcgaggaggaggaggaggacgacgactacggcagcagaaccggcagcatcagcagcagcgtgagcgtgcccgccaagcccgagagaagacccagcctgccccccagcaagcaggccaacaagaacctgatcctgaaggccatcagcgaggcccaggagagcgtgaccaagaccaccaactacagcaccgtgccccagaagcagaccctgcccgtggcccccagaaccagaaccagccaggaggagctgctggccgaggtggtgcagggccagagcagaacccccagaatcagcccccccatcaaggaggaggagaccaagggcgacagcgtggagaagaaccagggcacccagcagagacagctgctgagcagactgcagatcgaccccgtgatggccgagaccctgcagatgagccaggactactacgacatggagagcatggtgcacgccgacaccagaagcttcatcctgaagaagcccaagctgagcgaggaggtggtggtggcccccaaccaggagagcggcatgaagaccgccgacagcctgagagtgctgagcggccacctgatgcagaccagagacctggtgcagcccgacaagcccgccagccccaagttcatcgtgaccctggacggcgtgcccagcccccccggctacatgagcgaccaggaggaggacatgtgcttcgagggcatgaagcccgtgaaccagaccgccgccagcaacaagggcctgagaggcctgctgcacccccagcagctgcacctgctgagcagacagctggaggaccccaactgcaagtacgacgccaagtgcaccaagcccgactgccccttcacccacgtgagcagaagaatccccgtgctgagccccaagcccgccgtggccccccccgccccccccagcagcagccagctgtgcagatacttccccgcctgcaagaagatggagtgccccttctaccaccccaagcactgcagattcaacacccagtgcaccagacccgactgcaccttctaccaccccaccatcaacgtgccccccagacacgccctgaagtggatcagaccccagaccagcgagtag

SEQ ID NO: 281581 - DNA, 2022 bp, Artificial Sequence
  derived and/or modified sequence
atggagatcggcacggaaatctcacgcaaaatcagatcggcaattaagggaaagctgcaagaactgggagcatatatcgacgaggaactgcccgattacataatggttatggttgctaataaaaagagccaggaccagatgacagaggatctatcgctgttcctgggcaacaacacaattcggtttacagtgtggctgcacggcgttctggataagctacgatcggttaccacagagccgtcctctctcaaatcctctgatacaaatatctttgacagtaatgtgcccagcaataaaagcaattttagtaggggagatgagaggaggcacgaggcagctgtgccgccactggcaatcccatcagccaggccagaaaagcgcgactcccgcgtgtcaacctccagccaggaatcaaaaacaacaaatgtgcgacagacatacgatgacggtgcagcaacccgcctgatgtctacggtaaaacccttgagagagccggcccctagtgaagacgtgattgatatcaagcctgaaccggacgacctgattgatgaggatctcaactttgtgcaggagaatccactttctcagaagaaacccaccgtcaccttaacatacggttccagtagaccttcaattgaaatttatcggcccccagcctcacggaacgccgactccggcgtgcacctaaacagacttcaatttcagcagcagcagaacagcattcatgccgccaagcagctcgacatgcagtcctcgtgggtgtacgaaaccggcagactatgtgagccggaggtgctcaactctttggaggaaacttattcgccattcttccggaacaattctgaaaaaatgtcaatggaagatgaaaatttcagaaaaaggaagctccccgtagtgagttctgtcgtcaaggtgaagaaatttaaccatgatggagaagaagaggaagaagacgatgattacggttcccgcaccggcagcatttcctcaagtgtgtcagttcccgcgaagcccgagcggcgtcctagcctgcccccctccaaacaagccaacaagaatctgatattgaaggccattagtgaagctcaggagtcagtcactaagacgaccaattacagcaccgttccccagaagcaaacactccctgtcgcacctaggacccgcacatcccaagaggagctgctggccgaagtcgtgcaagggcagtcgagaactcctcgcatcagcccacccatcaaggaggaggagactaagggcgactccgttgagaaaaaccaagggacccaacagcgccagctgctgtcccggcttcagatcgaccccgtgatggcggaaactctccaaatgagccaggattactatgatatggagtcaatggtccatgctgacacccgaagttttattctaaaaaagccgaagctgtccgaagaggttgtagtggcacccaatcaggaatctggcatgaagaccgcagacagtttgagagttctgagtggccacctgatgcagaccagagatttggttcagcccgataaacctgcttctcctaagttcattgtaacactcgatggcgtgccatcaccacccggctacatgagcgaccaagaagaagacatgtgcttcgagggaatgaaacccgtgaaccagaccgccgcctcaaacaagggtctgcgcggcctactgcacccccagcagttacacttgctcagccgccaactcgaggatccaaactgtaaatacgatgcaaaatgtacgaagccagattgtccattcacccatgtctctcgtaggataccagtgttgtctcccaagcctgctgtcgctccccccgcccccccttcttcatctcagctgtgccgttactttccagcatgtaaaaagatggaatgcccattttaccaccccaagcattgccgtttcaacacccagtgtacccgcccagactgtacattctaccaccccactattaatgtcccgccacgccacgctctgaagtggattcgcccacaaacctctgagtag

SEQ ID NO: 281582 - DNA, 2022 bp, Artificial Sequence
  derived and/or modified sequence
atggagattggaacagagatcagcaggaagatccgcagcgccatcaagggcaagctgcaggagctgggcgcctacattgatgaggagctgcctgactacatcatggtgatggtggccaacaagaagagccaggaccagatgacagaggacctgagcctcttcctgggcaacaacaccatccgcttcaccgtgtggctgcatggagtgctggacaagctgcggtctgtgaccacagagcccagcagcctgaagagcagtgacaccaacatctttgacagcaatgtgcccagcaacaagagcaacttcagcagaggagatgagaggagacatgaggccgctgtgccccccctggccatccccagcgcccggcctgagaagagggacagccgggtgtccaccagcagccaggagagcaagaccaccaacgtgcggcagacctatgatgatggagctgccacccggctgatgagcacagtgaagcccctgcgggagcccgcccccagtgaagatgtgattgacatcaagccagagccagatgacctgattgatgaggacctgaactttgtgcaggagaaccccctgagccagaagaagcccaccgtgaccctgacctacggcagcagccggcccagcattgagatctacagacctccagccagcagaaatgctgacagcggcgtgcacctgaaccggctgcagttccagcagcagcagaacagcatccatgctgccaagcagctggacatgcagagctcctgggtgtatgaaacaggccgcctgtgtgagcctgaggtgctgaacagcctggaggagacctacagccccttcttcaggaacaacagcgagaagatgtccatggaggatgagaacttcaggaagaggaagctgcctgtggtgtcctctgtggtgaaggtgaagaagttcaaccatgatggagaggaggaggaggaggatgatgattatggcagcaggacaggcagcatcagcagctctgtgtctgtgcctgccaagccagagcggcggcccagcctgccccccagcaagcaggccaacaagaacctgatcctgaaggccatcagcgaggcccaggagagcgtgaccaagaccaccaactacagcacagtgccccagaagcagaccctgcctgtggcccccaggaccaggaccagccaggaggagctgctggccgaggtggtgcagggccagagcaggaccccccgcatcagcccccccatcaaggaggaggagaccaagggggacagcgtggagaagaaccagggcacccagcagaggcagctgctgagccggctgcagattgatcctgtgatggccgagaccctgcagatgagccaggactactatgacatggagagcatggtgcacgccgacaccaggagcttcatcctgaagaagcccaagctgtctgaggaggtggtggtggcccccaaccaggagagcggcatgaagacagctgacagcctgcgggtgctgagcggccacctgatgcagacccgggacctggtgcagcctgacaagccagccagccccaagttcatcgtgaccctggatggagtgcccagccccccaggctacatgtctgaccaggaggaggacatgtgctttgagggcatgaagcctgtgaaccagacagctgccagcaacaagggcctgcggggcctgctgcacccccagcagctgcacctgctgagccggcagctggaggaccccaactgcaagtatgatgccaagtgcaccaagccagactgccccttcacccacgtgagccgccgcatccctgtgctgagccccaagccagctgtggcccccccagccccacccagcagcagccagctgtgccgctacttccctgcctgcaagaagatggagtgccccttctaccaccccaagcactgccgcttcaacacccagtgcaccaggccagactgcaccttctaccaccccaccatcaacgtgcccccaagacatgccctgaagtggatccggccccagaccagcgagtag

SEQ ID NO: 281583 - DNA, 2022 bp, Artificial Sequence
  derived and/or modified sequence
atggagatcggcaccgagatcagccggaagatccggagcgccatcaaaggaaaactgcaggaactcggagcctatatagacgaagaactccccgattacatcatggttatggttgccaacaagaaatcacaggaccagatgaccgaagatctgtcactgtttctcggtaacaatacaatccggttcacagtctggctccacggggtcctggataagctccgatcagtgacgaccgagccatctagcctgaaatcatccgacaccaacattttcgactctaacgtgccatctaacaagtccaatttttctcgcggcgatgaacgcagacatgaagccgcagtccctcctttggccatcccctctgctaggccagagaagcgtgacagccgcgtatcgacaagctcacaggaatcgaagactactaacgtgcgccagacctacgatgacggcgccgcaacccgcctgatgtcaactgtaaaaccattacgcgaaccagcccccagcgaagatgttatagacatcaagccggagccagacgatcttattgacgaggacctgaattttgtacaggagaaccccctatcacaaaaaaaacccactgttacccttacctacggatcaagtaggccctctatcgaaatctacaggcccccggcgtcacggaatgctgacagcggcgtgcatttgaaccgcctgcaattccagcagcagcagaactccatacacgccgcaaagcaactggacatgcagtcgagctgggtgtatgagaccggccgcctatgtgagccagaggtgctgaatagcctggaggagacgtacagccctttttttagaaataactcggagaagatgagtatggaagacgagaacttccgaaaacgtaaacttcctgtagtgtccagcgtggtcaaggtaaagaagtttaaccatgatggtgaggaggaggaagaggatgacgactacggaagtcggactggaagcatttcatcttcggtgagtgttcctgctaagcccgaaaggcgtccatccttacctcctagcaaacaagctaataagaatttaatactgaaagcaatctctgaagctcaggagagcgtaaccaagacaacaaattactccaccgttccacagaagcagaccctacctgttgccccaaggacccgtacatcacaggaggagttgctggcggaggtggtgcaagggcagtctaggacccctcgaatctctccgcctataaaagaggaggagactaagggtgactccgttgaaaaaaaccagggcacccaacaacgacagctactaagtcgccttcagatcgaccccgtgatggctgagaccctacagatgagtcaagattattacgatatggaatccatggtgcacgctgatacccggtcatttatactgaagaaaccgaaactttccgaagaggtggttgtggctcccaatcaagaaagcggcatgaaaacagcagattctctgagagtgctgtctggacatttgatgcaaacccgggacctggtccagcccgacaaacccgcgtctccgaaattcatagtcaccctggacggagtcccgtccccaccaggttacatgagtgaccaggaagaggatatgtgtttcgagggaatgaaaccagtaaaccagacagccgcgagcaacaagggtctcaggggacttctccatccccagcagctgcacctcttgtcacgtcagctggaggacccaaactgtaaatacgacgcaaaatgcacaaaacccgattgccctttcacccacgtaagtcggcgcattcccgtactcagcccaaaacccgccgtagcaccaccagcccccccttcctcgtcacagctgtgtagatacttccctgcttgtaagaagatggaatgcccattttatcaccccaagcattgcagattcaacacccagtgcacacggcccgactgcactttttatcaccccacaattaatgtcccccccagacacgccctgaaatggattaggccccagacatcagaatag

SEQ ID NO: 281584 - DNA, 2022 bp, Artificial Sequence
  derived and/or modified sequence
atggagattggcaccgagatcagtcgcaagattaggagcgctataaagggaaagttgcaggaactcggcgcatatattgacgaagaacttccggattatataatggtcatggtagccaataagaaaagccaagatcagatgactgaagacctctctttatttctgggcaataatacaatccgtttcacggtgtggctacacggcgtgctggacaaactgagatcggtcactacagaaccgtctagcctgaagtcatctgatactaatatcttcgattcaaacgtccctagtaacaaatccaattttagccgaggtgatgaacggagacacgaagcggctgtgccgcctctggctattccgagcgctagacctgagaagagagactctagggtgagcaccagctcgcaggaatccaagacgactaacgtgaggcaaacatacgacgatggagctgccacaaggctgatgagcacagtcaaaccattaagagagcctgcaccctctgaggatgtgatcgacattaagcctgaacctgatgacctgatcgacgaggaccttaattttgtgcaagaaaatcctcttagtcagaagaagcccaccgtgaccctaacctatggctcaagcagaccttccatcgagatttataggcccccagcatcgcgcaacgccgacagcggagtccacctaaaccgcctgcagttccagcaacaacagaacagtatccacgccgctaagcaactcgacatgcagagtagttgggtctatgaaactggcaggctgtgcgagcccgaggttcttaattcattggaggagacctactcgcctttctttcgaaataatagcgagaaaatgagcatggaggatgaaaacttcaggaaaagaaaactcccagtggtatcgagcgtggtgaaggttaagaaatttaaccatgatggggaagaggaggaggaagatgacgactacggttctagaacagggagcatctctagtagcgtgagtgtgccagccaagcccgaacgtcgcccatccttgccgccttccaaacaggcgaacaagaacttaattcttaaagccatcagcgaggcgcaggagagcgtgacaaagactacaaattattctaccgtcccgcaaaaacagactctccccgtggcccctaggacacggacgtcacaggaggagctgctggccgaggtggtacaaggtcagagtagaacgcccaggatcagtccacccataaaggaagaagagaccaagggcgactccgtggaaaaaaaccagggcacccagcagcggcagctcctcagtcgcttgcagatcgatcctgtgatggctgagacactccagatgagccaggattattatgacatggagtcaatggttcacgccgatactagatcattcatacttaagaagccaaagctgtctgaggaggtggtggtcgctccaaaccaggagtctgggatgaaaacagctgacagccttcgcgtgttgtctgggcatctcatgcagacgcgggatctggtgcaaccggacaagccagcaagtcccaaattcatcgttactttggatggcgtgccttctcctcctggctatatgtccgaccaggaggaagatatgtgtttcgagggcatgaagcccgtaaaccagacagcggcatctaataaggggctcaggggccttctccaccctcaacagctccatctgctcagcagacagcttgaagaccccaactgtaagtacgacgccaaatgcactaagcctgactgtccattcacacatgtgtccagacgcattcccgtcctgtcgccaaaaccagctgtggcgccacccgcacctccatcttcctctcagctctgtagatacttccctgcgtgcaagaagatggagtgtccgttctatcacccaaagcattgtcgctttaacacacagtgcactcgccctgactgtaccttctatcacccgacaattaacgtgcctcctcggcacgctttgaagtggatcagaccccagacctcagagtag

SEQ ID NO: 281585 - DNA, 4004 bp, Artificial Sequence
  derived and/or modified sequence
tgagcacaggtttcgcgggtagaaggcgtgcgcaggcgcggacacgggcgcatgcgcgttcactccggcgcgcagtgccggccggggcggggatacgccgtgtgcgcggccgggggcggaacggaggaggaggcggtggtgtcccggctgcggggtaggagtccgcggcagcctccgggtaagccaagcgccgcgcagtgctgagttcccgcacgccgcagagccatggagatcggcaccgagatcagccgcaagatccggagtgccattaaggggaaattacaagaattaggagcttatatagatgaagaacttcctgattacattatggtgatggtggccaacaagaaaagtcaggaccaaatgacagaggatctgtccctgtttctagggaacaacacaattcgattcaccgtatggcttcatggtgtattagataaacttcgctctgttacaactgaaccctctagtctgaagtcttctgataccaacatctttgatagtaacgtgccttcaaacaagagcaatttcagtcggggagatgagaggaggcatgaagctgcagtgccaccacttgccattcctagcgcgagacctgaaaaaagagattccagagtttctacaagttcgcaggagtcaaaaaccacaaatgtcagacagacttacgatgatggagctgcaacccgactaatgtcaacagtgaaacctttgagggagccagcaccctctgaagatgtgattgatattaagccagaaccagatgatctcattgacgaagacctcaactttgtgcaggagaatcccttatctcagaaaaaacctacagtgacacttacatatggttcttctcgcccttctattgaaatttatcgaccacctgcaagtagaaatgcagatagtggtgttcatttaaacaggttgcaatttcaacagcagcagaatagtattcatgctgccaagcagcttgatatgcagagtagttgggtatatgaaacaggacgtttgtgtgaaccagaggtgcttaacagcttagaagaaacgtatagtccgttctttagaaacaactcggagaaaatgagtatggaggatgaaaactttcggaagagaaagttgcctgtggtaagttcagttgttaaagtaaaaaaattcaatcatgatggagaagaggaggaagaagatgatgattacgggtctcgaacaggaagcatctccagcagtgtgtctgtgcctgcaaagcctgaaaggagaccttctcttccaccttctaaacaagctaacaagaatctgattttgaaggctatatctgaagctcaagaatccgtaacaaaaacaactaactactctacagttccacagaaacagacacttccagttgctcccagaactcgaacttctcaagaagaattgctagcagaagtggtccagggacaaagtaggacccccagaataagtccccccattaaagaagaggaaacaaaaggagattctgtagaaaaaaatcaaggaactcaacagaggcaattattatcccgactgcaaatcgacccagtaatggcagaaactctgcagatgagtcaagattactatgacatggaatccatggtccatgcagacacaagatcatttattctgaagaagccaaagctgtctgaggaagtagtagtggcaccaaaccaagagtcggggatgaagactgcagattcccttcgggtactttcaggacaccttatgcagacacgagatcttgtacaaccagataaacctgcaagtcccaagtttatagtgacgctggatggtgtccccagccccccaggatacatgtcagatcaagaggaggacatgtgctttgaaggaatgaaacccgtaaaccaaactgcagcctcaaacaagggactcagaggtctcctccacccacagcagttgcacttgctgagcaggcagcttgaggacccaaattgtaaatatgatgcaaagtgtactaaaccagattgtcccttcactcatgtgagtagaagaattccagtactgtctccaaaaccagcagttgcaccaccagcaccaccttccagtagtcagctctgccgttacttccctgcttgtaagaagatggaatgtcccttctatcatccaaaacattgtaggtttaacactcaatgtacaagaccggactgcacattctaccatcccaccattaatgtcccaccacgacatgccttgaaatggattcgacctcaaaccagcgaatagcacccagtcctgcctggcagaagatcatgcagtttggaagttttcatgtactgatgaaagatactctacagaacttgtcaaatctttgaaacttggaatatattgctttcataatatgaagttttattgcctatctatctgaagtgtctaatttttcaagtttgtaagtttattatgtggttttaacattgggtgtttttgttttgtttttactatgaaaagacagcttaaggaagagctaaattctgttaaaatatttggggcatgtttgtgcactgctgttgtgaggatcagcatatgaaattgacatcatggttagtcatggtactgcagcttagggggctacacggttgctgtgtgagtggagagatgcagtgaggcagttgtcattattctaaaaattgtactactttcacttttcccaaagattatataatgttcataatccaccatgaaaacagcattggccaaaggtactgaggctgcttaaaatattcaattctgctttttaatttttaagtgaatttagtttgaaaagcatgattatacaggcctctcaggctgagtgctactttggtaaagttcccagttttcctgccttctgtgacaggatgaatgaggtgggtatggacagtggaggcagctggaatggcaagtgcagaaaataggaacagttctatacagtgctctcatttactaataacataatgccttctaaataatttttttgggaaactacattatcacaaaattatacaaatttttttacaagtatttacatactgtatctgaaaacagactttaaagtcacaagattataaatgtacatatatattctcacattctgaaaaataacattctcagaatccacagaaaatatacttagttactactgaagataatttttgaaatgtaaaaattagatttaaatagtatattttaaatgacagaactataattacagagatcagatcagataggtaaactgcaagatagataggatgaaacttttggcctactgtattacttacagagtttttttgtgtgtggtttttaaaactgttaaggcaagaagtgtcaaatgctttagagttaaataacagatcactgatttcaaagacttggtgtatagtgttaaaaattaaagcttaaaaggtggttagaaaagtggattaatgcaaaaggggtaataaagactgcaacattctcaggaccaaattaaactgctaaaaaaaaaaaaaaagttcattgacttgcttagtcgtatactcaaatgatgataaacctacatgtgcaaaggctcacgtttaagattgtcaagccagcagtctactgttgtgttgccattgcttttccattgggagaagaaagaattaaccagtcattaaaccatttggtaagttgcactttgctgtgctgatcccacaggaaaggcttgaaacacgagaagcagcaaagacagagcacacaagtgcataaggctgttgtcttcggcttgggtgaaatgacagttcctcttcattctaaaggtttactccattgaatttaaggcatttgttcattccagtgttgagatgctttgcatctctgcagaagaaatttattttaaattgtttaaatatctggaaatacttttagctatcatttataaagatagttttgttctcagtttcactataaattatagaacaaatgggaaacaagggtttaatttagttcagccattttacaaggaaataataaaatactaaaatctg

SEQ ID NO: 281586 - protein, 711 aa, Artificial Sequence
  derived and/or modified sequence
MEIGTEISRKIRSAIKGKLQELGAYVDEELPDYIMVMVANKKSQDQMTEDLSLFLGNNTIRFTVWLHGVLDKLRSVTTEPSSLKSSDTNIFDSNVPSNKSNFSRGDERRHEAAVPPLAIPSARPEKRDSRVSTSSQESKTTNVRQTYDDGAATRLMSTVKPLREPAPSEDVIDIKPEPDDLIDEDLNFVQENPLSQKKPTVTLTYGSSRPSIEIYRPPASRNADSGVHLNRLQFQQQQNSIHAAKQLDMQSSWVYETGRLCEPEVLNSLEETYSPFFRNNSEKMSMEDENFRKRKLPVVSSVVKVKKFNHDGEEEEEDDDYGSRTGSISSSVSVPAKPERRPSLPPSKQANKNLILKAISEAQESVTKTTNYSTVPQKQTLPVAPRTRTSQEELLAEVVQGQSRTPRISPPIKEEETKGDSVEKNQDYYDMESMVHADTRSFILKKPKLSEEVVVAPNQESGMKTADSLRVLSGHLMQTRDLVQPDKPASPKFIVTLDGVPSPPGYMSDQEEDMCFEGMKPVNQTAASNKGLRGLLHPQQLHLLSRQLEDPNGSFSNAEMSELSVAQKPEKLLERCKYWPACKNGDECAYHHPISPCKAFPNCKFAEKCLFVHPNCKYDAKCTKPDCPFTHVSRRIPVLSPKPAVAPPAPPSSSQLCRYFPACKKMECPFYHPKHCRFNTQCTRPDCTFYHPTINVPPRHALKWIRPQTSE

SEQ ID NO: 281587 - protein, 711 aa, Artificial Sequence
  derived and/or modified sequence
MEIGTEISRKIRSAIKGKLQELGAYIDEELPDYIMVMVANKKSQDQMTEDLSLFLGNNTIRFTVWLHGVLDKLRSVTTEPSSLKSSDTNIFDSNVPSNKSNFSRGDERRHEAAVPPLAIPSARPEKRDSRVSTSSQESKTTNVRQTYDDGAATRLMSTVKPLREPAPSEDVIDIKPEPDDLIDEDLNFVQENPLSQKKPTVTLTYGSSRPSIEIYRPPASRNADSGVHLNRLQFQQQQNSIHAAKQLDMQSSWVYETGRLCEPEVLNSLEETYSPFFRNNSEKMSMEDENFRKRKLPVVSSVVKVKKFNHDGEEEEEDDDYGSRTGSISSSVSVPAKPERRPSLPPSKQANKNLILKAISEAQESVTKTTNYSTVPQKQTLPVAPRTRTSQEELLAEVVQGQSRTPRISPPIKEEETKGDSVEKNQDYYDMESMVHADTRSFILKKPKLSEEVVVAPNQESGMKTADSLRVLSGHLMQTRDLVQPDKPASPKFIVTLDGVPSPPGYMSDQEEDMCFEGMKPVNQTAASNKGLRGLLHPQQLHLLSRQLEDPNGSFSNAEMSELSVAQKPEKLLERCKYWPACKNGDECAYHHPISPCKAFPNCKFAEKCLFVHPNCKYDAKCTKPDCPFTHVSRRIPVLSPKPAVAPPAPPSSSQLCRYFPACKKMECPFYHPKHCRFNTQCTRPDCTFYHPTINVPPRHALKWIRPQTSE

SEQ ID NO: 281588 - DNA, 2136 bp, Artificial Sequence
  derived and/or modified sequence
atggagatcggcaccgagatcagcagaaagatcagaagcgccatcaagggcaagctgcaggagctgggcgcctacgtggacgaggagctgcccgactacatcatggtgatggtggccaacaagaagagccaggaccagatgaccgaggacctgagcctgttcctgggcaacaacaccatcagattcaccgtgtggctgcacggcgtgctggacaagctgagaagcgtgaccaccgagcccagcagcctgaagagcagcgacaccaacatcttcgacagcaacgtgcccagcaacaagagcaacttcagcagaggcgacgagagaagacacgaggccgccgtgccccccctggccatccccagcgccagacccgagaagagagacagcagagtgagcaccagcagccaggagagcaagaccaccaacgtgagacagacctacgacgacggcgccgccaccagactgatgagcaccgtgaagcccctgagagagcccgcccccagcgaggacgtgatcgacatcaagcccgagcccgacgacctgatcgacgaggacctgaacttcgtgcaggagaaccccctgagccagaagaagcccaccgtgaccctgacctacggcagcagcagacccagcatcgagatctacagaccccccgccagcagaaacgccgacagcggcgtgcacctgaacagactgcagttccagcagcagcagaacagcatccacgccgccaagcagctggacatgcagagcagctgggtgtacgagaccggcagactgtgcgagcccgaggtgctgaacagcctggaggagacctacagccccttcttcagaaacaacagcgagaagatgagcatggaggacgagaacttcagaaagagaaagctgcccgtggtgagcagcgtggtgaaggtgaagaagttcaaccacgacggcgaggaggaggaggaggacgacgactacggcagcagaaccggcagcatcagcagcagcgtgagcgtgcccgccaagcccgagagaagacccagcctgccccccagcaagcaggccaacaagaacctgatcctgaaggccatcagcgaggcccaggagagcgtgaccaagaccaccaactacagcaccgtgccccagaagcagaccctgcccgtggcccccagaaccagaaccagccaggaggagctgctggccgaggtggtgcagggccagagcagaacccccagaatcagcccccccatcaaggaggaggagaccaagggcgacagcgtggagaagaaccaggactactacgacatggagagcatggtgcacgccgacaccagaagcttcatcctgaagaagcccaagctgagcgaggaggtggtggtggcccccaaccaggagagcggcatgaagaccgccgacagcctgagagtgctgagcggccacctgatgcagaccagagacctggtgcagcccgacaagcccgccagccccaagttcatcgtgaccctggacggcgtgcccagcccccccggctacatgagcgaccaggaggaggacatgtgcttcgagggcatgaagcccgtgaaccagaccgccgccagcaacaagggcctgagaggcctgctgcacccccagcagctgcacctgctgagcagacagctggaggaccccaacggcagcttcagcaacgccgagatgagcgagctgagcgtggcccagaagcccgagaagctgctggagagatgcaagtactggcccgcctgcaagaacggcgacgagtgcgcctaccaccaccccatcagcccctgcaaggccttccccaactgcaagttcgccgagaagtgcctgttcgtgcaccccaactgcaagtacgacgccaagtgcaccaagcccgactgccccttcacccacgtgagcagaagaatccccgtgctgagccccaagcccgccgtggccccccccgccccccccagcagcagccagctgtgcagatacttccccgcctgcaagaagatggagtgccccttctaccaccccaagcactgcagattcaacacccagtgcaccagacccgactgcaccttctaccaccccaccatcaacgtgccccccagacacgccctgaagtggatcagaccccagaccagcgagtag

SEQ ID NO: 281589 - DNA, 2136 bp, Artificial Sequence
  derived and/or modified sequence
atggagatcggcaccgagatcagcagaaagatcagaagcgccatcaagggcaagctgcaggagctgggcgcctacatcgacgaggagctgcccgactacatcatggtgatggtggccaacaagaagagccaggaccagatgaccgaggacctgagcctgttcctgggcaacaacaccatcagattcaccgtgtggctgcacggcgtgctggacaagctgagaagcgtgaccaccgagcccagcagcctgaagagcagcgacaccaacatcttcgacagcaacgtgcccagcaacaagagcaacttcagcagaggcgacgagagaagacacgaggccgccgtgccccccctggccatccccagcgccagacccgagaagagagacagcagagtgagcaccagcagccaggagagcaagaccaccaacgtgagacagacctacgacgacggcgccgccaccagactgatgagcaccgtgaagcccctgagagagcccgcccccagcgaggacgtgatcgacatcaagcccgagcccgacgacctgatcgacgaggacctgaacttcgtgcaggagaaccccctgagccagaagaagcccaccgtgaccctgacctacggcagcagcagacccagcatcgagatctacagaccccccgccagcagaaacgccgacagcggcgtgcacctgaacagactgcagttccagcagcagcagaacagcatccacgccgccaagcagctggacatgcagagcagctgggtgtacgagaccggcagactgtgcgagcccgaggtgctgaacagcctggaggagacctacagccccttcttcagaaacaacagcgagaagatgagcatggaggacgagaacttcagaaagagaaagctgcccgtggtgagcagcgtggtgaaggtgaagaagttcaaccacgacggcgaggaggaggaggaggacgacgactacggcagcagaaccggcagcatcagcagcagcgtgagcgtgcccgccaagcccgagagaagacccagcctgccccccagcaagcaggccaacaagaacctgatcctgaaggccatcagcgaggcccaggagagcgtgaccaagaccaccaactacagcaccgtgccccagaagcagaccctgcccgtggcccccagaaccagaaccagccaggaggagctgctggccgaggtggtgcagggccagagcagaacccccagaatcagcccccccatcaaggaggaggagaccaagggcgacagcgtggagaagaaccaggactactacgacatggagagcatggtgcacgccgacaccagaagcttcatcctgaagaagcccaagctgagcgaggaggtggtggtggcccccaaccaggagagcggcatgaagaccgccgacagcctgagagtgctgagcggccacctgatgcagaccagagacctggtgcagcccgacaagcccgccagccccaagttcatcgtgaccctggacggcgtgcccagcccccccggctacatgagcgaccaggaggaggacatgtgcttcgagggcatgaagcccgtgaaccagaccgccgccagcaacaagggcctgagaggcctgctgcacccccagcagctgcacctgctgagcagacagctggaggaccccaacggcagcttcagcaacgccgagatgagcgagctgagcgtggcccagaagcccgagaagctgctggagagatgcaagtactggcccgcctgcaagaacggcgacgagtgcgcctaccaccaccccatcagcccctgcaaggccttccccaactgcaagttcgccgagaagtgcctgttcgtgcaccccaactgcaagtacgacgccaagtgcaccaagcccgactgccccttcacccacgtgagcagaagaatccccgtgctgagccccaagcccgccgtggccccccccgccccccccagcagcagccagctgtgcagatacttccccgcctgcaagaagatggagtgccccttctaccaccccaagcactgcagattcaacacccagtgcaccagacccgactgcaccttctaccaccccaccatcaacgtgccccccagacacgccctgaagtggatcagaccccagaccagcgagtag

SEQ ID NO: 281590 - DNA, 2136 bp, Artificial Sequence
  derived and/or modified sequence
atggagattggaacagaaatctcgcgcaagatccgctccgccatcaaagggaagctacaggagctcggagcctacgtggacgaggagttgccagactacatcatggtcatggtcgccaacaagaagagccaagatcagatgacagaagacctgtctttattcctcggcaacaacactatccggtttaccgtctggctccacggcgtgctggacaaactgaggtccgtcacaacagagccatcaagcctgaaatcctccgacactaatatcttcgatagcaacgttccaagcaataagtccaatttcagcagaggcgatgaaagaaggcacgaagcggctgtcccacctttagctattccctccgccaggccagaaaaaagggactctagggtttctactagctcacaggaaagcaagacgactaatgttcggcagacatacgacgatggggccgcaacccgcttgatgtcaactgtcaaaccccttcgggaacccgccccctctgaggatgtgatcgatatcaaaccagaacccgacgatttgatcgacgaggatctgaacttcgtgcaggagaaccctctctctcagaagaaaccaactgtgacactgacatacggatcttccaggccatccatcgagatatatcggcctccagcaagtcgcaatgccgatagcggtgtacatctgaacaggctacagtttcagcagcagcagaactccatccatgccgccaaacagttggacatgcagtcatcctgggtctatgaaactgggcggctttgcgagcctgaggtcctgaatagtctggaggaaacctactcacctttttttagaaataattccgagaaaatgagcatggaggatgagaattttcgcaagcggaagctcccagtggtatcttccgtggtgaaggtgaaaaagttcaaccatgatggtgaggaggaggaagaagatgacgattacggcagcagaactgggtccatctcctcctccgtgtccgtgcccgcgaagccagagagaagaccaagtctgcctccatcaaagcaggccaacaaaaatttgattctcaaggcaatctccgaggcacaagaaagtgtgacaaaaactacgaactattcaaccgtgccacaaaaacagactctgccagtcgcgccaaggacccgaacaagtcaagaggaactgctcgctgaagtggtacaaggtcagtctcggacaccacgaattagcccccccatcaaggaggaggaaacaaaaggggactccgtcgagaagaatcaggactactatgacatggaatcaatggtacacgccgacacccgttcatttatcctgaaaaaacctaaactgtctgaagaggtcgtcgtcgcaccaaaccaggagtcaggtatgaaaactgccgatagcctgcgtgtgctcagtgggcatcttatgcagacaagggatctggtacagccagataaacccgcttctccaaagtttatcgtaacccttgacggcgtgccctcgccaccagggtacatgagcgaccaagaagaagatatgtgctttgagggcatgaagcctgtgaatcagactgctgccagcaacaagggactgcggggtttgctccatcctcagcaactgcatctcctttcccggcagttggaggatccgaatggatctttttcaaacgctgagatgtctgagctctctgtagcacagaaacctgagaaattgctggagagatgtaagtattggccggcttgtaagaacggagacgagtgtgcctaccaccacccaatctctccttgtaaagcctttcccaattgcaagtttgctgaaaaatgtcttttcgtgcaccccaattgcaaatatgatgcgaaatgcacaaagccagattgcccctttacccacgtgtctcgccggatccccgtgctcagcccgaaacccgccgttgcaccacccgcccctccatcttctagtcagctgtgtagatacttccccgcttgcaagaaaatggaatgtccgttttaccaccccaaacactgtcggttcaatacccagtgtactagacccgactgcacattctaccatccaactattaatgtgccgcctcgccacgcgttgaagtggattcgcccccagacatctgagtag

SEQ ID NO: 281591 - DNA, 2136 bp, Artificial Sequence
  derived and/or modified sequence
atggagattggtacggaaatctctagaaagatcaggagtgccatcaaagggaaactgcaagagctgggggcatacattgacgaagagctgcccgactatattatggtcatggtggctaataagaagtcccaggaccagatgacagaagatttgtcactttttctggggaacaacactataagattcaccgtttggcttcacggggtgctggacaagctgcggtctgtcaccaccgagccgtcatcgctcaaaagctccgacaccaacatcttcgactcgaatgtgccctcgaataagtcgaacttcagcagaggggatgagagacggcatgaggccgccgtccctccactggcgattccctcagctcggccagagaaaagggattcccgggtgagtacctcctctcaagagtccaagaccacaaacgttagacagacgtatgacgacggcgcagcgacgcggcttatgtccacggtcaagcctctacgggagcctgctccttccgaggacgtgatagacatcaaacccgagcctgacgacttaatcgacgaggaccttaatttcgtgcaggagaaccccctcagccagaagaaaccaactgtcactttgacgtatggttcttcgcgcccctcaatcgaaatatatcggccgccggcttcaaggaacgcagatagtggggtacacctgaaccgcctacagtttcagcagcaacaaaattccatccatgcggccaaacagctggacatgcagagctcctgggtgtacgagactggtcgtctttgcgaacctgaagtgctgaactcgctcgaagagacttatagcccatttttccgcaataattctgagaagatgtcaatggaggatgaaaacttccgcaagaggaagctccccgtcgtgtcatccgtcgtgaaggttaagaagtttaaccatgacggcgaagaagaggaggaagatgatgactacggctcccgcacagggagtattagtagcagcgtttccgttcctgccaaacccgaaagacgcccatctttgcctccaagcaagcaagctaacaagaacctgattttgaaggctatctccgaggcacaagagagtgtgaccaaaaccacaaactattcaacagttccccagaaacagactctcccagtggcaccaaggacccggacaagccaggaggaactgttggcagaggtcgtgcaggggcagagcagaaccccgcgcatttctccccctattaaggaggaggagacgaagggtgactccgtggagaaaaaccaggactactatgatatggagtctatggtccatgccgacacaaggagctttatcctgaagaagccaaagctgagcgaagaagtggttgttgcaccgaaccaggaatccggcatgaaaacagccgatagtctacgcgtgctgtctggccatctgatgcaaacccgggatttggtgcagcccgacaaacctgctagtcctaagttcatcgtgaccctggatggggtgccaagccctccaggttatatgtccgaccaggaggaagatatgtgcttcgagggcatgaagcccgtgaaccagacagcggcttctaataaaggcttgcggggactgctgcacccccaacaactgcacctattgagtcgacagcttgaagacccgaatggttcgttcagtaacgcggagatgtcagagctgtctgtcgcgcagaagccagagaaacttctggagcgctgcaaatactggcctgcctgcaagaatggggacgagtgcgcctatcaccatcccatttccccatgtaaggcgtttcccaattgcaaattcgctgagaaatgtctgttcgtccacccgaactgtaagtacgatgccaagtgtaccaagcccgattgtcctttcactcatgtaagtcggcggattcctgttcttagcccgaaacccgctgtggctcctcccgccccccccagcagctctcagttgtgtcggtatttcccagcttgcaagaagatggaatgcccgttctaccacccgaagcattgtagatttaacacccaatgcacacggcccgactgcaccttttatcaccccactatcaacgtaccacctcgccacgctctgaagtggattaggccacagacctccgaatag

SEQ ID NO: 281592 - DNA, 2136 bp, Artificial Sequence
  derived and/or modified sequence
atggagattggaacagagatcagcaggaagatccgcagcgccatcaagggcaagctgcaggagctgggcgcctacgtggatgaggagctgcctgactacatcatggtgatggtggccaacaagaagagccaggaccagatgacagaggacctgagcctcttcctgggcaacaacaccatccgcttcaccgtgtggctgcatggagtgctggacaagctgcggtctgtgaccacagagcccagcagcctgaagagcagtgacaccaacatctttgacagcaatgtgcccagcaacaagagcaacttcagcagaggagatgagaggagacatgaggccgctgtgccccccctggccatccccagcgcccggcctgagaagagggacagccgggtgtccaccagcagccaggagagcaagaccaccaacgtgcggcagacctatgatgatggagctgccacccggctgatgagcacagtgaagcccctgcgggagcccgcccccagtgaagatgtgattgacatcaagccagagccagatgacctgattgatgaggacctgaactttgtgcaggagaaccccctgagccagaagaagcccaccgtgaccctgacctacggcagcagccggcccagcattgagatctacagacctccagccagcagaaatgctgacagcggcgtgcacctgaaccggctgcagttccagcagcagcagaacagcatccatgctgccaagcagctggacatgcagagctcctgggtgtatgaaacaggccgcctgtgtgagcctgaggtgctgaacagcctggaggagacctacagccccttcttcaggaacaacagcgagaagatgtccatggaggatgagaacttcaggaagaggaagctgcctgtggtgtcctctgtggtgaaggtgaagaagttcaaccatgatggagaggaggaggaggaggatgatgattatggcagcaggacaggcagcatcagcagctctgtgtctgtgcctgccaagccagagcggcggcccagcctgccccccagcaagcaggccaacaagaacctgatcctgaaggccatcagcgaggcccaggagagcgtgaccaagaccaccaactacagcacagtgccccagaagcagaccctgcctgtggcccccaggaccaggaccagccaggaggagctgctggccgaggtggtgcagggccagagcaggaccccccgcatcagcccccccatcaaggaggaggagaccaagggggacagcgtggagaagaaccaggactactatgacatggagagcatggtgcatgctgacaccaggagcttcatcctgaagaagcccaagctgtctgaggaggtggtggtggcccccaaccaggagagcggcatgaagacagctgacagcctgcgggtgctgagcggccacctgatgcagacccgggacctggtgcagcctgacaagccagccagccccaagttcatcgtgaccctggatggagtgcccagccccccaggctacatgtctgaccaggaggaggacatgtgctttgagggcatgaagcctgtgaaccagacagctgccagcaacaagggcctgcggggcctgctgcacccccagcagctgcacctgctgagccggcagctggaggaccccaacggcagcttcagcaatgctgagatgtctgagctgtctgtggcccagaagccagagaagctgctggagcgctgcaagtactggccagcctgcaagaatggagatgaatgtgcctaccaccaccccatcagcccctgcaaggccttccccaactgcaagtttgctgagaagtgcctgtttgtgcaccccaactgcaagtatgatgccaagtgcaccaagccagactgccccttcacccacgtgagccgccgcatccctgtgctgagccccaagccagctgtggcccccccagccccacccagcagcagccagctgtgccgctacttccctgcctgcaagaagatggagtgccccttctaccaccccaagcactgccgcttcaacacccagtgcaccaggccagactgcaccttctaccaccccaccatcaacgtgcccccaagacatgccctgaagtggatccggccccagaccagcgagtag

SEQ ID NO: 281593 - DNA, 2136 bp, Artificial Sequence
  derived and/or modified sequence
atggagattggaacagagatcagcaggaagatccgcagcgccatcaagggcaagctgcaggagctgggcgcctacattgatgaggagctgcctgactacatcatggtgatggtggccaacaagaagagccaggaccagatgacagaggacctgagcctcttcctgggcaacaacaccatccgcttcaccgtgtggctgcatggagtgctggacaagctgcggtctgtgaccacagagcccagcagcctgaagagcagtgacaccaacatctttgacagcaatgtgcccagcaacaagagcaacttcagcagaggagatgagaggagacatgaggccgctgtgccccccctggccatccccagcgcccggcctgagaagagggacagccgggtgtccaccagcagccaggagagcaagaccaccaacgtgcggcagacctatgatgatggagctgccacccggctgatgagcacagtgaagcccctgcgggagcccgcccccagtgaagatgtgattgacatcaagccagagccagatgacctgattgatgaggacctgaactttgtgcaggagaaccccctgagccagaagaagcccaccgtgaccctgacctacggcagcagccggcccagcattgagatctacagacctccagccagcagaaatgctgacagcggcgtgcacctgaaccggctgcagttccagcagcagcagaacagcatccatgctgccaagcagctggacatgcagagctcctgggtgtatgaaacaggccgcctgtgtgagcctgaggtgctgaacagcctggaggagacctacagccccttcttcaggaacaacagcgagaagatgtccatggaggatgagaacttcaggaagaggaagctgcctgtggtgtcctctgtggtgaaggtgaagaagttcaaccatgatggagaggaggaggaggaggatgatgattatggcagcaggacaggcagcatcagcagctctgtgtctgtgcctgccaagccagagcggcggcccagcctgccccccagcaagcaggccaacaagaacctgatcctgaaggccatcagcgaggcccaggagagcgtgaccaagaccaccaactacagcacagtgccccagaagcagaccctgcctgtggcccccaggaccaggaccagccaggaggagctgctggccgaggtggtgcagggccagagcaggaccccccgcatcagcccccccatcaaggaggaggagaccaagggggacagcgtggagaagaaccaggactactatgacatggagagcatggtgcatgctgacaccaggagcttcatcctgaagaagcccaagctgtctgaggaggtggtggtggcccccaaccaggagagcggcatgaagacagctgacagcctgcgggtgctgagcggccacctgatgcagacccgggacctggtgcagcctgacaagccagccagccccaagttcatcgtgaccctggatggagtgcccagccccccaggctacatgtctgaccaggaggaggacatgtgctttgagggcatgaagcctgtgaaccagacagctgccagcaacaagggcctgcggggcctgctgcacccccagcagctgcacctgctgagccggcagctggaggaccccaacggcagcttcagcaatgctgagatgtctgagctgtctgtggcccagaagccagagaagctgctggagcgctgcaagtactggccagcctgcaagaatggagatgaatgtgcctaccaccaccccatcagcccctgcaaggccttccccaactgcaagtttgctgagaagtgcctgtttgtgcaccccaactgcaagtatgatgccaagtgcaccaagccagactgccccttcacccacgtgagccgccgcatccctgtgctgagccccaagccagctgtggcccccccagccccacccagcagcagccagctgtgccgctacttccctgcctgcaagaagatggagtgccccttctaccaccccaagcactgccgcttcaacacccagtgcaccaggccagactgcaccttctaccaccccaccatcaacgtgcccccaagacatgccctgaagtggatccggccccagaccagcgagtag

SEQ ID NO: 281594 - DNA, 2136 bp, Artificial Sequence
  derived and/or modified sequence
atggagatcggcaccgagatcagccggaagatccggagcgccatcaaaggaaagctgcaagaactgggagcgtacgtagatgaggagttaccagactacattatggtgatggtagctaacaaaaaatcccaggaccagatgacagaggatctctccctgtttctggggaacaataccattaggttcaccgtgtggctccacggggtcctagataagctcaggtctgtgacgaccgagccgtcctctctgaaatcctcagataccaacatctttgactccaacgttccctccaataaaagcaacttctcccgaggggacgagagaaggcacgaagccgcagtgccacccctggctattccttccgctcgtcccgaaaaacgggactcaagagtcagtacttcttctcaggagtctaaaacaactaatgtgaggcagacttatgacgatggcgccgccacgagactgatgagtactgtgaagcctctgagagagcctgcaccatccgaagacgtcattgacattaagcccgaacccgatgaccttatagatgaggatttgaacttcgtgcaggagaaccccctgagccagaaaaagcccactgtgactctaacatacgggagcagcagaccttctatcgagatctatcgcccacctgcctcccgcaatgccgactcgggagtccacctcaatcgactgcaatttcagcagcagcaaaattcaatccacgccgccaagcaactggatatgcaaagcagctgggtgtacgagaccgggaggctctgtgagccagaggtgctgaatagcctagaagaaacctacagcccctttttccgcaacaattcggaaaagatgtcaatggaggacgagaactttaggaaaaggaagctcccggtcgtttcatcggtcgtgaaagtgaaaaaattcaatcatgacggggaggaagaagaggaagacgacgattatgggagtcggaccggttcgatttcgtccagtgtctctgtgccagccaagccagagaggcgcccgagcctccctccttccaaacaggctaacaagaacctcattctcaaggctattagcgaagctcaggagtccgttaccaagacgactaactactccactgtgcctcagaagcagacgctccccgtggccccacgtaccagaacctcccaggaggagctgctggctgaagtcgtgcaagggcagagccggaccccaaggattagtcctcctattaaagaggaagaaacaaagggcgattccgtggagaaaaaccaggattattatgatatggaaagtatggtccacgccgacactcgcagcttcattctcaaaaagccaaagctgagcgaggaagtcgtcgtggcccctaatcaggagtcagggatgaagactgcggacagcctgcgagtgctatccggccatctgatgcagacacgagatctggtgcagcccgataagccagcctcacccaaatttatcgtgaccctcgatggagtgccaagcccccctggctacatgtctgatcaggaggaggacatgtgcttcgaaggcatgaagccggtgaaccagactgctgcctctaacaaaggccttagaggacttttacaccctcagcagcttcatctgctgagtaggcagctggaagaccctaacggatcattttctaacgctgagatgtccgaattaagcgtggcccaaaagcccgagaagttgctcgaacgctgcaagtactggcctgcatgtaagaacggtgatgagtgcgcttaccaccatccaatctcaccctgcaaggccttccccaactgcaagtttgcagaaaagtgcctgttcgtacatcctaactgtaagtacgacgcgaagtgcaccaagccagattgcccattcacgcacgtgagtaggaggattcccgtgcttagccccaaacctgccgtggctccgcccgctcccccttctagctcacagctgtgtagatatttccctgcttgcaaaaaaatggaatgtcctttttaccatcccaaacactgccgatttaacacccagtgcaccaggcccgactgcacattttaccatcccaccattaacgtcccccctcgccacgcccttaaatggatcaggcctcagaccagcgagtag

SEQ ID NO: 281595 - DNA, 2136 bp, Artificial Sequence
  derived and/or modified sequence
atggagatcggcaccgagatcagccggaagatccggagcgccatcaaaggcaaactccaggagctcggcgcctacatcgatgaggaactgcctgactacattatggtgatggtggcaaataagaagtcacaagatcagatgactgaggatctgtccctgttccttggaaataatacgatccgcttcactgtgtggctgcacggggtgctggataagctgagatcggtgacaacagaacctagctccctcaaatcatcagacaccaatatttttgactcaaacgtcccatctaacaaaagtaacttctccagaggcgacgaacgaagacacgaggccgctgtgcctccgctggccatccctagtgctcggccagagaaaagggacagtcgggtgagtacctccagccaggagtcaaagaccacaaacgtccgccagacatacgacgacggagctgcgaccagactgatgagtactgtgaaaccactccgggaacccgccccctccgaggacgtgatagacatcaagcccgagccagatgacctgatagatgaagatctgaacttcgtccaggagaaccccctcagccagaagaaacccaccgtgactcttacttatggttcctcacggccttcaatagagatctacaggccccctgcttccagaaacgccgactccggcgttcacttaaacaggctccagtttcagcagcagcaaaatagtatccatgctgctaaacagttggatatgcagtcctcatgggtatatgagacgggacggctatgcgagccggaagtacttaacagtttagaggagacctatagccctttttttagaaacaacagtgagaaaatgtctatggaagacgaaaatttccggaagcgaaaactgccggtggtgtccagcgtggttaaggtcaaaaaatttaatcatgatggcgaagaagaagaggaggatgatgactatgggagtagaacaggcagcatctcatctagtgtgtctgtacccgctaagccagagcggcggccaagcttaccccccagcaaacaggccaataagaatctgatattaaaggccatttccgaggcgcaagagagtgtcacgaaaactaccaactacagcacagtcccccagaagcagaccctcccagtggctcctcgaacacgtacttcgcaggaggaattactcgcagaggttgtgcagggccaatccaggacaccaaggattagccccccaataaaggaggaggagaccaaaggcgattccgtcgaaaagaaccaggactactatgacatggagagcatggtgcatgcggacacacgctcctttatccttaagaaacctaagttgtcagaggaggtggtagttgctccgaatcaggagagtgggatgaagaccgccgatagcttgcgtgtgctctcaggtcacctgatgcaaacccgcgacctggtgcagcccgataagccagcttccccaaagttcattgtgacccttgacggcgttccgagtccacctgggtacatgagcgatcaagaagaggacatgtgctttgaagggatgaagcccgttaaccaaactgcagcttcgaataagggccttagaggcctgctccacccccagcagttgcatctactgtcaagacagcttgaggatcctaatgggagcttttctaacgccgagatgtccgaattaagcgtggcacagaagccggagaaattactggagcgctgcaagtactggcccgcctgcaagaatggtgacgaatgtgcctaccatcaccctataagcccttgtaaagcattccccaactgcaaattcgccgaaaaatgcctgtttgtgcacccgaattgcaaatacgacgcaaagtgtacgaagcccgactgcccttttactcacgtgtcacggaggattcctgtgctgtcaccgaagcccgcagtagcacctccagcacctccctcctccagtcagctctgtagatacttccccgcgtgtaaaaaaatggagtgcccgttttatcacccaaaacattgtcggtttaacacccagtgtactcgaccagattgtaccttttatcaccctactattaatgtcccccctcggcatgccctcaagtggatcagacctcagacgtcagagtag

SEQ ID NO: 281596 - DNA, 2136 bp, Artificial Sequence
  derived and/or modified sequence
atggaaatcggaacagagatatctagaaaaattaggagtgctatcaagggcaagctgcaggagctgggcgcatacgtcgacgaggagctgcctgactatatcatggtgatggtggcaaataagaaaagtcaggaccagatgaccgaggatctgagcctgttcctcgggaacaatacaatccgattcacggtgtggctgcatggcgtccttgataaactgcgcagtgtcacaacggagccttcatccctgaagtcctccgacacaaatattttcgacagcaacgtgccttcgaataagagcaacttcagcagaggagatgagcgccgacatgaggccgcagtgccccctctcgccatccccagcgctcgccctgaaaaaagggactctagagtctctacaagttcacaggagagcaagacaaccaacgtgagacagacgtatgatgacggagccgcaacgagacttatgagcactgtgaagcccctcagagagcctgccccatctgaagacgtgatagacattaaaccggaacccgatgacttgatcgacgaagatctgaatttcgtgcaggaaaatccgctgtcacaaaagaagcctactgtgaccctgacttacgggagcagcaggccaagtatagagatctaccggccaccagcatccaggaatgcagactctggagtgcaccttaatcgccttcaattccagcagcagcagaactctattcacgcggcaaagcagctggacatgcagagctcttgggtctatgaaaccgggagattatgtgaacctgaggtgctgaactctctcgaagaaacgtattccccattcttcagaaataactcagaaaaaatgtccatggaggatgaaaactttagaaaacggaaattgcccgtggtgagttctgtggtgaaagtgaagaaatttaaccatgacggagaagaagaagaggaggacgacgactacggctcccggacaggttcaatcagcagttctgtatccgttcccgctaagcccgaaagaaggcccagcttacctccttcaaagcaagcaaacaagaatctcatcctaaaagctatcagtgaagcccaggaaagtgtcaccaaaacgaccaactattcgacagtcccccaaaagcaaacgctgccggtcgcgcctcggacgcggacttcacaagaagaactgctggctgaggtggtccaggggcagtcaaggactcccaggatctctccgcctatcaaagaggaagagactaaaggggatagcgttgagaaaaaccaggattactatgacatggaaagtatggttcacgctgacactcggtccttcatactgaagaagcccaaattatctgaggaggtggtggttgcccctaaccaagagagcggtatgaaaacagctgactcactcagggtgctgtcgggccacctcatgcagacacgcgacttagtgcaaccggataaaccggcttctcccaagtttatcgtgactctggatggtgttccctctcctccaggatacatgtccgatcaagaggaggatatgtgcttcgaagggatgaagcccgtgaatcagactgctgcatctaacaaaggcttacgaggccttcttcatcctcagcagctccacttgctctccaggcaattggaagaccccaatggttccttctcgaacgctgagatgtctgaactgtctgtggcccagaagccagagaaactgctggagcgttgtaaatattggcccgcatgtaagaacggagatgagtgtgcctatcatcatcccataagcccatgtaaagccttcccaaactgcaaattcgccgagaaatgtctgtttgtccatccaaattgtaaatacgatgctaagtgcacaaaacccgattgcccttttactcatgtgagccggaggatacctgtgctgagccctaagcccgctgtcgcccctccagcccctccaagttcttcacaattgtgccgctatttccctgcctgcaaaaagatggaatgtccattctatcaccctaaacactgccgatttaacacccagtgtactagaccagattgcaccttttaccaccctacaatcaacgttcccccacggcacgccctgaagtggataaggccccaaacaagtgaatag

SEQ ID NO: 281597 - DNA, 2136 bp, Artificial Sequence
  derived and/or modified sequence
atggagatcggcaccgagattagtcgtaagatacgatctgctattaagggaaagctccaggagctgggcgcttacatagatgaggaattgcctgactatattatggttatggtggccaataagaaatcacaggatcaaatgacggaagatttatcactctttctcggtaacaacactatccggttcaccgtctggctccacggagttttggacaaacttcgttctgtgacaaccgagccctcttccttaaaatcgtctgatacgaatatttttgatagcaatgttccttcgaacaagtctaacttcagccggggagatgagcgtagacacgaggctgccgtgccgccacttgccatcccgagcgctcgccctgagaaaagagactctcgtgtgagcacatcatctcaagagtccaaaacaactaacgtgagacagacttacgacgacggtgcagcaacgaggcttatgagtaccgtcaagccactgcgcgaacccgctcctagcgaagacgtaattgacatcaaacctgaaccagatgacttaatcgacgaagacttaaattttgtacaggaaaatcctctatcgcaaaagaagcccactgtgacacttacatacggctcttcccgcccttccattgagatttataggcccccagcctcaaggaacgcggatagtggtgtccacctgaataggctgcaattccagcagcagcagaattcaatccatgctgccaagcaattggacatgcagagcagttgggtgtatgagacagggagactctgcgaacctgaggtgctcaactctctggaggaaacctattcaccttttttcaggaataactccgagaagatgtccatggaggatgagaacttcagaaaacgcaaattacctgtggtgagcagcgtggttaaggtgaagaaatttaatcacgacggggaagaggaagaggaggacgacgactacggctctaggacaggcagcatttcctcaagcgtctctgtgcccgcaaagcctgagaggagacctagtctgccaccgtccaagcaggccaacaagaatctgatactgaaggctatctccgaggcccaggaatctgttacgaagacaacaaactattcaacagtcccccagaaacagactctgcccgttgccccacgcactaggacgtcacaggaggagctcctggcagaagtggtccagggccagtcccggaccccgagaatcagccctcctattaaagaggaggagaccaagggagacagtgttgaaaagaatcaggattattatgacatggaatccatggtgcatgccgacaccagatcgttcatcctcaaaaaaccaaaattaagtgaggaggttgtggttgcaccaaatcaggaatctggtatgaagactgctgatagcttaagggtgctgtctggacatcttatgcagaccagggacctggttcagccagacaagcccgcaagccctaaattcatagttaccctcgatggggtaccctccccacctggctacatgtccgatcaggaagaggacatgtgcttcgagggaatgaagccggtgaatcaaactgccgcaagcaacaaaggtctccgcggactgctgcacccgcagcagctgcatcttttaagtagacagctggaagatccgaacggttccttcagcaacgccgagatgtctgaactgagtgtcgcgcagaagccagagaaactgctcgagcgctgcaagtattggcccgcatgcaagaacggggatgagtgcgcttaccatcaccctatttccccatgcaaggcctttcctaactgtaaattcgcggagaaatgtctctttgtccatcctaactgcaaatacgacgccaagtgtactaaacctgattgcccttttactcacgtaagtaggaggattcctgttctgtcacccaagcccgcagttgctccacctgctccacccagttcgtcccagctctgccgttacttccctgcctgcaagaaaatggaatgtcctttttatcatccaaagcactgcaggttcaacactcaatgcacacgcccagactgtaccttctaccatcctactattaacgtcccaccgaggcacgccttgaaatggatcagaccccagacctctgagtag

SEQ ID NO: 281598 - DNA, 2195 bp, Artificial Sequence
  derived and/or modified sequence
atggagatcggcaccgagatcagccgcaagatccggagtgccattaaggggaaattacaagaattaggagcttatgttgatgaagaacttcctgattacattatggtgatggtggccaacaagaaaagtcaggaccaaatgacagaggatctgtccctgtttctagggaacaacacaattcgattcaccgtatggcttcatggtgtattagataaacttcgctctgttacaactgaaccctctagtctgaagtcttctgataccaacatctttgatagtaacgtgccttcaaacaagagcaatttcagtcggggagatgagaggaggcatgaagctgcagtgccaccacttgccattcctagcgcgagacctgaaaaaagagattccagagtttctacaagttcgcaggagtcaaaaaccacaaatgtcagacagacttacgatgatggagctgcaacccgactaatgtcaacagtgaaacctttgagggagccagcaccctctgaagatgtgattgatattaagccagaaccagatgatctcattgacgaagacctcaactttgtgcaggagaatcccttatctcagaaaaaacctacagtgacacttacatatggttcttctcgcccttctattgaaatttatcgaccacctgcaagtagaaatgcagatagtggtgttcatttaaacaggttgcaatttcaacagcagcagaatagtattcatgctgccaagcagcttgatatgcagagtagttgggtatatgaaacaggacgtttgtgtgaaccagaggtgcttaacagcttagaagaaacgtatagtccgttctttagaaacaactcggagaaaatgagtatggaggatgaaaactttcggaagagaaagttgcctgtggtaagttcagttgttaaagtaaaaaaattcaatcatgatggagaagaggaggaagaagatgatgattacgggtctcgaacaggaagcatctccagcagtgtgtctgtgcctgcaaagcctgaaaggagaccttctcttccaccttctaaacaagctaacaagaatctgattttgaaggctatatctgaagctcaagaatccgtaacaaaaacaactaactactctacagttccacagaaacagacacttccagttgctcccagaactcgaacttctcaagaagaattgctagcagaagtggtccagggacaaagtaggacccccagaataagtccccccattaaagaagaggaaacaaaaggagattctgtagaaaaaaatcaagattactatgacatggaatccatggtccatgcagacacaagatcatttattctgaagaagccaaagctgtctgaggaagtagtagtggcaccaaaccaagagtcggggatgaagactgcagattcccttcgggtactttcaggacaccttatgcagacacgagatcttgtacaaccagataaacctgcaagtcccaagtttatagtgacgctggatggtgtccccagccccccaggatacatgtcagatcaagaggaggacatgtgctttgaaggaatgaaacccgtaaaccaaactgcagcctcaaacaagggactcagaggtctcctccacccacagcagttgcacttgctgagcaggcagcttgaggacccaaatggtagcttttctaacgctgagatgagtgaactgagtgtggcacagaaaccagaaaaacttttggagcgctgcaagtactggcctgcttgtaaaaatggggatgagtgtgcctaccatcaccccatctcaccctgcaaagccttccccaattgtaaatttgctgaaaaatgtttgtttgttcacccaaattgtaaatatgatgcaaagtgtactaaaccagattgtcccttcactcatgtgagtagaagaattccagtactgtctccaaaaccagcagttgcaccaccagcaccaccttccagtagtcagctctgccgttacttccctgcttgtaagaagatggaatgtcccttctatcatccaaaacattgtaggtttaacactcaatgtacaagaccggactgcacattctaccatcccaccattaatgtcccaccacgacatgccttgaaatggattcgacctcaaaccagcgaatagcacccagtcctgcctggcagaagatcatgcagtttggaagttttcatgtactgatgaaa

SEQ ID NO: 281599 - DNA, 4118 bp, Artificial Sequence
  derived and/or modified sequence
tgagcacaggtttcgcgggtagaaggcgtgcgcaggcgcggacacgggcgcatgcgcgttcactccggcgcgcagtgccggccggggcggggatacgccgtgtgcgcggccgggggcggaacggaggaggaggcggtggtgtcccggctgcggggtaggagtccgcggcagcctccgggtaagccaagcgccgcgcagtgctgagttcccgcacgccgcagagccatggagatcggcaccgagatcagccgcaagatccggagtgccattaaggggaaattacaagaattaggagcttatatagatgaagaacttcctgattacattatggtgatggtggccaacaagaaaagtcaggaccaaatgacagaggatctgtccctgtttctagggaacaacacaattcgattcaccgtatggcttcatggtgtattagataaacttcgctctgttacaactgaaccctctagtctgaagtcttctgataccaacatctttgatagtaacgtgccttcaaacaagagcaatttcagtcggggagatgagaggaggcatgaagctgcagtgccaccacttgccattcctagcgcgagacctgaaaaaagagattccagagtttctacaagttcgcaggagtcaaaaaccacaaatgtcagacagacttacgatgatggagctgcaacccgactaatgtcaacagtgaaacctttgagggagccagcaccctctgaagatgtgattgatattaagccagaaccagatgatctcattgacgaagacctcaactttgtgcaggagaatcccttatctcagaaaaaacctacagtgacacttacatatggttcttctcgcccttctattgaaatttatcgaccacctgcaagtagaaatgcagatagtggtgttcatttaaacaggttgcaatttcaacagcagcagaatagtattcatgctgccaagcagcttgatatgcagagtagttgggtatatgaaacaggacgtttgtgtgaaccagaggtgcttaacagcttagaagaaacgtatagtccgttctttagaaacaactcggagaaaatgagtatggaggatgaaaactttcggaagagaaagttgcctgtggtaagttcagttgttaaagtaaaaaaattcaatcatgatggagaagaggaggaagaagatgatgattacgggtctcgaacaggaagcatctccagcagtgtgtctgtgcctgcaaagcctgaaaggagaccttctcttccaccttctaaacaagctaacaagaatctgattttgaaggctatatctgaagctcaagaatccgtaacaaaaacaactaactactctacagttccacagaaacagacacttccagttgctcccagaactcgaacttctcaagaagaattgctagcagaagtggtccagggacaaagtaggacccccagaataagtccccccattaaagaagaggaaacaaaaggagattctgtagaaaaaaatcaagattactatgacatggaatccatggtccatgcagacacaagatcatttattctgaagaagccaaagctgtctgaggaagtagtagtggcaccaaaccaagagtcggggatgaagactgcagattcccttcgggtactttcaggacaccttatgcagacacgagatcttgtacaaccagataaacctgcaagtcccaagtttatagtgacgctggatggtgtccccagccccccaggatacatgtcagatcaagaggaggacatgtgctttgaaggaatgaaacccgtaaaccaaactgcagcctcaaacaagggactcagaggtctcctccacccacagcagttgcacttgctgagcaggcagcttgaggacccaaatggtagcttttctaacgctgagatgagtgaactgagtgtggcacagaaaccagaaaaacttttggagcgctgcaagtactggcctgcttgtaaaaatggggatgagtgtgcctaccatcaccccatctcaccctgcaaagccttccccaattgtaaatttgctgaaaaatgtttgtttgttcacccaaattgtaaatatgatgcaaagtgtactaaaccagattgtcccttcactcatgtgagtagaagaattccagtactgtctccaaaaccagcagttgcaccaccagcaccaccttccagtagtcagctctgccgttacttccctgcttgtaagaagatggaatgtcccttctatcatccaaaacattgtaggtttaacactcaatgtacaagaccggactgcacattctaccatcccaccattaatgtcccaccacgacatgccttgaaatggattcgacctcaaaccagcgaatagcacccagtcctgcctggcagaagatcatgcagtttggaagttttcatgtactgatgaaagatactctacagaacttgtcaaatctttgaaacttggaatatattgctttcataatatgaagttttattgcctatctatctgaagtgtctaatttttcaagtttgtaagtttattatgtggttttaacattgggtgtttttgttttgtttttactatgaaaagacagcttaaggaagagctaaattctgttaaaatatttggggcatgtttgtgcactgctgttgtgaggatcagcatatgaaattgacatcatggttagtcatggtactgcagcttagggggctacacggttgctgtgtgagtggagagatgcagtgaggcagttgtcattattctaaaaattgtactactttcacttttcccaaagattatataatgttcataatccaccatgaaaacagcattggccaaaggtactgaggctgcttaaaatattcaattctgctttttaatttttaagtgaatttagtttgaaaagcatgattatacaggcctctcaggctgagtgctactttggtaaagttcccagttttcctgccttctgtgacaggatgaatgaggtgggtatggacagtggaggcagctggaatggcaagtgcagaaaataggaacagttctatacagtgctctcatttactaataacataatgccttctaaataatttttttgggaaactacattatcacaaaattatacaaatttttttacaagtatttacatactgtatctgaaaacagactttaaagtcacaagattataaatgtacatatatattctcacattctgaaaaataacattctcagaatccacagaaaatatacttagttactactgaagataatttttgaaatgtaaaaattagatttaaatagtatattttaaatgacagaactataattacagagatcagatcagataggtaaactgcaagatagataggatgaaacttttggcctactgtattacttacagagtttttttgtgtgtggtttttaaaactgttaaggcaagaagtgtcaaatgctttagagttaaataacagatcactgatttcaaagacttggtgtatagtgttaaaaattaaagcttaaaaggtggttagaaaagtggattaatgcaaaaggggtaataaagactgcaacattctcaggaccaaattaaactgctaaaaaaaaaaaaaaagttcattgacttgcttagtcgtatactcaaatgatgataaacctacatgtgcaaaggctcacgtttaagattgtcaagccagcagtctactgttgtgttgccattgcttttccattgggagaagaaagaattaaccagtcattaaaccatttggtaagttgcactttgctgtgctgatcccacaggaaaggcttgaaacacgagaagcagcaaagacagagcacacaagtgcataaggctgttgtcttcggcttgggtgaaatgacagttcctcttcattctaaaggtttactccattgaatttaaggcatttgttcattccagtgttgagatgctttgcatctctgcagaagaaatttattttaaattgtttaaatatctggaaatacttttagctatcatttataaagatagttttgttctcagtttcactataaattatagaacaaatgggaaacaagggtttaatttagttcagccattttacaaggaaataataaaatactaaaatctg

SEQ ID NO: 281600 - protein, 571 aa, Artificial Sequence
  derived and/or modified sequence
MVMVANKKSQDQMTEDLSLFLGNNTIRFTVWLHGVLDKLRSVTTEPSSLKSSDTNIFDSNVPSNKSNFSRGDERRHEAAVPPLAIPSARPEKRDSRVSTSSQESKTTNVRQTYDDGAATRLMSTVKPLREPAPSEDVIDIKPEPDDLIDEDLNFVQENPLSQKKPTVTLTYGSSRPSIEIYRPPASRNADSGVHLNRLQFQQQQNSIHAAKQLDMQSSWVYETGRLCEPEVLNSLEETYSPFFRNNSEKMSMEDENFRKRKLPVVSSVVKVKKFNHDGEEEEEDDDYGSRTGSISSSVSVPAKPERRPSLPPSKQANKNLILKAISEAQESVTKTTNYSTVPQKQTLPVAPRTRTSQEELLAEVVQGQSRTPRISPPIKEEETKGDSVEKNQGTQQRQLLSRLQIDPVMAETLQMSQAEMSELSVAQKPEKLLERCKYWPACKNGDECAYHHPISPCKAFPNCKFAEKCLFVHPNCKYDAKCTKPDCPFTHVSRRIPVLSPKPAVAPPAPPSSSQLCRYFPACKKMECPFYHPKHCRFNTQCTRPDCTFYHPTINVPPRHALKWIRPQTSE

SEQ ID NO: 281601 - DNA, 2007 bp, Artificial Sequence
  derived and/or modified sequence
cggagcgtggctgcggctgaagtagccgccgggaaatggaaggacaggcgcaggcccggctggagccaccaccgcggcgcacggcgccgctttggatccgctgcgggagagtgccattaaggggaaattacaagaattaggagcttatgttgatgaagaacttcctgattacattatggtgatggtggccaacaagaaaagtcaggaccaaatgacagaggatctgtccctgtttctagggaacaacacaattcgattcaccgtatggcttcatggtgtattagataaacttcgctctgttacaactgaaccctctagtctgaagtcttctgataccaacatctttgatagtaacgtgccttcaaacaagagcaatttcagtcggggagatgagaggaggcatgaagctgcagtgccaccacttgccattcctagcgcgagacctgaaaaaagagattccagagtttctacaagttcgcaggagtcaaaaaccacaaatgtcagacagacttacgatgatggagctgcaacccgactaatgtcaacagtgaaacctttgagggagccagcaccctctgaagatgtgattgatattaagccagaaccagatgatctcattgacgaagacctcaactttgtgcaggagaatcccttatctcagaaaaaacctacagtgacacttacatatggttcttctcgcccttctattgaaatttatcgaccacctgcaagtagaaatgcagatagtggtgttcatttaaacaggttgcaatttcaacagcagcagaatagtattcatgctgccaagcagcttgatatgcagagtagttgggtatatgaaacaggacgtttgtgtgaaccagaggtgcttaacagcttagaagaaacgtatagtccgttctttagaaacaactcggagaaaatgagtatggaggatgaaaactttcggaagagaaagttgcctgtggtaagttcagttgttaaagtaaaaaaattcaatcatgatggagaagaggaggaagaagatgatgattacgggtctcgaacaggaagcatctccagcagtgtgtctgtgcctgcaaagcctgaaaggagaccttctcttccaccttctaaacaagctaacaagaatctgattttgaaggctatatctgaagctcaagaatccgtaacaaaaacaactaactactctacagttccacagaaacagacacttccagttgctcccagaactcgaacttctcaagaagaattgctagcagaagtggtccagggacaaagtaggacccccagaataagtccccccattaaagaagaggaaacaaaaggagattctgtagaaaaaaatcaaggaactcaacagaggcaattattatcccgactgcaaatcgacccagtaatggcagaaactctgcagatgagtcaagctgagatgagtgaactgagtgtggcacagaaaccagaaaaacttttggagcgctgcaagtactggcctgcttgtaaaaatggggatgagtgtgcctaccatcaccccatctcaccctgcaaagccttccccaattgtaaatttgctgaaaaatgtttgtttgttcacccaaattgtaaatatgatgcaaagtgtactaaaccagattgtcccttcactcatgtgagtagaagaattccagtactgtctccaaaaccagcagttgcaccaccagcaccaccttccagtagtcagctctgccgttacttccctgcttgtaagaagatggaatgtcccttctatcatccaaaacattgtaggtttaacactcaatgtacaagaccggactgcacattctaccatcccaccattaatgtcccaccacgacatgccttgaaatggattcgacctcaaaccagcgaatagcacccagtcctgcctggcagaagatcatgcagtttggaagttttcatgtactgatgaaagatactctacagaacttgtcaaatctttgaaacttggaatatattgctttcataata

SEQ ID NO: 281602 - DNA, 3800 bp, Artificial Sequence
  derived and/or modified sequence
tgagcacaggtttcgcgggtagaaggcgtgcgcaggcgcggacacgggcgcatgcgcgttcactccggcgcgcagtgccggccggggcggggatacgccgtgtgcgcggccgggggcggaacggaggaggaggcggtggtgtcccggctgcggggtaggagtccgcggcagcctccgggtaagccaagcgccgcgcagtgctgagttcccgcacgccgcagagccatggagatcggcaccgagatcagccgcaagatccggagtgccattaaggggaaattacaagaattaggagcttatgttgatgaagaacttcctgattacattatggtgatggtggccaacaagaaaagtcaggaccaaatgacagaggatctgtccctgtttctagggaacaacacaattcgattcaccgtatggcttcatggtgtattagataaacttcgctctgttacaactgaaccctctagtctgaagtcttctgataccaacatctttgatagtaacgtgccttcaaacaagagcaatttcagtcggggagatgagaggaggcatgaagctgcagtgccaccacttgccattcctagcgcgagacctgaaaaaagagattccagagtttctacaagttcgcaggagtcaaaaaccacaaatgtcagacagacttacgatgatggagctgcaacccgactaatgtcaacagtgaaacctttgagggagccagcaccctctgaagatgtgattgatattaagccagaaccagatgatctcattgacgaagacctcaactttgtgcaggagaatcccttatctcagaaaaaacctacagtgacacttacatatggttcttctcgcccttctattgaaatttatcgaccacctgcaagtagaaatgcagatagtggtgttcatttaaacaggttgcaatttcaacagcagcagaatagtattcatgctgccaagcagcttgatatgcagagtagttgggtatatgaaacaggacgtttgtgtgaaccagaggtgcttaacagcttagaagaaacgtatagtccgttctttagaaacaactcggagaaaatgagtatggaggatgaaaactttcggaagagaaagttgcctgtggtaagttcagttgttaaagtaaaaaaattcaatcatgatggagaagaggaggaagaagatgatgattacgggtctcgaacaggaagcatctccagcagtgtgtctgtgcctgcaaagcctgaaaggagaccttctcttccaccttctaaacaagctaacaagaatctgattttgaaggctatatctgaagctcaagaatccgtaacaaaaacaactaactactctacagttccacagaaacagacacttccagttgctcccagaactcgaacttctcaagaagaattgctagcagaagtggtccagggacaaagtaggacccccagaataagtccccccattaaagaagaggaaacaaaaggagattctgtagaaaaaaatcaaggaactcaacagaggcaattattatcccgactgcaaatcgacccagtaatggcagaaactctgcagatgagtcaagctgagatgagtgaactgagtgtggcacagaaaccagaaaaacttttggagcgctgcaagtactggcctgcttgtaaaaatggggatgagtgtgcctaccatcaccccatctcaccctgcaaagccttccccaattgtaaatttgctgaaaaatgtttgtttgttcacccaaattgtaaatatgatgcaaagtgtactaaaccagattgtcccttcactcatgtgagtagaagaattccagtactgtctccaaaaccagcagttgcaccaccagcaccaccttccagtagtcagctctgccgttacttccctgcttgtaagaagatggaatgtcccttctatcatccaaaacattgtaggtttaacactcaatgtacaagaccggactgcacattctaccatcccaccattaatgtcccaccacgacatgccttgaaatggattcgacctcaaaccagcgaatagcacccagtcctgcctggcagaagatcatgcagtttggaagttttcatgtactgatgaaagatactctacagaacttgtcaaatctttgaaacttggaatatattgctttcataatatgaagttttattgcctatctatctgaagtgtctaatttttcaagtttgtaagtttattatgtggttttaacattgggtgtttttgttttgtttttactatgaaaagacagcttaaggaagagctaaattctgttaaaatatttggggcatgtttgtgcactgctgttgtgaggatcagcatatgaaattgacatcatggttagtcatggtactgcagcttagggggctacacggttgctgtgtgagtggagagatgcagtgaggcagttgtcattattctaaaaattgtactactttcacttttcccaaagattatataatgttcataatccaccatgaaaacagcattggccaaaggtactgaggctgcttaaaatattcaattctgctttttaatttttaagtgaatttagtttgaaaagcatgattatacaggcctctcaggctgagtgctactttggtaaagttcccagttttcctgccttctgtgacaggatgaatgaggtgggtatggacagtggaggcagctggaatggcaagtgcagaaaataggaacagttctatacagtgctctcatttactaataacataatgccttctaaataatttttttgggaaactacattatcacaaaattatacaaatttttttacaagtatttacatactgtatctgaaaacagactttaaagtcacaagattataaatgtacatatatattctcacattctgaaaaataacattctcagaatccacagaaaatatacttagttactactgaagataatttttgaaatgtaaaaattagatttaaatagtatattttaaatgacagaactataattacagagatcagatcagataggtaaactgcaagatagataggatgaaacttttggcctactgtattacttacagagtttttttgtgtgtggtttttaaaactgttaaggcaagaagtgtcaaatgctttagagttaaataacagatcactgatttcaaagacttggtgtatagtgttaaaaattaaagcttaaaaggtggttagaaaagtggattaatgcaaaaggggtaataaagactgcaacattctcaggaccaaattaaactgctaaaaaaaaaaaaaaagttcattgacttgcttagtcgtatactcaaatgatgataaacctacatgtgcaaaggctcacgtttaagattgtcaagccagcagtctactgttgtgttgccattgcttttccattgggagaagaaagaattaaccagtcattaaaccatttggtaagttgcactttgctgtgctgatcccacaggaaaggcttgaaacacgagaagcagcaaagacagagcacacaagtgcataaggctgttgtcttcggcttgggtgaaatgacagttcctcttcattctaaaggtttactccattgaatttaaggcatttgttcattccagtgttgagatgctttgcatctctgcagaagaaatttattttaaattgtttaaatatctggaaatacttttagctatcatttataaagatagttttgttctcagtttcactataaattatagaacaaatgggaaacaagggtttaatttagttcagccattttacaaggaaataataaaatactaaaatctg

SEQ ID NO: 281603 - protein, 585 aa, Artificial Sequence
  derived and/or modified sequence
MEIGTEISRKIRSAIKGKLQELGAYVDEELPDYIMVMVANKKSQDQMTEDLSLFLGNNTIRFTVWLHGVLDKLRSVTTEPSSLKSSDTNIFDSNVPPLAIPSARPEKRDSRVSTSSQESKTTNVRQTYDDGAATRLMSTVKPLREPAPSEDVIDIKPEPDDLIDEDLNFVQENPLSQKKPTVTLTYGSSRPSIEIYRPPASRNADSGVHLNRLQFQQQQNSIHAAKQLDMQSSWVYETGRLCEPEVLNSLEETYSPFFRNNSEKMSMEDENFRKRKLPVVSSVVKVKKFNHDGEEEEEDDDYGSRTGSISSSVSVPAKPERRPSLPPSKQANKNLILKAISEAQESVTKTTNYSTVPQKQTLPVAPRTRTSQEELLAEVVQGQSRTPRISPPIKEEETKGDSVEKNQGTQQRQLLSRLQIDPVMAETLQMSQAEMSELSVAQKPEKLLERCKYWPACKNGDECAYHHPISPCKAFPNCKFAEKCLFVHPNCKYDAKCTKPDCPFTHVSRRIPVLSPKPVAPPAPPSSSQLCRYFPACKKMECPFYHPKHCRFNTQCTRPDCTFYHPTINVPPRHALKWIRPQTSE

SEQ ID NO: 281604 - protein, 94 aa, Artificial Sequence
  derived and/or modified sequence
MVMVANKKSQDQMTEDLSLFLGNNTIRFTVWLHGVLDKLRSVTTEPSSLKSSDTNIFDSNVPSNKSNFSRGDERRHEAAVPPLAIPSARPEKRD

SEQ ID NO: 281605 - protein, 215 aa, Artificial Sequence
  derived and/or modified sequence
MVMVANKKSQDQMTEDLSLFLGNNTIRFTVWLHGVLDKLRSVTTEPSSLKSSDTNIFDSNVPSNKSNFSRGDERRHEAAVPPLAIPSARPEKRDSRVSTSSQESKTTNVRQTYDDGAATRLMSTVKPLREPAPSEDVIDIKPEPDDLIDEDLNFVQENPLSQKKPTVTLTYGSSRPSIEIYRPPASRNADSGVHLNRLQFQQQQNSIHAAKQLDM

SEQ ID NO: 281606 - DNA, 1758 bp, Artificial Sequence
  derived and/or modified sequence
atggagatcggcaccgagatcagcagaaagatcagaagcgccatcaagggcaagctgcaggagctgggcgcctacgtggacgaggagctgcccgactacatcatggtgatggtggccaacaagaagagccaggaccagatgaccgaggacctgagcctgttcctgggcaacaacaccatcagattcaccgtgtggctgcacggcgtgctggacaagctgagaagcgtgaccaccgagcccagcagcctgaagagcagcgacaccaacatcttcgacagcaacgtgccccccctggccatccccagcgccagacccgagaagagagacagcagagtgagcaccagcagccaggagagcaagaccaccaacgtgagacagacctacgacgacggcgccgccaccagactgatgagcaccgtgaagcccctgagagagcccgcccccagcgaggacgtgatcgacatcaagcccgagcccgacgacctgatcgacgaggacctgaacttcgtgcaggagaaccccctgagccagaagaagcccaccgtgaccctgacctacggcagcagcagacccagcatcgagatctacagaccccccgccagcagaaacgccgacagcggcgtgcacctgaacagactgcagttccagcagcagcagaacagcatccacgccgccaagcagctggacatgcagagcagctgggtgtacgagaccggcagactgtgcgagcccgaggtgctgaacagcctggaggagacctacagccccttcttcagaaacaacagcgagaagatgagcatggaggacgagaacttcagaaagagaaagctgcccgtggtgagcagcgtggtgaaggtgaagaagttcaaccacgacggcgaggaggaggaggaggacgacgactacggcagcagaaccggcagcatcagcagcagcgtgagcgtgcccgccaagcccgagagaagacccagcctgccccccagcaagcaggccaacaagaacctgatcctgaaggccatcagcgaggcccaggagagcgtgaccaagaccaccaactacagcaccgtgccccagaagcagaccctgcccgtggcccccagaaccagaaccagccaggaggagctgctggccgaggtggtgcagggccagagcagaacccccagaatcagcccccccatcaaggaggaggagaccaagggcgacagcgtggagaagaaccagggcacccagcagagacagctgctgagcagactgcagatcgaccccgtgatggccgagaccctgcagatgagccaggccgagatgagcgagctgagcgtggcccagaagcccgagaagctgctggagagatgcaagtactggcccgcctgcaagaacggcgacgagtgcgcctaccaccaccccatcagcccctgcaaggccttccccaactgcaagttcgccgagaagtgcctgttcgtgcaccccaactgcaagtacgacgccaagtgcaccaagcccgactgccccttcacccacgtgagcagaagaatccccgtgctgagccccaagcccgtggccccccccgccccccccagcagcagccagctgtgcagatacttccccgcctgcaagaagatggagtgccccttctaccaccccaagcactgcagattcaacacccagtgcaccagacccgactgcaccttctaccaccccaccatcaacgtgccccccagacacgccctgaagtggatcagaccccagaccagcgagtag

SEQ ID NO: 281607 - DNA, 1758 bp, Artificial Sequence
  derived and/or modified sequence
atggagatcgggactgagatcagccgcaaaattcgaagtgccataaaagggaagcttcaggagctaggcgcttacgtggacgaagagttgcctgactatattatggttatggtggccaacaaaaaaagtcaagatcagatgactgaagatctgtccctgttcctcggcaacaataccatacggttcaccgtctggttgcacggtgtgctcgataagttacggtccgtcacgacagagccctcctccttaaaatcttctgacacaaacatcttcgactccaatgttccgcccctggctatcccgtctgcccgacctgaaaagagagacagtcgcgtgtccacatcttcacaagagtcgaaaactaccaatgttcggcagacctatgatgatggtgccgctaccaggcttatgtcaaccgtgaagcctctgcgggagcccgctccctcagaagacgtgatagacatcaaacctgaacccgacgatctcatcgacgaagaccttaacttcgtacaggagaacccactttctcaaaaaaaacctactgtcaccctgacttacggttcttcccggccttctatcgaaatttaccgaccacccgcctcaaggaatgcagatagtggcgtacatctcaacaggctccagttccaacagcagcaaaattcaattcacgcggctaagcagctcgatatgcagtcatcctgggtttatgagacaggacgcctgtgcgaacctgaagttctcaatagtctggaagagacctattctcccttcttccgcaacaactcagagaaaatgtctatggaggacgagaactttaggaaaagaaagttaccggtagtgagttccgtcgtcaaggttaagaagttcaaccacgatggcgaggaagaggaggaagacgacgactacggttcccgtacaggctctatcagcagctccgtatcggtgcccgccaagcctgaaaggcggccgtccctgccaccctccaagcaggcaaacaaaaatcttatcttaaaggcgatctctgaggctcaggagtcagtgacaaagactaccaactatagcacagtgccccagaaacaaacccttcccgtggctcctcgaacccgaacaagccaggaagaactcctggcagaagtcgtgcagggccagtcgaggacacccagaatcagtcctcctatcaaagaagaggagaccaaaggcgattcagttgagaaaaaccagggtacacagcaacggcaactgctgtccagactccagatcgatcctgtcatggccgaaaccctgcagatgagccaggctgagatgtcagagctgtcagtggcacagaagcctgagaaactcctggagagatgcaagtactggccagcttgtaagaatggggatgagtgcgcataccatcatccaatctccccatgtaaggctttccccaattgtaagttcgccgagaagtgcctgtttgtgcatcctaattgtaaatacgacgcaaaatgcactaaaccggactgcccttttacccacgtgtcccgcagaattcccgtgcttagcccaaaacctgtggccccacctgccccgccttcctcatcccagctgtgtcgctatttccccgcgtgcaaaaaaatggaatgcccattctatcaccccaaacactgtcggttcaatacccagtgtactagacccgactgcacattctaccaccctaccattaatgtacccccccgacacgccctgaagtggatacgcccacagaccagcgagtag

SEQ ID NO: 281608 - DNA, 1758 bp, Artificial Sequence
  derived and/or modified sequence
atggagattggaacagagatcagcaggaagatccgcagcgccatcaagggcaagctgcaggagctgggcgcctacgtggatgaggagctgcctgactacatcatggtgatggtggccaacaagaagagccaggaccagatgacagaggacctgagcctcttcctgggcaacaacaccatccgcttcaccgtgtggctgcatggagtgctggacaagctgcggtctgtgaccacagagcccagcagcctgaagagcagtgacaccaacatctttgacagcaatgtgccccccctggccatccccagcgcccggcctgagaagagggacagccgggtgtccaccagcagccaggagagcaagaccaccaacgtgcggcagacctatgatgatggagctgccacccggctgatgagcacagtgaagcccctgcgggagcccgcccccagtgaagatgtgattgacatcaagccagagccagatgacctgattgatgaggacctgaactttgtgcaggagaaccccctgagccagaagaagcccaccgtgaccctgacctacggcagcagccggcccagcattgagatctaccggcccccagccagcagaaatgctgacagcggcgtgcacctgaaccggctgcagttccagcagcagcagaacagcatccacgccgccaagcagctggacatgcagagctcctgggtgtatgagaccggccgcctgtgtgagcctgaggtgctgaacagcctggaggagacctacagccccttcttcaggaacaacagcgagaagatgtccatggaggatgagaacttcaggaagaggaagctgcctgtggtgtcctctgtggtgaaggtgaagaagttcaaccatgatggagaggaggaggaggaggatgatgattatggcagcaggacaggcagcatcagcagctctgtgtctgtgcctgccaagccagagcggcggcccagcctgccccccagcaagcaggccaacaagaacctgatcctgaaggccatcagcgaggcccaggagagcgtgaccaagaccaccaactacagcacagtgccccagaagcagaccctgcctgtggcccccaggaccaggaccagccaggaggagctgctggccgaggtggtgcagggccagagcaggaccccccgcatcagcccccccatcaaggaggaggagaccaagggggacagcgtggagaagaaccagggcacccagcagaggcagctgctgagccggctgcagattgatcctgtgatggccgagaccctgcagatgagccaggccgagatgtctgagctgtctgtggcccagaagccagagaagctgctggagcgctgcaagtactggccagcctgcaagaatggagatgaatgtgcctaccaccaccccatcagcccctgcaaggccttccccaactgcaagtttgctgagaagtgcctgtttgtgcaccccaactgcaagtatgatgccaagtgcaccaagccagactgccccttcacccacgtgtcccggcgcatccctgtgctgagccccaagcctgtggcccccccagccccacccagcagcagccagctgtgccgctacttccctgcctgcaagaagatggagtgccccttctaccaccccaagcactgccgcttcaacacccagtgcaccaggccagactgcaccttctaccaccccaccatcaacgtgcccccaagacatgccctgaagtggatccggccccagaccagcgagtag

SEQ ID NO: 281609 - DNA, 1758 bp, Artificial Sequence
  derived and/or modified sequence
atggagatcggcaccgagatcagccggaagatccggagcgccatcaagggaaagttgcaggagttgggtgcttacgtggacgaggaattacctgactatattatggtgatggtcgctaacaaaaaaagccaggaccagatgaccgaggacttgagcctcttcttaggcaacaacaccatcagatttacagtctggcttcacggagtgctcgataagttgcggtctgttacaacagagcctagcagtctgaagtcctctgatactaatatattcgacagcaatgtccctccactggccatccctagtgccaggccggagaaaagagactcacgtgtgagcacttctagtcaggagtccaagacgacaaacgttcgccagacttacgacgatggggccgctacccgcctaatgtcgacggttaagcccctcagagaacctgctccttcggaggatgttatcgacataaagcccgaacctgacgacctaatagacgaggatctgaactttgtacaggagaatccgctcagccaaaagaagcctaccgttacactgacttacggttcttcacgtccgagcatagaaatctataggcctcctgcctcacgaaacgcagacagcggcgtgcatcttaatcgactccagttccagcagcaacagaatagcatacacgcggcgaaacagctggacatgcagtccagctgggtgtatgaaaccgggcgcctctgcgagcctgaagttctgaatagtctagaagagacctactcgccattcttcagaaacaattctgagaagatgtcaatggaggatgaaaattttagaaaaagaaaattaccagttgtgagtagcgtggtgaaagtcaaaaagttcaatcacgacggtgaagaggaggaagaagatgatgattatggcagcaggaccggtagtataagttcgtctgtgagcgtgccagccaagcccgaaagacgcccaagcttgcctccctccaagcaggctaataaaaacctgatcctgaaagcgatcagcgaggcccaagaatcagtgaccaagacgactaactattctacggtaccacagaagcagacgctgcccgttgccccccgcacccgcacttcccaagaagagcttctcgccgaagtagtccagggtcaatctcgtacaccaagaatatctccacctatcaaagaagaggaaaccaagggcgactctgtggaaaaaaatcagggcacccaacagcgccagctgctcagccggttgcagatagatccagtcatggctgaaacactccaaatgtcgcaggccgagatgtccgaactgtccgtagcccaaaagccagagaaactgctggaacgttgcaagtattggcccgcgtgtaagaatggcgatgagtgcgcataccaccatcctatttccccatgtaaggcatttccgaattgcaaatttgccgagaaatgcctctttgtccaccccaattgcaaatatgatgcgaagtgtacgaaaccggattgtccttttacacacgtctctaggaggattcccgtcctctctcctaaacccgtcgcgccgcctgcccctcctagctcatcacagctttgtaggtatttccccgcttgcaaaaaaatggaatgtcccttttaccaccctaagcactgccgatttaacacacagtgcacaagacctgactgtaccttctatcacccgactataaacgtgccacctagacacgccttgaagtggattagaccccagactagcgagtag

SEQ ID NO: 281610 - DNA, 1758 bp, Artificial Sequence
  derived and/or modified sequence
atggagattgggacagagatttccagaaagattaggagcgccattaaggggaagctgcaggagttaggggcttacgtcgacgaagagttgccggactacattatggtgatggttgctaacaagaagagccaggatcagatgactgaggatctcagcttatttctgggcaacaacaccatacgcttcaccgtttggttacacggtgtgctagataagctccgaagcgtaaccactgaacccagttcactgaaatctagtgacaccaatattttcgactcgaacgtgccccctcttgcaattccgtcggccaggccggaaaagcgcgattcaagggtctccacctcctcacaggagtctaaaacaactaatgtgaggcaaacctatgacgacggcgcagccaccagactaatgagtactgttaaaccattgagggagccggcaccatctgaggacgtcatcgacattaagcccgagccggatgatctgatagatgaagacctcaattttgttcaggaaaatcccctgagtcagaaaaaaccaacggtaacccttacgtatgggtcttctcgcccatccattgaaatttaccgcccaccagcaagccgtaatgctgactctggcgtccacctgaaccgtctgcaattccagcaacagcaaaacagcatccacgcagcaaaacagctcgatatgcagagctcctgggtttatgaaactggaaggctgtgtgaacctgaggtgcttaattccttagaggagacatatagccctttttttaggaacaactctgagaagatgagcatggaagacgagaacttccggaagaggaagctgcccgtggtgagcagcgtggtgaaagtgaaaaaattcaatcatgatggcgaggaggaagaggaagacgacgattatggttcacgtacaggatcaatttcctctagtgtgagcgtgccagctaaacctgagcgacggccttcccttcctccttccaaacaagcgaataaaaatctgatcctgaaagccattagcgaagctcaggagtcagttaccaagaccacaaactacagcacagtacctcaaaagcaaactctgccggtcgctccacgaactaggacaagccaagaggaattactcgcggaagttgtccagggacagagcagaactccacgcatctcgcctcctattaaggaggaggaaacaaaaggagactccgtggagaagaatcagggcacacagcagcggcaactgctcagccgtctgcagatcgacccagtgatggccgaaaccctgcagatgtctcaggccgaaatgtctgaactgtctgtggctcagaaacctgaaaaactgctggaacggtgcaagtactggcctgcttgtaaaaacggtgacgagtgtgcataccatcacccaatttccccatgcaaagcctttcctaactgtaagttcgcggaaaagtgtttgttcgtgcacccgaattgcaagtatgacgcaaaatgtaccaagcccgactgtccttttactcacgtgagtcgcaggatcccagtgctgagccctaaacctgtagcccctcctgccccaccgtccagctctcagctctgcaggtactttcccgcatgcaaaaaaatggagtgtccattttatcaccctaagcattgtaggtttaacactcagtgtacacgccctgactgtaccttctaccatccgacaattaatgtcccccctagacacgccttgaagtggatacgcccacagacaagcgagtag

SEQ ID NO: 281611 - DNA, 1899 bp, Artificial Sequence
  derived and/or modified sequence
gtgtgcgcggccgggggcggaacggaggaggaggcggtggtgtcccggctgcggggtaggagtccgcggcagcctccgggtaagccaagcgccgcgcagtgctgagttcccgcacgccgcagagccatggagatcggcaccgagatcagccgcaagatccggagtgccattaaggggaaattacaagaattaggagcttatgttgatgaagaacttcctgattacattatggtgatggtggccaacaagaaaagtcaggaccaaatgacagaggatctgtccctgtttctagggaacaacacaattcgattcaccgtatggcttcatggtgtattagataaacttcgctctgttacaactgaaccctctagtctgaagtcttctgataccaacatctttgatagtaacgtgccaccacttgccattcctagcgcgagacctgaaaaaagagattccagagtttctacaagttcgcaggagtcaaaaaccacaaatgtcagacagacttacgatgatggagctgcaacccgactaatgtcaacagtgaaacctttgagggagccagcaccctctgaagatgtgattgatattaagccagaaccagatgatctcattgacgaagacctcaactttgtgcaggagaatcccttatctcagaaaaaacctacagtgacacttacatatggttcttctcgcccttctattgaaatttatcgaccacctgcaagtagaaatgcagatagtggtgttcatttaaacaggttgcaatttcaacagcagcagaatagtattcatgctgccaagcagcttgatatgcagagtagttgggtatatgaaacaggacgtttgtgtgaaccagaggtgcttaacagcttagaagaaacgtatagtccgttctttagaaacaactcggagaaaatgagtatggaggatgaaaactttcggaagagaaagttgcctgtggtaagttcagttgttaaagtaaaaaaattcaatcatgatggagaagaggaggaagaagatgatgattacgggtctcgaacaggaagcatctccagcagtgtgtctgtgcctgcaaagcctgaaaggagaccttctcttccaccttctaaacaagctaacaagaatctgattttgaaggctatatctgaagctcaagaatccgtaacaaaaacaactaactactctacagttccacagaaacagacacttccagttgctcccagaactcgaacttctcaagaagaattgctagcagaagtggtccagggacaaagtaggacccccagaataagtccccccattaaagaagaggaaacaaaaggagattctgtagaaaaaaatcaaggaactcaacagaggcaattattatcccgactgcaaatcgacccagtaatggcagaaactctgcagatgagtcaagctgagatgagtgaactgagtgtggcacagaaaccagaaaaacttttggagcgctgcaagtactggcctgcttgtaaaaatggggatgagtgtgcctaccatcaccccatctcaccctgcaaagccttccccaattgtaaatttgctgaaaaatgtttgtttgttcacccaaattgtaaatatgatgcaaagtgtactaaaccagattgtcccttcactcatgtgagtagaagaattccagtactgtctccaaaaccagttgcaccaccagcaccaccttccagtagtcagctctgccgttacttccctgcttgtaagaagatggaatgtcccttctatcatccaaaacattgtaggtttaacactcaatgtacaagaccggactgcacattctaccatcccaccattaatgtcccaccacgacatgccttgaaatggattcgacctcaaaccagcgaatagcacccagtcctgcct

SEQ ID NO: 281612 - protein, 441 aa, Artificial Sequence
  derived and/or modified sequence
MVPALRYLVGACGRARGLFAGGSPGACGFASGRPRPLCGGSRSASTSSFDIVIVGGGIVGLASARALILRHPSLSIGVLEKEKDLAVHQTGHNSGVIHSGIYYKPESLKAKLCVQGAALLYEYCQQKGISYKQCGKLIVAVEQEEIPRLQALYEKGLQNGVPGLRLIQQEDIKKKEPYCRGLMAIDCPHTGIVDYRQVALSFAQDFQEAGGSVLTNFEVKGIEMAKESPSRSIDGMQYPIVIKNTKGEEIRCQYVVTCAGLYSDRISELSGCTPDPRIVPFRGDYLLLKPEKCYLVKGNIYPVPDSRFPFLGVHFTPRMDGSIWLGPNAVLAFKREGYRPFDFSATDVMDIIINSGLIKLASQNFSYGVTEMYKACFLGATVKYLQKFIPEITISDILRQVAVRGPSWLWQQPMKVSDNNIYCFLWRCFALLLTGSACSFK

SEQ ID NO: 281613 - protein, 463 aa, Artificial Sequence
  derived and/or modified sequence
MVPALRYLVGACGRARGLFAGGSPGACGFASGRPRPLCGGSRSASTSSFDIVIVGGGIVGLASARALILRHPSLSIGVLEKEKDLAVHQTGHNSGVIHSGIYYKPESLKAKLCVQGAALLYEYCQQKGISYKQCGKLIVAVEQEEIPRLQALYEKGLQNGVPGLRLIQQEDIKKKEPYCRGLMAIDCPHTGIVDYRQVALSFAQDFQEAGGSVLTNFEVKGIEMAKESPSRSIDGMQYPIVIKNTKGEEIRCQYVVTCAGLYSDRISELSGCTPDPRIVPFRGDYLLLKPEKCYLVKGNIYPVPDSRFPFLGVHFTPRMDGSIWLGPNAVLAFKREGYRPFDFSATDVMDIIINSGLIKLASQNFSYGVTEMYKACFLGATVKYLQKFIPEITISDILRGPAGVRAQALDRDGNLVEDFVFDAGVGDIGNRILHVRNAPSPAATSSIAISGMIADEVQQRFEL

SEQ ID NO: 281614 - DNA, 1326 bp, Artificial Sequence
  derived and/or modified sequence
atggttccagcccttagatatcttgtgggggcatgtgggcgggccagaggcctgttcgctggcgggagccctggagcctgcggattcgccagcggtcggccccggcccctgtgcgggggatcccgaagcgcctctacaagcagctttgatattgtgattgtgggaggagggatcgtaggactggcttccgctcgcgccctaattctgagacaccccagcttatctatcggggttctggagaaggaaaaagacctggccgtacaccagacgggccataactcaggcgtgatccactccggcatatactataagcctgagagtctgaaagctaagctgtgcgtgcagggggctgcacttctgtacgaatattgccagcagaaggggatctcttacaagcagtgtggaaagctgattgtggccgtggaacaggaggagattcctagattgcaggccctgtatgagaaggggctccaaaacggagtgcccggcttacggctgatacaacaggaagatatcaagaagaaggagccatattgtaggggcctgatggccattgactgcccacacaccggcatcgtcgattatcgccaggttgcactctccttcgcccaagattttcaggaagcaggcgggagcgtgttaaccaactttgaggttaagggaattgagatggccaaagaaagcccatctcgctctatcgatggcatgcaatatcccatcgtgatcaaaaataccaaaggagaggagattaggtgccagtacgtcgtgacatgtgctggcctgtactctgatagaatcagcgagctgtccgggtgcactcctgatccccggatagtacctttccggggtgactatctgctactgaaacccgaaaaatgctacttagttaaggggaatatatatccagtgcccgattcccgatttccattcctcggcgtgcacttcactcctcggatggatgggtctatctggttgggaccaaacgcagtgctggcctttaagagggaaggttatagaccttttgactttagcgccacagacgtcatggacattattattaactcaggactgatcaagctggcatcgcagaacttttcatatggagtaaccgaaatgtacaaagcgtgtttcctcggcgccactgtaaaatacctgcagaagtttattcccgagataactatctctgacatcttgcgccaggtcgccgtgcgcggccctagctggctgtggcagcagccaatgaaagtgtcggacaataatatatactgtttcctgtggcgctgcttcgctttactgctcacaggaagcgcctgttccttcaaatag

SEQ ID NO: 281615 - DNA, 1392 bp, Artificial Sequence
  derived and/or modified sequence
atggtgccggcccttagatacttagtgggcgcctgtggccgggcaagaggcctgttcgccggcggcagtccaggagcctgtgggtttgcgtccggcaggccccgccccctgtgtgggggctctagatcagctagtacgagttcttttgacatagtgattgttggcggtggaatagtcgggttggcatcagcccgggctctcatcctgcgacacccgagtctaagcatcggggtactcgaaaaagaaaaggatctcgcagttcaccagaccggtcataactctggcgtaatccactcaggcatatattataagcctgaatccctcaaagccaaactgtgcgtgcagggcgccgcactcctctatgaatattgtcaacagaaggggatttcctacaagcagtgcggtaaattaatagtcgccgttgagcaagaagaaatcccacgcttgcaggctctctatgagaaggggcttcagaacggggtgccaggactcagactgattcagcaggaagatatcaagaagaaggaaccgtactgccggggccttatggccattgactgccctcatacaggcattgtggactacaggcaggttgccctatctttcgctcaggactttcaggaggctggtggatcggtgctgaccaatttcgaggtaaagggtattgaaatggccaaggaaagcccatctcggtccattgacgggatgcagtaccccatcgtgattaagaacactaaaggagaagagattagatgtcagtacgtcgtgacatgtgcagggctgtattctgatcggattagcgaattgtcaggctgcaccccagacccccggattgtccccttccggggagactacctgctgctgaaacctgagaaatgctatttggtgaagggtaacatttaccccgtgccagactcccggtttccattcctgggagttcactttactccaagaatggacggctccatctggctggggcctaacgccgtgctggcatttaagcgtgaaggttacaggccctttgactttagcgcaaccgatgtcatggacataatcatcaattccgggctgatcaagttagcttcccagaacttctcctatggtgttactgagatgtataaggcatgcttccttggggcgacagtaaagtacctgcagaagtttattcccgagattactattagcgatatcctgcggggacctgctggagtgcgagctcaggccctcgaccgagatggcaatctagtagaagatttcgtttttgatgccggagtgggcgacatcgggaatagaatccttcacgttagaaatgcaccgtctccagcagctaccagctctatcgctattagcggcatgattgcggatgaggtccagcaaagattcgaattatag

SEQ ID NO: 281616 - DNA, 1392 bp, Artificial Sequence
  derived and/or modified sequence
atggttcccgctctgcgttacctagtgggggcttgcggccgagcccgcggtcttttcgccgggggttctccgggagcttgcggttttgcctcaggccgcccccgcccactgtgcggcgggtctcgtagtgcatccactagcagtttcgacatagtgatcgtggggggagggatagtgggtctggcctccgccagagccctaattctgcggcacccgtccctcagtataggagtcttagaaaaggaaaaagacttagctgttcaccagactgggcacaactcaggagtgatccattcaggaatctactataaacccgagtcactgaaagccaaactttgcgtacagggagccgcccttctctatgagtattgccagcagaaaggcatttcttacaaacagtgtgggaaactaatcgtcgccgtcgagcaggaagaaatccctcgtctgcaagctctatacgaaaaaggcctgcagaatggggttccagggctccgactgatccagcaggaggacatcaagaagaaggagccatattgccgcggcctcatggcaattgactgcccacacaccggcatcgtggattaccgtcaggtggccctctccttcgcccaggatttccaggaggcgggggggtcggtccttacaaactttgaggtgaagggcatagagatggccaaggagagcccctctaggtcaatagatggaatgcagtaccccattgttattaaaaataccaagggcgaggagatcaggtgtcaatacgtcgtaacatgtgcaggcttatattccgaccgtattagtgaactgtctggctgtaccccagaccccagaattgtgccatttcgaggagactacttactgctcaagcctgagaaatgctatctcgttaagggaaacatatatcccgtgccagacagccgattcccatttcttggggtgcactttacgcctaggatggacggctcaatatggttgggaccgaacgctgtcctggcgttcaaacgcgagggctatcgcccatttgatttcagcgcgactgatgtgatggatataataatcaactccggcttaatcaagctggctagccaaaactttagctacggagtgaccgaaatgtacaaagcctgctttctcggcgccacagttaagtatctgcaaaagttcatcccagagatcacaatttctgacattctccgaggaccagcgggggtccgagctcaagcactggatagagacggaaatctcgtcgaagattttgtcttcgatgccggtgtcggggatattggtaaccgtatcctgcatgttaggaacgcaccgtcccctgctgcaactagctcgatcgcgatttccggcatgattgctgatgaggttcaacagaggttcgagttgtag

SEQ ID NO: 281617 - DNA, 1377 bp, Artificial Sequence
  derived and/or modified sequence
ggggagcgtgcgtaggggatggtgccagcgctgcgttatttggttggtgcctgcggacgggcccgcgggcttttcgccggtggctcccctggggcgtgcgggttcgcgtctgggaggccaagaccgctgtgtggaggtagccgcagcgccagcaccagctcatttgatatagtcatcgttggtggcggaattgtggggcttgcctctgccagagcactcatcctgcgacatccatcactttctattggtgttctggaaaaggagaaagatttagctgttcaccagactggacataacagtggtgtcatacatagtggaatttattataaacctgagtctctgaaagccaaattatgtgtacaaggtgcagccctcctctatgagtactgtcagcaaaagggaatttcctacaagcagtgtggcaagcttatagtagctgttgaacaagaagaaattcccagacttcaggccctatatgagaaaggcctccagaatggtgtcccgggcctgaggctgatccagcaggaggatataaaaaagaaggagccatattgtaggggtctaatggctattgattgtccacatactggcattgtggactatcggcaggtggctttgtcatttgcccaggatttccaagaagcaggtggctctgtcttgaccaattttgaagtaaaaggtattgaaatggctaaagaaagtccttcaagaagtatagatggaatgcaatatccaattgttataaagaatacaaagggagaggaaattcgatgtcagtatgttgtgacatgtgcaggactttactcagaccgtatttcagagttgagtggctgcactcctgatcctcgaattgtaccattccggggagattacctgcttttgaagccagaaaaatgttatcttgtaaaaggaaatatttatccggtcccagatagccggtttcctttcctaggagttcacttcacaccaaggatggatggcagtatttggctagggcctaatgcagttcttgcctttaaacgagagggttacagaccctttgacttcagtgccacagatgttatggatataattatcaatagtggcttgattaaactggcatcccagaatttttcctatggagttactgaaatgtataaagcatgttttcttggtgcaacagtgaagtatcttcaaaaattcatccctgaaattactatcagtgatatacttaggcaggtggctgtgagaggaccgagctggctatggcagcaacccatgaaagtgagtgataacaacatttattgtttcctgtggcgttgctttgctttgctattgactggtagcgcttgtagctttaaataaattgaggaagtatgagagagtaaatggaagaaa

SEQ ID NO: 281618 - DNA, 3446 bp, Artificial Sequence
  derived and/or modified sequence
agtttctcccacggccccatgtccgcatggcggtgaaggtcgaagacgcgcgacccaaagggccaggttttcagtcagcccagcgttggcgacgggcgagggcagaacacaaccaccaccctagtcccgcccggctcggggcctagcttctctactcacagcgtcggagggagggagggagggagcgagccagcgtccccgcgtctgcggcaccctggccggcccttcgccctccgacgcgcgcgcctattggccaccgcagcctctcccacatggggcgaaggcgcgccacttcattggcccccgcgtgaggggcggggctaaagagcgcgggtcctcggccgtggagggtcaagtggcttcttctgagcgctgagggaggggagcgtgcgtaggggatggtgccagcgctgcgttatttggttggtgcctgcggacgggcccgcgggcttttcgccggtggctcccctggggcgtgcgggttcgcgtctgggaggccaagaccgctgtgtggaggtagccgcagcgccagcaccagctcatttgatatagtcatcgttggtggcggaattgtggggcttgcctctgccagagcactcatcctgcgacatccatcactttctattggtgttctggaaaaggagaaagatttagctgttcaccagactggacataacagtggtgtcatacatagtggaatttattataaacctgagtctctgaaagccaaattatgtgtacaaggtgcagccctcctctatgagtactgtcagcaaaagggaatttcctacaagcagtgtggcaagcttatagtagctgttgaacaagaagaaattcccagacttcaggccctatatgagaaaggcctccagaatggtgtcccgggcctgaggctgatccagcaggaggatataaaaaagaaggagccatattgtaggggtctaatggctattgattgtccacatactggcattgtggactatcggcaggtggctttgtcatttgcccaggatttccaagaagcaggtggctctgtcttgaccaattttgaagtaaaaggtattgaaatggctaaagaaagtccttcaagaagtatagatggaatgcaatatccaattgttataaagaatacaaagggagaggaaattcgatgtcagtatgttgtgacatgtgcaggactttactcagaccgtatttcagagttgagtggctgcactcctgatcctcgaattgtaccattccggggagattacctgcttttgaagccagaaaaatgttatcttgtaaaaggaaatatttatccggtcccagatagccggtttcctttcctaggagttcacttcacaccaaggatggatggcagtatttggctagggcctaatgcagttcttgcctttaaacgagagggttacagaccctttgacttcagtgccacagatgttatggatataattatcaatagtggcttgattaaactggcatcccagaatttttcctatggagttactgaaatgtataaagcatgttttcttggtgcaacagtgaagtatcttcaaaaattcatccctgaaattactatcagtgatatacttaggggcccagctggagtaagagcccaggccctggatagagatggaaatctggtagaagattttgtatttgatgcaggagttggggatattggaaatcgcattcttcatgtgagaaatgcaccttctcctgctgctacttcttccattgcaatttctggaatgattgcagatgaagtacaacaaagatttgaattataaataatgaaaggagctaggtatgcactgtaatcttcatgtcagcaacaagaatgtactaattgcattctttaatttaaaaaatggtttttaaactttagtttttaggtcaaagataaccactgcattgttaaaatgatgtaacatagaaataataattttctacaaaaattagccaggcatggtggcgcatgcctgtaatctcagctactcaggaggctgaggcaggagaatcaattgaaccgagcagacggaggtgagctgagagctgagattgcaccactgcactccagcctgggtgacagagcaagaaaataataataataataattttcaaaatgttaggctgggggccgtggccagcactttgggaagccaaggcaggtagattgtagcccaggagtttgagaacagcctgggcaacatggcaaaaccctgtttctacacaaagttagctgggtctggtgcctctgtagttccagctcctcagtaggctgaggtgagaggatcacttgagcccaggaggtctaggctgcagtgagcttatgttcatgacactgcattccaggctggatgatagagcaagatcttgtctcaaaaaaaaaaaaaaaaaaaaaaaaaatccagcctgggcaacatagtgaatgaaaccccatctctacaaaaaatacaaaaattagctgggcatgatggtgtgtgcctgtagtcccagctacttgggggctgaggcaggaggatcgcttgagcccgggagatcaaggctacagtgagctgtgttcatgccactataccccagcctgggcaacaaagtgagtccctgactcaaaaaataaaaacaacaacaaaaaataaattccatgcttatttactttgcgaataaagaggcaaggtacagttttatctgtccgaatccctgacttttatttattttttttttcagacggagtttcactcttgttgcccaggcttgagtgcaatggtacgatcttggctcactgcaacctctgcctcccgggttccagcgattctcttgcctcaacctcctgagtagctgggattacaggcgcccaccaccatgcctggctaattttttgtatttttagtagagacggggttttgccatgttggccaggctggtctcgaattcctgacctcaggtgatccacctgcctcagcctcccaaaatgctgggattacaggtgcgagccatcatgctcagccctgaatccctgactttgttaatgacctgtccttaccaaccatgacctagagaagatttggctttttaagagttttggagaaagatggcataaaaatagattatttccttaaatcaattttttagcattacgctacctaagctcgtttggtctctcatagacaagaaaatacattatattgtaggttacattcttttaattttgaagagtcacaaaactcacattatttagagcaacaatatttgtatttggaaattaaaaattcatgatttcaagaaaatacataaaatttacatttttgagtagtttgaataagtttctatcttaattataatatttgtaggaaataacaaaacaaactcaaagcctttattatttccagtctctttgtaactgatgtggtatggtatcatcatgaaatctaaacagtggtacactg

SEQ ID NO: 281619 - DNA, 1958 bp, Artificial Sequence
  derived and/or modified sequence
gctaaagagcgcgggtcctcggccgtggagggtcaagtggcttcttctgagcgctgagggaggggagcgtgcgtaggggatggtgccagcgctgcgttatttggttggtgcctgcggacgggcccgcgggcttttcgccggtggctcccctggggcgtgcgggttcgcgtctgggaggccaagaccgctgtgtggaggtagccgcagcgccagcaccagctcatttgatatagtcatcgttggtggcggaattgtggggcttgcctctgccagagcactcatcctgcgacatccatcactttctattggtgttctggaaaaggagaaagatttagctgttcaccagactggacataacagtggtgtcatacatagtggaatttattataaacctgagtctctgaaagccaaattatgtgtacaaggtgcagccctcctctatgagtactgtcagcaaaagggaatttcctacaagcagtgtggcaagcttatagtagctgttgaacaagaagaaattcccagacttcaggccctatatgagaaaggcctccagaatggtgtcccgggcctgaggctgatccagcaggaggatataaaaaagaaggagccatattgtaggggtctaatggctattgattgtccacatactggcattgtggactatcggcaggtggctttgtcatttgcccaggatttccaagaagcaggtggctctgtcttgaccaattttgaagtaaaaggtattgaaatggctaaagaaagtccttcaagaagtatagatggaatgcaatatccaattgttataaagaatacaaagggagaggaaattcgatgtcagtatgttgtgacatgtgcaggactttactcagaccgtatttcagagttgagtggctgcactcctgatcctcgaattgtaccattccggggagattacctgcttttgaagccagaaaaatgttatcttgtaaaaggaaatatttatccggtcccagatagccggtttcctttcctaggagttcacttcacaccaaggatggatggcagtatttggctagggcctaatgcagttcttgcctttaaacgagagggttacagaccctttgacttcagtgccacagatgttatggatataattatcaatagtggcttgattaaactggcatcccagaatttttcctatggagttactgaaatgtataaagcatgttttcttggtgcaacagtgaagtatcttcaaaaattcatccctgaaattactatcagtgatatacttaggggcccagctggagtaagagcccaggccctggatagagatggaaatctggtagaagattttgtatttgatgcaggagttggggatattggaaatcgcattcttcatgtgagaaatgcaccttctcctgctgctacttcttccattgcaatttctggaatgattgcagatgaagtacaacaaagatttgaattataaataatgaaaggagctagacggagtttcactcttgttgcccaggcttgagtgcaatggtacgatcttggctcactgcaacctctgcctcccgggttccagcgattctcttgcctcaacctcctgagtagctgggattacaggcgcccaccaccatgcctggctaattttttgtatttttagtagagacggggttttgccatgttggccaggctggtctcgaattcctgacctcaggtgatccacctgcctcagcctcccaaaatgctgggattacaggtgcgagccatcatgctcagccctgaatccctgactttgttaatgacctgtccttaccaaccatgacctagagaagatttggctttttaagagttttggagaaagatggcataaaaatagattatttccttaaatcaattttttagcattacgctacctaagctcgtttggtctctcatagacaagaaaatacattatattgtaggttaca

SEQ ID NO: 281620 - DNA, 1326 bp, Artificial Sequence
  derived and/or modified sequence
atggtgcctgccctgcgctacctggtgggcgcctgtggccgggcccggggcctgtttgctgggggcagccctggggcctgtggctttgccagcggccggccccggcccctgtgtggcggcagccgcagcgccagcaccagcagctttgatattgtgattgtgggcggcggcatcgtgggcctggccagcgcccgggccctgatcctgcggcaccccagcctgagcattggagtgctggagaaggagaaggacctggccgtgcaccagacaggccacaacagcggggtcatccacagcggcatctactacaagccagagagcctgaaggccaagctgtgtgtgcagggcgccgccctgctgtatgagtactgccagcagaagggcatctcctacaagcagtgtgggaagctgattgtggccgtggagcaggaggagatcccccggctgcaggccctgtatgagaagggcctgcagaatggagtgcccggcctgcggctcatccagcaggaggacatcaagaagaaggagccctactgccggggcctgatggccatcgactgcccccacacaggcatcgtggactaccggcaggtggccctgagctttgcccaggacttccaggaggccggcggctctgtgctgaccaactttgaggtgaagggcatcgagatggccaaggagagccccagccgcagcattgatggcatgcagtaccccatcgtcatcaagaacaccaagggggaggagatccgctgccagtatgtggtgacctgtgccggcctgtacagcgaccgcatcagcgagctgagcggctgcaccccagacccccgcatcgtgcccttccggggggactacctgctgctgaagccagagaagtgctacctggtgaagggcaacatctaccctgtgcctgacagccgcttccccttcctgggcgtgcacttcacccccaggatggatggcagcatctggctgggccccaatgctgtgctggccttcaagcgggagggctaccggccctttgacttcagcgccacagatgtgatggacatcatcatcaacagcggcctcatcaagctggccagccagaacttctcctatggagtgacagagatgtacaaggcctgcttcctgggcgccaccgtgaagtacctgcagaagttcatccctgagatcaccatcagtgacatcctgcggcaggtggccgtgcggggccccagctggctgtggcagcagcccatgaaggtgtctgacaacaacatctactgcttcctgtggcgctgctttgccctgctgctgaccggcagcgcctgcagcttcaagtag

SEQ ID NO: 281621 - DNA, 1392 bp, Artificial Sequence
  derived and/or modified sequence
atggtgcctgccctgcgctacctggtgggcgcctgtggccgggcccggggcctgtttgctgggggcagccctggggcctgtggctttgccagcggccggccccggcccctgtgtggcggcagccgcagcgccagcaccagcagctttgatattgtgattgtgggcggcggcatcgtgggcctggccagcgcccgggccctgatcctgcggcaccccagcctgagcattggagtgctggagaaggagaaggacctggccgtgcaccagacaggccacaacagcggggtcatccacagcggcatctactacaagccagagagcctgaaggccaagctgtgtgtgcagggcgccgccctgctgtatgagtactgccagcagaagggcatctcctacaagcagtgtgggaagctgattgtggccgtggagcaggaggagatcccccggctgcaggccctgtatgagaagggcctgcagaatggagtgcccggcctgcggctcatccagcaggaggacatcaagaagaaggagccctactgccggggcctgatggccatcgactgcccccacacaggcatcgtggactaccggcaggtggccctgagctttgcccaggacttccaggaggccggcggctctgtgctgaccaactttgaggtgaagggcatcgagatggccaaggagagccccagccgcagcattgatggcatgcagtaccccatcgtcatcaagaacaccaagggggaggagatccgctgccagtatgtggtgacctgtgccggcctgtacagcgaccgcatcagcgagctgagcggctgcaccccagacccccgcatcgtgcccttccggggggactacctgctgctgaagccagagaagtgctacctggtgaagggcaacatctaccctgtgcctgacagccgcttccccttcctgggcgtgcacttcacccccaggatggatggcagcatctggctgggccccaatgctgtgctggccttcaagcgggagggctaccggccctttgacttcagcgccacagatgtgatggacatcatcatcaacagcggcctcatcaagctggccagccagaacttctcctatggagtgacagagatgtacaaggcctgcttcctgggcgccaccgtgaagtacctgcagaagttcatccctgagatcaccatcagtgacatcctgcggggccctgctggggtgcgggcccaggccctggacagagatggcaacctggtggaggactttgtgtttgatgctggggtgggggacatcggcaaccgcatcctgcacgtgagaaatgcccccagccctgctgccaccagcagcatcgccatcagcggcatgattgctgatgaggtgcagcagagatttgagctgtag

SEQ ID NO: 281622 - DNA, 1326 bp, Artificial Sequence
  derived and/or modified sequence
atggtgcccgccctgcggtacctggtgggcgcctgcggccgggcccgtggcctgtttgcaggtgggagtcccggagcctgcggcttcgctagcggacgccccaggcctctgtgtggtgggtctcgatcggcctcaacttcgtccttcgatatagttattgtaggaggtggcatcgtggggcttgcctcagcacgtgccctgatactgcgtcaccccagtctctcaatcggggtgcttgagaaggaaaaagacctcgctgttcaccaaacgggccataacagcggcgtaattcactctgggatatactataaacccgaatccttaaaggcaaaactgtgtgtccagggtgccgccctgctgtacgagtactgtcagcaaaagggcatctcttataaacagtgcgggaaactgatcgtcgctgtggagcaagaagaaattcccaggttgcaagccctgtacgaaaagggactccaaaatggcgttcctgggctgcgtctgattcagcaggaagacatcaagaaaaaagaaccatattgcagaggtctcatggcaattgattgtcctcataccggcatcgtggattacagacaggtggccctgagttttgctcaggattttcaggaagctggcggaagcgtgctaactaactttgaagttaagggaattgaaatggccaaagaaagccctagtagatcaatcgacggtatgcagtatccaatcgttataaagaacactaaaggcgaagaaattcgatgtcagtatgtcgtcacgtgcgccggactctactcggaccgtatttccgagctctctggctgtactcctgatccaagaatagtgccattcagaggcgattatctgcttcttaagccggagaagtgttacctagtcaaaggtaacatttaccccgtccccgattctaggttccccttcttgggggtacactttacaccccgcatggatggctccatttggttggggccaaacgccgttttagctttcaaaagggagggatatcggccgttcgacttctcagcaactgacgtgatggatattattatcaattctggattaattaagctcgcctcgcagaattttagctatggagttaccgagatgtacaaagcatgctttttgggggcgaccgtcaagtatctgcagaagtttattcctgaaatcacgatttctgacattcttcgccaggtcgctgtgcggggtccctcatggctgtggcagcaacctatgaaggtctccgataataatatatattgcttcctctggcgttgttttgccttgcttctaaccggctccgcctgttcttttaagtag

SEQ ID NO: 281623 - DNA, 1392 bp, Artificial Sequence
  derived and/or modified sequence
atggtgcccgccctgcggtacctggtgggcgcctgcggccgggcccggggtctgtttgcaggcggttcaccaggcgcttgtggattcgcatccggacgtccgcgtcccctgtgcggaggatcgcgttctgctagtacaagttcctttgacattgtcattgtcgggggcggcattgtgggacttgcatcagctcgtgccttaatcctgcggcacccctctctctctatcggtgtactggagaaggaaaaggacttggccgtgcatcagaccggtcacaattccggcgttattcactctggtatctactataagcccgagagcctgaaggccaagttatgcgtgcagggtgccgctctgttgtacgaatactgccagcagaaagggatttcgtacaaacagtgtggcaaactgatagtggccgtcgaacaggaagagatccccagactccaagccttatatgagaaaggcttacagaacggcgtccctgggctcaggttaattcaacaggaggacattaagaagaaagaaccgtattgccgtggacttatggccatcgactgcccccacacaggcatagtcgactaccggcaagtggctctttcctttgctcaggatttccaagaggccggcggctcagtcctaactaacttcgaggtgaaaggcatcgagatggctaaagaaagcccgtctaggtccatcgacggcatgcagtatcccatcgtgataaaaaacacaaaaggtgaagaaatcaggtgtcagtacgtggtcacttgcgcagggctgtactcggatagaattagcgagctgtccggctgtacaccagatccccggatagtgcctttcaggggcgactacctgctcctcaagcccgaaaagtgttacctcgtgaaagggaacatttaccccgtccctgatagccgatttcctttcctgggtgtccacttcacgccccgaatggatggctcaatctggctgggccctaacgctgtcctggcttttaaacgtgaagggtaccggcctttcgacttttcggctacagacgtaatggatatcatcatcaattcgggcctgatcaagctcgcaagtcaaaactttagctacggtgtgacagagatgtacaaggcttgttttctgggcgccacagtgaagtacctgcagaaatttattcctgaaattaccatatcagatatcttgagaggacctgcgggggtcagggcccaggcactggatagggacggaaatctggtggaggactttgtttttgatgccggtgttggtgatattggtaataggattctccacgtcaggaacgcaccttctcctgccgcgacatcctccatcgcgatcagtgggatgattgccgacgaagtgcagcagcgtttcgaattgtag

SEQ ID NO: 281624 - DNA, 1392 bp, Artificial Sequence
  derived and/or modified sequence
atggtgcccgccctgcggtacctggtgggcgcctgcggccgggccagaggcctgtttgccggtggctcccctggcgcctgcggatttgccagcggtcggccacgaccactatgtgggggctctaggagtgcctccacctcctctttcgatattgtaatagttgggggtggtatcgttgggttagccagtgcgcgcgcactgatcttgcggcacccctccctgagcatcggggtgctcgagaaggaaaaagaccttgccgttcaccagactggccataactccggggtaattcactccgggatctactacaaacctgaatctctcaaagccaaactttgtgtgcagggcgcggccttgctttatgagtactgccaacagaaagggatcagctataaacagtgcggtaagctcatcgtggctgtggagcaagaagagatacctcgattgcaagccctctatgagaaaggcctgcagaacggagtgccaggattgcgcttgattcagcaggaggatatcaaaaaaaaggagccttactgtagaggactcatggctattgactgtccacacaccggtatcgtcgattatcgccaagtagccctgtcatttgcccaggacttccaggaagcaggagggtctgtgcttaccaatttcgaagtgaagggaattgaaatggccaaggaaagcccctctaggtccatcgacggaatgcagtaccctattgtcatcaagaatacaaagggtgaagagattcggtgtcagtacgtggtgacctgcgccggtctctacagcgacaggatctcagaactgtctggttgtacgcccgatccgcgaattgtgccattccgaggggactacctgctcctcaaacccgagaagtgttatttggtcaagggtaacatctaccccgtcccagattctaggtttccgttcttgggcgtgcacttcacccctcgaatggacggctcaatctggcttgggccgaacgctgtgcttgctttcaagcgggagggctatagacccttcgacttttccgccaccgatgtcatggatattatcatcaactctggcctcatcaaactggcttctcagaactttagttacggtgtaaccgagatgtacaaagcttgtttcctaggagccaccgttaaatacttacaaaaattcataccagagataactatcagcgacatcctcaggggccctgctggtgtcagagctcaagcgctggatcgggacggtaaccttgtggaagactttgtgtttgacgcaggcgttggagacatagggaatcggattctgcacgttcgcaacgcaccgtcccctgccgccacgagttctatcgccatctcaggcatgattgctgacgaagtacaacagcggtttgagctgtag

SEQ ID NO: 281625 - DNA, 1326 bp, Artificial Sequence
  derived and/or modified sequence
atggtgcctgctttaaggtaccttgtgggggcatgcgggcgagcaaggggtctgtttgcaggtgggagtcctggagcatgtggctttgccagtggacgccctcgcccactgtgtgggggatcgcggagcgcttctacaagttcttttgatatagttatcgtaggaggtggcatcgtaggcctcgcctctgccagggctttgatcctccggcacccctcgctctctatcggggtgctcgagaaagagaaagacctggcagtgcaccagacgggccataacagcggagttattcacagcggtatttattataagcctgagagcttaaaggctaagctgtgcgtccagggagcagcattactgtacgaatactgtcagcagaaaggaatctcttataaacaatgcggcaagctgattgttgcagtggagcaggaggagattcctcgactgcaggccctgtatgagaagggcttgcagaatggtgtccccggactacgactgattcaacaggaggatatcaaaaagaaagagccatactgccggggacttatggcgatcgattgcccgcatacgggaatcgttgactataggcaggtagcattgagcttcgcacaggatttccaggaggctggcggaagcgtgctaacgaacttcgaagtcaagggaatcgagatggccaaggagtcaccttctaggtcaattgacggaatgcagtacccaattgtgatcaagaacaccaaaggggaggagattcggtgtcagtatgtcgtcacctgtgccggactgtattcagacaggatctcagagctttccggctgcacacctgatccacgcattgtgcccttcaggggcgactacttactattgaagcccgagaagtgctatctagtgaaaggcaacatttaccctgtgccagactcccggttccctttcctaggggtccactttacccctcgaatggatgggtctatctggctcgggcctaacgcggtgctagcattcaaaagagagggatatcgacccttcgatttttcagccactgatgtcatggacatcatcataaattcgggcttgattaaactggcgtctcagaatttctcctatggggttactgaaatgtacaaggcttgcttcttgggtgccactgtgaagtatctccagaaattcatccccgaaatcaccatcagtgatatactccgacaggtggccgtgaggggccctagttggctgtggcagcagcccatgaaagttagcgacaataatatatattgctttctgtggagatgcttcgcactgctgctaaccggatcagcttgcagctttaagtag

SEQ ID NO: 281626 - DNA, 1392 bp, Artificial Sequence
  derived and/or modified sequence
atggttcctgcactgaggtacctagtgggtgcctgcgggagggctcgaggtctttttgcaggaggaagtcctggagcttgcggattcgcaagtggacggcctcgcccactgtgcggcggttccaggtcagcctcgacctctagcttcgacatcgtgattgtcgggggtggaatcgtcggactagcttctgcaagggctctgatcctgcggcacccaagcctaagcatcggtgtcctagagaaagagaaggatctggctgttcatcagaccgggcacaactctggtgtgatccactctggtatttattacaaaccagaaagcctgaaagccaaactctgcgtgcaaggggctgcgctcttatacgagtactgtcagcaaaagggcataagctacaagcagtgcggcaagctgatcgtggctgttgaacaagaggagattccaagactacaagccctatatgagaagggcctccaaaatggggtgcccggattgaggctgatacagcaggaggatattaaaaagaaggagccctattgccggggacttatggctatcgactgtccccatactggcattgtggattaccggcaggtggccctgtcttttgcccaagattttcaggaggccggtgggagcgtgctgactaatttcgaggtcaagggcattgaaatggccaaagaaagccccagcaggtcaattgacggtatgcagtacccaatcgtaattaaaaatacgaaaggagaggaaattagatgtcagtacgttgtgacatgtgctggtctttacagcgaccgaatatctgaattgtccgggtgcacaccggacccacgcattgtgccattcaggggagactatctacttctaaagccagaaaagtgttacctcgttaaagggaatatctatccagtccctgattctcgttttccctttctgggcgtgcacttcacacccagaatggatgggtcgatttggctaggtcctaacgccgtgctggcatttaagcgcgaaggttacaggcccttcgatttcagtgccacagacgtgatggacatcataattaattccggcttaattaagctggccagtcaaaattttagctatggggtgaccgaaatgtataaggcctgtttcctcggagcaacagtgaagtatctccagaagttcatcccagagataactatcagtgatatactgagagggccagcaggagtcagagctcaggcgctggaccgcgacggcaatttagtggaagatttcgttttcgacgcaggcgttggagacatcgggaacagaatcctccacgtgaggaacgcaccttcccctgccgctacttccagcatcgcgatttctggtatgatcgctgatgaggtgcagcaacgcttcgaactgtag

SEQ ID NO: 281627 - DNA, 1392 bp, Artificial Sequence
  derived and/or modified sequence
atggtgcccgcactccgataccttgtaggggcatgtggccgagcacgcggactatttgcagggggttctcccggagcttgtggatttgccagtggaaggcctcggccactctgcggcggatcacgctcagcgtcgacgtcaagtttcgatattgtcatcgtgggtggcggaattgtgggcctggcaagcgcaagggcactcatcctgcggcacccctctctttcaataggcgtactcgagaaagaaaaagatctcgccgtacaccagacaggacacaattcaggagtcattcatagcggaatctactataagcccgagtccctgaaagcaaagctgtgtgtccagggagccgcactgttatacgagtactgtcagcagaaggggatctcatacaaacagtgtgggaaacttattgtggccgtggagcaggaggagattcctagattgcaggcactgtacgagaagggccttcaaaatggcgtcccagggctgcggcttattcagcaggaagatattaagaagaaggagccttattgtaggggcctgatggccattgactgcccccacacgggtattgtagattatagacaggtggccttatcctttgcccaggacttccaagaagccggaggaagcgttctgactaattttgaagttaaaggaatcgaaatggctaaggagtcgccatctcgttcaatagatgggatgcagtaccccattgtgatcaaaaatactaaaggagaagagatccgctgccagtacgtcgtcacctgcgccggtctttacagtgaccgcatcagcgaattaagcggctgtaccccagacccacggattgtaccattcaggggagactacctgttgttaaaaccggaaaagtgttatctcgtgaagggcaacatctatccagttcccgactcccggttcccctttttgggtgtacacttcacaccgaggatggacggcagtatctggctggggcctaacgctgtgttagctttcaagagagaaggatatcgtcctttcgatttcagtgctacggatgtgatggatattattatcaattcaggcttgattaaactggcaagtcaaaacttcagttatggtgtgaccgaaatgtacaaggcttgcttcctgggggctaccgttaagtaccttcagaagttcattccagagatcactatctccgacattctgcggggaccagccggagtgagagcccaggccttggaccgggacggtaacctggtggaggatttcgtgttcgacgccggagtgggcgacatcgggaaccggatcttgcacgtgcgcaacgcaccaagcccagcagctactagcagcatcgcgattagcgggatgatagccgacgaagtgcagcagcggtttgaattatag

SEQ ID NO: 281628 - DNA, 1326 bp, Artificial Sequence
  derived and/or modified sequence
atggtgcccgccctgagatacctggtgggcgcctgcggcagagccagaggcctgttcgccggcggcagccccggcgcctgcggcttcgccagcggcagacccagacccctgtgcggcggcagcagaagcgccagcaccagcagcttcgacatcgtgatcgtgggcggcggcatcgtgggcctggccagcgccagagccctgatcctgagacaccccagcctgagcatcggcgtgctggagaaggagaaggacctggccgtgcaccagaccggccacaacagcggcgtgatccacagcggcatctactacaagcccgagagcctgaaggccaagctgtgcgtgcagggcgccgccctgctgtacgagtactgccagcagaagggcatcagctacaagcagtgcggcaagctgatcgtggccgtggagcaggaggagatccccagactgcaggccctgtacgagaagggcctgcagaacggcgtgcccggcctgagactgatccagcaggaggacatcaagaagaaggagccctactgcagaggcctgatggccatcgactgcccccacaccggcatcgtggactacagacaggtggccctgagcttcgcccaggacttccaggaggccggcggcagcgtgctgaccaacttcgaggtgaagggcatcgagatggccaaggagagccccagcagaagcatcgacggcatgcagtaccccatcgtgatcaagaacaccaagggcgaggagatcagatgccagtacgtggtgacctgcgccggcctgtacagcgacagaatcagcgagctgagcggctgcacccccgaccccagaatcgtgcccttcagaggcgactacctgctgctgaagcccgagaagtgctacctggtgaagggcaacatctaccccgtgcccgacagcagattccccttcctgggcgtgcacttcacccccagaatggacggcagcatctggctgggccccaacgccgtgctggccttcaagagagagggctacagacccttcgacttcagcgccaccgacgtgatggacatcatcatcaacagcggcctgatcaagctggccagccagaacttcagctacggcgtgaccgagatgtacaaggcctgcttcctgggcgccaccgtgaagtacctgcagaagttcatccccgagatcaccatcagcgacatcctgagacaggtggccgtgagaggccccagctggctgtggcagcagcccatgaaggtgagcgacaacaacatctactgcttcctgtggagatgcttcgccctgctgctgaccggcagcgcctgcagcttcaagtag

SEQ ID NO: 281629 - DNA, 1392 bp, Artificial Sequence
  derived and/or modified sequence
atggtgcccgccctgagatacctggtgggcgcctgcggcagagccagaggcctgttcgccggcggcagccccggcgcctgcggcttcgccagcggcagacccagacccctgtgcggcggcagcagaagcgccagcaccagcagcttcgacatcgtgatcgtgggcggcggcatcgtgggcctggccagcgccagagccctgatcctgagacaccccagcctgagcatcggcgtgctggagaaggagaaggacctggccgtgcaccagaccggccacaacagcggcgtgatccacagcggcatctactacaagcccgagagcctgaaggccaagctgtgcgtgcagggcgccgccctgctgtacgagtactgccagcagaagggcatcagctacaagcagtgcggcaagctgatcgtggccgtggagcaggaggagatccccagactgcaggccctgtacgagaagggcctgcagaacggcgtgcccggcctgagactgatccagcaggaggacatcaagaagaaggagccctactgcagaggcctgatggccatcgactgcccccacaccggcatcgtggactacagacaggtggccctgagcttcgcccaggacttccaggaggccggcggcagcgtgctgaccaacttcgaggtgaagggcatcgagatggccaaggagagccccagcagaagcatcgacggcatgcagtaccccatcgtgatcaagaacaccaagggcgaggagatcagatgccagtacgtggtgacctgcgccggcctgtacagcgacagaatcagcgagctgagcggctgcacccccgaccccagaatcgtgcccttcagaggcgactacctgctgctgaagcccgagaagtgctacctggtgaagggcaacatctaccccgtgcccgacagcagattccccttcctgggcgtgcacttcacccccagaatggacggcagcatctggctgggccccaacgccgtgctggccttcaagagagagggctacagacccttcgacttcagcgccaccgacgtgatggacatcatcatcaacagcggcctgatcaagctggccagccagaacttcagctacggcgtgaccgagatgtacaaggcctgcttcctgggcgccaccgtgaagtacctgcagaagttcatccccgagatcaccatcagcgacatcctgagaggccccgccggcgtgagagcccaggccctggacagagacggcaacctggtggaggacttcgtgttcgacgccggcgtgggcgacatcggcaacagaatcctgcacgtgagaaacgcccccagccccgccgccaccagcagcatcgccatcagcggcatgatcgccgacgaggtgcagcagagattcgagctgtag

SEQ ID NO: 281630 - protein, 149 aa, Artificial Sequence
  derived and/or modified sequence
MGRPLLLPLLLLLQPPAFLQPGLCEPALSELDRGSGERLPQDLKPAEGGPVCVFLPSRAGHPEIREAAVAVHQGDQTHHHPGCHNHHHLEAQQHNHHSRPQGHRKQRALRIMAPKSGHCHQGCIGCRCAQNCHFGTAVPPPPVVEEKER

SEQ ID NO: 281631 - DNA, 2331 bp, Artificial Sequence
  derived and/or modified sequence
atggtccagctgcaccaagacacagacccccaaatccccaaaggacagccctgtacactgaacagcagtgaggggggagctaggcctgcagtcccgcacaccctgttctcctctgccctcgacaggtggctccataatgacagctttatcatggcagtgggagagcctctagtgcatatccgtgtgaccctcctgctgttgtggttcgggatgtttctgtctattagcggccatagtcaagcaagaccttctcagtattttacaagcccggaggtggttatccctctcaaggtaatcagccgggggagaggggcaaaagcccccggctggctatcctacagcctgcgattcgggggccagagatacatcgttcatatgcgagttaataaattgttatttgccgcccacctacccgtgtttacgtacacagagcagcacgccctgctgcaggatcagccatttattcaggatgattgctactaccacggctacgtggagggagttccagagtccctggttgcactgtcaacttgctcaggcggctttctgggcatgctgcagataaatgacctggtatatgaaatcaaacccataagcgtatcagctacttttgagcatcttgtgtacaagatcgattccgatgatactcaatttcccccaatgcggtgtggtcttacagaggaaaagattgcccaccagatggagctgcaattaagctataacttcacgcttaagcagtcgtcctttgtgggttggtggacgcaccagcgatttgtagagcttgtggtggtggttgacaatattcgctacctgtttagtcagagcaacgctactactgtccagcatgaagtgttcaacgtagtcaacatagtcgattccttttaccaccccctggaggttgatgttattctgactgggattgatatttggacagccagcaatcctctaccaactagcggcgacctggataatgtgcttgaggatttctccatttggaagaattataatttaaataatcggctacaacacgacgtagcgcatcttttcataaaggacacccagggaatgaaactaggagttgcgtatgtcaaagggatctgtcagaaccccttcaacacaggggtagatgtttttgaggacaacaggctagtagtcttcgccatcacactggggcacgaactagggcataatctcgggatgcagcacgatacgcagtggtgtgtctgcgagctgcaatggtgtatcatgcacgcatatcgaaaagttacgacgaaattctctaattgttcctatgcccaatactgggatagtacgatatcctcaggactatgcatacagccacccccttatccaggcaatatcttccggctcaagtattgcgggaacttggtggtggaagaaggggaggaatgcgactgcggcacgattagacagtgcgcaaaggacccctgttgtctcttgaattgtaccctacaccccggggccgcgtgcgctttcgggatatgctgcaaagattgtaaattcctcccaagtggcactttatgtcgacaacaggtcggcgaatgcgatctcccggaatggtgcaatggtacttcccatcagtgtcctgacgatgtgtatgtccaagacgggatttcctgcaacgttaacgctttttgctatgagaaaacctgcaacaatcacgacatccagtgcaaagagatatttggccaggatgctcggtcggcctcccagagttgctatcaggaaatcaacactcaggggaacagatttgggcactgcggcatcgtggggactacctacgtcaaatgctggacgcccgacattatgtgcgggcgagtgcaatgcgaaaacgtgggcgtaattccaaatcttatagagcactccaccgtgcagcagtttcacctgaatgatacaacttgctgggggactgattaccacttgggcatggcaattcctgacatcggagaggtgaaagacggtacagtgtgcggccctgagaagatttgcattcggaaaaagtgtgcaagtatggtgcacttgtcacaggcctgtcaacctaagacttgtaatatgaggggcatctgcaacaacaaacaacactgccattgcaatcatgaatgggcaccaccgtactgtaaggataaagggtacggcggaagcgccgacagtgggccgccaccaaagaataacatggaaggacttaatgtgatggggaaactcagatacttatccctcctctgcctgctaccacttgttgcctttctcttattttgtttacatgtactgttcaagaagcggactaagtctaaggaggatgaagaaggatag

SEQ ID NO: 281632 - DNA, 2331 bp, Artificial Sequence
  derived and/or modified sequence
atggtgcagctgcaccaggacacagacccccagatccccaagggccagccctgcaccctgaacagcagcgagggcggggcccggcctgctgtgccccacaccctcttcagcagcgccctggaccgctggctgcacaatgacagcttcatcatggctgtgggggagcccctggtgcacatccgggtgaccctgctgctgctgtggtttggcatgttcctgagcatcagcggccacagccaggcccggcccagccagtacttcaccagccctgaggtggtgatccccctgaaggtgatcagccggggccgcggggccaaggcccctggctggctgagctacagcctgcgctttggaggccagcgctacatcgtgcacatgagggtgaacaagctgctgtttgctgcccacctgcccgtcttcacctacacagagcagcacgccctgctgcaggaccagcccttcatccaggatgactgctactaccacggctacgtggagggcgtgcctgagagcctggtggccctgagcacctgcagcggcggcttcctgggcatgctgcagatcaatgacctggtgtatgagatcaagcccatctctgtgtctgccacctttgagcacctggtgtacaagattgacagtgatgacacccagtttcctcccatgagatgtggcctgacagaggagaagatcgcccaccagatggagctgcagctgagctacaacttcaccctgaagcagagcagctttgtgggctggtggacccaccagagatttgtggagctggtggtggtggtggacaacatccgctacctgttcagccagagcaatgccaccaccgtgcagcacgaggtgttcaacgtggtgaacatcgtggacagcttctaccaccccctggaggtggatgtgatcctgactggaattgacatctggacagccagcaaccccctgcccaccagcggggacctggacaacgtgctggaggacttcagcatctggaagaactacaacctgaacaaccggctgcagcatgatgtggcccacctgttcatcaaggacacccagggcatgaagctgggcgtggcctacgtgaagggcatctgccagaaccccttcaacacaggagtggatgtgtttgaggacaaccggctggtggtgtttgccatcaccctgggccacgagctgggccacaacctgggcatgcagcacgacacccagtggtgtgtgtgtgagctgcagtggtgcatcatgcacgcctacaggaaggtgaccaccaagttcagcaactgcagctatgcccagtactgggacagcaccatcagcagcggcctgtgcatccagcccccaccctacccaggcaacatcttccggctgaagtactgcggcaacctggtggtggaggagggggaggagtgtgactgtggcaccatccggcagtgtgccaaggacccctgctgcctgctgaactgcaccctgcaccctggagctgcctgtgccttcggcatctgctgcaaggactgcaagttcctgcccagcggcaccctgtgccggcagcaggtgggagaatgtgacctgcctgagtggtgcaatggcaccagccaccagtgcccagatgatgtgtatgtgcaggacggcatcagctgcaatgtgaatgccttctgctatgagaagacctgcaacaaccacgacatccagtgcaaggagatcttcggccaggatgcccggagcgccagccagagctgctaccaggagatcaacacccagggcaacagatttggccactgcggcatcgtgggcaccacctacgtgaagtgctggaccccagacatcatgtgtggccgggtgcagtgtgaaaatgtgggcgtcatccccaacctgattgagcacagcacagtgcagcagttccacctgaatgacaccacctgctggggcacagactaccacctgggcatggccatcccagacattggagaggtgaaggatggcaccgtgtgtggccctgagaagatctgcatcaggaagaagtgtgcctccatggtgcacctgagccaggcctgccagcccaagacctgcaacatgaggggcatctgcaacaacaagcagcactgccactgcaaccacgagtgggccccaccctactgcaaggacaagggctacggcggcagcgctgacagcggccccccacccaagaacaacatggagggcctgaatgtgatgggcaagctgcgctacctgagcctgctgtgcctgctgcccctggtggccttcctgctcttctgcctgcacgtgctcttcaagaagaggaccaagagcaaggaggatgaggagggctag

SEQ ID NO: 281633 - DNA, 2331 bp, Artificial Sequence
  derived and/or modified sequence
atggtgcagctgcaccaggacaccgacccccagatccccaagggccagccatgtaccttaaatagttcagaaggaggggccaggcccgccgtccctcacaccctcttctcaagtgccttagaccgctggctgcataatgacagcttcattatggccgttggagagcccctggtgcacatcagagtaactttactgttattgtggttcgggatgtttctgtctataagtggacactcccaggctagacccagccagtactttacaagtcccgaggtggtgatccctctgaaagtcatcagtcgcggacgcggagccaaggcacccggatggttaagttatagcctcagatttggggggcagagatacatcgtccacatgcgagtgaataagcttctgtttgctgcacatcttcccgtctttacttacaccgagcaacacgctctcttacaggaccagccattcatccaagatgattgctactaccatgggtacgtagaaggcgtgcccgaaagcctggtggcattatcaacatgttcgggtgggttcctgggcatgctccagattaacgatctggtatatgagataaaacctataagcgttagcgcaaccttcgagcacctggtgtacaagatcgactccgacgatactcaattcccgcccatgaggtgcggccttaccgaagaaaagatcgcccatcagatggagttgcagctatcctataatttcaccttgaagcagtcatcctttgtgggttggtggacacatcagcggtttgtggagcttgtcgtcgtagttgataacatcaggtacctgttcagccagtcaaacgccaccacagttcagcacgaggttttcaacgtggtcaatattgttgattcattttatcatcccctcgaagtggacgtgatcttgactggaattgacatctggaccgcatctaatccccttccaacatccggcgatcttgacaacgtgctggaggatttcagtatctggaaaaattacaacctcaataacagactgcagcacgatgtggctcacctattcattaaggatactcaaggaatgaaactgggcgttgcctatgttaagggcatttgccagaatcctttcaacactggcgtggatgtgtttgaggataatcgtctcgtagtgtttgctataacactcgggcacgaattgggccataatttaggtatgcagcacgatacacagtggtgcgtttgtgagctgcagtggtgtatcatgcatgcatatagaaaggtgacaacaaaattcagtaactgctcttatgcccagtattgggattccacgatatcaagtggtttatgtatacaaccacccccctatcccggaaacatattccggcttaaatactgtggcaacctggtcgtcgaagagggcgaagaatgcgactgcggcactattaggcaatgtgcaaaagacccctgttgtctcctcaattgtaccctgcatcccggagctgcgtgcgcctttggcatttgttgtaaggattgcaagttcctgccgtccgggactctctgtcgacagcaagtcggcgagtgcgaccttccagagtggtgtaatggcacctctcaccagtgtcccgatgacgtttacgttcaggatggtatctcatgtaatgtgaacgccttttgctatgaaaaaacatgtaataatcacgacattcagtgtaaggagatatttggtcaggatgccagaagcgcctcccagagctgttatcaggagatcaacactcaaggcaatcgcttcggccattgcggcatcgtcggcacaacatatgtgaaatgctggactccagacattatgtgcggcagagtgcaatgtgagaatgtgggcgtgatccctaacctgattgagcattccacagtgcagcagtttcatttaaacgacaccacctgttggggtaccgattatcatctgggcatggctattccggatatcggcgaggtaaaagacggaaccgtttgcggcccagaaaaaatctgcatcaggaagaaatgcgccagcatggtccatctgtctcaggcatgtcaacccaaaacatgcaacatgcgagggatatgcaacaataaacagcactgccattgcaatcacgagtgggctcctccttactgtaaagacaaaggctacggaggttctgccgacagcggtccaccccccaagaacaatatggagggacttaacgtgatggggaagctccgctatctatccctactgtgcctgctgccactcgttgcatttcttttgttctgcctgcacgtgttgttcaagaagcgcacgaagtcaaaagaggacgaagaagggtag

SEQ ID NO: 281634 - DNA, 2331 bp, Artificial Sequence
  derived and/or modified sequence
atggtgcaactccaccaagacactgatccacagatccctaaaggacagccctgtaccctgaattccagtgagggaggggctcggcctgccgtacctcacactctcttttcatcagcacttgataggtggttgcataatgacagttttatcatggccgtcggggaaccactagtgcatatcagggttaccctgctgcttttgtggtttggcatgttcctttcaataagcggacatagccaggccagaccgagccagtatttcacctcccccgaggtcgtgataccactgaaggttatatcccgaggcagaggggcaaaggcccctggttggcttagctattctctgcgatttggaggccagcgctacatagtgcacatgcgcgtgaataaattgctcttcgcggcacatctgccagtcttcacatatactgagcagcacgccctccttcaggatcagccatttattcaggacgactgctattaccatggctatgtggaaggtgtgcccgaaagtctcgtggcgctgagtacttgcagcggcggatttctgggcatgctccaaatcaatgatctcgtatacgagataaagccaatttccgttagcgctactttcgagcacttagtgtacaagattgactccgatgacactcagtttccacccatgaggtgcggcttgacagaagagaagatcgcccaccaaatggaactgcaactctcctataattttactttgaagcagtctagcttcgtgggctggtggacccaccaacgtttcgttgagctggtggtggtagtcgacaacatcagatatctcttctcccaatccaatgctacaaccgtacaacacgaggtttttaacgtggtgaacattgtggacagcttctaccatcctttggaggtggacgtgatcctcaccgggattgatatttggaccgcaagcaaccctctcccgacatccggcgacttggacaacgtactggaagacttctccatttggaaaaattacaacctcaacaatcgactgcagcacgatgtggctcatctttttattaaggatacacagggtatgaaactgggcgttgcatacgtgaagggtatttgccagaacccattcaacaccggtgtggatgtgtttgaagacaataggctggttgtcttcgccatcacacttgggcacgagctgggccacaatctgggaatgcaacacgatacacagtggtgcgtatgcgaacttcagtggtgcattatgcacgcgtatcgaaaggttaccactaagttcagtaactgctcttacgcacagtactgggattccacaatctcttccggactctgcattcagcctcccccttaccccggtaacattttcagactgaagtactgcggcaacctggttgtagaagagggcgaggaatgtgactgcggtactatcagacagtgtgcaaaggatccctgctgcctgttgaattgtaccttgcacccgggtgctgcctgcgcgttcggaatttgttgtaaagactgcaagtttctaccgagcggcaccttgtgtagacagcaggtcggagaatgtgatctgcccgagtggtgcaacgggaccagccaccagtgccccgacgacgtgtacgtccaggacggaatcagctgtaatgttaatgcattctgctacgaaaaaacgtgtaataaccacgatatccagtgcaaagagattttcggtcaggacgccaggtcagccagtcagagctgctaccaggaaatcaacactcaaggcaatcggttcggccactgcggcatcgtaggcacaacatacgtcaagtgctggacacccgatatcatgtgtggccgtgtacagtgcgaaaacgtgggcgtgattccgaatcttattgaacactcaacagtgcagcagtttcatctgaatgacactacttgctggggcactgactaccatctgggaatggctatccccgacataggagaggtcaaagacggaaccgtttgcggtcccgaaaaaatctgtatccggaagaagtgtgcgagcatggttcacctgagccaggcctgccagccaaaaacctgcaacatgaggggcatctgtaacaacaaacagcactgccattgtaaccacgagtgggctcccccatattgtaaagataaggggtatggtgggagtgccgattcgggcccaccgccaaagaacaatatggaaggacttaacgttatgggaaagcttcgatacctgagcctcttgtgtctccttcctctggtggcttttctcctgttctgcctgcatgtgctgttcaaaaagagaactaagagcaaggaagatgaagaaggctag

SEQ ID NO: 281635 - DNA, 2331 bp, Artificial Sequence
  derived and/or modified sequence
atggtgcagctgcaccaggacaccgacccccagatccccaagggccagccctgcaccctgaacagcagcgagggcggcgccagacccgccgtgccccacaccctgttcagcagcgccctggacagatggctgcacaacgacagcttcatcatggccgtgggcgagcccctggtgcacatcagagtgaccctgctgctgctgtggttcggcatgttcctgagcatcagcggccacagccaggccagacccagccagtacttcaccagccccgaggtggtgatccccctgaaggtgatcagcagaggcagaggcgccaaggcccccggctggctgagctacagcctgagattcggcggccagagatacatcgtgcacatgagagtgaacaagctgctgttcgccgcccacctgcccgtgttcacctacaccgagcagcacgccctgctgcaggaccagcccttcatccaggacgactgctactaccacggctacgtggagggcgtgcccgagagcctggtggccctgagcacctgcagcggcggcttcctgggcatgctgcagatcaacgacctggtgtacgagatcaagcccatcagcgtgagcgccaccttcgagcacctggtgtacaagatcgacagcgacgacacccagttcccccccatgagatgcggcctgaccgaggagaagatcgcccaccagatggagctgcagctgagctacaacttcaccctgaagcagagcagcttcgtgggctggtggacccaccagagattcgtggagctggtggtggtggtggacaacatcagatacctgttcagccagagcaacgccaccaccgtgcagcacgaggtgttcaacgtggtgaacatcgtggacagcttctaccaccccctggaggtggacgtgatcctgaccggcatcgacatctggaccgccagcaaccccctgcccaccagcggcgacctggacaacgtgctggaggacttcagcatctggaagaactacaacctgaacaacagactgcagcacgacgtggcccacctgttcatcaaggacacccagggcatgaagctgggcgtggcctacgtgaagggcatctgccagaaccccttcaacaccggcgtggacgtgttcgaggacaacagactggtggtgttcgccatcaccctgggccacgagctgggccacaacctgggcatgcagcacgacacccagtggtgcgtgtgcgagctgcagtggtgcatcatgcacgcctacagaaaggtgaccaccaagttcagcaactgcagctacgcccagtactgggacagcaccatcagcagcggcctgtgcatccagccccccccctaccccggcaacatcttcagactgaagtactgcggcaacctggtggtggaggagggcgaggagtgcgactgcggcaccatcagacagtgcgccaaggacccctgctgcctgctgaactgcaccctgcaccccggcgccgcctgcgccttcggcatctgctgcaaggactgcaagttcctgcccagcggcaccctgtgcagacagcaggtgggcgagtgcgacctgcccgagtggtgcaacggcaccagccaccagtgccccgacgacgtgtacgtgcaggacggcatcagctgcaacgtgaacgccttctgctacgagaagacctgcaacaaccacgacatccagtgcaaggagatcttcggccaggacgccagaagcgccagccagagctgctaccaggagatcaacacccagggcaacagattcggccactgcggcatcgtgggcaccacctacgtgaagtgctggacccccgacatcatgtgcggcagagtgcagtgcgagaacgtgggcgtgatccccaacctgatcgagcacagcaccgtgcagcagttccacctgaacgacaccacctgctggggcaccgactaccacctgggcatggccatccccgacatcggcgaggtgaaggacggcaccgtgtgcggccccgagaagatctgcatcagaaagaagtgcgccagcatggtgcacctgagccaggcctgccagcccaagacctgcaacatgagaggcatctgcaacaacaagcagcactgccactgcaaccacgagtgggcccccccctactgcaaggacaagggctacggcggcagcgccgacagcggccccccccccaagaacaacatggagggcctgaacgtgatgggcaagctgagatacctgagcctgctgtgcctgctgcccctggtggccttcctgctgttctgcctgcacgtgctgttcaagaagagaaccaagagcaaggaggacgaggagggctag

SEQ ID NO: 281636 - protein, 782 aa, Artificial Sequence
  derived and/or modified sequence
MDSRVMSKWMKNLKLKGYIIQKREIKPSLEADKPVEDILTYEEFHPFLFSQHSQCPYIEFESFDKAVDEFYSKIEGQKIDLKALQQEKQALKKLDNVRKDHENRLEALQQAQEIDKLKGELIEMNLQIVDRAIQVVRSALANQIDWTEIGLIVKEAQAQGDPVASAIKELKLQTNHVTMLLRNPYLLSEEEDDDVDGDVNVEKNETEPPKGKKKKQKNKQLQKPQKNKPLLVDVDLSLSAYANAKKYYDHKRYAAKKTQKTVEAAEKAFKSAEKKTKQTLKEVQTVTSIQKARKVYWFEKFLWFISSENYLIIGGRDQQQNEIIVKRYLTPEGDIYVHADLHGATSCVIKNPTGEPIPPRTLTEAGTMALCYSAAWDARVITSAWWVYHHQVSKTAPTGEYLTTGSFMIRGKKNFLPPSYLMMGFSFLFKVDESCVWRHQGERKVRVQDEDMETLASCTSELISEEMEQLDGGDTSSDEDKEEHETPVEVELMTQVDQEDITLQSGRDELNEELIQEESSEDEGEYEEVRKDQDSVGEMKDEGEETLNYPDTTIDLSHLQPQRSIQKLASKEESSNSSDSKSQSRRHLSAKERREMKKKKLPSDSGDLEALEGKDKEKESTVHIETHQNTSKNVAAVQPMKRGQKSKMKKMKEKYKDQDEEDRELIMKLLGSAGSNKEEKGKKGKKGKTKDEPVKKQPQKPRGGQRVSDNIKKETPFLEVITHELQDFAVDDPHDDKEEQDLDQQGNEENLFDSLTGQPHPEDVLLFAIPICAPYTTMTNYK

SEQ ID NO: 281637 - DNA, 831 bp, Artificial Sequence
  derived and/or modified sequence
atgcccaagacctgccagtgctacgtgggcaccaagaccaccaaccccagcgcctggcccagcagagagatgaagaagaagaagctgcccagcgacagcggcgacctggaggccctggagggcaaggacaaggagaaggagagcaccgtgcacatcgagacccaccagaacaccagcaagaacgtggccgccgtgcagcccatgaagagaggccagaagagcaagatgaagaagatgaaggagaagtacaaggaccaggacgaggaggacagagagctgatcatgaagctgctgggcagcgccggcagcaacaaggaggagaagggcaagaagggcaagaagggcaagaccaaggacgagcccgtgaagaagcagccccagaagcccagaggcggccagagagtgagcgacaacatcaagaaggagacccccttcctggaggtgatcacccacgagctgcaggacttcgccgtggacgacccccacgacgacaaggaggagcaggacctggaccagcagggcaacgaggagaacctgttcgacagcctgaccggccagccccaccccgaggacgtgctgctgttcgccatccccatctgcgccccctacaccaccatgaccaactacaagtacaaggtgaagctgacccccggcgtgcagaagaagggcaaggccgccaagaccgccctgaacagcttcatgcacagcaaggaggccaccgccagagagaaggacctgttcagaagcgtgaaggacaccgacctgagcagaaacatccccggcaaggtgaaggtgagcgcccccaacctgctgaacgtgaagagaaagtag

SEQ ID NO: 281638 - DNA, 2349 bp, Artificial Sequence
  derived and/or modified sequence
atggacagcagagtgatgagcaagtggatgaagaacctgaagctgaagggctacatcatccagaagagagagatcaagcccagcctggaggccgacaagcccgtggaggacatcctgacctacgaggagttccaccccttcctgttcagccagcacagccagtgcccctacatcgagttcgagagcttcgacaaggccgtggacgagttctacagcaagatcgagggccagaagatcgacctgaaggccctgcagcaggagaagcaggccctgaagaagctggacaacgtgagaaaggaccacgagaacagactggaggccctgcagcaggcccaggagatcgacaagctgaagggcgagctgatcgagatgaacctgcagatcgtggacagagccatccaggtggtgagaagcgccctggccaaccagatcgactggaccgagatcggcctgatcgtgaaggaggcccaggcccagggcgaccccgtggccagcgccatcaaggagctgaagctgcagaccaaccacgtgaccatgctgctgagaaacccctacctgctgagcgaggaggaggacgacgacgtggacggcgacgtgaacgtggagaagaacgagaccgagccccccaagggcaagaagaagaagcagaagaacaagcagctgcagaagccccagaagaacaagcccctgctggtggacgtggacctgagcctgagcgcctacgccaacgccaagaagtactacgaccacaagagatacgccgccaagaagacccagaagaccgtggaggccgccgagaaggccttcaagagcgccgagaagaagaccaagcagaccctgaaggaggtgcagaccgtgaccagcatccagaaggccagaaaggtgtactggttcgagaagttcctgtggttcatcagcagcgagaactacctgatcatcggcggcagagaccagcagcagaacgagatcatcgtgaagagatacctgacccccgagggcgacatctacgtgcacgccgacctgcacggcgccaccagctgcgtgatcaagaaccccaccggcgagcccatcccccccagaaccctgaccgaggccggcaccatggccctgtgctacagcgccgcctgggacgccagagtgatcaccagcgcctggtgggtgtaccaccaccaggtgagcaagaccgcccccaccggcgagtacctgaccaccggcagcttcatgatcagaggcaagaagaacttcctgccccccagctacctgatgatgggcttcagcttcctgttcaaggtggacgagagctgcgtgtggagacaccagggcgagagaaaggtgagagtgcaggacgaggacatggagaccctggccagctgcaccagcgagctgatcagcgaggagatggagcagctggacggcggcgacaccagcagcgacgaggacaaggaggagcacgagacccccgtggaggtggagctgatgacccaggtggaccaggaggacatcaccctgcagagcggcagagacgagctgaacgaggagctgatccaggaggagagcagcgaggacgagggcgagtacgaggaggtgagaaaggaccaggacagcgtgggcgagatgaaggacgagggcgaggagaccctgaactaccccgacaccaccatcgacctgagccacctgcagccccagagaagcatccagaagctggccagcaaggaggagagcagcaacagcagcgacagcaagagccagagcagaagacacctgagcgccaaggagagaagagagatgaagaagaagaagctgcccagcgacagcggcgacctggaggccctggagggcaaggacaaggagaaggagagcaccgtgcacatcgagacccaccagaacaccagcaagaacgtggccgccgtgcagcccatgaagagaggccagaagagcaagatgaagaagatgaaggagaagtacaaggaccaggacgaggaggacagagagctgatcatgaagctgctgggcagcgccggcagcaacaaggaggagaagggcaagaagggcaagaagggcaagaccaaggacgagcccgtgaagaagcagccccagaagcccagaggcggccagagagtgagcgacaacatcaagaaggagacccccttcctggaggtgatcacccacgagctgcaggacttcgccgtggacgacccccacgacgacaaggaggagcaggacctggaccagcagggcaacgaggagaacctgttcgacagcctgaccggccagccccaccccgaggacgtgctgctgttcgccatccccatctgcgccccctacaccaccatgaccaactacaagtag

SEQ ID NO: 281639 - DNA, 831 bp, Artificial Sequence
  derived and/or modified sequence
atgccaaagacatgccagtgctacgtcgggacaaaaactacaaacccctccgcctggccatcccgagagatgaagaagaagaagctgccatccgactctggtgatctggaagccctggaggggaaagacaaagagaaggaatcaacagttcatattgagacacaccagaacacttctaagaatgtggctgcggtgcagcctatgaaaagaggccagaagagcaaaatgaagaaaatgaaggagaaatacaaggaccaagatgaagaagacagagagctcattatgaagctgctgggctctgccggatctaacaaagaagagaagggcaagaaagggaaaaagggtaagactaaagatgagccagtcaagaagcagccccaaaagcctcgagggggtcaacgggtgagcgacaacatcaagaaggagacccccttcctggaagtgataacccacgagctccaggattttgccgtagacgacccccatgatgataaagaggagcaagacctggatcagcaggggaacgaagaaaacctcttcgacagtcttacagggcaaccccatccagaggacgtcctgttgtttgcaatccccatttgtgctccatacacaactatgactaattacaagtacaaggtgaagctcacacccggagtccagaagaaaggaaaagcagccaaaactgccctgaactcattcatgcacagcaaagaagctaccgcaagagaaaaagacctctttcgctccgttaaggatacagacttatctcgaaatataccaggcaaagtcaaggttagtgcccctaacctgttgaatgtgaaaagaaaatag

SEQ ID NO: 281640 - DNA, 2349 bp, Artificial Sequence
  derived and/or modified sequence
atggactctcgggtgatgtctaagtggatgaaaaacctgaaattaaagggatacattatccaaaagagggaaataaagcccagtcttgaagccgataaaccagtggaggatattcttacctatgaggagtttcaccctttcctattttcccagcacagccagtgcccctatatcgaattcgagagttttgataaggccgtcgatgagttttactccaagatagaagggcaaaaaatcgacctcaaagctctacagcaggaaaagcaagcattaaaaaaactggacaacgtgaggaaggatcacgagaaccgtttggaggcacttcagcaggctcaggagattgacaagctgaaaggggaacttatagagatgaatctgcagatcgtcgatcgggccatccaggttgtacgaagtgcactcgccaaccaaattgactggaccgagattggcttaatcgtgaaagaagcccaggctcagggagacccagtagccagcgccattaaagaacttaagttacaaaccaatcatgtgactatgctccttagaaacccctacttgctcagcgaggaggaagacgatgacgtagatggagacgttaatgtcgaaaagaacgagaccgagccccccaaaggcaagaaaaaaaagcagaagaacaagcaactgcagaaaccacagaagaataaacctttgctggtggatgtggacctctccctgagcgcctacgcaaatgccaagaaatactacgatcataagcggtatgccgctaaaaaaacccagaagacagtcgaagccgctgagaaggcctttaaaagtgcagaaaagaaaaccaaacaaacactgaaagaagtccagactgtgacgagcatccagaaggccagaaaagtgtattggttcgagaagtttctgtggtttatcagttctgagaattatctgattatcggaggtagagatcagcaacagaacgagatcattgtgaagagatacctaacccctgagggagacatttacgtgcacgccgatctgcacggcgctacaagttgcgttatcaaaaatccaacaggtgagcctattcctccgcgcaccctaactgaagcgggtactatggccttatgctacagcgcagcgtgggacgcacgggtaatcaccagcgcgtggtgggtttatcatcaccaggtgtcgaagaccgcgcccacgggcgaatacctcacgactggcagctttatgatccgcggcaagaaaaactttctgcctcctagctaccttatgatgggcttttctttcttatttaaagtagacgagtcttgcgtgtggaggcatcagggggaaagaaaagtgcgcgtgcaggatgaggacatggagaccctagcatcttgcacatccgagttgatctctgaagaaatggagcagctggacggtggtgacaccagttcggacgaggacaaagaggagcacgaaacaccagtagaagtggaactgatgacacaggttgaccaagaggacataacccttcaaagtggacgagatgaactcaacgaagaactcattcaagaggagtcaagcgaagacgagggggagtatgaagaggtgcgtaaggatcaggactccgtcggcgaaatgaaagacgaaggggaggaaacattgaattaccctgatacgacaattgacctctcccaccttcagccccaacgatctatccagaaactggcctcaaaagaggagtcctctaacagtagcgactccaaatctcagagtcggagacatctcagtgctaaggagcggcgtgagatgaagaaaaaaaagctccccagcgatagcggtgaccttgaggccctggagggcaaggacaaggagaaagaatccacagtgcacatcgagacacaccagaacacctcaaagaacgtcgccgcagtccaacctatgaaacgaggccagaagtcaaagatgaaaaagatgaaggagaagtataaggatcaggatgaagaagacagggaactaataatgaagctcctgggatctgccggaagtaataaggaagagaaaggcaagaagggaaagaaaggcaagacaaaggacgaaccggtgaaaaaacagccgcagaagccccgcggcgggcagagggtgagcgacaacatcaaaaaggagactcctttcctggaggttataacccatgaacttcaagattttgcagtggacgacccccacgatgacaaggaggagcaagatttggaccagcaggggaacgaggagaacctttttgactctcttacgggccaacctcatccagaggatgtgctgctgttcgctatccctatctgcgcaccatacacaaccatgactaactataaatag

SEQ ID NO: 281641 - DNA, 831 bp, Artificial Sequence
  derived and/or modified sequence
atgcccaagacctgccagtgctacgtgggcaccaagaccaccaaccccagcgcctggcccagccgggagatgaagaagaagaagctgcccagcgacagcggggacctggaggccctggagggcaaggacaaggagaaggagagcacagtgcacatcgagacccaccagaacaccagcaagaatgtggccgctgtgcagcccatgaagaggggccagaagagcaagatgaagaagatgaaggagaagtacaaggaccaggatgaagaagatcgggagctgatcatgaagctgctgggcagcgctggcagcaacaaggaggagaagggcaagaagggcaagaagggcaagaccaaggatgagcctgtgaagaagcagccccagaagccccggggcggccagagggtgtctgacaacatcaagaaggagacccccttcctggaggtgatcacccatgagctgcaggactttgctgtggatgacccccatgatgacaaggaggagcaggacctggaccagcagggcaatgaggagaacctgtttgacagcctgaccggccagccccacccagaagatgtgctgctgtttgccatccccatctgtgccccctacaccaccatgaccaactacaagtacaaggtgaagctgaccccaggagtgcagaagaagggcaaggccgccaagacagccctgaacagcttcatgcacagcaaggaggccacagcccgggagaaggacctcttccgctctgtgaaggacacagacctgagcaggaacatccctgggaaggtgaaggtgtctgcccccaacctgctgaatgtgaagaggaagtag

SEQ ID NO: 281642 - DNA, 2349 bp, Artificial Sequence
  derived and/or modified sequence
atggacagccgggtgatgagcaagtggatgaagaacctgaagctgaagggctacatcatccagaagcgggagatcaagcccagcctggaggccgacaagcctgtggaggacatcctgacctatgaggagttccaccccttcctgttcagccagcacagccagtgcccctacatcgagtttgagagctttgacaaggctgtggatgagttctacagcaagattgagggccagaagattgacctgaaggccctgcagcaggagaagcaggccctgaagaagctggacaacgtgaggaaggaccacgagaaccggctggaggccctgcagcaggcccaggagattgacaagctgaagggggagctgattgagatgaacctgcagatcgtggaccgggccatccaggtggtgcgcagcgccctggccaaccagattgactggacagaaattggcctcatcgtgaaggaggcccaggcccagggcgaccctgtggccagcgccatcaaggagctgaagctgcagaccaaccacgtgaccatgctgctgaggaacccctacctgctgtctgaggaggaggatgatgatgtggatggagatgtgaatgtggagaagaatgaaacagagccccccaagggcaagaagaagaagcagaagaacaagcagctgcagaagccccagaagaacaagcccctgctggtggatgtggacctgagcctgagcgcctatgccaatgccaagaagtactatgaccacaagagatatgctgccaagaagacccagaagacagtggaggccgctgagaaggccttcaagtctgctgagaagaagaccaagcagaccctgaaggaggtgcagacagtgaccagcatccagaaggccaggaaggtgtactggtttgagaagttcctgtggttcatcagcagcgagaactacctgatcattggaggccgggaccagcagcagaatgagatcatcgtgaagcgctacctgaccccagagggggacatctacgtgcatgctgacctgcacggggccaccagctgtgtgatcaagaaccccactggagagcccatcccccccaggaccctgacagaagctggcaccatggccctgtgctacagcgctgcctgggatgcccgggtcatcaccagcgcctggtgggtgtaccaccaccaggtgtccaagacagcccccaccggggagtacctgaccaccggcagcttcatgatccggggcaagaagaacttcctgcccccatcctacctgatgatgggcttctccttcctgttcaaggtggatgagagctgtgtgtggaggcaccagggcgagaggaaggtgcgggtgcaggatgaggacatggagaccctggccagctgcaccagcgagctgatcagcgaggagatggagcagctggatggaggagacaccagcagtgatgaggacaaggaggagcacgagacccctgtggaggtggagctgatgacccaggtggaccaggaggacatcaccctgcagagcggcagagatgagctgaatgaggagctgatccaggaggagagcagtgaagatgaaggagaatatgaggaggtgaggaaggaccaggacagcgtgggggagatgaaggatgaaggagaggagaccctgaactacccagacaccaccatcgacctgagccacctgcagccccagaggagcatccagaagctggccagcaaggaggagagcagcaacagcagtgacagcaagagccagagcagaagacacctgagcgccaaggagcggcgggagatgaagaagaagaagctgcccagcgacagcggggacctggaggccctggagggcaaggacaaggagaaggagagcacagtgcacatcgagacccaccagaacaccagcaagaatgtggccgctgtgcagcccatgaagaggggccagaagagcaagatgaagaagatgaaggagaagtacaaggaccaggatgaagaagatcgggagctgatcatgaagctgctgggcagcgctggcagcaacaaggaggagaagggcaagaagggcaagaagggcaagaccaaggatgagcctgtgaagaagcagccccagaagccccggggcggccagagggtgtctgacaacatcaagaaggagacccccttcctggaggtgatcacccatgagctgcaggactttgctgtggatgacccccatgatgacaaggaggagcaggacctggaccagcagggcaatgaggagaacctgtttgacagcctgaccggccagccccacccagaagatgtgctgctgtttgccatccccatctgtgccccctacaccaccatgaccaactacaagtag

SEQ ID NO: 281643 - DNA, 831 bp, Artificial Sequence
  derived and/or modified sequence
atgcccaagacctgccagtgctacgtgggcaccaagaccaccaacccctctgcctggccaagcagggaaatgaagaaaaaaaaattgccaagcgattccggggatttggaggccttggagggcaaggacaaggaaaaagagagcacagtccacatcgagacacatcaaaatacctcaaagaatgtggccgccgtccaacctatgaagcgaggccagaaaagcaagatgaagaaaatgaaggagaagtataaggatcaagatgaggaggatcgggaactgatcatgaaactcctcggctcagcgggatcaaataaagaggagaaaggcaagaagggaaaaaagggcaaaacaaaagacgaacccgtgaaaaagcaaccacaaaagccaaggggcgggcagagagtaagcgacaatatcaagaaggagacaccatttctggaggtgattacgcatgagctgcaggactttgcggtggatgatccacacgatgacaaggaagagcaagatctggatcaacaaggcaatgaggagaacctgtttgactcccttaccgggcaacctcaccctgaagacgtcttgcttttcgccattccgatctgtgctccatacaccaccatgaccaattacaaatataaagtgaagttgacccccggagtccagaaaaaggggaaagccgcgaaaactgccttaaactcttttatgcacagtaaagaagcaaccgcccgggagaaagatcttttccgtagtgtcaaggatactgacttatctcggaacatccccggaaaagtgaaggtgagtgccccaaaccttttgaatgtcaagaggaagtag

SEQ ID NO: 281644 - DNA, 2349 bp, Artificial Sequence
  derived and/or modified sequence
atggacagccgggtgatgagcaagtggatgaagaacctgaagctgaaaggctatatcatccaaaaaagagaaataaagccttctttggaggcagacaagccggtcgaagacatactcacctatgaagaattccacccattcttgttttcccagcattcccagtgtccttacattgaatttgaatcatttgacaaggctgtggacgagttttactcaaagattgaagggcaaaagattgacttgaaagcactgcagcaggaaaaacaggcactaaagaaacttgataatgtgcggaaggaccatgagaatagactggaagcattacagcaggcgcaagagattgataagctaaagggcgaactgatcgagatgaacctccaaattgttgatcgggccattcaagtggtgcgctcggccctcgccaaccagattgattggacagaaattggtctcattgttaaagaagcccaagcccaaggcgaccccgtggcaagcgcgattaaagagctaaaacttcagaccaaccacgtcactatgttgttaagaaatccatatttgctcagcgaggaggaggacgacgacgtcgacggcgacgtgaatgtggagaaaaacgaaacagagccccctaagggaaaaaagaaaaaacaaaagaataaacagcttcagaaacctcaaaagaacaaaccgcttttagtggatgtcgacctgtctttatccgcctatgccaacgctaaaaagtactatgaccacaagagatatgcagccaaaaagacacagaagactgtggaggcagccgaaaaggcttttaaatctgctgaaaaaaagaccaaacagacattaaaggaggtccaaacagtgaccagtatacagaaggcccgcaaagtgtattggttcgaaaaattcttgtggtttatctcctccgagaactaccttatcatcggcgggagagaccaacagcagaacgagatcattgtaaagaggtacttaaccccagagggagatatttatgttcacgcagacctgcatggcgccacaagctgtgtcataaaaaatcctacaggggagccaattccccctaggacactcaccgaagccgggaccatggccctgtgttacagcgctgcttgggacgctagagtgatcaccagtgcctggtgggtttaccaccatcaggtgtcgaagaccgctccgaccggcgagtacttgaccacagggtctttcatgattaggggcaaaaaaaattttctccctcctagctaccttatgatgggcttcagcttcctgttcaaggtcgatgaatcatgcgtgtggaggcatcagggtgagcgcaaggtcagagtgcaggatgaggacatggagacgctggcgtcgtgcacgagtgagcttatctccgaagagatggagcagctcgatggtggcgacacaagctcagatgaagataaggaagaacacgaaacccccgtggaagtggagctgatgacacaggtggaccaggaggacatcactctccaatccggacgggatgagctaaacgaagagctgatccaagaagaatcttcggaggacgagggcgaatatgaagaggtgcgtaaggatcaggattcagtgggagagatgaaggacgaaggcgaggaaacactgaattatcctgataccaccattgacctcagccacctacagcctcagcgttctatccagaaactggcttcaaaggaagagtcaagcaattcttccgactctaaaagccagtcacgacgccacttgtctgctaaggagaggagggagatgaagaagaagaagctccctagcgacagcggggacttggaggctttggaagggaaggataaagagaaggagagcaccgtccatatcgaaacccatcaaaatacctccaaaaacgttgccgcagttcaaccaatgaaacggggccagaaatcaaaaatgaagaagatgaaagaaaaatacaaggatcaggatgaagaggacagagaactgatcatgaaactactgggctctgccgggtcaaataaggaggaaaaaggtaagaagggaaagaagggcaaaaccaaggacgagccagtcaagaagcaaccccagaaacctcgaggtggccaacgtgtgagtgataatatcaagaaagagaccccattcttggaggtgatcacacacgagctgcaggacttcgcggtggatgatcctcatgacgataaagaggaacaagacctggaccaacaaggcaacgaggagaacctgttcgattctttaacaggccagccccatcctgaggatgtgctgctgtttgcaattcccatctgcgccccatatacaaccatgaccaattataaatag

SEQ ID NO: 281645 - DNA, 1653 bp, Artificial Sequence
  derived and/or modified sequence
atgcctaagacctgccaatgctatgttggtacaaagactacaaatcccagtgcctggccatcaagggaaatgaaaaagaaaaaacttccaagtgactcaggagatttagaagcgttagagggaaaggataaagaaaaagaaagtactgtacacattgaaactcatcagaacacaagcaaaaatgttgcggctgtgcagccaatgaaacgaggacaaaagagtaaaatgaaaaaaatgaaagaaaaatacaaagaccaggatgaagaagaccgtgaacttatcatgaagttgctggggtctgcaggttcaaacaaagaagaaaaagggaagaaggggaagaaaggaaaaacaaaggacgaacctgtgaagaaacagccccagaaacctagaggtggacagagggtctctgacaacattaagaaagaaactccgttccttgaggttataactcatgagttacaagactttgctgtagatgatccacatgatgacaaggaagagcaagatctggatcaacagggaaatgaggaaaacctatttgattctttgacaggccagccacatcctgaagatgtactactgtttgccattccaatatgtgccccttacaccaccatgacaaactacaaatataaagtgaaacttactcctggagtgcagaaaaagggaaaagctgcaaaaacagccttgaatagtttcatgcattccaaagaagcaacagcaagagaaaaagacttattccgcagcgtaaaggacacagatttatcaagaaacattcctggcaaagtgaaagtgtctgcacccaatcttctgaatgtaaaaaggaaatagctgaaatgaaattctaaaatatttgagaagagccaattttatagccttttggaagttcaaagatgaaagcaccatgtatcaggatttccgcattataaaaatgaactaaacattgccttgctatattcaccaaaaggacttacttcttgttttttcccagttttatatagaggaaacactgtctatgataggatttccaaaagtatttgtggacagttaaatgctaattaatatacatctgtagttattctacattttcttgaaatttgggaggttaataccaagtattcatttcatgatgtaaagaaactgaacagtgaagtggcttgattgcttaaactattgacttggtaagtctactgtatataacatctaatatatatattacaggccaaatgaactaaacattgccttgctatattcaccaaaaggacttaattcttgtttttttcccagttttatatagaggaaacactatgataggatttcctaaagtatttgtggacagttaaatgctaattatatacatctgtagttattctacattttcttgaaatttgggaggttaataccaagtattcatttcatgatgtaaagaaactgaacagtgaagtggcttgattgcttaaactattgacttggtaagtctactgtatataacatctaatatatatatattataggccagctacaaggggtttaaatatttaggattgtgtcttgaaaactaagtattggagtggattttcttctgctttcattgatacttgtcagaaaaaaatattagaccaaaatgtaaaatataagtaataattctcatga

SEQ ID NO: 281646 - DNA, 3280 bp, Artificial Sequence
  derived and/or modified sequence
gaacttgcggtagtgaccctcgggcctcgccatgaagagccgctttagcaccattgacctccgcgccgtactcgcggagctgaatgctagcttgctaggaatgagagtaaacaatgtttatgatgtggataataagacataccttattcgtcttcaaaaaccggactttaaagctacacttttacttgaatctggcatacgaattcatacaacagaatttgagtggcctaagaatatgatgccgtctagttttgccatgaagtgccgaaaacatttgaagagtcggagattagtcagtgcaaaacagcttggtgtggatagaattgtagattttcaatttggaagtgatgaagctgcttaccatttaatcattgagctctatgatagggggaacattgttcttacagattatgagtacgtaattttaaatattctaaggtttcgaactgatgaggcagatgatgttaaatttgctgttcgtgaacgctatccacttgatcatgctagagctgctgaacctttgcttactttggaaaggttgactgaaatagtagccagcgcacctaagggtgaactactgaagagggtgcttaacccattacttccctatggaccagctctcattgaacactgtcttttagaaaatggattctcgggtaatgtcaaagtggatgaaaaacttgaaactaaagggatatatcattcagaaaagagaaataaaaccaagcttggaagcagataaaccagttgaagacatactgacgtatgaggaatttcatcctttcttgttttctcaacattcacaatgtccatatatagaatttgaatcatttgacaaggcggtggatgaattttattccaagatagaaggccagaaaattgacttaaaagctttacaacaggaaaagcaagcattgaagaaattagataatgttcgaaaggatcacgaaaacagattggaagctcttcagcaggctcaggaaatagacaaactgaaaggagagctcatagaaatgaacctacaaatagttgacagagccattcaggtagttcgaagtgctttagctaaccagatagattggacagaaattgggttaattgtgaaagaagcccaggctcaaggagaccctgttgcaagtgcaatcaaagaattaaaactacaaacaaaccatgttacaatgctgctaagaaatccatacttgttatcagaggaggaagatgatgatgttgatggtgacgtcaatgttgagaaaaatgaaactgaaccaccaaaaggaaaaaagaaaaaacaaaagaataaacagctgcagaagcctcagaaaaataagcccttacttgtagatgttgatctcagcttgtcagcatatgccaatgccaaaaagtattatgatcacaagagatatgctgctaagaaaacacaaaagactgttgaagctgctgagaaggcattcaagtcagcagaaaagaaaacaaagcaaacattaaaagaagttcagactgttacctctattcaaaaagcaagaaaagtatattggtttgagaaatttctgtggttcattagctcagagaactatctaattataggtggacgagatcagcaacagaatgaaataattgtgaaaagatacttgacaccagaaggagacatttatgtacatgctgatcttcatggagctactagctgtgtaattaagaatccaacaggagaacccatccccccacggaccttgactgaagctggcacaatggcactttgctacagtgctgcttgggatgcacgagttatcactagtgcttggtgggtgtaccatcatcaggtatctaaaacagcaccaactggagaatatttgacaacaggaagcttcatgataagaggaaaaaagaattttcttcctccctcatatctaatgatggggtttagcttcctttttaaggtagatgagtcttgtgtttggagacatcagggtgaacgaaaagtcagagtacaggatgaagacatggagacactggcaagttgtacaagtgaactcatatcagaagaaatggaacaattagatggaggtgacacgagcagtgatgaggataaagaagaacatgaaactcctgtggaagtagaactcatgactcaggttgaccaagaggatatcactcttcagagtggcagagatgaactaaatgaggagctcattcaggaagaaagctctgaagacgaaggagaatatgaagaggttagaaaagatcaggattctgttggtgaaatgaaggatgaaggggaagagacattaaattatcctgatactaccattgacttgtctcaccttcaaccccaaaggtccatccagaaattggcttcaaaagaggaatcttctaattctagtgacagtaaatcacagagccggagacatttgtcagccaaggaaagaagggaaatgaaaaagaaaaaacttccaagtgactcaggagatttagaagcgttagagggaaaggataaagaaaaagaaagtactgtacacattgaaactcatcagaacacaagcaaaaatgttgcggctgtgcagccaatgaaacgaggacaaaagagtaaaatgaaaaaaatgaaagaaaaatacaaagaccaggatgaagaagaccgtgaacttatcatgaagttgctggggtctgcaggttcaaacaaagaagaaaaagggaagaaggggaagaaaggaaaaacaaaggacgaacctgtgaagaaacagccccagaaacctagaggtggacagagggtctctgacaacattaagaaagaaactccgttccttgaggttataactcatgagttacaagactttgctgtagatgatccacatgatgacaaggaagagcaagatctggatcaacagggaaatgaggaaaacctatttgattctttgacaggccagccacatcctgaagatgtactactgtttgccattccaatatgtgccccttacaccaccatgacaaactacaagtaagttaccattagttgacagaatggcttttgtgaattgttttgtaacgtctatttagtaacacatgtaattcctttttaaagatataaagtgaaacttactcctggagtgcagaaaaagggaaaaggtatttaaatttgtttttttgaattatgattttaaacagttcagtgacttaacagtagattattcttactcttttttgtatttacagctgcaaaaacagccttgaatagtttcatgcattccaaagaagcaacagcaagagaaaaagacttattccgcagcgt

SEQ ID NO: 281647 - DNA, 831 bp, Artificial Sequence
  derived and/or modified sequence
atgcccaaaacctgccagtgttacgtaggcaccaaaacaactaatccaagcgcctggccatctagagagatgaagaagaaaaagctcccatcagactcaggggatctcgaagccctcgagggaaaggacaaggagaaggagtccacggtccacattgaaacgcaccaaaatacatctaagaacgtggctgctgtgcaacccatgaagcgtggccaaaaatctaagatgaagaagatgaaagagaaatacaaggatcaagacgaggaggatagagagttgatcatgaagcttttagggtctgccggtagcaataaagaggagaaaggaaaaaagggaaagaaaggaaagaccaaggacgaaccggtcaaaaagcaaccccaaaagcctcgtggcggacaaagagtcagcgataatataaaaaaggaaaccccattcctggaggtaatcacccatgagcttcaggactttgcagtcgatgacccgcacgacgacaaagaagaacaagacttggatcagcaaggcaacgaagagaatttattcgactctctgactggacagccacatccagaggacgtcctgcttttcgccattcccatttgcgctccctatacaactatgaccaattacaagtacaaggttaaattgactcctggggtccagaagaaaggaaaggccgctaaaacagcattaaattctttcatgcactcaaaagaggctaccgccagggagaaggacctgtttcgctccgtgaaagacacagacttgagtcgcaatatccccggaaaagtcaaggtgtcagccccaaacttattgaatgtgaagaggaaatag

SEQ ID NO: 281648 - DNA, 2349 bp, Artificial Sequence
  derived and/or modified sequence
atggacagcagagtgatgtcaaagtggatgaaaaacctgaagctcaaaggttacataatccagaagcgcgagattaaaccatcactggaggccgataaacctgtggaagatatcctgacgtacgaagagttccatcctttcttattctcgcagcacagtcagtgcccatatatcgagttcgaatcattcgataaggcagttgatgaattttattcaaagatagagggacagaaaatcgatcttaaagcactacagcaggaaaaacaggcactcaagaagcttgataatgtcagaaaagatcatgagaatcggcttgaagccctgcaacaggcccaggaaatcgacaagctgaaaggcgagcttatcgaaatgaacctccagatcgtcgaccgagcgattcaggtggtgaggtcagcactggccaaccagatcgattggaccgaaatcggcctgatcgtgaaggaggcacaggcccagggcgaccctgttgcaagcgctataaaagaactcaaactccagaccaatcacgtgaccatgcttctgcggaacccctacttactttccgaagaggaagacgacgacgtggatggggacgtgaatgtggaaaaaaacgagacagaacccccaaaggggaagaagaaaaaacagaagaacaagcagctccaaaagccacaaaagaataagcctttgctagtcgatgtcgacctgagcctgtcagcttacgcaaatgcgaagaagtactacgatcacaaacgctatgccgcaaagaagacgcagaagacagtcgaggccgctgaaaaggcgtttaaaagtgccgagaagaagacaaagcagactctgaaagaggtgcagactgtcacgtctattcaaaaggcccgaaaagtgtactggttcgaaaaattcctgtggtttatcagtagcgaaaattatctgataatcggaggacgcgatcagcagcagaatgagataattgtcaagagataccttacccccgaaggcgatatctacgtgcacgcagacctgcatggggcaaccagttgcgtgattaagaatccgaccggcgaacccatcccacctaggactctgactgaggccggaacaatggccctctgctacagcgcagcatgggacgctagggttataaccagcgcctggtgggtgtatcaccaccaggtgtccaagacagcacccaccggagagtatctaaccaccggcagcttcatgattcggggtaagaagaactttctgccccctagctacttgatgatggggttttcctttctgtttaaggtggatgaatcctgcgtctggagacatcaaggagagaggaaggtgcgcgtgcaagacgaggacatggaaactttggcctcatgcacgtcagagctcatatctgaggaaatggaacaactggacggaggagacacttctagcgacgaggataaggaggagcatgaaacccctgtggaggtcgagcttatgacgcaggtcgatcaggaggatatcactctgcaatctgggagagacgaattgaacgaagaactcatacaggaggagtcttctgaggacgagggtgaatatgaggaggtgcggaaagatcaggactcagtgggagaaatgaaggacgagggggaggaaacccttaactatcccgacaccacaatcgatctgtcccatttacaacctcagcggtccattcagaagctggcaagcaaggaggaaagtagtaactcaagcgacagtaagtcacagtcacgtaggcacctgagcgccaaggaacgcagggagatgaagaaaaagaagctgccatctgattctggggatctggaagcgctggaaggcaaggacaaggagaaggaatctactgttcacatagagacacatcagaacacatctaaaaatgtcgccgcagttcagcccatgaagagagggcagaagtctaaaatgaagaagatgaaggaaaaatataaagatcaggacgaggaagatcgggagttaataatgaagttgctgggttccgccggttcaaataaggaggagaaggggaagaaagggaaaaaaggaaaaactaaagacgaaccagttaagaagcaaccacagaagcctcgtggaggacaacgcgtatcagataacattaagaaggagacccctttcttggaggttattactcacgagctccaggattttgccgtagacgacccccacgacgataaagaagagcaggatttggaccagcagggcaacgaagagaacttgtttgactctcttaccgggcaaccgcaccccgaggacgtgctgctgtttgcaattcccatatgtgcaccatacactaccatgacaaattacaagtag

SEQ ID NO: 281649 - protein, 1045 aa, Artificial Sequence
  derived and/or modified sequence
MNLQAQPKAQNKRKRCLFGGQEPAPKEQPPPLQPPQQSIRVKEEQYLGHEGPGGAVSTSQPVELPPPSSLALLNSVVYGPERTSAAMLSQQVASVKWPNSVMAPGRGPERGGGGGVSDSSWQQQPGQPPPHSTWNCHSLSLYSATKGSPHPGVGVPTYYNHPEALKREKAGGPQLDRYVRPMMPQKVQLEVGRPQAPLNSFHAAKKPPNQSLPLQPFQLAFGHQVNRQVFRQGPPPPNPVAAFPPQKQQQQQQPQQQQQQQQAALPQMPLFENFYSMPQQPSQQPQDFGLQPAGPLGQSHLAHHSMAPYPFPPNPDMNPELRKALLQDSAPQPALPQVQIPFPRRSRRLSKEGILPPSALDGAGTQPGQEATGNLFLHHWPLQQPPPGSLGQPHPEALGFPLELRESQLLPDGERLAPNGREREAPAMGSEEGMRAVSTGDCGQVLRGGVIQSTRRRRRASQEANLLTLAQKAVELASLQNAKDGSGSEEKRKSVLASTTKCGVEFSEPSLATKRAREDSGMVPLIIPVSVPVRTVDPTEAAQAGGLDEDGKGPEQNPAEHKPSVIVTRRRSTRIPGTDAQAQAEDMNVKLEGEPSVRKPKQRPRPEPLIIPTKAGTFIAPPVYSNITPYQSHLRSPVRLADHPSERSFELPPYTPPPILSPVREGSGLYFNAIISTSTIPAPPPITPKSAHRTLLRTNSAEVTPPVLSVMGEATPVSIEPRINVGSRFQAEIPLMRDRALAAADPHKADLVWQPWEDLESSREKQRQVEDLLTAACSSIFPGAGTNQELALHCLHESRGDILETLNKLLLKKPLRPHNHPLATYHYTGSDQWKMAERKLFNKGIAIYKKDFFLVQKLIQTKTVAQCVEFYYTYKKQVKIGRNGTLTFGDVDTSDEKSAQEEVEVDIKTSQKFPRVPLPRRESPSEERLEPKREVKEPRKEGEEEVPEIQEKEEQEEGRERSRRAAAVKATQTLQANESASDILILRSHESNAPGSAGGQASEKPREGTGKSRRALPFSEKKKKTETFSKTQNQENTFPCKKCGR

SEQ ID NO: 281650 - protein, 66 aa, Artificial Sequence
  derived and/or modified sequence
MNLQAQPKAQNKRKRCLFGGQEPAPKEQPPPLQPPQQSIRVKEEQYLGHEGPGGAVSTSQPVELPP

SEQ ID NO: 281651 - protein, 1019 aa, Artificial Sequence
  derived and/or modified sequence
MNLQAQPKAQNKRKRCLFGGQEPAPKEQPPPLQPPQQSIRVKEEQYLGHEGPGGAVSTSQPVELPPPSSLALLNSVVYGPERTSAAMLSQQVASVKWPNSVMAPGRGPERGGGGGVSDSSWQQQPGQPPPHSTWNCHSLSLYSATKGSPHPGVGVPTYYNHPEALKREKAGGPQLDRYVRPMMPQKVQLEVGRPQAPLNSFHAAKKPPNQSLPLQPFQLAFGHQVNRQVFRQGPPPPNPVAAFPPQKQQQQQQPQQQQQQQQAALPQMPLFENFYSMPQQPSQQPQDFGLQPAGPLGQSHLAHHSMAPYPFPPNPDMNPELRKALLQDSAPQPALPQVQIPFPRRSRRLSKEGILPPSALDGAGTQPGQEATGNLFLHHWPLQQPPPGSLGQPHPEALGFPLELRESQLLPDGERLAPNGREREAPAMGSEEGMRAVSTGDCGQVLRGGVIQSTRRRRRASQEANLLTLAQKAVELASLQNAKDGSGSEEKRKSVLASTTKCGVEFSEPSLATKRAREDSGMVPLIIPVSVPVRTVDPTEAAQAGGLDEDGKGPEQNPAEHKPSVIVTRRRSTRIPGTDAQAQAEDMNVKLEGEPSVRKPKQRPRPEPLIIPTKAGTFIAPPVYSNITPYQSHLRSPVRLADHPSERSFELPPYTPPPILSPVREGSGLYFNAIISTSTIPAPPPITPKSAHRTLLRTNSAEVTPPVLSVMGEATPVSIEPRINVGSRFQAEIPLMRDRALAAADPHKADLVWQPWEDLESSREKQRQVEDLLTAACSSIFPGAGTNQELALHCLHESRGDILETLNKLLLKKPLRPHNHPLATYHYTGSDQWKMAERKLFNKGIAIYKKDFFLVQKLIQTKTVAQCVEFYYTYKKQVKIGRNGTLTFGDVDTSDEKSAQEEVEVDIKTSQKFPRVPLPRRESPSEERLEPKREVKEPRKEGEEEVPEIQEKEEQEEGRERSRRAAAVKATQTLQANESASDILILRSHESNAPGSAGGQASEKPREGTGKSRRALPFS

SEQ ID NO: 281652 - DNA, 3483 bp, Artificial Sequence
  derived and/or modified sequence
gtgccagaaccctgtggagcatcatgaactgggaagagtagctgagccccagagcctctctggaagagaaaggaagagccagcagttctttctcccagtgtccgacctcactgtccagcgtcttcctctgcccctgctctgccctccctggctcctggactagagcccggcttccagcaggacgtttccccaggggatgggcgactgttgaaggggatctcaccgccagggctcagttggccacatcatgaacctccaggcccagcccaaggctcagaacaagcggaagcgttgcctcttcgggggccaggaaccagctcccaaggagcagccccctcccctgcagcccccccagcagtccatcagagtgaaggaggagcagtacctcgggcacgagggtccaggaggggcagtctccacctctcagcctgtggaactgccccctcctagcagcctggccctgctgaactctgtggtatatgggcctgagcggacctcagcagccatgctgtcccagcaggtggcctcagtaaagtggcccaactctgtgatggctccagggcggggcccggagcgtggaggaggtgggggtgtcagtgacagcagctggcagcagcagccaggccagcctccaccccattcaacatggaactgccacagtctgtccctctacagtgcaaccaaggggagcccgcatcctggagtgggagtcccgacttactataaccaccctgaggcactgaagcgggagaaagcggggggcccacagctggaccgctatgtgcgaccaatgatgccacagaaggtgcagctggaggtagggcggccccaggcacccctgaattctttccacgcagccaagaaacccccaaaccagtcactgcccctgcaacccttccagctggcattcggccaccaggtgaaccggcaggtcttccggcagggcccaccgcccccaaacccggtggctgccttccctccacagaagcagcagcagcagcagcaaccacagcagcagcagcagcagcagcaggcagccctaccccagatgccgctctttgagaacttctattccatgccgcagcaaccctcgcagcaaccccaggactttggcctgcagccagctgggccactgggacagtcccacctggctcaccacagcatggcaccctaccccttcccccccaacccagatatgaacccagaactgcgcaaggcccttctgcaggactcagccccgcagccagcgctacctcaggtccagatccccttcccccgccgctcccgccgcctctctaaggagggtatcctgcctcccagcgccctggatggggctggcacccagcctgggcaggaggccactggcaacctgttcctacatcactggcccctgcagcagccgccacctggctccctggggcagccccatcctgaagctctgggattcccgctggagctgagggagtcgcagctactgcctgatggggagagactagcacccaatggccgggagcgagaggctcctgccatgggcagcgaggagggcatgagggcagtgagcacaggggactgtgggcaggtgctacggggcggagtgatccagagcacgcgacggaggcgccgggcatcccaggaggccaatttgctgaccctggcccagaaggctgtggagctggcctcactgcagaatgcaaaggatggcagtggttctgaagagaagcggaaaagtgtattggcctcaactaccaagtgtggggtggagttttctgagccttccttagccaccaagcgagcacgagaagacagtgggatggtacccctcatcatcccagtgtctgtgcctgtgcgaactgtggacccaactgaggcagcccaggctggaggtcttgatgaggacgggaagggtcctgaacagaaccctgctgagcacaagccatcagtcatcgtcacccgcaggcggtccacccgaatccccgggacagatgctcaagctcaggcagaggacatgaatgtcaagttggagggggagccttccgtgcggaaaccaaagcagcggcccaggcccgagcccctcatcatccccaccaaggcgggcactttcatcgcccctcccgtctactccaacatcaccccataccagagccacctgcgctctcccgtgcgcctagctgaccacccctctgagcggagctttgagctacctccctacacgccgccccccatcctcagccctgtgcgggaaggctctggcctctacttcaatgccatcatatcaaccagcaccatccctgcccctcctcccatcacgcctaagagtgcccatcgcacgctgctccggactaacagtgctgaagtaaccccgcctgtcctctctgtgatgggggaggccaccccagtgagcatcgagccacggatcaacgtgggctcccggttccaggcagaaatccccttgatgagggaccgtgccctggcagctgcagatccccacaaggctgacttggtgtggcagccatgggaggacctagagagcagccgggagaagcagaggcaagtggaagacctgctgacagccgcctgctccagcattttccctggtgctggcaccaaccaggagctggccctgcactgtctgcacgaatccagaggagacatcctggaaacgctgaataagctgctgctgaagaagcccctgcggccccacaaccatccgctggcaacttatcactacacaggctctgaccagtggaagatggccgagaggaagctgttcaacaaaggcattgccatctacaagaaggatttcttcctggtgcagaagctgatccagaccaagaccgtggcccagtgcgtggagttctactacacctacaagaagcaggtgaaaatcggccgcaatgggactctaacctttggggatgtggatacgagcgatgagaagtcggcccaggaagaggttgaagtggatattaagacttcccaaaagttcccaagggtgcctcttcccagaagagagtccccaagtgaagagaggctggagcccaagagggaggtgaaggagcccaggaaggagggggaggaggaggtgccagagatccaagagaaggaggagcaggaagaggggcgagagcgcagcaggcgggcagcggcagtcaaagccacgcagacactacaggccaatgagtcggccagtgacatcctcatcctccggagccacgagtccaacgcccctgggtctgccggtggccaggcctcggagaagccaagggaagggacagggaagtcacgaagggcactacctttttcagagaagaagaaaaaaacagagacattcagtaagacccagaatcaggagaacactttcccctgtaaaaaatgtggcagggtgttttacaaggtgaagagccgcagtgcgcatatgaagagccacgcagagcaggagaagaaggctgcagcgctgaggctgaaggagaaagaggccgctgc

SEQ ID NO: 281653 - protein, 514 aa, Artificial Sequence
  derived and/or modified sequence
MSVLGEYERHCDSINSDFGSESGGCGDSSPGPSASQGPRAGGGAFGEATLYRRTEDDSLVVWKEVDLTRLSEKERRDALNEIVILALLQHDNIIAYYNHFMDNTTLLIELEYCNGGNLYDKILRQKDKLFEEEMVVWYLFQIVSAVSCIHKAGILHRDIKTLNIFLTKANLIKLGDYGLAKKLNSEYSMAETLVGTPYYMSPELCQGVKYNFKSDIWAVGCVIFELLTLKRTFDATNPLNLCVKIVQGIRAMEVDSSQYSLELIQMVHSCLDQDPEQRPTADELLDRPLLRKRRREMEEKVTLLNAPTKRPRSSTVTEAPIAVVTSRTSEVYVWGGGKSTPQKLDVIKSGCSARQVCAGNTHFAVVTVEKELYTWVNMQGGTKLHGQLGHGDKASYRQPKHVEKLQGKAIRQVSCGDDFTVCVTDEGQLYAFGSDYYGCMGVDKVAGPEVLEPMQLNFFLSNPVEQVSCGDNHVVVLTRNKEVYSWGCGEYGRGSLVSVHFFTGIQPDFKVVCI

SEQ ID NO: 281654 - DNA, 1545 bp, Artificial Sequence
  derived and/or modified sequence
atgtctgtcctgggggagtacgaaaggcattgcgactctataaatagcgacttcggctctgaatcaggagggtgcggcgatagctctcccggtccttccgcttcacagggcccccgggcaggtgggggggcgttcggcgaggccaccttatatcggcggaccgaggacgactcgctggtagtctggaaagaggtcgacctgactcgtttgtccgagaaggaacgcagagatgccctgaatgagatcgtgatcctggccctgctacagcatgataacattatcgcttattataaccactttatggacaacaccacattgcttattgagctggaatattgtaacggcggaaacttgtacgacaaaattctgcggcagaaggataaactgttcgaggaagagatggttgtgtggtatctctttcagatagtttctgctgttagctgtattcacaaagccgggattttacacagagatatcaagacactcaatatctttttgaccaaagcaaatttgattaaattaggcgattatggcctcgccaagaaactcaacagtgaatatagcatggcagagactctcgtgggcactccctactacatgagtcccgaactgtgtcaaggcgtgaaatacaattttaagagcgatatatgggctgtgggctgcgtcatctttgagctcctcaccctgaaacggacctttgatgcaaccaatccactgaatctttgtgttaaaattgtccagggtatcagggccatggaggtggacagcagccagtactctctcgagctgatccagatggttcattcgtgtctggatcaagatccagaacagaggccgaccgcagatgagctgcttgaccggccactgttaagaaaaaggaggagggagatggaggagaaggtgaccctgctcaacgcgcccacaaagagaccccgttctagcactgttaccgaggcgcccatcgcagtggttacttcacgcacaagcgaggtgtatgtatggggcggaggtaaatctacaccccagaagctggacgtcatcaagtccggttgcagcgcccgccaagtatgcgctggcaatacccacttcgccgttgtgacagtggaaaaagaattgtacacatgggtgaacatgcagggcggcacaaaacttcacgggcaactgggacacggcgacaaggctagctaccgacaacctaagcatgtggaaaagctgcagggaaaggcgattcggcaagtttcttgtggcgatgactttaccgtgtgtgtgacagatgagggacagctatatgcttttgggagcgactactatgggtgtatgggtgttgacaaagttgccggcccagaagtcctagagccaatgcaactgaatttctttctgagtaatcctgtggaacaagtgtcatgcggtgataatcacgtggtcgtcctcacccggaacaaagaggtgtatagttggggttgtggtgagtacgggcggggttcactcgtgtctgtccatttttttacaggcatccagcccgactttaaggtagtctgtatctag

SEQ ID NO: 281655 - DNA, 1545 bp, Artificial Sequence
  derived and/or modified sequence
atgtctgtgctgggggagtatgagcggcactgtgacagcatcaacagcgactttggcagcgagagcggcggctgtggggacagcagccctggccccagcgccagccagggcccccgggccggcggcggggcctttggagaggccaccctgtacagaagaacagaagatgacagcctggtggtgtggaaggaggtggacctgacccggctgtctgagaaggagaggagagatgccctgaatgagatcgtcatcctggccctgctgcagcacgacaacatcatcgcctactacaaccacttcatggacaacaccaccctgctgattgagctggagtactgcaatggaggcaacctgtatgacaagatcctgcggcagaaggacaagctgtttgaggaggagatggtggtgtggtacctgttccagatcgtgtctgctgtgtcctgcatccacaaggccggcatcctgcaccgggacatcaagaccctgaacatcttcctgaccaaggccaacctgatcaagctgggggactatggcctggccaagaagctgaacagcgagtacagcatggccgagaccctggtgggcaccccctactacatgagccctgagctgtgccagggcgtgaagtacaacttcaagagtgacatctgggccgtgggctgtgtgatctttgagctgctgaccctgaagaggacctttgatgccaccaaccccctgaacctgtgtgtgaagatcgtgcagggcatccgggccatggaggtggacagcagccagtacagcctggagctgatccagatggtgcacagctgcctggaccaggaccctgagcagaggcccacagcagatgagctgctggaccggcccctgctgaggaagagaagaagagagatggaggagaaggtgaccctgctgaatgcccccaccaagaggcccaggagcagcacagtgacagaggcccccatcgctgtggtgaccagcaggaccagcgaggtgtatgtgtggggcggcggcaagagcaccccccagaagctggatgtgatcaagagcggctgcagcgcccggcaggtgtgtgccggcaacacccactttgctgtggtgacagtggagaaggagctgtacacctgggtgaacatgcagggcggcaccaagctgcacggccagctgggccacggggacaaggccagctaccggcagcccaagcacgtggagaagctgcagggcaaggccatccggcaggtgtcctgtggagatgacttcaccgtgtgtgtgacagatgagggccagctgtatgccttcggcagtgactactacggctgcatgggcgtggacaaggtggccggccctgaggtgctggagcccatgcagctgaacttcttcctgagcaaccctgtggagcaggtgtcctgtggggacaaccacgtggtggtgctgaccaggaacaaggaggtgtacagctggggctgtggggagtatggccggggcagcctggtgtctgtgcacttcttcaccggcatccagcctgacttcaaggtggtgtgcatctag

SEQ ID NO: 281656 - DNA, 1545 bp, Artificial Sequence
  derived and/or modified sequence
atgagcgtgctgggcgagtacgagcggcactgcgacagcatcaactctgacttcggaagcgagtcaggagggtgtggcgatagctcccccgggccttctgccagccaggggcctagggctggtggcggagcatttggcgaggccacactgtaccggaggaccgaagatgactctctcgtggtctggaaagaggtggaccttaccaggctgtcagagaaagagcggcgggacgcgctgaacgaaattgtgattcttgctttgctgcagcatgataatatcatagcctactataatcatttcatggataacaccacattgcttatcgagcttgagtactgtaacgggggaaacctgtacgataagatcttgcgccagaaggataaactattcgaggaagagatggtagtttggtacctattccaaatcgttagcgcggtatcgtgcatccacaaggcaggaattctgcaccgggatatcaaaacacttaacatcttcctgaccaaagcaaacttgatcaagcttggcgactacggactggccaaaaaattgaatagcgaatacagtatggcagagaccctcgtaggcactccttattatatgtcacctgagctctgtcaaggcgtgaagtacaactttaagagtgacatatgggcagttggctgcgttatatttgagcttcttaccctgaagagaacatttgatgccactaatccgctaaacctgtgcgtgaagattgtgcaagggattagggccatggaagttgacagctcacaatacagcctggaacttattcagatggtgcactcttgcctggatcaggaccctgagcagcgccctaccgccgacgaactcctagaccggcctctgcttagaaagagaaggagggagatggaagaaaaggtaaccctgctcaacgctccaaccaaaaggcccaggtcaagcaccgttactgaggctcctattgcagtagtgacaagccggacatctgaagtgtacgtatggggggggggtaaatcaactccacagaaattagacgtgattaaatcgggctgttctgcccgccaggtgtgtgcaggaaatactcactttgcagtggtgactgtagagaaggaactgtatacctgggtcaatatgcagggaggaaccaagctgcacggacagctcgggcatggggacaaagcttcctatagacagccgaaacacgtggagaagctgcaggggaaggccatacgacaggtgtcctgcggagacgacttcacagtatgtgtcacagacgaggggcagttatatgcctttggctcagactactatggctgcatgggcgtggataaagtggctggcccggaagtgctggagcctatgcaattgaactttttcctgtcaaaccctgtggagcaggtctcatgcggcgacaatcatgtggtcgtgctgacacgtaacaaggaggtgtactcctggggctgcggagaatatggtcgtggatctctggtctcagtgcattttttcactgggattcaaccagactttaaagtggtatgcatttag

SEQ ID NO: 281657 - DNA, 1545 bp, Artificial Sequence
  derived and/or modified sequence
atgtcggtgctgggcgagtacgagcgacactgcgattccatcaactcggactttgggagcgagtccgggggttgcggggactcgagtccggggcctagcgccagtcaggggccgcgagccggcggcggcgccttcggggaagccacgctgtaccgccgcaccgaggatgactcactggttgtgtggaaggaagtcgatttgacccggctgtctgagaaggaacgtcgtgatgccttgaatgagattgttattctggcactgctgcagcacgacaacattattgcctactacaatcacttcatggacaataccacgctgctgattgagctggaatattgtaatggagggaacctgtatgacaaaatccttcgtcagaaggacaagttgtttgaggaagagatggtggtgtggtacctatttcagattgtttcagcagtgagctgcatccataaagctggaatccttcatagagatataaagacattaaatatttttctgaccaaggcaaacctgataaaacttggagattatggcctagcaaagaaacttaattctgagtattccatggctgagacgcttgtgggaaccccatattacatgtctccagagctctgtcaaggagtaaagtacaatttcaagtctgatatctgggcagttggctgcgtcatttttgaactgcttaccttaaagaggacgtttgatgctacaaacccacttaacctgtgtgtgaagatcgtgcaaggaattcgggccatggaagttgactctagccagtactctttggaattgatccaaatggttcattcgtgccttgaccaggatcctgagcagagacctactgcagatgaacttctagatcgccctcttctcaggaaacgcaggagagagatggaggaaaaagtcactctgcttaatgcacctacaaagagaccaaggtcaagcactgtgactgaagcacccattgctgtagtaacatcacgaaccagtgaagtctatgtttggggtggtggaaaatccaccccccagaaactggatgttatcaagagtggctgtagtgcccggcaggtctgtgcagggaatacccactttgctgtggtcacagtggagaaggaactgtacacttgggtgaacatgcaaggaggcactaaactccatggtcagctgggccatggagacaaagcctcctatcgacagccaaagcatgtggaaaagttgcaaggcaaagctatccgtcaggtgtcatgtggtgatgatttcactgtctgtgtgactgatgagggtcagctctatgccttcggatcagattattatggctgcatgggggtggacaaagttgctggccctgaagtgctagaacccatgcagctgaacttcttcctcagcaatccagtggagcaggtctcctgtggagataatcatgtggtggttctgacacgaaacaaggaagtctattcttggggctgtggcgaatatggtaggggtagccttgtctctgtccacttcttcacaggtatacaacctgacttcaaagttgtatgcatctaa

SEQ ID NO: 281658 - DNA, 1545 bp, Artificial Sequence
  derived and/or modified sequence
atgagcgtgctaggcgagtatgaaagacactgcgactctattaacagcgacttcggctccgagtcaggcggatgtggggattcctccccaggaccaagcgccagtcaaggacctagagcgggtgggggtgcatttggggaagctaccctgtacaggcgcaccgaggacgactcccttgtggtgtggaaggaggtggatcttacccgactctcagaaaaggagcgacgcgacgcattgaacgaaattgtgattttggctctacttcagcacgataatattatcgcatattacaatcatttcatggacaatactacgttgctcatcgaactggagtactgcaatgggggtaacctttatgataaaattctgaggcaaaaggacaagttgtttgaggaggagatggtcgtttggtatctgtttcagatagtgtctgctgtctcctgtattcataaggccggaatcctgcaccgagacattaagaccctgaacattttcctcacaaaggccaatctaatcaagcttggcgattatggcttagctaaaaagttgaattcagagtatagcatggctgagacactggtgggcacaccctattacatgagccctgaactgtgtcagggggtgaagtataatttcaaatccgacatttgggccgtcggatgcgttatcttcgaacttctcacgctgaagaggacctttgacgctaccaatcccctcaacctctgtgttaagatcgttcagggtatccgtgccatggaagtcgattccagccaatacagcttggaactcatccagatggtccatagttgtctggaccaagaccctgaacaacggcctacggccgacgaactgcttgataggccattgttacggaaaagacgtcgggagatggaagagaaagtaacccttttaaacgctcctaccaaacgtcccaggagttccactgtcaccgaggcgccaattgcagtcgtgacttcgcgaacttcggaagtgtacgtatggggtggagggaagtctactcctcagaagctcgatgtcatcaaatctggctgctcggcaaggcaggtgtgtgccggaaacacacactttgccgtggtgactgtcgaaaaggaactctacacatgggtgaatatgcagggcggtacaaagctgcacggtcaactgggacatggcgataaggcatcttaccggcaacccaagcacgtagaaaaactgcaggggaaggccatacgtcaagtgtcctgcggggacgattttactgtgtgcgtcacggacgagggtcagttgtatgcatttggatcagattactacggttgtatgggagtagacaaagtcgccggtccagaagtgctggagcctatgcagcttaacttcttcctttcaaaccccgtcgagcaggtttcatgtggtgataaccacgtcgtagtactcactagaaacaaggaagtgtactcttgggggtgcggggagtatggcaggggtagcctggtgagcgtgcacttcttcacgggtattcagcctgacttcaaagtggtgtgcatttag

SEQ ID NO: 281659 - DNA, 1545 bp, Artificial Sequence
  derived and/or modified sequence
atgagcgtgctgggcgagtacgagagacactgcgacagcatcaacagcgacttcggcagcgagagcggcggctgcggcgacagcagccccggccccagcgccagccagggccccagagccggcggcggcgccttcggcgaggccaccctgtacagaagaaccgaggacgacagcctggtggtgtggaaggaggtggacctgaccagactgagcgagaaggagagaagagacgccctgaacgagatcgtgatcctggccctgctgcagcacgacaacatcatcgcctactacaaccacttcatggacaacaccaccctgctgatcgagctggagtactgcaacggcggcaacctgtacgacaagatcctgagacagaaggacaagctgttcgaggaggagatggtggtgtggtacctgttccagatcgtgagcgccgtgagctgcatccacaaggccggcatcctgcacagagacatcaagaccctgaacatcttcctgaccaaggccaacctgatcaagctgggcgactacggcctggccaagaagctgaacagcgagtacagcatggccgagaccctggtgggcaccccctactacatgagccccgagctgtgccagggcgtgaagtacaacttcaagagcgacatctgggccgtgggctgcgtgatcttcgagctgctgaccctgaagagaaccttcgacgccaccaaccccctgaacctgtgcgtgaagatcgtgcagggcatcagagccatggaggtggacagcagccagtacagcctggagctgatccagatggtgcacagctgcctggaccaggaccccgagcagagacccaccgccgacgagctgctggacagacccctgctgagaaagagaagaagagagatggaggagaaggtgaccctgctgaacgcccccaccaagagacccagaagcagcaccgtgaccgaggcccccatcgccgtggtgaccagcagaaccagcgaggtgtacgtgtggggcggcggcaagagcaccccccagaagctggacgtgatcaagagcggctgcagcgccagacaggtgtgcgccggcaacacccacttcgccgtggtgaccgtggagaaggagctgtacacctgggtgaacatgcagggcggcaccaagctgcacggccagctgggccacggcgacaaggccagctacagacagcccaagcacgtggagaagctgcagggcaaggccatcagacaggtgagctgcggcgacgacttcaccgtgtgcgtgaccgacgagggccagctgtacgccttcggcagcgactactacggctgcatgggcgtggacaaggtggccggccccgaggtgctggagcccatgcagctgaacttcttcctgagcaaccccgtggagcaggtgagctgcggcgacaaccacgtggtggtgctgaccagaaacaaggaggtgtacagctggggctgcggcgagtacggcagaggcagcctggtgagcgtgcacttcttcaccggcatccagcccgacttcaaggtggtgtgcatctag

SEQ ID NO: 281660 - DNA, 327 bp, Artificial Sequence
  derived and/or modified sequence
atgctgaccatgagcgtgaccctgagccccctgagaagccaggacctggaccccatggccaccgacgccagccccatggccatcaacatgacccccaccgtggagcagggcgagggcgaggaggccatgaaggacatggacagcgaccagcagtacgagaagcccccccccctgcacaccggcgccgactggaagatcgtgctgcacctgcccgagatcgagacctggctgagaatgaccagcgagagagtgagagacctgacctacagcgtgcagcaggacagcgacagcaagcacgtggacgtgcacctggtgcagctgaagtag

SEQ ID NO: 281661 - DNA, 562 bp, Artificial Sequence
  derived and/or modified sequence
agtattgcatcctacagatgtgctgtaaacatcaaaagaagacggtgggatcaggagatgtttggacagctctttattcagaacatcaaggactgttgacagttgaataaaaagggcggaggcttatgggattgctaatgagatacaaagccaccttggaataaaaataaatttctctctgttggctcctccggccatggagagctgttttggaaagaagtgaggtttagacttctccatgttaaccatgagcgtgacactttcccccctgaggtcacaggacctggatcccatggctactgatgcttcacccatggccatcaacatgacacccactgtggagcagggtgagggagaagaggcaatgaaggacatggactctgaccagcagtatgaaaagccacccccactacacacaggggctgactggaagattgtcctccacttacctgaaattgagacctggctccggatgacctcagagagggtccgagacctaacctattcagtccagcaggattcggacagcaagcatgtggatgtacatctagttcaactaaag

SEQ ID NO: 281662 - DNA, 327 bp, Artificial Sequence
  derived and/or modified sequence
atgctcacgatgtctgtgacccttagccctctgcgctcacaagatctggaccctatggcgacagatgcctctcccatggccattaacatgacacccacagtcgagcagggagaaggcgaagaggccatgaaagatatggatagtgatcagcagtatgaaaagccacctcccctgcacacaggcgctgactggaagattgtgttgcaccttccagagatcgagacctggcttaggatgacctctgagagagtgcgggacctgacgtattccgtgcagcaggattcagatagcaaacatgtggatgtccacttggtacaactgaagtag

SEQ ID NO: 281663 - DNA, 327 bp, Artificial Sequence
  derived and/or modified sequence
atgctgaccatgtctgtgaccctgagccccctgcggagccaggacctggaccccatggccacagatgccagccccatggccatcaacatgacccccaccgtggagcagggcgagggggaggaggccatgaaggacatggacagcgaccagcagtatgagaagcccccacccctgcacactggagctgactggaagatcgtgctgcacctgcctgagattgagacctggctgaggatgaccagcgagcgggtgcgggacctgacctacagcgtgcagcaggacagcgacagcaagcacgtggatgtgcacctggtgcagctgaagtag

SEQ ID NO: 281664 - DNA, 327 bp, Artificial Sequence
  derived and/or modified sequence
atgctgaccatgagcgtgaccctgagccccctgcggagccaggacctggatccgatggccacagatgcatccccaatggccatcaacatgactccaacagttgaacaaggcgagggggaggaagccatgaaagacatggattctgatcagcagtacgaaaaacccccacctctccatactggggccgactggaagatcgtgttgcacttgccagagatcgagacttggctccgaatgacatcagaacgcgtgcgggatctcacttatagcgtgcagcaggatagcgactcaaaacatgtagatgtgcatctcgtgcagctaaaatag

SEQ ID NO: 281665 - DNA, 327 bp, Artificial Sequence
  derived and/or modified sequence
atgctgaccatgtcggtgacactcagtcctctgcggtcacaggacctagaccctatggctaccgatgcttcccctatggcaatcaacatgacgcccacagtagaacagggcgagggggaagaagccatgaaggacatggactccgatcaacagtacgaaaagccacctccactacataccggcgcagactggaagattgtgttgcatctgcccgagattgagacctggcttagaatgacatctgagagggtccgtgatctgacgtattctgtgcagcaggattcagactcgaaacatgtggatgtgcacctggtgcaactgaagtag

SEQ ID NO: 281666 - DNA, 80 bp, Artificial Sequence
  derived and/or modified sequence
gaattaacccgaatagaatggaatggaatggaatggaacagaacggaacggaatggaatggaatggaatggaatggaatg

SEQ ID NO: 281667 - DNA, 78 bp, Artificial Sequence
  derived and/or modified sequence
atggaatcgaatggaatggactggaatggaatggattcgaatggaatcgaatggaacaatatggaatggtaccaaatg

SEQ ID NO: 281668 - DNA, 58 bp, Artificial Sequence
  derived and/or modified sequence
tcttttctctcttatttcccagtgtgtgtgtgtgtatttttctagagcccgcccactc

SEQ ID NO: 281669 - protein, 530 aa, Artificial Sequence
  derived and/or modified sequence
KVRRSQKLDMSARLELQSALEAEIRAKQLVQEELRKVKDANLTLESKLKDSEAKNRELLEEMEILKKKMEEKFRADTGLKLPDFQDSIFEYFNTAPLAHDLTFRTSSASEQETQAPKPEASPSMSVAASEQQEPKAHQFSIKSFSSPTQCSHCTSLMVGLIRQGYACEVCSFACHVSCKDGAPQVCPIPPEQSKRPLGVDVQRGIGTAYKGHVKVPKPTGVKKGWQRAYAVVCDCKLFLYDLPEGKSTQPGVIASQVLDLRDDEFSVSSVLASDVIHATRRDIPCIFRVTASLLGAPSKTSSLLILTENENEKRKWVGILEGLQSILHKNRLRNQVVHVPLEAYDSSLPLIKAILTAAIVDADRIAVGLEEGLYVIEVTRDVIVRAADCKKVHQIELAPREKIVILLCGRNHHVHLYPWSSLDGAEGSFDIKLPETKGCQLMATATLKRNSGTCLFVAVKRLILCYEIQRTKPFHRKFNEIVAPGSVQCLAVLRDRLCVGYPSGFCLLSIQGDGQPLNLVNPNDPSLAFL

SEQ ID NO: 281670 - DNA, 1593 bp, Artificial Sequence
  derived and/or modified sequence
aaggtgcggcgctcccagaaattggatatgagtgctcggcttgaactgcagtctgctctcgaggcagaaatccgggccaagcagttagtccaggaagagctgagaaaggtcaaagacgctaatctgactttggagagcaagctgaaggacagcgaggccaaaaacagggagctgctggaagagatggagatcctgaagaaaaaaatggaggaaaagttcagagcagacaccgggctcaagctgcctgacttccaagacagcatttttgagtatttcaacaccgctccactggcacacgacctaacttttagaacaagtagcgcatcagagcaggaaacccaagcccctaaacctgaggcctcaccttccatgagcgtggcagcaagtgaacaacaggaacctaaggcacaccagtttagcatcaagtctttctcatctccaacacagtgttctcattgcacctcactgatggtgggactcatacggcagggctatgcctgcgaagtttgtagcttcgcttgtcacgtcagctgtaaggatggagcacctcaggtttgtcccatcccacccgagcaatccaagagacccctcggggttgatgtgcagaggggaatcgggacagcttacaaaggacatgtgaaagtccctaaaccaacaggtgttaagaaaggctggcagagagcatacgctgtggtgtgcgattgcaagttgttcttatatgatctgcctgaggggaagagtacccagcccggggtgatcgcctcccaggtactagatcttcgagatgacgagttctcagtcagctccgttctcgcctcagatgtgattcatgctacgaggagggacataccttgtattttcagagtaacagctagcctcctcggcgccccctctaaaacctccagcctgctcatcctcaccgagaatgagaatgaaaaacgcaaatgggtcggcatcctcgagggcctgcagtccatactgcacaagaaccgcttgcggaatcaagtggtgcatgtcccgttggaggcctatgattcatcgctcccactcattaaagccatattaaccgctgctattgttgacgcggatagaatagccgtcggcctggaagagggcctatatgttatcgaagtgactcgagacgtgattgtgagggccgcggattgcaaaaaagtccaccaaatagagctggccccgcgggaaaaaattgtgatcctattgtgcggcagaaatcaccacgtgcacctctatccatggtcatccctcgatggtgcagaaggcagcttcgatatcaagctgcccgaaacaaaggggtgccagctcatggccaccgctaccctcaaacgtaattccgggacttgcctttttgtcgctgtcaagagactgatcctgtgttacgagatccagcggactaagcctttccatcgaaagtttaatgagatcgtcgctccaggctccgtgcagtgcctggctgtcctgagagaccgactgtgcgtgggatacccctctggtttctgtctgctgtcaatccagggtgatggccagccactcaatctcgtcaatcctaatgatccatccttggcatttctgtag

SEQ ID NO: 281671 - DNA, 1593 bp, Artificial Sequence
  derived and/or modified sequence
aaggtgagaagaagccagaagctggacatgtctgcccggctggagctgcagagcgccctggaggccgagatccgggccaagcagctggtgcaggaggagctgaggaaggtgaaggatgccaacctgaccctggagagcaagctgaaggacagcgaggccaagaaccgggagctgctggaggagatggagatcctgaagaagaagatggaggagaagttccgggctgacaccggcctgaagctgcctgacttccaggacagcatctttgagtacttcaacacagcccccctggcccatgacctgaccttccgcaccagcagcgccagcgagcaggagacccaggcccccaagccagaggccagccccagcatgtctgtggccgccagcgagcagcaggagcccaaggcccaccagttcagcatcaagagcttcagcagccccacccagtgcagccactgcaccagcctgatggtgggcctcatccggcagggctacgcctgtgaggtgtgcagctttgcctgccacgtgtcctgcaaggatggagccccccaggtgtgccccatccccccagagcagagcaagaggcccctgggcgtggatgtgcagaggggcattggaacagcctacaagggccacgtgaaggtgcccaagcccactggagtgaagaagggctggcagagggcctatgctgtggtgtgtgactgcaagctgttcctgtatgacctgcctgagggcaagagcacccagcccggggtgattgccagccaggtgctggacctgagagatgatgagttctctgtgtcctctgtgctggccagtgatgtgattcatgccacccggcgggacatcccctgcatcttccgggtgacagccagcctgctgggcgcccccagcaagaccagcagcctgctgatcctgacagaaaatgaaaatgagaagaggaagtgggtgggcatcctggagggcctgcagagcatcctgcacaagaaccggctgaggaaccaggtggtgcacgtgcccctggaggcctatgacagcagcctgcccctcatcaaggccatcctgacagctgccatcgtggatgctgacagaattgctgtgggcctggaggagggcctgtatgtgattgaggtgaccagagatgtgattgtgcgggctgctgactgcaagaaggtgcaccagatcgagctggccccccgggagaagatcgtcatcctgctgtgtggcaggaaccaccacgtgcacctgtacccctggagcagcctggatggagctgagggcagctttgacatcaagctgcctgagaccaagggctgccagctgatggccacagccaccctgaagagaaattctggcacctgcctgtttgtggccgtgaagaggctcatcctgtgctatgagatccagaggaccaagcccttccacaggaagttcaatgaaattgtggcccctggctctgtgcagtgcctggccgtgctgcgggaccggctgtgtgtgggctaccccagcggcttctgcctgctgagcatccagggagatggccagcccctgaacctggtgaaccccaatgaccccagcctggccttcctgtag

SEQ ID NO: 281672 - DNA, 1593 bp, Artificial Sequence
  derived and/or modified sequence
aaggtgcggcggagccagaagctggacatgagcgcccggctggagctgcagagcgccttggaagccgaaatccgtgccaagcaactggtgcaggaagagctgagaaaagtgaaggacgcgaatttaacactggaatccaagttgaaggattctgaggctaagaatagagagcttcttgaggagatggagatcctgaaaaaaaagatggaagagaagttcagggctgacaccgggctgaaactgcctgactttcaggacagtatctttgagtatttcaataccgctcctctggcccatgacctgaccttccgcacctccagtgccagcgagcaggaaacacaggcccctaagcccgaggcatctccttccatgtccgtcgccgctagcgaacagcaggagccaaaggcccaccaattttctatcaagtcgtttagcagcccaacccagtgttcccattgcacctccttaatggtgggcctgatccgacagggctacgcatgcgaggtttgtagtttcgcatgccacgtttcctgcaaggatggggccccccaggtgtgtcccattccaccagaacagtctaaaaggcctttaggagtagatgtccaacgcggcatcggcactgcgtacaagggccatgtcaaggtcccgaaacccactggtgtgaaaaagggatggcagcgtgcctatgcagtagtatgtgattgcaaactcttcctgtacgacctgccagagggcaaaagcactcagcccggagtgatagcttctcaggtcctggacctgcgggacgatgaattttccgtatcttcggtccttgccagcgatgttatacacgccactcggcgggacatcccctgtatctttcgagtcacagccagccttctcggcgcgcccagcaagacctcatccctgctaatactgacagaaaatgaaaacgaaaaaaggaagtgggttgggatattagagggtctgcaaagcatcttgcataagaacagactccggaatcaggtggtgcacgtgcccttggaagcctatgactccagcctgcccctgatcaaggcaatcctcacagctgctatcgtcgacgccgacaggatcgccgtgggcttggaggaggggctgtacgtgattgaagtaaccagagacgtgatcgtccgagcagcagactgtaagaaagttcaccagatcgagttggctccccgcgaaaaaatagttatcctcctgtgtgggagaaaccaccatgtgcatttatatccttggtcatccctggatggagcagagggtagcttcgatattaagctcccagagacgaagggttgccagctcatggccacagctactttgaagcggaacagcggcacttgcctcttcgtggctgttaaacgactgattctgtgttacgaaattcagcgcacgaaacctttccatcgcaagttcaatgaaatcgttgctcctggctctgtacagtgcttggcggtcctcagagaccgactgtgcgtcggttaccccagcgggttctgcttactgtctattcagggcgacggccagcctttaaacttggtgaatcccaacgatcccagcttagccttcctttag

SEQ ID NO: 281673 - DNA, 1593 bp, Artificial Sequence
  derived and/or modified sequence
aaggtgaggaggagccagaagctagacatgtcagcaagattggaactccaatccgctttggaagccgaaattcgcgcaaaacagctcgttcaggaagaacttcggaaggtgaaagatgccaatttaaccctcgagtctaaactgaaagacagcgaagcaaaaaatagggagcttctagaagaaatggagatcctcaaaaaaaagatggaggaaaaatttagagccgacactggcctgaaactgcctgactttcaggacagcatttttgaatattttaacacagctcctctggcacacgatctcactttcaggacatccagcgcctccgagcaggaaactcaggcaccgaaaccagaagccagtccctccatgagcgtggccgcatcagagcagcaagagcctaaagctcatcagttttccattaagtcctttagcagtccaacccagtgttcgcattgcactagcttaatggtgggactgattagacagggctacgcatgtgaggtttgttcgtttgcatgtcatgtttcctgcaaggatggggcacctcaggtgtgccctatcccccctgagcagtctaaaaggcccttgggcgttgatgttcaaagaggaatcggtactgcttacaaaggtcacgtgaaagttcctaagcccaccggagtgaagaagggatggcagagggcatacgccgttgtctgtgactgcaaattattcttatacgacctgcccgaggggaagtctacccagcctggagtgatagcctcccaggtgctggatctaagagacgacgagttttcggtatcctctgtacttgcttctgatgtgatacatgccacccggcgagacatcccctgcattttccgggttaccgcctcactcttgggcgctccatcgaagacaagtagcctcctgattttgacagagaacgaaaacgagaaacgaaagtgggttgggatcttggaggggctacagtcaattttgcacaagaataggttgaggaatcaggtcgtgcacgtgcctctggaggcctacgattcatctctgccactgatcaaggccattctgacagccgctatcgttgacgcggatcgtatcgctgtcggactggaagaaggcctctacgtcatcgaggtcacccgagacgtcatcgttcgtgcagcagattgcaaaaaggtgcaccaaatcgagcttgctcctagagaaaagatcgtaattctgctctgtggccgaaaccaccacgtgcatctttacccttggtcgagtctagacggggcagaaggctcgtttgacattaagctgcctgagaccaaggggtgccagctgatggcaaccgctacactcaagagaaattccggcacttgtctcttcgtcgccgtgaaacgcctgatcttatgttatgagatccagcggacaaagcccttccaccgtaaattcaacgagattgtggctcccggaagcgtgcagtgcttggctgtgctgagggacaggctgtgcgtgggatacccctcaggtttctgcttgttatctatccagggagacggtcagccccttaacttggtgaatcctaacgatccctcactggcatttctgtag

SEQ ID NO: 281674 - DNA, 1592 bp, Artificial Sequence
  derived and/or modified sequence
ggaaggtgcgccgcagccagaagctggacatgtccgcgcggctggagctgcagtcggccctggaggcggagatccgggccaagcagcttgtccaggaggagctcaggaaggtcaaggacgccaacctcaccttggaaagcaaactaaaggattccgaagccaaaaacagagaattattagaagaaatggaaattttgaagaaaaagatggaagaaaaattcagagcagatactgggctcaaacttccagattttcaggattccatttttgagtatttcaacactgctcctcttgcacatgacctgacatttagaaccagctcagctagtgagcaagaaacacaagctccgaagccagaagcgtccccgtcgatgtctgtggctgcatcagagcagcaggagccaaaagctcaccagttcagcatcaagtccttctccagccctactcagtgcagccactgcacctccctgatggttgggctgatccggcagggctacgcctgcgaggtgtgttcctttgcttgccacgtgtcctgcaaagacggtgccccccaggtgtgcccaatacctcccgagcagtccaagaggcctctgggcgtggacgtgcagcgaggcatcggaacagcctacaaaggccatgtcaaggtcccaaagcccacgggggtgaagaagggatggcagcgcgcatatgcagtcgtctgtgactgcaagctcttcctgtatgatctgcctgaaggaaaatccacccagcctggtgtcattgcgagccaagtcttggatctcagagatgacgagttttccgtgagctcagtcctggcctcagatgtcattcatgctacacgccgagatattccatgtatattcagggtgacggcctctctcttaggtgcaccttctaagaccagctcgctgctcattctgacagaaaatgagaatgaaaagaggaagtgggttgggattctagaaggactccagtccatccttcataaaaaccggctgaggaatcaggtcgtgcatgttcccttggaagcctacgacagctcgctgcctctcatcaaggccatcctgacagctgccatcgtggatgcagacaggattgcagtcggcctagaagaagggctctatgtcatagaggtcacccgagatgtgatcgtccgtgccgctgactgtaagaaggtacaccagatcgagcttgctcccagggagaagatcgtaatcctcctctgtggccggaaccaccatgtgcacctctatccgtggtcgtcccttgatggagcggaaggcagctttgacatcaagcttccggaaaccaaaggctgccagctcatggccacggccacactcaagaggaactctggcacctgcctgtttgtggccgtgaaacggctgatcctttgctatgagatccagagaacgaagccattccacagaaagttcaatgagattgtggctcccggcagcgtgcagtgcctggcggtgctcagggacaggctctgtgtgggctacccttctgggttctgcctgctgagcatccagggggacgggcagcctctaaacctggtaaatcccaatgacccctcgcttgcgttcctc

SEQ ID NO: 281675 - DNA, 1593 bp, Artificial Sequence
  derived and/or modified sequence
aaggtgagaagaagccagaagctggacatgagcgccagactggagctgcagagcgccctggaggccgagatcagagccaagcagctggtgcaggaggagctgagaaaggtgaaggacgccaacctgaccctggagagcaagctgaaggacagcgaggccaagaacagagagctgctggaggagatggagatcctgaagaagaagatggaggagaagttcagagccgacaccggcctgaagctgcccgacttccaggacagcatcttcgagtacttcaacaccgcccccctggcccacgacctgaccttcagaaccagcagcgccagcgagcaggagacccaggcccccaagcccgaggccagccccagcatgagcgtggccgccagcgagcagcaggagcccaaggcccaccagttcagcatcaagagcttcagcagccccacccagtgcagccactgcaccagcctgatggtgggcctgatcagacagggctacgcctgcgaggtgtgcagcttcgcctgccacgtgagctgcaaggacggcgccccccaggtgtgccccatcccccccgagcagagcaagagacccctgggcgtggacgtgcagagaggcatcggcaccgcctacaagggccacgtgaaggtgcccaagcccaccggcgtgaagaagggctggcagagagcctacgccgtggtgtgcgactgcaagctgttcctgtacgacctgcccgagggcaagagcacccagcccggcgtgatcgccagccaggtgctggacctgagagacgacgagttcagcgtgagcagcgtgctggccagcgacgtgatccacgccaccagaagagacatcccctgcatcttcagagtgaccgccagcctgctgggcgcccccagcaagaccagcagcctgctgatcctgaccgagaacgagaacgagaagagaaagtgggtgggcatcctggagggcctgcagagcatcctgcacaagaacagactgagaaaccaggtggtgcacgtgcccctggaggcctacgacagcagcctgcccctgatcaaggccatcctgaccgccgccatcgtggacgccgacagaatcgccgtgggcctggaggagggcctgtacgtgatcgaggtgaccagagacgtgatcgtgagagccgccgactgcaagaaggtgcaccagatcgagctggcccccagagagaagatcgtgatcctgctgtgcggcagaaaccaccacgtgcacctgtacccctggagcagcctggacggcgccgagggcagcttcgacatcaagctgcccgagaccaagggctgccagctgatggccaccgccaccctgaagagaaacagcggcacctgcctgttcgtggccgtgaagagactgatcctgtgctacgagatccagagaaccaagcccttccacagaaagttcaacgagatcgtggcccccggcagcgtgcagtgcctggccgtgctgagagacagactgtgcgtgggctaccccagcggcttctgcctgctgagcatccagggcgacggccagcccctgaacctggtgaaccccaacgaccccagcctggccttcctgtag

SEQ ID NO: 281676 - DNA, 1428 bp, Artificial Sequence
  derived and/or modified sequence
atggcgcaaggatcaggcgatcagcgggccgtgggcgtggccgatcctgaagagtcttctcccaacatgatcgtgtactgcaagattgaggatatcattacgaaaatgcaggacgataagactggtggcgtgcccatacggacggttaagagcttcctgtcaaaaataccttctgtcgtaacagggaccgatatcgtccagtggctgatgaagaacctgagtatcgaagatccagtggaagcaatccatcttggctccctgattgccgctcaaggatatatcttccccatttctgatcacgtgttgacaatgaaagatgacggcactttctatcgcttccaggctccctacttttggcccagcaattgttgggagccagaaaatactgactatgcgatctacttatgtaagagaactatgcagaataaagccaggctggaactcgcagattacgaagcggaaaaccttgcccgtttgcagcgagcgttcgcccgtaaatgggagtttatttttatgcaggccgaggcccaggtcaagatcgaccgaaaaaaagacaagacagaaagaaagattttggattcacaagagcgagcgttttgggacgtgcatcgccccgtgccaggatgtgtcaacaccaccgaaatggacatcagaaagtgccggcggctcaaaaatcctcagaaagtgaagaagtctgtttacggcgtgacagaggagagccaggcacagagtccagtgcatgtgctctcccagcccattagaaagacgaccaaagaggacattcgcaagcagattacctttctgaacgctcaaattgacagacactgtctgaaaatgtctaaggtagcagagagcctcatcgcctacactgagcagtatgtcgagtatgacccacttattactccagccgagccatctaatccttggatcagcgacgacgtagctctgtgggatatcgagatgtctaaggaaccgagccagcagagagtcaagagatggggcttctcgttcgacgagatactcaaagaccaggtcggccgcgatcaattccttcgcttcctggaatccgagttttccagcgagaacctgcgtttttggctcgctgtgcaggacctaaagaagcagccactgcaggatgtggctaaacgtgtcgaagaaatttggcaggagttcctggctcccggtgcaccgagcgctatcaatctcgattctcacagctatgaaatcacttctcagaacgtgaaggatggcggaagatacaccttcgaggacgcccaggagcatatttataagctaatgaagtcagattcctatgcccgtttcctacgatccaacgcctatcaagatctgctcctggccaaaaaaaagccagaaagtgagcagggaaggaggacatccctcgagaagttcactcgttccgtcggatag

SEQ ID NO: 281677 - DNA, 1428 bp, Artificial Sequence
  derived and/or modified sequence
atggcccagggcagcggggaccagagagctgtgggcgtggccgaccctgaggagagcagccccaacatgattgtgtactgcaagattgaggacatcatcaccaagatgcaggatgacaagacaggaggagtgcccatcagaacagtgaagagcttcctgagcaagatccccagcgtggtgactggaacagacatcgtgcagtggctgatgaagaacctgagcattgaggaccctgtggaggccatccacctgggcagcctgattgctgcccagggctacatcttccccatcagtgaccacgtgctgaccatgaaggatgatggcaccttctaccgcttccaggccccctacttctggcccagcaactgctgggagccagaaaatacagattatgccatctacctgtgcaagaggaccatgcagaacaaggcccggctggagctggccgactatgaagctgagaacctggcccggctgcagagggcctttgccaggaagtgggagttcatcttcatgcaggccgaggcccaggtgaagattgacaggaagaaggacaagacagagaggaagatcctggacagccaggagcgggccttctgggatgtgcacaggcctgtgcccggctgtgtgaacaccacagagatggacatcagaaaatgtagaaggctgaagaacccccagaaggtgaagaagtctgtgtatggagtgacagaggagagccaggcccagagccctgtgcacgtgctgagccagcccatcaggaagaccaccaaggaggacatcaggaagcagatcaccttcctgaatgcccagattgacagacactgcctgaagatgagcaaggtggccgagagcctgattgcctacacagagcagtatgtggagtatgaccccctcatcaccccagctgagcccagcaacccctggatcagtgatgatgtggccctgtgggacatcgagatgagcaaggagcccagccagcagagggtgaagcgctggggcttctcctttgatgagatcctgaaggaccaggtgggccgggaccagttcctgcgcttcctggagagcgagttcagcagcgagaacctgcgcttctggctggccgtgcaggacctgaagaagcagcccctgcaggatgtggccaagagggtggaggagatctggcaggagttcctggcccctggggcccccagcgccatcaacctggacagccacagctatgagatcaccagccagaatgtgaaggatggcggccgctacacctttgaagatgcccaggagcacatctacaagctgatgaagagtgacagctatgcccgcttcctgcggagcaatgcctaccaggacctgctgctggccaagaagaagccagagagcgagcagggccgccgcaccagcctggagaagttcaccaggtctgtgggctag

SEQ ID NO: 281678 - DNA, 1428 bp, Artificial Sequence
  derived and/or modified sequence
atggcccagggcagcggcgaccagcgggccgtgggcgtggccgacccagaggagtcaagtcccaatatgattgtctactgtaagatagaagatatcatcactaagatgcaggatgataaaactggtggcgtgcccatccgcaccgtgaaaagtttcctcagcaagatcccctcagtcgtgaccggtaccgacattgtgcaatggttgatgaaaaatctaagtatagaagaccccgtcgaagccattcatctcggcagcctgatcgccgctcaggggtatattttccctattagcgatcatgttctgacaatgaaggacgacggtactttttacaggttccaggctccatatttctggcctagcaattgctgggagccagagaacaccgactacgctatttacctttgtaagcgcacaatgcagaacaaagctcgtctagagttggccgactacgaggccgaaaaccttgctagacttcaaagggcgttcgctcgtaaatgggaattcatttttatgcaagccgaagcgcaagttaagattgatcggaagaaggacaaaacagagcggaagatcctcgacagccaggagagggcgttctgggacgtgcataggccagtgccagggtgtgttaacactaccgagatggacatccggaagtgtaggcggctcaagaatccgcagaaggtaaagaaatccgtgtacggagtgaccgaagaaagccaagcccagtcccctgtccatgtgctgagccaaccgatccggaagacgacaaaagaggacatcaggaagcagatcacgttccttaacgcccagattgacagacattgcttgaagatgtccaaggtggccgagtcattaattgcttacacagagcagtacgttgaatatgaccccctgattacaccggccgagccgagcaatccttggatttctgatgacgtcgcattgtgggacattgagatgtcgaaggaaccttcacaacaaagagtcaaaagatggggtttctcttttgacgagattttaaaggatcaggttggccgggatcagttcctgcgcttcctggaatcggagttctcatccgagaacctgaggttctggctggcggttcaagacctaaagaaacagccgcttcaggacgtggctaagagagtcgaggaaatttggcaagaatttttggccccaggcgcaccaagcgcgattaacctggatagtcactcatacgagattactagccagaacgtgaaggatggtggacgctacacatttgaagacgcgcaggagcacatctataaactcatgaaaagcgattcatacgcccgtttcttaaggagcaacgcctatcaggaccttctgctggctaagaaaaagcccgagtcagaacaaggccgcagaaccagtctggagaagttcacacgctccgtgggttag

SEQ ID NO: 281679 - DNA, 1428 bp, Artificial Sequence
  derived and/or modified sequence
atggcacagggttctggagatcagagggcagtaggtgtcgcagatcccgaagaaagcagtcctaatatgattgtctactgcaagattgaggatattattacaaagatgcaagatgataaaacgggaggtgtgcctatcaggactgtgaaaagcttcctcagtaaaattccatctgttgttaccgggacagacatcgtgcagtggctgatgaagaacctgagtatcgaggaccccgttgaggccatccatttgggaagcttaatcgccgctcagggctatatcttccctatctctgaccatgtgttaacaatgaaggacgatggtaccttctacaggttccaggcgccttatttctggcctagcaattgctgggaacccgaaaatactgactacgccatttatctctgtaagcgaacaatgcagaataaagctaggctggaactggctgactacgaggcagagaacttagcgcgattacaacgcgcattcgctcgtaagtgggaatttatctttatgcaagcagaagctcaagtgaagatagataggaaaaaagataaaactgaaagaaagatactggattcccaggaacgggcattttgggacgtgcatcgtcctgtcccgggatgtgtcaacaccactgagatggacatccggaagtgtcgtcggctgaagaatccacagaaagtgaagaagtctgtctacggagttaccgaggagtcacaggctcaatccccagtgcacgtgctctcccagcccatcagaaagaccactaaagaagatataagaaaacagattaccttcctgaacgcgcaaatcgaccgccactgccttaagatgtcaaaagtggcagagagtctcatcgcgtatactgaacagtacgtggaatacgatcccctgattactccggcagaacccagtaatccgtggatttccgacgacgtcgcgctttgggacatcgaaatgtcgaaggaaccttcgcagcagcgagtgaaaaggtggggtttttcctttgatgagattcttaaagaccaggtggggagggatcagttcctgcggtttctggagagcgaattttctagcgaaaacctccgattttggcttgccgttcaggatctcaagaaacaaccgttacaggatgttgccaagcgggtggaggaaatctggcaggagtttttggccccaggcgcacctagcgcaatcaaccttgactcacacagttacgagattacgtcccaaaacgtgaaggatggaggacgctacacttttgaagatgcgcaggagcacatctataagctgatgaaaagcgatagctacgcgagattcctaagatcaaatgcttaccaggatctgttattagccaaaaaaaagcccgaatcggaacagggccgtagaacttccctggagaagttcactcgctcagtgggttag

SEQ ID NO: 281680 - DNA, 1476 bp, Artificial Sequence
  derived and/or modified sequence
atggctcaaggatccggggatcaaagagcagtgggggttgctgacccagaggagagttctccaaacatgatcgtttactgcaaaattgaagacatcattacaaagatgcaagatgacaagacagggggtgtgcccatcagaacagtcaagagctttctctccaaaatccccagtgtcgtcacaggtactgacattgtgcagtggcttatgaagaacctttccattgaggacccagttgaagcaatacacttggggagccttatcgctgcccagggctacatctttccaatctcagaccatgttctcaccatgaaggatgatggcaccttttatcgtttccaggctccgtacttctggccttcgaactgctgggaacctgaaaacactgactatgccatctatctctgtaagaggacaatgcaaaataaagcaaggctggaactggcagattatgaagcagaaaacttagcaagactccagagggcctttgcgaggaagtgggaattcatctttatgcaagcagaagcacaagtaaagattgaccggaaaaaagacaagacagaaaggaaaattttggatagtcaagaacgagccttttgggatgtccacaggcctgtgccaggctgtgtgaacacaacagaaatggatatccgaaaatgtcgacgtttgaagaatccacaaaaggttaaaaagtccgtgtatggcgtgactgaagagtcccaggcacagagcccggtgcatgtactcagccaaccaatcaggaaaacaacaaaagaggacatccggaaacagataacatttttgaacgcacagatcgacagacattgtttgaaaatgtccaaagtggctgaaagtttaattgcctacacggaacaatatgtggaatatgaccctttgataacaccagctgagccatccaacccttggatcagcgatgacgttgctttgtgggacatagagatgagcaaagagcccagccaacagcgagtaaaaagatggggcttctctttcgatgagatattgaaggaccaggtggggcgggaccagtttctacgattcctggagtccgaattcagttcagaaaacctcaggttctggctggctgtccaagatcttaagaaacaacccctacaggatgtggccaagagggtagaagaaatctggcaagagtttctggctccaggggctccaagtgcaatcaacctggattctcacagctatgagataaccagtcaaaatgtcaaagatggagggagatatacatttgaagacgcccaggagcacatctacaagctgatgaagagtgacagctatgcccgcttcctccggtcaaatgcttaccaggatttgctgctggccaagaagaagccagaaagtgagcaaggtcgtagaacttccctagaaaagttcactcgcagtgtgggatgaaaatgcaaaaaagagcaagcggctccctctgcagaaggtgcacccttg

SEQ ID NO: 281681 - DNA, 1428 bp, Artificial Sequence
  derived and/or modified sequence
atggcccagggcagcggcgaccagagagccgtgggcgtggccgaccccgaggagagcagccccaacatgatcgtgtactgcaagatcgaggacatcatcaccaagatgcaggacgacaagaccggcggcgtgcccatcagaaccgtgaagagcttcctgagcaagatccccagcgtggtgaccggcaccgacatcgtgcagtggctgatgaagaacctgagcatcgaggaccccgtggaggccatccacctgggcagcctgatcgccgcccagggctacatcttccccatcagcgaccacgtgctgaccatgaaggacgacggcaccttctacagattccaggccccctacttctggcccagcaactgctgggagcccgagaacaccgactacgccatctacctgtgcaagagaaccatgcagaacaaggccagactggagctggccgactacgaggccgagaacctggccagactgcagagagccttcgccagaaagtgggagttcatcttcatgcaggccgaggcccaggtgaagatcgacagaaagaaggacaagaccgagagaaagatcctggacagccaggagagagccttctgggacgtgcacagacccgtgcccggctgcgtgaacaccaccgagatggacatcagaaagtgcagaagactgaagaacccccagaaggtgaagaagagcgtgtacggcgtgaccgaggagagccaggcccagagccccgtgcacgtgctgagccagcccatcagaaagaccaccaaggaggacatcagaaagcagatcaccttcctgaacgcccagatcgacagacactgcctgaagatgagcaaggtggccgagagcctgatcgcctacaccgagcagtacgtggagtacgaccccctgatcacccccgccgagcccagcaacccctggatcagcgacgacgtggccctgtgggacatcgagatgagcaaggagcccagccagcagagagtgaagagatggggcttcagcttcgacgagatcctgaaggaccaggtgggcagagaccagttcctgagattcctggagagcgagttcagcagcgagaacctgagattctggctggccgtgcaggacctgaagaagcagcccctgcaggacgtggccaagagagtggaggagatctggcaggagttcctggcccccggcgcccccagcgccatcaacctggacagccacagctacgagatcaccagccagaacgtgaaggacggcggcagatacaccttcgaggacgcccaggagcacatctacaagctgatgaagagcgacagctacgccagattcctgagaagcaacgcctaccaggacctgctgctggccaagaagaagcccgagagcgagcagggcagaagaaccagcctggagaagttcaccagaagcgtgggctag

SEQ ID NO: 281682 - protein, 472 aa, Artificial Sequence
  derived and/or modified sequence
MAQGSGDQRAVGVADPEESSPNMIVYCKIEDIITKMQDDKTGGVPIRTVKSFLSKIPSVVTGTDIVQWLMKNLSIEDPVEAIHLGSLIAAQGYIFPISDHVLTMKDDGTFYRFQAPYFWPSNCWEPENTDYAIYLCKRTMQNKARLELADYEAENLARLQRAFARKWEFIFMQAEAQVKIDRKKDKTERKILDSQERAFWDVHRPVPGCVNTTEMDIRKCRRLKNPQKVKKSVYGVTEESQAQSPVHVLSQPIRKTTKEDIRKQITFLNAQIDRHCLKMSKVAESLIAYTEQYVEYDPLITPAEPSNPWISDDVALWDIEMSKEPSQQRVKRWGFSFDEILKDQVGRDQFLRFLESEFSSENLRFWLAVQDLKKQPLQDVAKRVEEIWQEFLAPGAPSAINLDSHSYEITSQNVKDGGRYTFEDAQEHIYKLMKSDSYARFLRSNAYQDLLLAKKKGKSLAGKRLTGLMQSS

SEQ ID NO: 281683 - DNA, 1419 bp, Artificial Sequence
  derived and/or modified sequence
atggcccagggttccggtgaccagagggccgtcggtgtggctgacccggaggagagcagccctaatatgattgtttattgcaagatagaagacatcatcactaagatgcaggatgataaaaccggcggagttcctattcggactgtaaaatcatttctaagcaaaatccccagcgtggttactggaactgacatcgtccagtggctgatgaaaaatctgtctattgaagatccagttgaggcaatacacttgggtagtctcattgctgcccagggatatatattccctatttccgaccacgttctgacaatgaaggacgatgggacattctatagatttcaagcaccatacttctggccttcaaactgctgggagccagaaaataccgattacgcgatttacttgtgcaagagaacaatgcagaacaaagcccggctggagcttgcagactatgaggctgagaatctggccagactccagagggctttcgcccgaaaatgggagttcatttttatgcaggctgaagcacaagtgaaaatagaccgcaaaaaagataaaacggaacgaaaaattctggactcgcaggaaagggccttctgggatgtacacagaccagtgcctggttgtgtgaacacaaccgaaatggatattagaaagtgtagaaggctcaagaacccccagaaagtcaaaaaatccgtgtacggggtgaccgaggagagccaggcgcaaagccctgtgcacgtgcttagccagccgatccggaaaactacgaaggaggacattcgcaaacagatcacattcctgaacgctcaaatcgaccgacattgtctcaagatgtcaaaagtggctgaatctctgatcgcttacacagagcaatatgtcgaatatgatcccctaatcacccctgccgaacccagtaacccatggattagcgatgacgtggctctctgggacattgagatgagcaaggagccaagccagcagcgggtgaaaagatgggggttctcctttgatgagatcctcaaggatcaggtagggagggaccaattcctgagattcctggagagcgagttctcatccgaaaacctccgcttctggctggccgtacaggacctaaaaaagcagccacttcaggacgtcgctaagcgagttgaagagatttggcaggagttcctcgctcccggggcaccatctgccattaacttagactcacattcatacgaaatcacgagccagaacgtaaaagacggcggtcgttatacctttgaggatgcccaggagcatatttataaactaatgaaatccgacagttacgctagattcctccggagcaacgcttatcaggatcttctcctggctaagaaaaaaggcaaaagcctggccgggaagcggctcaccggcttaatgcagagtagctag

SEQ ID NO: 281684 - DNA, 1419 bp, Artificial Sequence
  derived and/or modified sequence
atggcccagggttctggggatcagcgggcagtcggcgtcgcagacccagaggagagctctcccaatatgatcgtctattgcaaaattgaagacataatcacaaaaatgcaagacgataaaaccggcggggtgccaatacgcacagtgaaatccttcctgtctaagattccgagcgtggtgacgggaacagatattgtgcagtggctaatgaaaaatttatctatagaagaccctgttgaggccatacaccttggcagtctgatcgcggcccagggatacattttcccaatctcagaccacgtcctgacaatgaaagatgacggaactttttaccggtttcaagctccatatttttggccatctaactgttgggagccagaaaacaccgactatgctatttacttgtgcaagcgcactatgcagaacaaagccagactcgagctagctgattacgaagctgagaatctagcgcgactgcagcgggcatttgcccgcaaatgggagttcatctttatgcaggcagaggctcaggttaagattgaccgcaagaaggataagacggagcgaaaaatcctggacagtcaagagagggcattttgggacgttcacaggcctgtgccgggttgcgttaatactacagagatggacattagaaagtgcaggagactgaagaatccccagaaggtgaagaagtccgtgtatggagtcactgaagaaagtcaggcacagagtccagtacacgtcctatcccaacctattcggaaaaccaccaaagaggacattaggaagcagattacatttctgaatgcacagatcgaccggcactgtctaaaaatgagtaaggtggctgaatctctgatcgcctacaccgagcaatatgtagagtatgaccctcttattacacctgccgagccctccaacccttggattagcgacgacgtggcactctgggacatcgagatgagcaaagagccttcccaacaaagagtgaagaggtgggggttctcattcgacgagatcctgaaggaccaggtggggagagaccagttcctgagattcctggagtccgagttttcttccgagaacctccgcttttggctggccgttcaggatttaaaaaagcagcctctgcaagatgttgccaaaagggtcgaggaaatctggcaggagttcctggcccctggcgccccatccgctattaacttggattcacactcttacgagatcacctctcagaacgtgaaggacggagggcggtataccttcgaggatgcccaggagcatatctataagctcatgaaatctgattcttacgcccgcttcctgaggtccaatgcataccaggatttgcttctggccaagaaaaagggcaagagcttagctggaaaacggttaactggattgatgcaatccagctag

SEQ ID NO: 281685 - DNA, 1419 bp, Artificial Sequence
  derived and/or modified sequence
atggcccaggggagcggcgaccaacgcgcagtcggtgtggcagacccagaggagtcctctcctaacatgatcgtttactgcaaaattgaggatataataacaaaaatgcaggatgacaaaaccgggggcgttccaatccgcactgtgaaatcgttcctctccaaaattccctccgtggtgactggaaccgacatcgtgcagtggctgatgaaaaacctctctatagaagatcccgtggaggccattcacttaggcagtttaattgctgcccaaggatacatcttcccaatctcagaccatgtgctcacaatgaaggacgacggaaccttctatcgctttcaagcgccatatttttggccatctaactgttgggagcctgagaatacagactacgccatctacttgtgtaagagaactatgcaaaacaaagccaggttagaactcgcagactatgaagcagagaatctcgcaagattgcagagggctttcgcaaggaagtgggagttcatattcatgcaggcagaagcccaagtgaaaatcgataggaagaaggataaaaccgagcgcaagattctcgactcgcaggaaagagcattctgggacgtacatagacctgtaccagggtgcgtgaacacaacagaaatggacatacgaaagtgcagaaggctgaagaacccgcagaaagtgaagaaatccgtgtatggcgtgaccgaggagtctcaggctcagagccctgtccacgtgctcagccagcctataagaaagactacgaaggaggatattcggaaacaaattacattcctcaatgctcagattgaccgacactgcctgaaaatgtcaaaagtcgctgaaagtctcatcgcatacacagaacagtatgtggagtacgatcccctcatcacccctgccgaaccctccaacccctggatttccgacgatgtggcgctatgggacattgagatgagcaaggagccatctcagcaacgcgtgaagcgctggggcttctcctttgatgaaatcttgaaggatcaagtcggaagggaccagttcttgcggttcctagagtctgagttcagttccgagaacttaaggttttggttggcggtgcaggatctgaaaaaacaaccccttcaggatgtggccaaaagagtcgaggagatatggcaagaattcctggcccctggagcccctagcgccatcaacctcgattctcactcctacgaaattactagtcagaatgtgaaagacggggggcgatacacctttgaagacgcgcaagagcacatctacaagctgatgaagtcagattcctatgccaggtttctcaggtcgaacgcctatcaggatttgctactcgcaaagaaaaaggggaagtctctggctggcaaacgcttgaccggcctaatgcagtcaagctag

SEQ ID NO: 281686 - DNA, 1419 bp, Artificial Sequence
  derived and/or modified sequence
atggcccagggcagcggggaccagagagctgtgggcgtggccgaccctgaggagagcagccccaacatgattgtgtactgcaagattgaggacatcatcaccaagatgcaggatgacaagacaggaggagtgcccatcagaacagtgaagagcttcctgagcaagatccccagcgtggtgactggaacagacatcgtgcagtggctgatgaagaacctgagcattgaggaccctgtggaggccatccacctgggcagcctgattgctgcccagggctacatcttccccatcagtgaccacgtgctgaccatgaaggatgatggcaccttctaccgcttccaggccccctacttctggcccagcaactgctgggagccagaaaatacagattatgccatctacctgtgcaagaggaccatgcagaacaaggcccggctggagctggccgactatgaagctgagaacctggcccggctgcagagggcctttgccaggaagtgggagttcatcttcatgcaggccgaggcccaggtgaagattgacaggaagaaggacaagacagagaggaagatcctggacagccaggagcgggccttctgggatgtgcacaggcctgtgcccggctgtgtgaacaccacagagatggacatcagaaaatgtagaaggctgaagaacccccagaaggtgaagaagtctgtgtatggagtgacagaggagagccaggcccagagccctgtgcacgtgctgagccagcccatcaggaagaccaccaaggaggacatcaggaagcagatcaccttcctgaatgcccagattgacagacactgcctgaagatgagcaaggtggccgagagcctgattgcctacacagagcagtatgtggagtatgaccccctcatcaccccagctgagcccagcaacccctggatcagtgatgatgtggccctgtgggacatcgagatgagcaaggagcccagccagcagagggtgaagcgctggggcttctcctttgatgagatcctgaaggaccaggtgggccgggaccagttcctgcgcttcctggagagcgagttcagcagcgagaacctgcgcttctggctggccgtgcaggacctgaagaagcagcccctgcaggatgtggccaagagggtggaggagatctggcaggagttcctggcccctggggcccccagcgccatcaacctggacagccacagctatgagatcaccagccagaatgtgaaggatggcggccgctacacctttgaagatgcccaggagcacatctacaagctgatgaagagtgacagctatgcccgcttcctgcggagcaatgcctaccaggacctgctgctggccaagaagaagggcaagagcctggccggcaagaggctgaccggcctgatgcagagcagctag

SEQ ID NO: 281687 - DNA, 1419 bp, Artificial Sequence
  derived and/or modified sequence
atggcccagggcagcggcgaccagcgggccgtgggcgtggccgacccagaggagtcgtctcccaacatgatagtctactgtaagatcgaggatattatcaccaaaatgcaagacgacaagacaggaggcgtgcccatccgcacggtcaagtcctttctaagtaaaattcctagtgtggtgacagggaccgatattgtacaatggctgatgaaaaaccttagcatcgaggaccccgttgaggctatccacttagggagcctcattgcggcccagggctacatcttcccaattagcgatcacgttctcactatgaaggatgacggaacattttaccggttccaggcgccctatttctggccatccaactgctgggaaccagaaaacaccgattatgccatctatctgtgcaaacgcactatgcagaataaggcccgcctcgaattggcggattacgaagctgagaatttggcccgcctccaaagagcctttgccagaaaatgggagttcatcttcatgcaggcagaggctcaggtgaagatcgaccgtaaaaaggacaaaaccgagaggaaaattcttgactcacaggagagagccttttgggacgtgcaccgcccagtgcccggctgcgttaacaccactgagatggacattaggaaatgccgccgtttgaaaaatccacagaaggtcaaaaaaagcgtttatggtgtcactgaagagtcgcaggcacaatcacccgtgcacgttctctcccagccaattagaaaaacaactaaggaggacatacggaagcaaattacatttctaaacgcgcagattgacaggcattgtctgaagatgtccaaagttgctgagtccttgattgcctacaccgaacagtacgtcgagtatgatcctctcatcaccccagcggagccaagcaacccctggatcagtgacgatgtagccctttgggacattgaaatgtctaaggaaccgtcacagcaacgagtgaaacgttggggattctcctttgatgaaatcctgaaagaccaagttggaagagatcagttcctaaggtttcttgagtccgagttctcatcagagaaccttaggttttggctagctgtgcaggatctaaagaagcagcctttgcaggacgttgccaagagggtggaggaaatttggcaggagtttttagccccaggcgcccctagtgcgatcaatctggactctcatagttacgaaatcacgtcacaaaacgtcaaagatgggggcaggtacacattcgaggacgctcaggaacatatctacaaactgatgaagagcgattcatacgcaagattcctgagaagtaacgcttaccaggacctcctgctggccaagaaaaaaggaaagagcttagccggaaaacgcttgacaggcttgatgcagtcctcgtag

SEQ ID NO: 281688 - DNA, 1419 bp, Artificial Sequence
  derived and/or modified sequence
atggcccagggcagcggcgaccagcgggccgtgggcgtggccgacccagaagagtccagtccgaacatgatcgtgtactgcaaaatcgaggatatcatcactaagatgcaggatgataaaactgggggcgttcccattcggacagtcaaatccttcctgtcaaaaattccctccgtggttactggtaccgacatagtccagtggctcatgaaaaacctctctatcgaggacccagtggaagccatccatttgggtagcctaatagccgctcaggggtatatctttcctatcagtgaccatgtgctcactatgaaagatgacggaaccttctataggttccaagcaccctatttctggccctccaattgttgggaacctgagaatacggactatgcaatttacttgtgtaagcggacaatgcagaataaagctcgtctggaactagcagattacgaagctgagaacctggcacgactccagcgcgcatttgcccgtaaatgggagttcatttttatgcaagccgaggctcaagtaaaaattgatcggaagaaggacaagactgaacgcaagattctggacagtcaggaacgtgcattctgggacgtgcacagacctgtccctggctgcgttaatacgacagaaatggacattcgcaagtgccgccggctgaagaatccacagaaggtaaagaagtccgtgtacggtgtgaccgaggaaagtcaggcacagagtcccgtccatgtgctgtcccagccgattcggaagaccactaaggaagacattcgcaagcagataacatttttgaacgcacaaatcgataggcattgcctaaagatgagtaaggtggccgagagtctgattgcgtacactgaacagtatgtagagtacgacccactaataaccccagccgagccaagcaacccttggatttccgacgatgtagccctctgggacatcgagatgagtaaagaaccttctcagcagagagtgaagaggtggggattttcgttcgacgaaatacttaaggaccaagtaggcagggaccagtttctgcgatttcttgagagcgagttcagtagcgagaatctcaggttctggctcgccgtccaggacctgaaaaaacaaccactgcaagacgtggctaagcgggtggaggagatttggcaggagtttctcgcccccggcgcccccagtgcaatcaacctggactctcacagctatgagatcacatctcagaacgtaaaagacgggggacgatacacctttgaggacgctcaggagcatatctataagttaatgaagtccgacagctatgcacgctttcttcgtagcaatgcctatcaagacctgctcctcgcaaagaagaaggggaaatctctggcaggaaagaggttgaccggcctgatgcagtccagttag

SEQ ID NO: 281689 - DNA, 1419 bp, Artificial Sequence
  derived and/or modified sequence
atggcccagggcagcggcgaccagcgggccgtgggcgtggccgaccccgaggagagtagccccaacatgatcgtctactgtaagatcgaagatatcataacaaaaatgcaggatgataaaacaggcggagtccccattcggactgtgaaatcattcttgtcgaagattccaagcgtcgtgactggaacagatattgttcagtggctcatgaaaaacttaagcatcgaggaccctgtagaagctattcatttgggaagtctcatagccgcccagggttatatcttcccgataagcgaccatgtgttaacaatgaaggatgatgggacattctatcgttttcaggctccctacttctggccttctaactgttgggaacccgagaacacggattacgctatctacctctgtaaacggactatgcaaaacaaggcgcggctggagttggccgattacgaagcagaaaatctggctcggctacagagagcctttgcacggaagtgggagttcattttcatgcaggccgaagcacaggtcaagattgaccggaagaaagacaagaccgagaggaagatactggatagtcaggagcgggccttttgggatgtgcatagaccagtacccggctgtgtgaacacaactgaaatggatattcgaaaatgccgaaggcttaaaaatccacagaaggttaaaaagagcgtgtacggcgttactgaggagagccaggcgcagtcacctgtgcacgtcttgtcccaacccatccgaaagaccactaaggaagacattcggaaacagatcaccttcctcaacgcccagatagaccgccactgtctaaagatgtctaaggtggcagagtcgctcatcgcttataccgaacagtacgtggagtatgatcctttaattacaccagccgagccttcaaacccttggatcagtgacgacgtggccttatgggacatcgagatgagtaaagaacctagtcagcagagagtcaaaaggtggggcttttccttcgacgagatcttaaaggaccaagtaggccgtgatcagttccttcgtttcctggaaagcgagttcagttccgaaaacctaaggttttggttagccgtgcaagacctgaaaaagcagccacttcaggatgtggccaagagagtggaggagatctggcaggagttcctcgctccaggcgccccaagtgccatcaacctcgattcacactcgtacgagatcacaagccaaaatgtgaaagacgggggcaggtatacttttgaggacgcccaggagcatatatacaagcttatgaagtcagatagttacgcgaggttccttagatcgaacgcctatcaggatctgctccttgccaagaaaaaaggcaaatccctcgctgggaagcgactaaccgggctgatgcaatcgagctag

SEQ ID NO: 281690 - DNA, 1419 bp, Artificial Sequence
  derived and/or modified sequence
atggcccagggatcgggggatcagcgagccgttggcgttgccgatcctgaggagtcctctccgaatatgattgtgtattgtaagatcgaggacattatcacgaagatgcaagacgacaagacaggcggtgtgcccattcgcaccgtcaagtcctttttgtcgaaaattccatcagtggtgaccgggaccgacatcgtacagtggctgatgaaaaatctcagcattgaggatccagtagaggcaatccacttaggtagtctgattgcagctcaaggctatattttccccataagtgaccacgtgctaacaatgaaagacgacggcactttctatcggttccaggctccttatttttggccatccaattgttgggaacccgaaaatacagactacgccatctatttgtgcaaaagaacgatgcaaaacaaagcacggcttgaactggccgactacgaagcagagaatctcgcaaggctgcagcgggctttcgcccgtaagtgggagttcatctttatgcaggcagaggcacaggttaaaattgatagaaagaaggataagaccgaaaggaagattctggacagccaggagcgagcattctgggatgtgcatcggcctgtgccaggatgtgtgaatactacggaaatggatatacgcaagtgtaggcgcctcaaaaatccccaaaaagtcaaaaagtcggtgtatggcgtaaccgaggagtctcaggctcagtctcccgtgcacgtactgtctcagccgatacggaaaacaaccaaagaggacataaggaaacaaatcaccttcctgaatgctcaaattgaccgccactgtctgaagatgtccaaagtggccgagtcacttattgcctatactgaacagtacgtagagtacgacccactcattacgcctgcagagccatccaatccttggatcagtgatgacgtagccctgtgggacatagaaatgagcaaagagcccagccagcaacgcgtgaaaaggtggggtttcagtttcgacgaaattctgaaagatcaagtcgggagggatcagtttcttagattcttggagtcagagttttcgagcgaaaacctgcgattttggttagctgttcaggacctgaaaaaacagccactgcaagatgtagcgaaacgcgtggaagagatctggcaggaattcctcgcccctggagcaccctcggctatcaatctggattcgcacagctatgaaatcaccagccagaacgtgaaggacggaggacggtacacctttgaggacgcacaagaacacatctataagctcatgaagtctgactcgtatgccagatttcttaggtctaatgcctatcaagacttacttctcgccaagaaaaaagggaagtcgttggccggtaaaaggctgacgggtcttatgcagtcttcatag

SEQ ID NO: 281691 - DNA, 1419 bp, Artificial Sequence
  derived and/or modified sequence
atggcccaaggaagcggagaccagagggctgtaggggtggctgacccagaagagagctctccgaatatgatcgtatactgtaagatcgaagatatcatcaccaagatgcaggacgataagacaggtggagtgcctatacgtaccgtcaagtcatttctttcaaagatcccttccgtggtgacggggactgatatagtgcagtggctaatgaagaacctgtccatcgaggatccagtggaagccattcatctgggtagccttatcgccgctcaagggtatatcttccctatcagcgatcatgtcctcacaatgaaagatgatggcaccttttatcgttttcaggccccatacttttggccatccaactgttgggagcctgaaaatacagattatgcgatctatctttgcaaacgcacaatgcagaacaaagcaaggctggaactggcagattacgaagctgaaaatctggctcgactacagagggctttcgcgcgtaagtgggaatttattttcatgcaggctgaagcccaagtcaagatagacaggaagaaagacaagacggagcgcaaaatcctagatagccaagagagagcgttttgggacgtacaccggccagtaccaggatgtgtgaataccaccgaaatggatattcggaagtgcaggcgtctaaagaacccccagaaggttaagaaatcagtctatggcgttaccgaagagtctcaggctcaatctccagtacacgtccttagtcagccaattcgcaaaactactaaggaggatatccggaagcagattactttcctgaatgcacagatcgaccggcattgcctcaaaatgtcaaaggttgctgagtctctgatagcatacaccgagcagtacgtggagtacgaccctcttatcactcccgctgagccctccaacccctggataagtgatgacgtggccctgtgggatatagagatgtccaaggagccttctcagcagagagtaaaacgctggggtttttctttcgatgaaattttgaaagaccaggtcggacgcgatcagttcctaagattccttgagtccgagttttcctctgagaatttgagattctggctggccgtgcaggacttgaaaaaacaaccactccaagacgttgcaaaacgtgtcgaggagatctggcaggagttcttggcccctggcgcaccttccgctataaacttggactctcactcgtacgagatcaccagccagaatgtaaaggacggtggccgttatacattcgaagatgcccaagaacatatatacaaactgatgaaatctgatagttatgccagatttttacgaagcaacgcctaccaggaccttctactcgcaaaaaagaaaggcaagtcactcgctggaaaaaggctgaccggcctgatgcagagcagctag

SEQ ID NO: 281692 - DNA, 1419 bp, Artificial Sequence
  derived and/or modified sequence
atggcccaaggatccggcgaccagcgtgctgtcggagtagcggaccccgaggagagcagcccaaacatgatagtttactgcaaaatcgaggacatcatcactaagatgcaggatgacaaaacggggggagtccccatcaggaccgtgaagtcctttctaagtaagattcccagtgtggttaccggcaccgatatcgtccagtggctcatgaagaatctctctatcgaagaccctgtggaagccatccatttaggatctctcatcgccgctcaaggctatatcttcccgatcagcgatcatgttctcacgatgaaagatgacgggaccttctatcggttccaggccccttatttctggccctctaattgctgggagccggaaaacaccgactatgctatctacctgtgcaaacggacgatgcagaataaagcccgactggaacttgcggactatgaagccgaaaatctcgcccgactccagcgagcattcgcgcgtaaatgggagtttatcttcatgcaggccgaggcccaggttaaaattgacagaaagaaggacaagactgaacgtaagattctggactcccaagagcgggcattctgggacgtccataggccagtgccagggtgcgtgaatacaaccgagatggacatccgcaaatgccgccgactgaagaacccgcagaaggtcaagaaatccgtatatggcgttacagaagaatcacaggcccagtctcctgtgcacgtgctctcccagcccatcagaaaaactactaaggaagacatacgcaagcagatcacgttccttaatgcccagattgaccgacattgtctgaagatgtcgaaagtggcagagagtctcatcgcctacaccgagcaatacgtggagtacgatcctcttataaccccagccgaaccttccaacccctggatatccgatgatgtggctctctgggacattgaaatgtccaaggaaccctcacagcagagagtgaaaaggtggggcttctccttcgatgagattcttaaagaccaggtggggcgagaccagtttctccgctttctcgagtccgaattcagttctgagaatctgaggttctggctcgctgtgcaggatctaaaaaaacagccactccaggacgtggcaaagcgcgtggaagagatatggcaggagttcctagcacctggagccccttccgccataaacctcgatagccactcgtacgagatcacctcccaaaatgtgaaagacgggggaagatacacgttcgaggacgcacaggaacatatctacaaactgatgaaaagcgactcgtacgcccgatttctgcgatctaacgcctatcaggacctgcttctggctaaaaaaaaggggaaaagcctggccggaaaaaggctcaccggcttaatgcagtcatcttag

SEQ ID NO: 281693 - DNA, 1419 bp, Artificial Sequence
  derived and/or modified sequence
atggctcaaggatccggggatcaaagagcagtgggggttgctgacccagaggagagttctccaaacatgatcgtttactgcaaaattgaagacatcattacaaagatgcaagatgacaagacagggggtgtgcccatcagaacagtcaagagctttctctccaaaatccccagtgtcgtcacaggtactgacattgtgcagtggcttatgaagaacctttccattgaggacccagttgaagcaatacacttggggagccttatcgctgcccagggctacatctttccaatctcagaccatgttctcaccatgaaggatgatggcaccttttatcgtttccaggctccgtacttctggccttcgaactgctgggaacctgaaaacactgactatgccatctatctctgtaagaggacaatgcaaaataaagcaaggctggaactggcagattatgaagcagaaaacttagcaagactccagagggcctttgcgaggaagtgggaattcatctttatgcaagcagaagcacaagtaaagattgaccggaaaaaagacaagacagaaaggaaaattttggatagtcaagaacgagccttttgggatgtccacaggcctgtgccaggctgtgtgaacacaacagaaatggatatccgaaaatgtcgacgtttgaagaatccacaaaaggttaaaaagtccgtgtatggcgtgactgaagagtcccaggcacagagcccggtgcatgtactcagccaaccaatcaggaaaacaacaaaagaggacatccggaaacagataacatttttgaacgcacagatcgacagacattgtttgaaaatgtccaaagtggctgaaagtttaattgcctacacggaacaatatgtggaatatgaccctttgataacaccagctgagccatccaacccttggatcagcgatgacgttgctttgtgggacatagagatgagcaaagagcccagccaacagcgagtaaaaagatggggcttctctttcgatgagatattgaaggaccaggtggggcgggaccagtttctacgattcctggagtccgaattcagttcagaaaacctcaggttctggctggctgtccaagatcttaagaaacaacccctacaggatgtggccaagagggtagaagaaatctggcaagagtttctggctccaggggctccaagtgcaatcaacctggattctcacagctatgagataaccagtcaaaatgtcaaagatggagggagatatacatttgaagacgcccaggagcacatctacaagctgatgaagagtgacagctatgcccgcttcctccggtcaaatgcttaccaggatttgctgctggccaagaagaagggaaagtcgctggcgggcaagcgcctcacgggcctgatgcagtcctcctga

SEQ ID NO: 281694 - DNA, 3105 bp, Artificial Sequence
  derived and/or modified sequence
gactgtggaagcacgagcttacataagtggttaggcaagctggcgtgtggacttgtgtgggatgggtgcaggtctgcatataaatcatgttcctgggtttctgggtgtgaagcgcacaccgacggggacgagagcgcagaggatggcgcttttagatacttccagtcttccgatgttgtgatcgcagtgtgagtgaagacactcaggatggctcaaggatccggggatcaaagagcagtgggggttgctgacccagaggagagttctccaaacatgatcgtttactgcaaaattgaagacatcattacaaagatgcaagatgacaagacagggggtgtgcccatcagaacagtcaagagctttctctccaaaatccccagtgtcgtcacaggtactgacattgtgcagtggcttatgaagaacctttccattgaggacccagttgaagcaatacacttggggagccttatcgctgcccagggctacatctttccaatctcagaccatgttctcaccatgaaggatgatggcaccttttatcgtttccaggctccgtacttctggccttcgaactgctgggaacctgaaaacactgactatgccatctatctctgtaagaggacaatgcaaaataaagcaaggctggaactggcagattatgaagcagaaaacttagcaagactccagagggcctttgcgaggaagtgggaattcatctttatgcaagcagaagcacaagtaaagattgaccggaaaaaagacaagacagaaaggaaaattttggatagtcaagaacgagccttttgggatgtccacaggcctgtgccaggctgtgtgaacacaacagaaatggatatccgaaaatgtcgacgtttgaagaatccacaaaaggttaaaaagtccgtgtatggcgtgactgaagagtcccaggcacagagcccggtgcatgtactcagccaaccaatcaggaaaacaacaaaagaggacatccggaaacagataacatttttgaacgcacagatcgacagacattgtttgaaaatgtccaaagtggctgaaagtttaattgcctacacggaacaatatgtggaatatgaccctttgataacaccagctgagccatccaacccttggatcagcgatgacgttgctttgtgggacatagagatgagcaaagagcccagccaacagcgagtaaaaagatggggcttctctttcgatgagatattgaaggaccaggtggggcgggaccagtttctacgattcctggagtccgaattcagttcagaaaacctcaggttctggctggctgtccaagatcttaagaaacaacccctacaggatgtggccaagagggtagaagaaatctggcaagagtttctggctccaggggctccaagtgcaatcaacctggattctcacagctatgagataaccagtcaaaatgtcaaagatggagggagatatacatttgaagacgcccaggagcacatctacaagctgatgaagagtgacagctatgcccgcttcctccggtcaaatgcttaccaggatttgctgctggccaagaagaagggaaagtcgctggcgggcaagcgcctcacgggcctgatgcagtcctcctgaccgttcctaccgcaggtccagggcctgggcccgcggaccccacaggcaggcggcggcgctccacatctgcggacagagtttccttacgaggagacttggtcactgtgaaggagaaagagtgagggcaatgaagggcgatggtggggagactcggtgggtgaatggggagaccagaaagaaagagtccacagagcctgggctgggcccggtggaggctcctgtttacagccctctcttctttgtacagttgtattccaacactccactcgctaagaggccctgatcccagctcattcaggggagaacacgtcgtggggttcctgtcacgactatcacttgagattatattattatcctcactccctcgctgtctggagacggtcacaccttctggcaaattcaagaggcatgagtggaccgagagcacatccagcatttgcatcacctccctggcacctcccatagttacagccactacatccccaccgccgcctgtcatccctcacgtctctgtggccacccgggtgtcactgccagcaccaggcactgctttcacgtaaaatgtccaaatcacatcttcagcaagaaagcaacctcacggattgccccgcctcaaggtctttccaccctctttgagatcagcgttcggagaggtccccgccagcccggtggctgccctcaggtcccgtcacatgtctcaagggtccagcgttcgaggaagcactgttgtagatgacagagctttttgtttcacagctgcggggattctgctgaccatcttttagaaaattatttcataatttattctggctttgcccccttgctccttggtttattccctcatgttttactcaaaataaacatggccatgaactcaggggccattgggattctcccctctggcagccccaggtgggagctgggagggtccccagcccaggaggtggctggattgcagggctggcagcccccacgtggtggcatcctgacaggcacagtgagacccttgctgggtcaggtctcctttgtgtgtgaagctggggcagagtatgctacgaagggaccaggccaggccacagggctctcctcccagtctttatctgaaggcccagccaaagcacccctctaaaccggtcacctaggggaaatgcaaaaacctgcaaaagatccacctgtattccctgtgtgtgtgtgtcaaaatgaccatttgccaacctggctgtgaggtaatgtatgtaaagcaccgagtcaggtgcctgatacgcagtaggtgcttagcaaacggtagctaatactatcatcattgtcattgttattgtgacacccatgagcccacagacagagctgtattaagtaacctgttttgaatccagacattcactcccccacttgctatgactaccctcctttgatctatttttggtcataggtaaaaaaaaaaatctctcttgggagcatataaacaaaaaacatagaagc

SEQ ID NO: 281695 - DNA, 1764 bp, Artificial Sequence
  derived and/or modified sequence
agccaggccagcccggagcgcgccggggacaccctgtgcgccccgagtcccggcaccatgcgacccgccgcgcgtcctcgcgggcccggggcttcgctcttcgctcgctgagcccctgcgctcgccaccacggaaactcggaaagaggaggcgaggctgtggggagcggcgcggagacggactagacttcccctccgcccccaagaggctgccggtccccggttccctgggcttctccagctttatcatgaacctggcgcaaggttggctttaggaaaaattctggagccagagggagagtcaaggcaattctttggttgctaagtgtgagtgaagacactcaggatggctcaaggatccggggatcaaagagcagtgggggttgctgacccagaggagagttctccaaacatgatcgtttactgcaaaattgaagacatcattacaaagatgcaagatgacaagacagggggtgtgcccatcagaacagtcaagagctttctctccaaaatccccagtgtcgtcacaggtactgacattgtgcagtggcttatgaagaacctttccattgaggacccagttgaagcaatacacttggggagccttatcgctgcccagggctacatctttccaatctcagaccatgttctcaccatgaaggatgatggcaccttttatcgtttccaggctccgtacttctggccttcgaactgctgggaacctgaaaacactgactatgccatctatctctgtaagaggacaatgcaaaataaagcaaggctggaactggcagattatgaagcagaaaacttagcaagactccagagggcctttgcgaggaagtgggaattcatctttatgcaagcagaagcacaagtaaagattgaccggaaaaaagacaagacagaaaggaaaattttggatagtcaagaacgagccttttgggatgtccacaggcctgtgccaggctgtgtgaacacaacagaaatggatatccgaaaatgtcgacgtttgaagaatccacaaaaggttaaaaagtccgtgtatggcgtgactgaagagtcccaggcacagagcccggtgcatgtactcagccaaccaatcaggaaaacaacaaaagaggacatccggaaacagataacatttttgaacgcacagatcgacagacattgtttgaaaatgtccaaagtggctgaaagtttaattgcctacacggaacaatatgtggaatatgaccctttgataacaccagctgagccatccaacccttggatcagcgatgacgttgctttgtgggacatagagatgagcaaagagcccagccaacagcgagtaaaaagatggggcttctctttcgatgagatattgaaggaccaggtggggcgggaccagtttctacgattcctggagtccgaattcagttcagaaaacctcaggttctggctggctgtccaagatcttaagaaacaacccctacaggatgtggccaagagggtagaagaaatctggcaagagtttctggctccaggggctccaagtgcaatcaacctggattctcacagctatgagataaccagtcaaaatgtcaaagatggagggagatatacatttgaagacgcccaggagcacatctacaagctgatgaagagtgacagctatgcccgcttcctccggtcaaatgcttaccaggatttgctgctggccaagaagaagggaaagtcgctggcgggcaagcgcctcacgggcctgatgcagtcctcctga

SEQ ID NO: 281696 - DNA, 1419 bp, Artificial Sequence
  derived and/or modified sequence
atggcccagggcagcggcgaccagagagccgtgggcgtggccgaccccgaggagagcagccccaacatgatcgtgtactgcaagatcgaggacatcatcaccaagatgcaggacgacaagaccggcggcgtgcccatcagaaccgtgaagagcttcctgagcaagatccccagcgtggtgaccggcaccgacatcgtgcagtggctgatgaagaacctgagcatcgaggaccccgtggaggccatccacctgggcagcctgatcgccgcccagggctacatcttccccatcagcgaccacgtgctgaccatgaaggacgacggcaccttctacagattccaggccccctacttctggcccagcaactgctgggagcccgagaacaccgactacgccatctacctgtgcaagagaaccatgcagaacaaggccagactggagctggccgactacgaggccgagaacctggccagactgcagagagccttcgccagaaagtgggagttcatcttcatgcaggccgaggcccaggtgaagatcgacagaaagaaggacaagaccgagagaaagatcctggacagccaggagagagccttctgggacgtgcacagacccgtgcccggctgcgtgaacaccaccgagatggacatcagaaagtgcagaagactgaagaacccccagaaggtgaagaagagcgtgtacggcgtgaccgaggagagccaggcccagagccccgtgcacgtgctgagccagcccatcagaaagaccaccaaggaggacatcagaaagcagatcaccttcctgaacgcccagatcgacagacactgcctgaagatgagcaaggtggccgagagcctgatcgcctacaccgagcagtacgtggagtacgaccccctgatcacccccgccgagcccagcaacccctggatcagcgacgacgtggccctgtgggacatcgagatgagcaaggagcccagccagcagagagtgaagagatggggcttcagcttcgacgagatcctgaaggaccaggtgggcagagaccagttcctgagattcctggagagcgagttcagcagcgagaacctgagattctggctggccgtgcaggacctgaagaagcagcccctgcaggacgtggccaagagagtggaggagatctggcaggagttcctggcccccggcgcccccagcgccatcaacctggacagccacagctacgagatcaccagccagaacgtgaaggacggcggcagatacaccttcgaggacgcccaggagcacatctacaagctgatgaagagcgacagctacgccagattcctgagaagcaacgcctaccaggacctgctgctggccaagaagaagggcaagagcctggccggcaagagactgaccggcctgatgcagagcagctag

SEQ ID NO: 281697 - protein, 462 aa, Artificial Sequence
  derived and/or modified sequence
MDNGMFSGFIMIKNLLLFCISMNLSSHFGFSQMPTSSVKDETNDNITIFTRILDGLLDGYDNRLRPGLGERITQVRTDIYVTSFGPVSDTEMEYTIDVFFRQSWKDERLRFKGPMQRLPLNNLLASKIWTPDTFFHNGKKSIAHNMTTPNKLLRLEDDGTLLYTMRLTISAECPMQLEDFPMDAHACPLKFGSYAYPNSEVVYVWTNGSTKSVVVAEDGSRLNQYHLMGQTVGTENISTSTGEYTIMTAHFHLKRKIGYFVIQTYLPCIMTVILSQVSFWLNRESVPARTVFGVTTVLTMTTLSISARNSLPKVAYATAMDWFIAVCYAFVFSALIEFATVNYFTKRGWAWDGKKALEAAKIKKKREVILNKSTNAFTTGKMSHPPNIPKEQTPAGTSNTTSVSVKPSEEKTSESKKTYNSISKIDKMSRIVFPVLFGTFNLVYWATYLNREPVIKGAASPK

SEQ ID NO: 281698 - protein, 86 aa, Artificial Sequence
  derived and/or modified sequence
MDNGMFSGFIMIKNLLLFCISMNLSSHFGFSQMPTSSVKDETNDNITIFTRILDGLLDGYDNRLRPGLGERITQVRTDIYVTSFGP

SEQ ID NO: 281699 - protein, 149 aa, Artificial Sequence
  derived and/or modified sequence
MDNGMFSGFIMIKNLLLFCISMNLSSHFGFSQMPTSSVKDETNDNITIFTRILDGLLDGYDNRLRPGLGERITQVRTDIYVTSFGPVSDTEMEYTIDVFFRQSWKDERLRFKGPMQRLPLNNLLASKIWTPDTFFHNGKKSIAHNMTTP

SEQ ID NO: 281700 - protein, 166 aa, Artificial Sequence
  derived and/or modified sequence
MDNGMFSGFIMIKNLLLFCISMNLSSHFGFSQMPTSSVKDETNDNITIFTRILDGLLDGYDNRLRPGLGERITQVRTDIYVTSFGPVSDTEMEYTIDVFFRQSWKDERLRFKGPMQRLPLNNLLASKIWTPDTFFHNGKKSIAHNMTTPNKLLRLEDDGTLLYTMR

SEQ ID NO: 281701 - protein, 16 aa, Artificial Sequence
  derived and/or modified sequence
MDNGMFSGFIMIKNLL

SEQ ID NO: 281702 - DNA, 3251 bp, Artificial Sequence
  derived and/or modified sequence
aggaactgcaccactaggacggacgacacaccgacgtaatgaccatagtaagaccccatgtacgtggctaatgaggcagtgacccgacgtggctcggaagccctgctggggagatcccgccccgtcaccccagaggcgctctccgacctgcagcccccagggctcctggccctttcccgtttgccactgcggcttgttgtcaagaaatggaacttcagaaaacccccagatatacactgcgttaggtaaggatttcattctaatcgagtccaatgtgaccctggctttccctcccgtagttatgcattcctgtctatgagtgagatgaaaagaatgtccacaggccagcttctttcagaagcgcctaagagatgcgcatgtaaggggtgccatggagcacccgggaaggacccaggcctgggcagggaggcgttggggccggctctagggagcaaagctgtcggagtccaggcctctatcacccgactgctgacactgccctcccatccctgctctacaagcgggcggtggtgactacacgaggcgccgaagatgctgttgagggccctggagaaacttcagcagaacagggcctctccccttgcaggccgagccgggggccctgcgccctccccctccgcccagctcggccaagggcgcatttgctgagcgtctggcggcctctaccggagcacctctgcagagggccgatcctccagcccagagacgacatgtggcgctcgggcgagtgccttgcagagagaggagtagcttgctggctttgaacgcgtggcgtggcagatatttcagaaagcttcaagaacaagctggagaagggaagagttattcctccatattcacctgcttcaactactattcttattgggaatggacaatggaatgttctctggttttatcatgatcaaaaacctccttctcttttgtatttccatgaacttatccagtcactttggcttttcacagatgccaaccagttcagtgaaagatgagaccaatgacaacatcacgatatttaccaggatcttggatgggctcttggatggctacgacaacagacttcggcccgggctgggagagcgcatcactcaggtgaggaccgacatctacgtcaccagcttcggcccggtgtccgacacggaaatggagtacaccatagacgtgtttttccgacaaagctggaaagatgaaaggcttcggtttaaggggcccatgcagcgcctccctctcaacaacctccttgccagcaagatctggaccccagacacgttcttccacaacgggaagaagtccatcgctcacaacatgaccacgcccaacaagctgctgcggctggaggacgacggcaccctgctctacaccatgcgcttgaccatctctgcagagtgccccatgcagcttgaggacttcccgatggatgcgcacgcttgccctctgaaatttggcagctatgcgtaccctaattctgaagtcgtttacgtctggaccaacggctccaccaagtcggtggtggtggcggaagatggctccagactgaaccagtaccacctgatggggcagacggtgggcactgagaacatcagcaccagcacaggcgaatacacaatcatgacagctcacttccacctgaaaaggaagattggctactttgtcatccagacctaccttccctgcataatgaccgtgatcttatcacaggtgtccttttggctgaaccgggaatcagtcccagccaggacagtttttggggtcaccacggtgctgaccatgacgaccctcagcatcagcgccaggaactctctgcccaaagtggcctacgccaccgccatggactggttcatagccgtgtgctatgccttcgtcttctcggcgctgatagagtttgccacggtcaattactttaccaagagaggctgggcctgggatggcaaaaaagccttggaagcagccaagatcaagaaaaagcgtgaagtcatactaaataagtcaacaaacgcttttacaactgggaagatgtctcaccccccaaacattccgaaggaacagaccccagcagggacgtcgaatacaacctcagtctcagtaaaaccctctgaagagaagacttctgaaagcaaaaagacttacaacagtatcagcaaaattgacaaaatgtcccgaatcgtattcccagtcttgttcggcactttcaacttagtttactgggcaacgtatttgaatagggagccggtgataaaaggagccgcctctccaaaataaccggccacactcccaaactccaagacagccatacttccagcgaaatggtaccaaggagaggtcttgctcacagggactctccatatgtgagcactatctttcaggaaatttttgcatgtttaataatatgtacaaataatattgccttgatgtttctatatgtaacttcagatgtttccaagatgtcccattgataattcgagcaaacaactttctggaaaaacaggatacgatgactgacactcagatgcccagtatcatacgttgatagtttacaaacaagatacgtatatttttaactgcttcaagtgttacctaacaatgttttttatacttcaaatgtcatttcatacaaattttcccagtgaataaatattttaggaaactctccatgattattagttgaccaactatattgcgagaaacagagatcataaagagcacgttttccattatgaggaaacttggacatttatgtacaaaatgaattgcctttgataattcttactgttctgaaattaggaaagtactgcatgatcttacacgaagaaatagaataggcaaacttttatgcaggcagattaataacagaaatacatcatatgttagatacacaaaatatttccctgaggaaaaaaaatcaactgcttaaattttttgggaagaaaaagaaacatttcttaccccacaccacccactacctgaacaatagccaagaaaggaaaggagatgttaaaacaaacagtgttttgatgacattctcagcacttggcccatgtgatcgctgtctctgaaacactgaccacctctccctacagccagcgtgtagtgcttcagtggtgagaaattgtaattgagttattttccattttatttccttgtatgtatttcatgactggacttactgctctgtcagcttttgtatatgaatcttaaatgttcattaaaaaataaaaaatgaactgatcttgtgg

SEQ ID NO: 281703 - DNA, 2183 bp, Artificial Sequence
  derived and/or modified sequence
gaagatgctgttgagggccctggagaaacttcagcagaacagggcctctccccttgcaggccgagccgggggccctgcgccctccccctccgcccagctcggccaagggcgcatttgctgagcgtctggcggcctctaccggagcacctctgcagagggccgatcctccagcccagagacgacatgtggcgctcgggcgagcttcaagaacaagctggagaagggaagagttattcctccatattcacctgcttcaactactattcttattgggaatggacaatggaatgttctctggttttatcatgatcaaaaacctccttctcttttgtatttccatgaacttatccagtcactttggcttttcacagatgccaaccagttcagtgaaagatgagaccaatgacaacatcacgatatttaccaggatcttggatgggctcttggatggctacgacaacagacttcggcccgggctgggagagcgcatcactcaggtgaggaccgacatctacgtcaccagcttcggcccggtgtccgacacggaaatggagtacaccatagacgtgtttttccgacaaagctggaaagatgaaaggcttcggtttaaggggcccatgcagcgcctccctctcaacaacctccttgccagcaagatctggaccccagacacgttcttccacaacgggaagaagtccatcgctcacaacatgaccacgcccaacaagctgctgcggctggaggacgacggcaccctgctctacaccatgcgcttgaccatctctgcagagtgccccatgcagcttgaggacttcccgatggatgcgcacgcttgccctctgaaatttggcagctatgcgtaccctaattctgaagtcgtttacgtctggaccaacggctccaccaagtcggtggtggtggcggaagatggctccagactgaaccagtaccacctgatggggcagacggtgggcactgagaacatcagcaccagcacaggcgaatacacaatcatgacagctcacttccacctgaaaaggaagattggctactttgtcatccagacctaccttccctgcataatgaccgtgatcttatcacaggtgtccttttggctgaaccgggaatcagtcccagccaggacagtttttggggtcaccacggtgctgaccatgacgaccctcagcatcagcgccaggaactctctgcccaaagtggcctacgccaccgccatggactggttcatagccgtgtgctatgccttcgtcttctcggcgctgatagagtttgccacggtcaattactttaccaagagaggctgggcctgggatggcaaaaaagccttggaagcagccaagatcaagaaaaagcgtgaagtcatactaaataagtcaacaaacgcttttacaactgggaagatgtctcaccccccaaacattccgaaggaacagaccccagcagggacgtcgaatacaacctcagtctcagtaaaaccctctgaagagaagacttctgaaagcaaaaagacttacaacagtatcagcaaaattgacaaaatgtcccgaatcgtattcccagtcttgttcggcactttcaacttagtttactgggcaacgtatttgaatagggagccggtgataaaaggagccgcctctccaaaataaccggccacactcccaaactccaagacagccatacttccagcgaaatggtaccaaggagaggtcttgctcacagggactctccatatgtgagcactatctttcaggaaatttttgcatgtttaataatatgtacaaataatattgccttgatgtttctatatgtaacttcagatgtttccaagatgtcccattgataattcgagcaaacaactttctggaaaaacaggatacgatgactgacactcagatgcccagtatcatacgttgatagtttacaaacaagatacgtatatttttaactgcttcaagtgttacctaacaatgttttttatacttcaaatgtcatttcatacaaattttcccagtgaataaatattttaggaaactctccatgattattagttgaccaactatattgcgagaaacagagatcataaagagcacgttttccattatgaggaaacttggacatttatgtacaaaatgaattgcctttgataattcttactgttctgaaat

SEQ ID NO: 281704 - DNA, 2761 bp, Artificial Sequence
  derived and/or modified sequence
gagtgcgccgggggcgctggggggctctgcggcgggcggcgcgcggcccggggcgcggcgcggagcggagctgcagggcggcggcgggagcgcggggcgcaagagccgctccgccgggagtgccggggaagttcgcgctggcagcatggggcggtgacgccgcaccggccttccgcgcctgccagccgggcgagagcaggcggaggagaaggaggatgcatcctcaccgacggctcgcctcccggggccggcgcgcaggtgccttgcagagagaggagtagcttgctggctttgaacgcgtggcgtggcagatatttcagaaagcttcaagaacaagctggagaagggaagagttattcctccatattcacctgcttcaactactattcttattgggaatggacaatggaatgttctctggttttatcatgatcaaaaacctccttctcttttgtatttccatgaacttatccagtcactttggcttttcacagatgccaaccagttcagtgaaagatgagaccaatgacaacatcacgatatttaccaggatcttggatgggctcttggatggctacgacaacagacttcggcccgggctgggagagcgcatcactcaggtgaggaccgacatctacgtcaccagcttcggcccggtgtccgacacggaaatggagtacaccatagacgtgtttttccgacaaagctggaaagatgaaaggcttcggtttaaggggcccatgcagcgcctccctctcaacaacctccttgccagcaagatctggaccccagacacgttcttccacaacgggaagaagtccatcgctcacaacatgaccacgcccaacaagctgctgcggctggaggacgacggcaccctgctctacaccatgcgcttgaccatctctgcagagtgccccatgcagcttgaggacttcccgatggatgcgcacgcttgccctctgaaatttggcagctatgcgtaccctaattctgaagtcgtttacgtctggaccaacggctccaccaagtcggtggtggtggcggaagatggctccagactgaaccagtaccacctgatggggcagacggtgggcactgagaacatcagcaccagcacaggcgaatacacaatcatgacagctcacttccacctgaaaaggaagattggctactttgtcatccagacctaccttccctgcataatgaccgtgatcttatcacaggtgtccttttggctgaaccgggaatcagtcccagccaggacagtttttggggtcaccacggtgctgaccatgacgaccctcagcatcagcgccaggaactctctgcccaaagtggcctacgccaccgccatggactggttcatagccgtgtgctatgccttcgtcttctcggcgctgatagagtttgccacggtcaattactttaccaagagaggctgggcctgggatggcaaaaaagccttggaagcagccaagatcaagaaaaagcgtgaagtcatactaaataagtcaacaaacgcttttacaactgggaagatgtctcaccccccaaacattccgaaggaacagaccccagcagggacgtcgaatacaacctcagtctcagtaaaaccctctgaagagaagacttctgaaagcaaaaagacttacaacagtatcagcaaaattgacaaaatgtcccgaatcgtattcccagtcttgttcggcactttcaacttagtttactgggcaacgtatttgaatagggagccggtgataaaaggagccgcctctccaaaataaccggccacactcccaaactccaagacagccatacttccagcgaaatggtaccaaggagaggtcttgctcacagggactctccatatgtgagcactatctttcaggaaatttttgcatgtttaataatatgtacaaataatattgccttgatgtttctatatgtaacttcagatgtttccaagatgtcccattgataattcgagcaaacaactttctggaaaaacaggatacgatgactgacactcagatgcccagtatcatacgttgatagtttacaaacaagatacgtatatttttaactgcttcaagtgttacctaacaatgttttttatacttcaaatgtcatttcatacaaattttcccagtgaataaatattttaggaaactctccatgattattagttgaccaactatattgcgagaaacagagatcataaagagcacgttttccattatgaggaaacttggacatttatgtacaaaatgaattgcctttgataattcttactgttctgaaattaggaaagtactgcatgatcttacacgaagaaatagaataggcaaacttttatgcaggcagattaataacagaaatacatcatatgttagatacacaaaatatttccctgaggaaaaaaaatcaactgcttaaattttttgggaagaaaaagaaacatttcttaccccacaccacccactacctgaacaatagccaagaaaggaaaggagatgttaaaacaaacagtgttttgatgacattctcagcacttggcccatgtgatcgctgtctctgaaacactgaccacctctccctacagccagcgtgtagtgcttcagtggtgagaaattgtaattgagttattttccattttatttccttgtatgtatttcatgactggacttactgctctgtcagcttttgtatatgaatcttaaatgttcattaaaaaataaaaaatgaactgatcttgtgg

SEQ ID NO: 281705 - DNA, 653 bp, Artificial Sequence
  derived and/or modified sequence
ggcgcgcggcccggggcgcggcgcggagcggagctgcagggcggcggcgggagcgcggggcgcaagagccgctccgccgggagtgccggggaagttcgcgctggcagcatggggcggtgacgccgcaccggccttccgcgcctgccagccgggcgagagcaggcggaggagaaggaggatgcatcctcaccgacggctcgcctcccggggccggcgcgcagggtgagccctgggcgcgctgggccggggcagtgggtgccttgcagagagaggagtagcttgctggctttgaacgcgtggcgtggcagatatttcagaaagcttcaagaacaagctggagaagggaagagttattcctccatattcacctgcttcaactactattcttattgggaatggacaatggaatgttctctggttttatcatgatcaaaaacctccttctcttttgtatttccatgaacttatccagtcactttggcttttcacagatgccaaccagttcagtgaaagatgagaccaatgacaacatcacgatatttaccaggatcttggatgggctcttggatggctacgacaacagacttcggcccgggctgggagagcgcatcactcaggtgaggaccgacatctacgtcaccagcttcggcccg

SEQ ID NO: 281706 - DNA, 728 bp, Artificial Sequence
  derived and/or modified sequence
ggagtgccggggaagttcgcgctggcagcatggggcggtgacgccgcaccggccttccgcgcctgccagccgggcgagagcaggcggaggagaaggaggatgcatcctcaccgacggctcgcctcccggggccggcgcgcaggtgccttgcagagagaggagtagcttgctggctttgaacgcgtggcgtggcagatatttcagaaagcttcaagaacaagctggagaagggaagagttattcctccatattcacctgcttcaactactattcttattgggaatggacaatggaatgttctctggttttatcatgatcaaaaacctccttctcttttgtatttccatgaacttatccagtcactttggcttttcacagatgccaaccagttcagtgaaagatgagaccaatgacaacatcacgatatttaccaggatcttggatgggctcttggatggctacgacaacagacttcggcccgggctgggagagcgcatcactcaggtgaggaccgacatctacgtcaccagcttcggcccggtgtccgacacggaaatggagtacaccatagacgtgtttttccgacaaagctggaaagatgaaaggcttcggtttaaggggcccatgcagcgcctccctctcaacaacctccttgccagcaagatctggaccccagacacgttcttccacaacgggaagaagtccatcgctcacaacatgaccacgcc

SEQ ID NO: 281707 - DNA, 653 bp, Artificial Sequence
  derived and/or modified sequence
acgtactttctcagtgccttgcagagagaggagtagcttgctggctttgaacgcgtggcgtggcagatatttcagaaagcttcaagaacaagctggagaagggaagagttattcctccatattcacctgcttcaactactattcttattgggaatggacaatggaatgttctctggttttatcatgatcaaaaacctccttctcttttgtatttccatgaacttatccagtcactttggcttttcacagatgccaaccagttcagtgaaagatgagaccaatgacaacatcacgatatttaccaggatcttggatgggctcttggatggctacgacaacagacttcggcccgggctgggagagcgcatcactcaggtgaggaccgacatctacgtcaccagcttcggcccggtgtccgacacggaaatggagtacaccatagacgtgtttttccgacaaagctggaaagatgaaaggcttcggtttaaggggcccatgcagcgcctccctctcaacaacctccttgccagcaagatctggaccccagacacgttcttccacaacgggaagaagtccatcgctcacaacatgaccacgcccaacaagctgctgcggctggaggacgacggcaccctgctctacaccatgcgctt

SEQ ID NO: 281708 - DNA, 458 bp, Artificial Sequence
  derived and/or modified sequence
gctcgaggccaggggacttggagtcgctgctgcaccgcgcgctcccagcccaggaggaaggcgctgcctggcggagcgcttggctcgtacccggggcaggagcaggggaagtctgcgaaagccgggagcgagccggggagggccggggagctggagaccctcggcgtgccgctgcggaccgcgcgggtggcgaccgcgggtgccagggcgacccaggctgcggctccgcagtgcagcccccgcgcccacctgccctggcgcgccggccctgtgccttgcagagagaggagtagcttgctggctttgaacgcgtggcgtggcagatatttcagaaagcttcaagaacaagctggagaagggaagagttattcctccatattcacctgcttcaactactattcttattgggaatggacaatggaatgttctctggttttatcatgatcaaaaacctcctt

SEQ ID NO: 281709 - DNA, 1389 bp, Artificial Sequence
  derived and/or modified sequence
atggacaatggcatgttttctggatttattatgatcaagaatctgctcctgttttgtatttcaatgaacctgagtagccatttcggtttcagtcagatgccgacaagcagcgttaaagatgagactaatgataatatcaccatatttactaggattctggacggcctgctagatgggtatgacaataggttgcgcccaggtcttggggagaggatcacacaggttcgtacagatatttatgtaacaagcttcgggccagtgtcggacacagaaatggaatacaccattgacgtcttctttcgacagagttggaaggacgagaggcttcggttcaaaggaccaatgcaaaggctgccactgaataacctgcttgcttctaagatatggacccccgacaccttttttcacaacgggaaaaaaagtattgctcacaacatgacaaccccgaacaagctgctccgtcttgaagatgacggcacattactgtatacaatgcggcttactattagtgctgaatgccccatgcagctggaggatttcccgatggatgcccatgcatgtcccctgaagtttggctcttatgcctatccaaacagtgaggttgtgtatgtgtggaccaacggatcaactaaaagtgtggtagtggccgaagacggttcccgtctgaaccagtatcacctgatgggacagactgtaggtaccgagaacataagcacctcaacaggcgagtataccatcatgactgcgcactttcaccttaaaaggaagattgggtatttcgtaatacagacctacctgccatgtattatgaccgttatattgagccaggtaagcttctggctgaatcgtgagagtgtgcctgcgagaactgtcttcggggtgacaactgtactgacaatgacaacattgtcaatctcagcccgcaactcccttcctaaggtggcctacgcaactgccatggactggtttatcgccgtgtgttacgcattcgtgttcagcgccctcattgagtttgctacggtgaactacttcactaagaggggttgggcttgggatgggaaaaaggccttggaggccgcaaaaattaagaaaaagcgggaggtcatactcaataaatctaccaacgcatttacaacgggaaaaatgagccatccacctaacatacccaaagaacagacacctgccggaacctccaatactaccagtgtttctgtgaaacccagcgaagagaaaaccagcgagtccaagaaaacttataattccatttcaaaaattgacaaaatgagtaggattgtctttcctgtgctcttcggaactttcaacttggtctactgggcaacatatctgaaccgggagcccgtcattaaaggggcggcttctcctaaatag

SEQ ID NO: 281710 - DNA, 1389 bp, Artificial Sequence
  derived and/or modified sequence
atggataacggcatgttctcgggctttataatgattaagaatctcctgctgttttgtatcagcatgaacctgagtagccattttggtttcagccagatgcctacatctagcgtgaaagacgagacgaacgacaacattactatttttacacggattctggatggcctattggacggatacgataaccgcctccgccccgggctcggagagaggataactcaggtgcgaaccgacatttacgtgacctctttcggtcccgtttccgataccgaaatggaatacacgatagatgtgttttttcggcagtcctggaaggatgagagactccggtttaaaggacccatgcaacgcctgccgctcaacaacctgctggcctcaaaaatctggacacccgatactttctttcataacggcaaaaagagcattgctcacaacatgaccacacccaacaaactgctcagacttgaagacgacgggactctgctgtacacgatgaggctgaccatcagtgctgagtgtccaatgcagctcgaggacttccccatggacgcccacgcatgtccgctcaagttcggaagctacgcctaccccaattctgaagtggtctacgtgtggacaaacggcagcaccaaatccgtcgtagtagcagaagacggctcgcggctgaaccagtaccatctgatggggcagactgttggcaccgagaacatctccactagcaccggggaatacaccattatgactgcccacttccacctcaaacggaagatcggctatttcgtgatacagacctaccttccctgtataatgacagttatcttgagccaggtgtcgttttggctgaacagggagagtgtgccggccaggacggtgttcggcgttactacagtactcacaatgactactctcagtatatctgctcgaaatagcctgcccaaagtggcatacgcaaccgctatggactggttcatcgccgtgtgttatgcatttgtcttcagcgccctaattgagtttgccacggtgaattacttcactaagcgcggatgggcttgggacggcaaaaaggctctcgaggccgccaaaattaaaaaaaagcgagaagtgatcttgaacaaaagcaccaatgcattcacaacaggcaaaatgtctcatcctcccaatattcccaaagaacaaactccggccggaactagcaacactactagtgtttcagtgaaacctagtgaggagaagaccagcgagagtaaaaagacatacaacagcatctccaagatagacaagatgtctaggatcgtgttccctgtgctttttggtacctttaacctcgtttattgggcgacatacctcaatcgagaacctgtaatcaaaggggcggcctctccaaaatag

SEQ ID NO: 281711 - DNA, 1389 bp, Artificial Sequence
  derived and/or modified sequence
atggataacggtatgttcagcggctttattatgatcaagaatttgctgttattctgtatatctatgaacctgtccagtcatttcggattcagtcagatgcccacctcttcagtgaaggacgaaactaacgacaatatcacaatcttcacccgcatcctcgacggacttctcgacggctatgataataggttacggcccggattaggagaacgcatcacacaagtgcggacagacatctatgttacatcttttggtccggtttctgacaccgagatggagtatacaatcgatgtttttttccggcaatcttggaaagatgaacgactccgctttaagggtcctatgcaacggcttccactgaataacttgctggcctcaaaaatctggactcctgatacgttttttcataacgggaaaaaatccattgcgcacaatatgaccactccgaacaagttactcaggctggaagatgacggtactcttctctacacaatgaggttgacgatttccgccgaatgtcccatgcagctcgaagattttcctatggacgcccacgcctgtcctttgaaattcggctcatacgcttatcctaacagcgaggttgtgtacgtctggactaatgggtccacaaaatccgttgtcgtggctgaggatggttcccgcctgaaccagtaccacctgatgggccagacagtcggtaccgaaaatatatcgacatctaccggagaatataccattatgacggcccacttccacctgaaaagaaaaattggatactttgtgatccaaacttacttaccatgcatcatgaccgtaatcctatcccaggtgtctttttggttgaacagagagtcggtgccagcgaggaccgtcttcggcgtgactacggtgctaaccatgacaacactctctatatctgcgcggaattctctgcccaaagtcgcctacgcgacggccatggactggtttatcgccgtgtgttatgcgttcgtcttttcagccctcatcgaattcgcgacagtcaactacttcactaaaaggggctgggcttgggacggcaagaaagcactagaagccgcgaaaatcaaaaagaaacgagaggtaatcctgaataagagcactaatgcctttactaccggcaagatgtcgcatcctcccaacatcccaaaggagcagacacctgcggggaccagcaatactacgtccgtttcagtgaagcctagtgaagagaagacctcggaatctaagaagacttataatagcatttccaagattgataagatgtcccgcattgtctttcctgtattatttggcaccttcaatttggtatactgggcgacctatctcaatcgtgagccagtcatcaaaggcgcggcttctccaaagtag

SEQ ID NO: 281712 - DNA, 261 bp, Artificial Sequence
  derived and/or modified sequence
atggataacggcatgttttccggctttatcatgatcaagaatttgttgctcttctgcatcagcatgaacctgtctagccatttcggatttagccaaatgcctacttccagcgttaaagacgagactaacgacaatattactatctttacacggatcctcgacgggctattagatgggtacgacaacagactacggcctggactcggcgagcggatcactcaagtgagaacggatatctacgtgacgtctttcggaccttag

SEQ ID NO: 281713 - DNA, 450 bp, Artificial Sequence
  derived and/or modified sequence
atggataacggaatgttttcggggttcatcatgattaagaaccttctgttattctgcatttccatgaaccttagctctcatttcggattctctcagatgcctacaagcagcgtcaaggacgaaaccaacgacaacataaccatctttactcgcattttagatgggctcttggatggctacgacaatcgcttgcgccctggcctaggagaacgcatcacgcaagttcgcaccgatatctatgtcacctcattcgggcctgtgagcgataccgagatggagtatactatcgatgtgttttttcgccagtcctggaaagacgagagacttagattcaagggaccaatgcagcggttgcctctgaacaatttacttgcctctaagatttggacaccagacacattttttcacaatggtaagaaatctatcgcacataatatgaccacgccatag

SEQ ID NO: 281714 - DNA, 501 bp, Artificial Sequence
  derived and/or modified sequence
atggacaatggtatgttttcaggattcataatgatcaaaaacctgctgctgttttgcatttccatgaacctgtccagccatttcggcttcagccagatgcctacgagttccgtaaaggatgagacaaacgataacattactatctttaccaggatccttgatggtctgcttgatgggtacgataatagactgaggccaggcctaggggaacgaattacacaggtgcggaccgacatctacgtgacctctttcgggccggtgagcgatacggagatggagtataccatcgacgtgttcttccgacagtcctggaaagatgagaggctgcgtttcaagggtccaatgcagaggctccctctcaataatctcttagcaagtaaaatatggactccagacactttctttcacaacggaaagaaatctatcgctcacaatatgaccacccctaataaactgctgcgccttgaggacgacggcaccttactctacacaatgcgatag

SEQ ID NO: 281715 - DNA, 51 bp, Artificial Sequence
  derived and/or modified sequence
atggataacggaatgtttagtggcttcatcatgatcaagaacctgctttag

SEQ ID NO: 281716 - DNA, 1389 bp, Artificial Sequence
  derived and/or modified sequence
atggacaatggcatgttttctggcttcatcatgatcaagaacctgctgctcttctgcatctccatgaacctgagcagccacttcggcttcagccagatgcccaccagctctgtgaaggatgagaccaatgacaacatcaccatcttcacccgcatcctggatggcctgctggatggctatgacaaccggctgcggcccggcctgggggagcgcatcacccaggtgaggacagacatctacgtgaccagctttggacctgtgtctgacacagagatggagtacaccattgatgtgttcttccggcagagctggaaggatgagcggctgcgcttcaagggccccatgcagaggctgcccctgaacaacctgctggccagcaagatctggaccccagacaccttcttccacaacgggaagaagagcatcgcccacaacatgaccacccccaacaagctgctgcggctggaggatgatggcaccctgctgtacaccatgaggctgaccatctctgctgagtgccccatgcagctggaggacttccccatggatgcccacgcctgccccctgaagtttggcagctatgcctaccccaacagcgaggtggtgtatgtgtggaccaacggcagcaccaagtctgtggtggtggctgaagatggcagccggctgaaccagtaccacctgatgggccagacagtgggcacagagaacatcagcaccagcactggagagtacaccatcatgacagcccacttccacctgaagaggaagattggctacttcgtcatccagacctacctgccctgcatcatgaccgtcatcctgagccaggtgtccttctggctgaaccgggagagcgtgcctgccaggacagtgtttggagtgaccaccgtgctgaccatgaccaccctgagcatcagcgccaggaacagcctgcccaaggtggcctatgccacagccatggactggttcatcgctgtgtgctacgcctttgtgttttctgccctgattgaatttgccaccgtgaactacttcaccaagaggggctgggcctgggatggcaagaaggccctggaggccgccaagatcaagaagaagcgggaggtgatcctgaacaagagcaccaatgccttcaccaccgggaagatgagccacccccccaacatccccaaggagcagaccccagctggcaccagcaacaccacctctgtgtctgtgaagcccagcgaggagaagaccagcgagagcaagaagacctacaacagcatcagcaagattgacaagatgagcagaattgtgtttcctgtgctgtttggcaccttcaacctggtgtactgggccacctacctgaaccgggagcctgtgatcaagggggccgccagccccaagtag

SEQ ID NO: 281717 - DNA, 261 bp, Artificial Sequence
  derived and/or modified sequence
atggacaatggcatgttttctggcttcatcatgatcaagaacctgctgctcttctgcatctccatgaacctgagcagccacttcggcttcagccagatgcccaccagctctgtgaaggatgagaccaatgacaacatcaccatcttcacccgcatcctggatggcctgctggatggctatgacaaccggctgcggcccggcctgggggagcgcatcacccaggtgaggacagacatctacgtgaccagctttggcccctag

SEQ ID NO: 281718 - DNA, 450 bp, Artificial Sequence
  derived and/or modified sequence
atggacaatggcatgttttctggcttcatcatgatcaagaacctgctgctcttctgcatctccatgaacctgagcagccacttcggcttcagccagatgcccaccagctctgtgaaggatgagaccaatgacaacatcaccatcttcacccgcatcctggatggcctgctggatggctatgacaaccggctgcggcccggcctgggggagcgcatcacccaggtgaggacagacatctacgtgaccagctttggacctgtgtctgacacagagatggagtacaccattgatgtgttcttccggcagagctggaaggatgagcggctgcgcttcaagggccccatgcagaggctgcccctgaacaacctgctggccagcaagatctggaccccagacaccttcttccacaacgggaagaagagcatcgcccacaacatgaccaccccctag

SEQ ID NO: 281719 - DNA, 501 bp, Artificial Sequence
  derived and/or modified sequence
atggacaatggcatgttttctggcttcatcatgatcaagaacctgctgctcttctgcatctccatgaacctgagcagccacttcggcttcagccagatgcccaccagctctgtgaaggatgagaccaatgacaacatcaccatcttcacccgcatcctggatggcctgctggatggctatgacaaccggctgcggcccggcctgggggagcgcatcacccaggtgaggacagacatctacgtgaccagctttggacctgtgtctgacacagagatggagtacaccattgatgtgttcttccggcagagctggaaggatgagcggctgcgcttcaagggccccatgcagaggctgcccctgaacaacctgctggccagcaagatctggaccccagacaccttcttccacaacgggaagaagagcatcgcccacaacatgaccacccccaacaagctgctgcggctggaggatgatggcaccctgctgtacaccatgaggtag

SEQ ID NO: 281720 - DNA, 51 bp, Artificial Sequence
  derived and/or modified sequence
atggacaatggcatgttttctggcttcatcatgatcaagaacctgctgtag

SEQ ID NO: 281721 - DNA, 1389 bp, Artificial Sequence
  derived and/or modified sequence
atggacaacggcatgttcagcggcttcatcatgatcaagaacctgctgctcttttgtatctccatgaacctgtcaagccacttcggattctctcaaatgccaaccagcagcgtcaaggacgagacgaatgataacattacaattttcactcgaattctagatgggctgctagacgggtatgataacagattgagacctgggctcggagagcgtatcacgcaggtccgtacagatatctatgtgactagttttggccccgtgagtgacaccgagatggagtacactatagatgtgttcttccggcagagctggaaagacgagaggcttaggtttaagggccccatgcaaagactgcccttaaataacctgctcgcttcaaaaatttggacgcctgatacctttttccacaatgggaaaaagtccatcgcacacaatatgaccaccccgaacaaattgcttcggttggaggacgacgggactcttctgtacactatgcgactgaccatatctgccgaatgtcctatgcagttggaagatttcccaatggacgcccatgcgtgtcctctcaagttcggatcttatgcctaccccaacagtgaggtcgtctatgtgtggactaacggatccacgaagtctgttgtggtggccgaggacggatcacgtctgaaccagtaccacctgatggggcaaaccgtaggtactgaaaacatttcaacctccacgggggagtacaccattatgacggcccacttccatctcaagcgcaagatcgggtatttcgtgatacagacatacctcccgtgtattatgacagtcatcctgtcgcaagtatctttctggcttaacagagaatcagtaccggccagaaccgtattcggagtgacaacggttctgaccatgactaccctaagcatctctgccaggaactccttgccgaaagttgcctacgccactgcgatggactggttcattgcagtttgctatgcatttgttttctcggcacttatagagttcgctacagtcaattacttcactaagcgcgggtgggcttgggacgggaaaaaggctctcgaagccgccaaaataaaaaaaaaaagagaagtaatccttaacaaaagcaccaacgcttttactacgggaaaaatgagtcacccgcccaacatccctaaagagcagacacctgccggcaccagcaacaccacgtccgtatcagtcaagcctagcgaggagaagacctcggagagtaaaaagacctacaattctatttctaaaattgataagatgtcacgcatcgtgttcccggtcttgttcggcaccttcaacctcgtatactgggctacctatctgaatcgagagccggtgatcaagggggccgctagccccaaatag

SEQ ID NO: 281722 - DNA, 1389 bp, Artificial Sequence
  derived and/or modified sequence
atggacaacggcatgttcagcggcttcatcatgatcaagaacctgctgctgttttgtataagtatgaatctgtcaagccactttggcttcagccagatgccaaccagtagtgtcaaagacgagaccaatgataacattaccatctttacccgcattttagatggactgttggacggttacgataaccgcctaaggccaggactaggggagcgtattacgcaggttagaactgacatttacgttaccagttttggccccgtgagcgacaccgagatggagtacacgatcgacgtgttcttcaggcagtcctggaaggacgaacggctacggttcaaaggtccaatgcagcgactgccattgaacaacctcttagcctccaagatctggactccggacacattttttcacaacgggaaaaaatctattgctcataacatgacgacccctaacaagcttctgagactggaagacgatgggacccttctctacaccatgagactgaccatcagcgctgaatgtccaatgcagctggaggattttcccatggacgcccacgcttgtccgctgaaatttggatcctatgcataccctaactcagaagtagtgtacgtctggactaacggctctaccaagtctgttgtggtcgctgaggatggctctagactgaatcagtatcatcttatgggacagacggtcggcaccgaaaatatatctacgtcaactggcgagtataccatcatgactgcccacttccacctgaagcgcaaaattggctatttcgtcattcagacataccttccctgcatcatgacggtgatcctcagccaggtgagtttttggctgaaccgcgagagcgttcccgcacggactgtctttggtgtgacaacagtattaacaatgaccactctctcaatttccgcgagaaactccctgccgaaggtggcctatgcgaccgccatggactggttcattgccgtttgctacgccttcgtgttttccgctcttatcgagtttgcgactgtgaactacttcacaaaacgcggatgggcctgggacggaaagaaagcgttagaagctgccaaaataaaaaagaagcgggaagtcatactgaataaatctacgaatgcctttactacgggcaagatgagccatcccccgaacataccaaaggaacagactcctgctggtacctccaacacgactagtgtttctgtgaagcctagcgaggaaaagaccagcgaatccaagaagacatacaacagcatctcaaaaatcgacaagatgagcaggatcgtcttcccggtgctcttcgggacattcaacttggtgtactgggctacctatctgaatagagagccagtaataaagggcgctgcctctccaaaatag

SEQ ID NO: 281723 - DNA, 1389 bp, Artificial Sequence
  derived and/or modified sequence
atggacaacggcatgttcagcggcttcatcatgatcaagaacctgctccttttctgtatctcgatgaatttgagttcccacttcggcttttcacagatgccaaccagtagcgtgaaggatgaaaccaacgacaatatcaccatctttacaaggatcttggacggcctgctcgatggatatgataaccggcttagaccgggattgggagaacggatcacccaggtcaggactgacatctacgtgaccagttttggacccgtgtccgatacagagatggagtacactatcgacgtatttttccgtcaatcgtggaaggacgagcgcctgcggtttaaggggcctatgcagcgcctgccccttaacaacctgttggctagcaaaatctggaccccggacactttcttccacaatgggaagaaaagtatcgctcataatatgactacacctaacaagttacttcgcttagaggacgatggtactctactttacaccatgaggttgacaatttctgcggagtgccctatgcaactggaagacttcccgatggatgcgcacgcatgtcctctgaagttcggcagttacgcctacccaaactccgaggtagtatacgtgtggacgaacggatccaccaaatccgtggtcgtggcggaggacggctcccggctcaatcagtatcacctgatgggacaaacagtgggaaccgagaatattagcacatccacaggcgaatacacgattatgaccgctcacttccacctgaagaggaagattgggtatttcgtcatccaaacttatcttccttgcattatgaccgtgatcctgtcccaagtgtcgttttggttgaatagggaaagtgttcccgcccgcacagtgttcggtgtgacaacagtcttaaccatgactactctgtcaatatcggcaagaaattccctgcctaaggttgcttacgcaacggcgatggattggttcatcgccgtctgttatgcattcgtgttcagcgcactgatcgagttcgctacggtaaactatttcaccaagagaggctgggcttgggatggaaagaaagcgctagaggcggcaaaaatcaaaaaaaagcgggaggtgatccttaataagagcactaacgcgttcaccaccggcaagatgagtcacccacccaacatccctaaggagcagacacccgccgggacctctaacactacctcagtctccgtcaagcccagcgaagagaaaacttctgaatccaaaaagacctataatagcatatccaagatcgataagatgagtcggattgtctttcctgtgctttttggcactttcaacctggtttactgggctacatatcttaaccgtgaacccgtgattaaaggggctgcatcgccgaagtag

SEQ ID NO: 281724 - DNA, 261 bp, Artificial Sequence
  derived and/or modified sequence
atggacaacggcatgttcagcggcttcatcatgatcaagaacctgctcctgttctgcatttcaatgaacctcagcagtcatttcggattctcccagatgcctactagttccgtcaaggatgaaaccaacgataacatcactattttcacgaggatacttgacgggttgctggatggctatgacaaccggttgcggcccggactgggcgagagaatcacacaggtcagaactgatatttatgtgacatcttttggtccctag

SEQ ID NO: 281725 - DNA, 450 bp, Artificial Sequence
  derived and/or modified sequence
atggacaacggcatgttcagcggcttcatcatgatcaagaacctgctcctgttttgtatatctatgaatctgtcgtctcacttcggatttagccaaatgccgactagctcagtaaaggatgagactaatgacaatattaccatctttaccagaatcctggacggactgctagatgggtatgacaacaggctgcgtccaggccttggagagcgcataacacaggtgcggacggatatctacgttacctcctttggcccagtgtctgacacagaaatggaatacaccatcgacgtgttttttagacagtcgtggaaggatgagcgactacggtttaagggccccatgcagcgactacctctgaacaatctcctcgcttctaaaatctggactcccgacacttttttccacaacggcaaaaagtcaattgctcacaacatgacgactccttag

SEQ ID NO: 281726 - DNA, 501 bp, Artificial Sequence
  derived and/or modified sequence
atggacaacggcatgttcagcggcttcatcatgatcaagaacctgttgctgttttgtatctccatgaatctttcctctcatttcggcttttctcagatgccgactagctccgtcaaagacgagaccaacgacaatatcaccatttttacccggatcctcgatggcttgttggacggatacgacaataggcttcgacctggtttgggcgagcgtattacacaggtgaggaccgacatctatgtaaccagctttggcccagtgtccgacactgaaatggaatatacaatagacgtgttctttcggcaatcctggaaagacgagcggctgaggttcaaagggccaatgcagaggctacccttaaataacctgctggcctccaaaatatggactcccgataccttctttcacaatggaaagaagtctatagcccacaatatgactacaccaaacaagcttcttaggctggaggacgacggcacgcttttgtacaccatgaggtag

SEQ ID NO: 281727 - DNA, 1389 bp, Artificial Sequence
  derived and/or modified sequence
atggacaatggaatgttctcaggattcattatgataaagaacctgctgctcttctgcatctctatgaacctcagttcccattttggcttctcccagatgccaacttccagtgtgaaagacgaaaccaacgataatattactatctttacaaggatcctggatggactgctcgacgggtacgataaccggttgagacccggtctgggtgagagaatcacgcaggtccgcactgacatctacgtgacctcttttggccctgtgtcggatacagaaatggagtataccatcgacgtgttcttcaggcagagctggaaagatgagcgtcttcgtttcaagggtccaatgcaaaggctcccactgaataatctgctggccagcaaaatttggacccctgacacattcttccacaacggaaagaagagtatcgctcataatatgacaactccaaataagctacttcgcttggaggacgacggcacgttactctacaccatgcgcctaaccatctcggcggagtgcccaatgcaacttgaggactttcctatggatgcccacgcgtgtccccttaagtttggaagctatgcctatcctaattctgaggtggtgtacgtctggacgaatggatcaacaaagtcagttgtagtcgctgaagacggatctcgccttaaccagtaccatctcatgggccagactgtggggaccgaaaatatcagcacctcaactggcgaatacactattatgactgcccacttccaccttaagaggaagatcggatatttcgtgatccagacgtatctcccctgcattatgaccgtgatcctgtcccaggtgtccttctggctcaaccgtgaatctgtgcctgcgcgtacagtgtttggggtgaccactgtgctgactatgaccactcttagcatttccgctaggaactctctgccaaaggtggcttacgccactgccatggactggtttatcgccgtgtgttatgctttcgtgttttctgccctgattgaattcgcgaccgtcaattactttaccaaaagaggttgggcttgggacgggaaaaaagctttggaggccgctaagattaaaaaaaagcgggaggtaatactgaataagagtacaaacgctttcactactgggaagatgagccacccccctaacattcctaaggaacagactcccgctggtacatccaacacgacatcggtatctgtgaagccctctgaggagaagacatctgagtcaaagaagacatataattcaatttccaaaattgacaaaatgagtcgtattgtctttccagtgctgttcggaacatttaaccttgtctactgggctacgtatcttaatagggagccggtcattaagggggcagcgagccccaaatag

SEQ ID NO: 281728 - DNA, 1389 bp, Artificial Sequence
  derived and/or modified sequence
atggataacggcatgttctcgggctttattatgatcaagaatctcctgctgttttgcattagcatgaacctgtcttcacactttggattttcacagatgccaacctcttccgtgaaggacgagacgaacgacaatatcaccattttcaccagaatcctcgatggcctgctggatggctatgataataggctgcggcctgggctcggggagcgcatcactcaggtgcgaactgatatatatgtgacttcgtttgggccagtctctgatacagagatggaatatacgattgacgtgttttttcgacaaagctggaaagatgagcgcctcagatttaagggccctatgcaacgtctgccactcaataatctccttgcgagcaagatttggaccccagacacattttttcacaatggaaaaaaaagtatcgcccacaacatgacgactcccaataagctgttacgcctcgaagacgatggaactttattatacactatgcggctaactatctcggccgagtgccctatgcagctagaagatttcccaatggacgctcacgcttgtcccctgaaatttgggtcttatgcctaccccaactccgaggttgtgtacgtctggacaaatggctcgactaagagcgtggtggtggcagaggacggctcaagactgaaccagtatcatctgatgggacagacagtgggcactgaaaacatctcaactagcaccggcgagtacaccatcatgaccgcccactttcatctcaagcggaaaatcggatatttcgtgattcaaacctatctgccttgtataatgactgttatcttgagtcaagtctccttctggctcaacagggagtcagtgcccgcaaggacagtgttcggcgtcactactgttctcacaatgaccacattgagtatttcggctagaaattccctgcccaaggtcgcttacgcaacggctatggattggttcatcgccgtgtgctatgctttcgtcttcagcgcgcttatagagttcgcgaccgtgaattatttcacaaagcgcggttgggcttgggatgggaagaaggcactcgaggctgccaagattaagaagaagcgggaagtcattctgaataaatccacaaatgccttcacaactggcaaaatgtcacatcccccaaatatccccaaggagcagacccccgctggaacatccaacacgacttctgtaagcgtgaagccatccgaggaaaaaacatccgagagcaaaaagacatacaatagcatctctaagatcgacaaaatgagtcgcattgtgtttccagttctgttcggaaccttcaatttggtttactgggccacctacctaaatagagaacctgtgattaagggagccgcatctccgaaatag

SEQ ID NO: 281729 - DNA, 1389 bp, Artificial Sequence
  derived and/or modified sequence
atggacaatggcatgttcagtggctttataatgatcaagaacttgctgctcttttgcattagcatgaatctgagtagccacttcggcttctcccaaatgccaacatctagcgtcaaggatgaaactaatgacaatataacaatctttaccaggatcctcgatggcttgctagacggatatgacaatagattacggcctggattgggggaacgcattactcaagttcgcaccgatatatacgtgacgtcctttggacccgtgtccgatacagaaatggagtataccatcgacgtttttttccgtcagtcttggaaagacgagcgcctgcgttttaaggggccaatgcagagactgcccttgaacaatctgcttgccagtaagatttggaccccagatactttcttccataatggcaaaaaatccatcgcacataatatgaccacccccaataagctactccgcctagaggatgatggcactctgttgtacaccatgagacttaccatctctgccgaatgtcccatgcaactagaggattttccaatggacgcccatgcttgtccactgaagtttgggagctacgcttatccaaattcagaagttgtttatgtgtggacaaacggtagtaccaagagtgtcgtggtggccgaggatgggtctagactgaatcaataccacctcatggggcagactgtgggcacggagaacatctccacttctacaggggaatataccatcatgacggcccactttcatctgaaaagaaaaattgggtatttcgtgattcagacatatcttccttgcataatgaccgtgatattatctcaggtttcattttggctgaaccgcgaaagtgtgccagccaggacagtctttggggttaccactgtgctgactatgactactctctcaataagcgctcgaaacagccttcccaaagttgcatatgctaccgcaatggactggttcattgccgtgtgctatgcctttgtgttcagcgcactcatagaatttgctaccgtgaattattttaccaaaaggggatgggcctgggacggcaagaaagcactggaagccgctaaaatcaagaagaagcgggaagtgatcctgaataagagcaccaatgctttcacaactggtaagatgtcacatcccccaaacatcccgaaagagcagacgccagcaggcacaagtaataccacgtccgtatccgtcaagcccagcgaagagaagaccagcgagagcaagaaaacatacaatagtattagcaagattgataagatgtctaggatagtgttccccgtgctgttcggcacatttaacctcgtgtactgggcgacctacctcaatcgagagccagttattaagggagctgcatccccaaagtag

SEQ ID NO: 281730 - DNA, 261 bp, Artificial Sequence
  derived and/or modified sequence
atggacaacgggatgttcagtgggtttatcatgattaaaaaccttctgctgttctgtatttcaatgaatcttagcagccatttcggcttcagccagatgcctacttcgagcgtaaaggacgagacaaacgacaatattacaatattcacacgtatactggatgggctgctagacggatacgataataggctgcgccctggtttgggcgaacggatcacccaggtgagaacagatatttatgtgacttctttcggcccatag

SEQ ID NO: 281731 - DNA, 450 bp, Artificial Sequence
  derived and/or modified sequence
atggacaatggcatgttcagtgggttcatcatgattaaaaacctgctgctgttttgcatcagtatgaacctgtcatctcattttggattcagtcagatgccaacatctagtgtgaaagatgagacgaatgacaacattactattttcacccggattctggatggcttgctggatggatacgataacaggcttcggcctggcctcggagagcggattacacaagtacgtaccgacatttatgtgaccagcttcggcccagtaagcgacactgagatggagtataccatcgacgtattctttagacagagctggaaggatgagaggctaaggttcaagggccctatgcagcgcctccccctcaataacctgctggcctcaaagatatggacccccgacacgttcttccacaacggtaagaaatcaatagctcataatatgacgacaccctag

SEQ ID NO: 281732 - DNA, 501 bp, Artificial Sequence
  derived and/or modified sequence
atggataatggaatgttctcgggctttatcatgataaaaaacctccttctcttctgtatcagcatgaacctgtctagtcacttcggcttctcccagatgcccacatccagcgttaaggatgagacaaacgataacattactatattcacccggattctggacgggcttctcgatggctacgataacagacttcgacccggactcggtgaacgtataactcaagtccggacggacatctatgtgacaagcttcggtcccgtctctgataccgagatggagtatactatcgatgtcttcttccggcagagttggaaggatgagaggttacggtttaaggggccaatgcagcggctaccccttaacaaccttcttgcctctaaaatttggacgcccgatacgtttttccacaacggtaaaaagtcgatagctcataatatgacaaccccaaacaaactccttaggctggaggacgacggaaccctgctgtataccatgcggtag

SEQ ID NO: 281733 - DNA, 51 bp, Artificial Sequence
  derived and/or modified sequence
atggacaacggtatgttcagcgggttcataatgatcaaaaacctcctttag

SEQ ID NO: 281734 - DNA, 1389 bp, Artificial Sequence
  derived and/or modified sequence
atggacaacggcatgttcagcggcttcatcatgatcaagaacctgctgctgttctgcatcagcatgaacctgagcagccacttcggcttcagccagatgcccaccagcagcgtgaaggacgagaccaacgacaacatcaccatcttcaccagaatcctggacggcctgctggacggctacgacaacagactgagacccggcctgggcgagagaatcacccaggtgagaaccgacatctacgtgaccagcttcggccccgtgagcgacaccgagatggagtacaccatcgacgtgttcttcagacagagctggaaggacgagagactgagattcaagggccccatgcagagactgcccctgaacaacctgctggccagcaagatctggacccccgacaccttcttccacaacggcaagaagagcatcgcccacaacatgaccacccccaacaagctgctgagactggaggacgacggcaccctgctgtacaccatgagactgaccatcagcgccgagtgccccatgcagctggaggacttccccatggacgcccacgcctgccccctgaagttcggcagctacgcctaccccaacagcgaggtggtgtacgtgtggaccaacggcagcaccaagagcgtggtggtggccgaggacggcagcagactgaaccagtaccacctgatgggccagaccgtgggcaccgagaacatcagcaccagcaccggcgagtacaccatcatgaccgcccacttccacctgaagagaaagatcggctacttcgtgatccagacctacctgccctgcatcatgaccgtgatcctgagccaggtgagcttctggctgaacagagagagcgtgcccgccagaaccgtgttcggcgtgaccaccgtgctgaccatgaccaccctgagcatcagcgccagaaacagcctgcccaaggtggcctacgccaccgccatggactggttcatcgccgtgtgctacgccttcgtgttcagcgccctgatcgagttcgccaccgtgaactacttcaccaagagaggctgggcctgggacggcaagaaggccctggaggccgccaagatcaagaagaagagagaggtgatcctgaacaagagcaccaacgccttcaccaccggcaagatgagccacccccccaacatccccaaggagcagacccccgccggcaccagcaacaccaccagcgtgagcgtgaagcccagcgaggagaagaccagcgagagcaagaagacctacaacagcatcagcaagatcgacaagatgagcagaatcgtgttccccgtgctgttcggcaccttcaacctggtgtactgggccacctacctgaacagagagcccgtgatcaagggcgccgccagccccaagtag

SEQ ID NO: 281735 - DNA, 261 bp, Artificial Sequence
  derived and/or modified sequence
atggacaacggcatgttcagcggcttcatcatgatcaagaacctgctgctgttctgcatcagcatgaacctgagcagccacttcggcttcagccagatgcccaccagcagcgtgaaggacgagaccaacgacaacatcaccatcttcaccagaatcctggacggcctgctggacggctacgacaacagactgagacccggcctgggcgagagaatcacccaggtgagaaccgacatctacgtgaccagcttcggcccctag

SEQ ID NO: 281736 - DNA, 450 bp, Artificial Sequence
  derived and/or modified sequence
atggacaacggcatgttcagcggcttcatcatgatcaagaacctgctgctgttctgcatcagcatgaacctgagcagccacttcggcttcagccagatgcccaccagcagcgtgaaggacgagaccaacgacaacatcaccatcttcaccagaatcctggacggcctgctggacggctacgacaacagactgagacccggcctgggcgagagaatcacccaggtgagaaccgacatctacgtgaccagcttcggccccgtgagcgacaccgagatggagtacaccatcgacgtgttcttcagacagagctggaaggacgagagactgagattcaagggccccatgcagagactgcccctgaacaacctgctggccagcaagatctggacccccgacaccttcttccacaacggcaagaagagcatcgcccacaacatgaccaccccctag

SEQ ID NO: 281737 - DNA, 501 bp, Artificial Sequence
  derived and/or modified sequence
atggacaacggcatgttcagcggcttcatcatgatcaagaacctgctgctgttctgcatcagcatgaacctgagcagccacttcggcttcagccagatgcccaccagcagcgtgaaggacgagaccaacgacaacatcaccatcttcaccagaatcctggacggcctgctggacggctacgacaacagactgagacccggcctgggcgagagaatcacccaggtgagaaccgacatctacgtgaccagcttcggccccgtgagcgacaccgagatggagtacaccatcgacgtgttcttcagacagagctggaaggacgagagactgagattcaagggccccatgcagagactgcccctgaacaacctgctggccagcaagatctggacccccgacaccttcttccacaacggcaagaagagcatcgcccacaacatgaccacccccaacaagctgctgagactggaggacgacggcaccctgctgtacaccatgagatag

SEQ ID NO: 281738 - DNA, 51 bp, Artificial Sequence
  derived and/or modified sequence
atggacaacggcatgttcagcggcttcatcatgatcaagaacctgctgtag

SEQ ID NO: 281739 - protein, 852 aa, Artificial Sequence
  derived and/or modified sequence
MKRAAAKHLIERYYHQLTEGCGNEACTNEFCASCPTFLRMDNNAAAIKALELYKINAKLCDPHPSKKGASSAYLENSKGAPNNSCSEIKMNKKGARIDFKDVTYLTEEKVYEILELCREREDYSPLIRVIGRVFSSAEALVQSFRKVKQHTKEELKSLQAKDEDKDEDEKEKAACSAAAMEEDSEASSSRIGDSSQGDNNLQKLGPDDVSVDIDAIRRVYTRLLSNEKIETAFLNALVYLSPNVECDLTYHNVYSRDPNYLNLFIIVMENRNLHSPEYLEMALPLFCKAMSKLPLAAQGKLIRLWSKYNADQIRRMMETFQQLITYKVISNEFNSRNLVNDDDAIVAASKCLKMVYYANVVGGEVDTNHNEEDDEEPIPESSELTLQELLGEERRNKKGPRVDPLETELGVKTLDCRKPLIPFEEFINEPLNEVLEMDKDYTFFKVETENKFSFMTCPFILNAVTKNLGLYYDNRIRMYSERRITVLYSLVQGQQLNPYLRLKVRRDHIIDDALVRLEMIAMENPADLKKQLYVEFEGEQGVDEGGVSKEFFQLVVEEIFNPDIGMFTYDESTKLFWFNPSSFETEGQFTLIGIVLGLAIYNNCILDVHFPMVVYRKLMGKKGTFRDLGDSHPVLYQSLKDLLEYEGNVEDDMMITFQISQTDLFGNPMMYDLKENGDKIPITNENRKEFVNLYSDYILNKSVEKQFKAFRRGFHMVTNESPLKYLFRPEEIELLICGSRNLDFQALEETTEYDGGYTRDSVLIREFWEIVHSFTDEQKRLFLQFTTGTDRAPVGGLGKLKMIIAKNGPDTERLPTSHTCFNVLLLPEYSSKEKLKERLLKAITYAKGFGML

SEQ ID NO: 281740 - DNA, 2559 bp, Artificial Sequence
  derived and/or modified sequence
atgaagagagccgccgccaagcacctgatcgagagatactaccaccagctgaccgagggctgcggcaacgaggcctgcaccaacgagttctgcgccagctgccccaccttcctgagaatggacaacaacgccgccgccatcaaggccctggagctgtacaagatcaacgccaagctgtgcgacccccaccccagcaagaagggcgccagcagcgcctacctggagaacagcaagggcgcccccaacaacagctgcagcgagatcaagatgaacaagaagggcgccagaatcgacttcaaggacgtgacctacctgaccgaggagaaggtgtacgagatcctggagctgtgcagagagagagaggactacagccccctgatcagagtgatcggcagagtgttcagcagcgccgaggccctggtgcagagcttcagaaaggtgaagcagcacaccaaggaggagctgaagagcctgcaggccaaggacgaggacaaggacgaggacgagaaggagaaggccgcctgcagcgccgccgccatggaggaggacagcgaggccagcagcagcagaatcggcgacagcagccagggcgacaacaacctgcagaagctgggccccgacgacgtgagcgtggacatcgacgccatcagaagagtgtacaccagactgctgagcaacgagaagatcgagaccgccttcctgaacgccctggtgtacctgagccccaacgtggagtgcgacctgacctaccacaacgtgtacagcagagaccccaactacctgaacctgttcatcatcgtgatggagaacagaaacctgcacagccccgagtacctggagatggccctgcccctgttctgcaaggccatgagcaagctgcccctggccgcccagggcaagctgatcagactgtggagcaagtacaacgccgaccagatcagaagaatgatggagaccttccagcagctgatcacctacaaggtgatcagcaacgagttcaacagcagaaacctggtgaacgacgacgacgccatcgtggccgccagcaagtgcctgaagatggtgtactacgccaacgtggtgggcggcgaggtggacaccaaccacaacgaggaggacgacgaggagcccatccccgagagcagcgagctgaccctgcaggagctgctgggcgaggagagaagaaacaagaagggccccagagtggaccccctggagaccgagctgggcgtgaagaccctggactgcagaaagcccctgatccccttcgaggagttcatcaacgagcccctgaacgaggtgctggagatggacaaggactacaccttcttcaaggtggagaccgagaacaagttcagcttcatgacctgccccttcatcctgaacgccgtgaccaagaacctgggcctgtactacgacaacagaatcagaatgtacagcgagagaagaatcaccgtgctgtacagcctggtgcagggccagcagctgaacccctacctgagactgaaggtgagaagagaccacatcatcgacgacgccctggtgagactggagatgatcgccatggagaaccccgccgacctgaagaagcagctgtacgtggagttcgagggcgagcagggcgtggacgagggcggcgtgagcaaggagttcttccagctggtggtggaggagatcttcaaccccgacatcggcatgttcacctacgacgagagcaccaagctgttctggttcaaccccagcagcttcgagaccgagggccagttcaccctgatcggcatcgtgctgggcctggccatctacaacaactgcatcctggacgtgcacttccccatggtggtgtacagaaagctgatgggcaagaagggcaccttcagagacctgggcgacagccaccccgtgctgtaccagagcctgaaggacctgctggagtacgagggcaacgtggaggacgacatgatgatcaccttccagatcagccagaccgacctgttcggcaaccccatgatgtacgacctgaaggagaacggcgacaagatccccatcaccaacgagaacagaaaggagttcgtgaacctgtacagcgactacatcctgaacaagagcgtggagaagcagttcaaggccttcagaagaggcttccacatggtgaccaacgagagccccctgaagtacctgttcagacccgaggagatcgagctgctgatctgcggcagcagaaacctggacttccaggccctggaggagaccaccgagtacgacggcggctacaccagagacagcgtgctgatcagagagttctgggagatcgtgcacagcttcaccgacgagcagaagagactgttcctgcagttcaccaccggcaccgacagagcccccgtgggcggcctgggcaagctgaagatgatcatcgccaagaacggccccgacaccgagagactgcccaccagccacacctgcttcaacgtgctgctgctgcccgagtacagcagcaaggagaagctgaaggagagactgctgaaggccatcacctacgccaagggcttcggcatgctgtag

SEQ ID NO: 281741 - DNA, 2559 bp, Artificial Sequence
  derived and/or modified sequence
atgaagagagctgcggcaaagcatttgatcgaacgatactaccaccagctgactgaggggtgtgggaatgaagcatgtacaaatgaattttgtgctagctgcccaacatttctccggatggacaataatgccgccgcaatcaaggcgttggaactctataaaattaacgccaagctgtgtgatccacacccatctaagaaaggcgcttcatctgcttacctggaaaattccaaaggtgctcctaacaattcttgctctgaaattaaaatgaataagaagggcgctcggatcgactttaaggacgtgacatacctcactgaagaaaaagtatatgagatccttgagctttgcagagaacgggaggactatagcccactcattcgggtaatcgggagggtattctcaagcgccgaagcactggtccagagctttcggaaggtcaagcagcatacaaaggaggagctgaagtctctccaggccaaggacgaggacaaagacgaggatgagaaggagaaagctgcttgcagcgccgcagctatggaagaagacagtgaggcgagctctagcagaatcggcgacagcagtcagggggacaacaacctgcaaaagttagggcccgatgacgttagtgtggacatcgatgccattcgtagagtttatacaagactgcttagcaatgagaaaatagagacagcgttccttaatgctcttgtgtacctgtctcccaatgtcgagtgtgacctaacgtatcacaacgtttactccagggatcctaattacctgaacttattcatcatcgttatggagaacagaaacctgcactcccctgagtacctggagatggccctaccactcttttgtaaagccatgagcaaattaccgctggcagctcaaggaaaactcatccgtttgtggtccaagtacaatgccgatcagatccggcggatgatggagaccttccagcagttgatcacttataaggttatctccaacgaatttaactccaggaacttggtgaacgacgacgacgctatcgtggcagcctccaaatgtctgaaaatggtctactatgctaacgtggtgggtggcgaagtggacacaaatcacaatgaggaagacgatgaagaacccattcctgagagcagcgagctcacgttacaagagctcctgggcgaggagaggcggaataaaaagggccccagagtggaccctttggagacggaattgggagtaaaaactctcgattgtcgaaagccgctaattccctttgaggaattcattaacgagccgctgaacgaagttttagagatggataaagattatacttttttcaaggtggagacagagaacaaattcagctttatgacctgcccctttattttaaacgctgtgactaagaacctgggcttgtattacgacaaccggattcggatgtacagcgagagacgaatcacagtgctttatagccttgtacaaggccagcagctcaacccatacctgaggttgaaagtgcgccgcgaccatattatcgatgatgccttggttaggctggagatgatcgctatggagaatcctgctgatctcaaaaaacaattgtacgtcgaatttgagggcgagcagggcgttgacgaggggggcgtcagcaaggaattctttcagctcgtcgtcgaagagatctttaacccagatattggaatgtttacatacgatgagtctaccaaactgttttggtttaatcctagctcattcgagaccgaagggcagttcaccctcattggtattgtgcttggactggcaatttacaataactgcatcctcgatgtccacttcccgatggtggtgtataggaagctgatggggaaaaaagggaccttccgggacctaggggactcacaccctgtgctataccaaagcctcaaagatttgctggagtacgagggaaacgtggaagatgatatgatgatcacttttcaaatctcccagaccgacttgtttggcaaccctatgatgtatgaccttaaggagaacggagataaaattcctatcaccaacgagaatagaaaagagtttgtgaacctctatagcgattatattctgaataagtcagtagagaagcaatttaaagcttttcgtagggggtttcatatggtcacgaacgagagtccactgaagtatttattcagaccggaagaaatagagttattaatttgtgggtcccgcaatcttgacttccaagcactggaggagacgacagagtatgacggtgggtatacgcgagattcggttctcattagggaattctgggagattgtgcatagctttactgatgagcaaaagaggcttttcctacagttcacgaccggcacagatagggctcctgtgggagggctcggtaaactaaagatgatcatagctaagaatggacctgacacggagcggttacctactagccatacctgtttcaacgtgctgctgctgcctgaatatagcagcaaggaaaaacttaaggaaaggctcctaaaggcgattacctatgccaagggcttcggcatgctgtag

SEQ ID NO: 281742 - DNA, 2559 bp, Artificial Sequence
  derived and/or modified sequence
atgaaacgcgccgccgccaaacatctgattgaaagatattatcaccagctgaccgaaggttgcggaaatgaagcttgtacaaacgagttctgtgcatcatgtcccaccttcttgagaatggacaataatgctgccgctataaaagccttagaactttataagatcaacgctaagctgtgcgacccccatccctcaaagaagggggcgagctcagcctacctggaaaacagcaagggcgcccctaacaatagctgctctgagattaaaatgaataagaagggagcccgcatcgatttcaaggatgtgacatacctaactgaggagaaggtgtacgaaatattggaactgtgccgggaaagggaggattacagccccctgattagggtgataggccgtgtattctccagcgcggaggcactagtccagtcctttcggaaggttaagcagcataccaaagaagagcttaagagtctgcaagcgaaggacgaagacaaagacgaggatgagaaggaaaaggccgcttgttcagctgccgctatggaggaggattccgaggcttcttcctccaggattggcgatagctcccaaggggataacaatttgcagaagctggggccggacgatgtatctgtagatatcgatgcaatccgacgagtttatacacggcttctgtctaacgagaaaatcgagacggcctttttgaacgcgcttgtgtatctgtcaccaaacgtcgaatgcgacttgacctaccataatgtttactctagggatccaaattatctgaacctctttatcattgtgatggaaaaccggaatctccacagccccgagtaccttgagatggcgcttcccttattctgtaaggcaatgtcgaaattgccgcttgcggcccagggtaagctgattcggttatggtctaaatacaacgccgaccagattaggcgcatgatggaaacattccagcagctaatcacctacaaagtgatcagcaacgagttcaacagcagaaacttggtgaacgacgatgatgctatcgtggccgcctccaagtgtctcaaaatggtctactatgctaatgttgtggggggtgaagtggacactaaccacaacgaagaggacgacgaagagcccattcctgagtcctctgagctgacactgcaggagctgctgggtgaggagagaaggaataagaagggaccaagagtggatcccctggagactgaattaggcgttaagacactggattgcagaaagcctcttattccattcgaggagttcatcaatgagccgctcaatgaggttcttgagatggataaggactacactttctttaaggtggagacagaaaataaatttagttttatgacctgcccattcatcctgaatgccgttactaagaacttggggttgtactatgacaataggatcaggatgtactcagagcggagaatcaccgtgctttactctctggttcagggtcagcagttgaatccttatctcaggctgaaagtgaggcgggaccacatcatcgacgatgctctggtgcgacttgagatgatcgctatggagaatccagctgatctgaaaaagcagttatatgttgagtttgagggcgagcagggtgtcgatgagggcggggtgagcaaggagttctttcagcttgttgtcgaggagatattcaatcccgacataggtatgtttacctacgatgagtccacaaaactattctggttcaatccaagctcattcgagactgaggggcaatttacattgataggtatcgtgctcggattggctatctataataattgcatattggacgtacatttcccgatggtggtctacagaaagctcatgggaaaaaaagggacctttagagacctaggagacagtcatccagtactatatcagagcttaaaggacctccttgagtacgagggaaatgtggaagacgacatgatgattactttccagatctcccaaacagacctgtttgggaatccgatgatgtacgatctcaaggagaacggagacaagatccctattactaatgaaaacagaaaagagttcgttaacttatactctgactatatcctgaataagagcgtggaaaaacagtttaaagctttccgcagggggtttcatatggtaaccaacgagtcgcccctgaagtacctattccgcccggaagagattgaactgctgatttgtggctctaggaatctcgacttccaggctcttgaggaaaccaccgaatacgacggtgggtacactcgcgacagcgtgctgatcagggaattctgggagattgtccactcctttactgacgagcagaagcgcctctttctgcagttcactactgggactgaccgggcccccgtaggaggcctgggcaagctgaagatgatcatcgctaaaaatggacccgatactgagaggctcccgaccagccatacctgcttcaacgtcctgctcctccctgagtattccagcaaagagaagctgaaagagcggcttctaaaagctatcacttacgcgaaaggctttggcatgctgtag

SEQ ID NO: 281743 - DNA, 2559 bp, Artificial Sequence
  derived and/or modified sequence
atgaagagagctgctgccaagcacctgattgaaagatactaccaccagctgacagagggctgtggaaatgaggcctgcaccaatgagttctgtgccagctgccccaccttcctgaggatggacaacaatgctgctgccatcaaggccctggagctgtacaagatcaatgccaagctgtgtgacccccaccccagcaagaagggggccagcagcgcctacctggagaacagcaagggggcccccaacaacagctgcagcgagatcaagatgaacaagaagggggccagaattgacttcaaggatgtgacctacctgacagaggagaaggtgtatgagatcctggagctgtgccgggagcgggaggactacagccccctcatccgggtcatcggccgggtcttcagcagcgctgaggccctggtgcagagcttcaggaaggtgaagcagcacaccaaggaggagctgaagagcctgcaggccaaggatgaggacaaggatgaagatgagaaggagaaggccgcctgcagcgctgctgccatggaggaggacagcgaggccagcagcagcagaattggagacagcagccagggcgacaacaacctgcagaagctgggcccagatgatgtgtctgtggacattgatgccatcagaagagtgtacacccggctgctgagcaatgagaagattgaaacagccttcctgaatgccctggtgtacctgagccccaacgtggagtgtgacctgacctaccacaacgtgtacagccgggaccccaactacctgaacctcttcatcatcgtgatggagaacagaaacctgcacagccctgagtacctggagatggccctgcccctcttctgcaaggccatgagcaagctgcccctggccgcccagggcaagctgatccggctgtggagcaagtacaatgctgaccagatccggaggatgatggagaccttccagcagctgatcacctacaaggtgatcagcaatgagttcaacagcaggaacctggtgaatgatgatgatgccatcgtggccgccagcaagtgcctgaagatggtgtactatgccaacgtggtgggcggggaggtggacaccaaccacaatgaggaggatgatgaggagcccatccctgagagcagcgagctgaccctgcaggagctgctgggggaggagaggaggaacaagaagggcccccgggtggaccccctggagacagagctgggcgtgaagaccctggactgcaggaagcccctcatcccctttgaggagttcatcaatgagcccctgaatgaggtgctggagatggacaaggactacaccttcttcaaggtggagacagagaacaagttctccttcatgacctgccccttcatcctgaatgctgtgaccaagaacctgggcctgtactatgacaaccgcatccgcatgtacagcgagcggcgcatcaccgtgctgtacagcctggtgcagggccagcagctgaacccctacctgcggctgaaggtgagaagagaccacatcattgatgatgccctggtgcggctggagatgattgccatggagaacccagctgacctgaagaagcagctgtatgtggagtttgaaggagagcagggcgtggatgaaggaggagtgtccaaggagttcttccagctggtggtggaggagatcttcaacccagacatcggcatgttcacctatgatgagagcaccaagctgttctggttcaaccccagcagctttgaaacagagggccagttcaccctcatcggcatcgtgctgggcctggccatctacaacaactgcatcctggatgtgcacttccccatggtggtgtacaggaagctgatgggcaagaagggcaccttccgggacctgggggacagccaccctgtgctgtaccagagcctgaaggacctgctggagtatgagggcaatgtggaggatgacatgatgatcaccttccagatcagccagacagacctgtttggaaaccccatgatgtatgacctgaaggaaaatggagacaagatccccatcaccaatgaaaataggaaggagtttgtgaacctgtacagcgactacatcctgaacaagtctgtggagaagcagttcaaggccttcagaagaggcttccacatggtgaccaatgaaagccccctgaagtacctgttccggcctgaggagattgagctgctgatctgtggcagcaggaacctggacttccaggccctggaggagaccacagaatatgatggcggctacacccgggacagcgtgctgatccgggagttctgggagatcgtgcacagcttcacagatgagcagaagaggctcttcctgcagttcaccactggaacagaccgggcccctgtgggcggcctgggcaagctgaagatgatcatcgccaagaatggaccagacacagagcggctgcccaccagccacacctgcttcaacgtgctgctgctgcctgagtacagcagcaaggagaagctgaaggagcggctgctgaaggccatcacctacgccaagggcttcggcatgctgtag

SEQ ID NO: 281744 - DNA, 2559 bp, Artificial Sequence
  derived and/or modified sequence
atgaagcgggccgccgccaagcacctgatcgagcggtactaccaccagcttaccgaagggtgcggcaacgaggcatgtaccaatgagttttgtgcaagctgccctacctttctacggatggacaataatgccgctgccatcaaggccctggagctgtacaaaattaatgctaagctgtgcgacccacatcctagcaagaagggggcaagtagtgcctatctagaaaactcgaagggggccccaaataattcctgttcagagattaagatgaataagaagggcgctcggatcgatttcaaggacgtgacatatctcacagaagaaaaggtctacgaaatcctggaactctgtcgcgagagggaggactacagcccactcattagggtgataggtcgcgtatttagcagcgcagaggctttagtgcagtccttccgaaaggtcaaacaacacacaaaagaggagctcaaatctctccaggcgaaagacgaggacaaggacgaggacgagaaggagaaagcagcatgttcagccgcggccatggaggaagacagcgaagctagttcaagtcgcatcggagactccagccagggtgataataacctacagaagctgggcccagatgacgtaagtgttgacattgacgctatacgtcgtgtctacaccaggctgctttccaatgagaagattgaaacagcatttctcaatgctctggtctatctcagccccaacgttgagtgtgatctgacctatcacaatgtgtatagtcgagatccaaactatctaaacctctttatcattgttatggagaatcgcaatctgcatagtccagagtacctggaaatggctctccctttgttttgtaaggcaatgagtaaactgccgctcgccgcccagggaaagctaatccgactatggtcaaaatacaatgcagatcagattagacgaatgatggagacatttcagcagctgataacgtacaaggtgatatccaatgaatttaacagtagaaatctcgttaatgatgacgacgctattgtggcagcatcgaaatgcctaaaaatggtgtactacgcgaacgtcgtggggggtgaagtggatactaaccacaatgaggaggacgatgaggaacctattccagagagtagtgaattgacattacaggaattgctcggggaggagcggcgaaataaaaaggggccacgagtcgatcctctggaaaccgagttaggggttaaaacgcttgactgccgcaaacccctcattccctttgaagaattcattaatgaaccactgaatgaagttctggagatggacaaggactacaccttcttcaaagtggaaactgaaaataagttctccttcatgacctgccccttcatacttaacgctgttactaagaatctgggactctactacgataaccgtattcggatgtactccgagaggaggatcactgttttatactcactggtccagggccagcagctgaatccctacttaagattgaaagtaagacgtgatcacatcattgacgacgcactagtgcgactggagatgattgctatggagaaccctgctgacctgaagaaacaactttacgtcgagtttgagggagagcagggcgtcgacgaagggggtgtgtctaaggagttttttcagctggtcgttgaggagatcttcaaccctgacatcggaatgttcacttatgatgaatccacaaagctcttctggtttaatccctccagtttcgagacggagggacagtttacattaatcggcatcgtgcttggactcgccatatataacaattgtatcctggacgtccactttccgatggtagtctaccgcaagctcatgggaaagaaaggaaccttcagagacctgggagattcccacccagttctctaccaaagtttaaaggatctgttagaatacgagggtaacgtggaagacgatatgatgattacatttcagataagtcagaccgacctcttcgggaaccctatgatgtacgacctcaaggagaacggggacaagataccgatcactaacgagaacagaaaagaatttgtgaatctgtactcagattatatactcaacaagtcagtggaaaaacagttcaaggccttccgacgtggctttcatatggtgacaaacgagtcaccgctcaagtacctctttaggcccgaggaaatcgagcttctgatctgcggttcaaggaaccttgacttccaggccttggaagagaccactgagtacgacggtggctataccagagatagtgtgctcattagagagttttgggagatagttcactcatttaccgacgagcaaaaaagactattcctgcagtttactaccggcacggaccgggcccctgtgggcggtctgggaaaattaaagatgattatcgccaaaaatggtcctgatactgagaggctccctacgagccatacctgcttcaacgtgcttcttctgccagagtattccagcaaggaaaaactaaaagaacgtttgctaaaggcaattacatatgctaaaggctttgggatgttatag

SEQ ID NO: 281745 - DNA, 2559 bp, Artificial Sequence
  derived and/or modified sequence
atgaagcgggccgccgccaagcacctgatcgagcggtactaccaccagttgactgaaggttgcggtaacgaggcttgtactaacgagttttgtgcttcttgtcccacatttttacgcatggataacaatgccgcagccatcaaggccctggaattgtataagatcaacgctaaactatgcgatcctcacccatccaagaagggagctagtagcgcttatttggaaaactctaagggcgctccaaacaattcttgttcagagattaaaatgaacaaaaagggagccaggattgatttcaaggacgtgacttacctaactgaagagaaagtgtatgagatcttagaactgtgccgtgagagggaagactactcacctctgatacgagtaatcggccgcgtgttctcctcagccgaagcacttgtacagagcttccgcaaggttaagcaacacaccaaggaggaactcaagtctctccaagcgaaggacgaagataaagatgaggatgagaaggagaaagccgcttgttctgccgccgccatggaagaagactctgaagcctcaagttcaaggatcggggattcttcacagggcgacaacaacctgcagaaactgggcccagatgatgtgagcgtggatattgatgccatccgccgggtctatacacgccttctgagcaatgaaaagatagaaacagccttccttaacgcccttgtgtacctttctcccaatgtggaatgcgacctcacgtaccacaacgtctatagtcgcgaccccaactacctcaacttatttataatcgtgatggaaaacagaaacctccacagtcctgaatacctggaaatggcactgccactgttctgtaaagcaatgtctaaactgccgctggccgcccagggaaaactcatccggctctggtctaagtataatgctgatcagattcggaggatgatggagacgtttcagcaattgatcacatataaggtaatcagcaacgaatttaactcacggaacttagtaaacgatgatgatgctatcgtggctgcttccaagtgcctaaaaatggtctactatgccaacgtagtaggaggggaggtggataccaaccataacgaggaagacgatgaggaaccaatacctgagtcatccgagttaacactccaggaattgcttggggaggagcgacgcaacaagaaagggccccgagttgatcctttagagacagaactgggcgtgaaaacactggattgtcgaaagcctctgatacccttcgaggagtttattaatgagcccctgaatgaggtgctggagatggacaaggactataccttcttcaaggtcgagaccgagaataaattttcattcatgacctgcccttttattctcaacgctgtcacaaagaacctgggactgtactatgataataggatccggatgtattccgagagaagaattactgtgctctactccttagtgcagggacagcagctgaacccctatttacgactgaaggtacgaagagaccatattattgacgatgctctggtccgcctggaaatgattgcaatggagaaccctgcggacctgaagaaacagctgtacgtggagtttgaaggagaacagggcgtggacgaaggaggcgtgtctaaggagtttttccaactggtggtcgaagagatcttcaaccccgacatcggcatgtttacgtacgacgagtccaccaaattgttctggttcaacccttcgagtttcgaaaccgaaggccagttcacacttattgggattgttctcgggctagctatctataacaattgcatcctcgacgttcacttccctatggtggtgtaccgcaaacttatggggaagaagggaaccttcagagatctgggggactcccaccccgttctgtatcagtctctcaaagacctgctcgagtatgaagggaatgtggaggacgacatgatgattacattccagattagtcagaccgatctgtttgggaatcctatgatgtacgacctgaaagaaaacggagacaagatccctatcaccaacgagaaccgtaaggaatttgttaatctgtactccgattatatcctgaataagtccgttgagaagcaatttaaggcatttcgcaggggcttccatatggtgacaaacgagtctcctttgaagtacttgttcaggcccgaggaaatcgaattattgatctgtggctcacgtaacctggactttcaggctctggaggaaaccaccgaatatgatgggggatacacccgcgattcagttctgatccgggaattctgggaaatagtgcattcttttaccgacgagcaaaagcggttgtttttacagttcactacaggcaccgacagggctcctgttggaggcctagggaagttgaaaatgattattgctaagaatggtccagatacggaacgtcttccaactagccacacctgtttcaacgtcctgctgctcccagagtattctagtaaggagaagctcaaggaacggctgctcaaggccattacatacgccaaagggttcggaatgctctag

SEQ ID NO: 281746 - DNA, 2559 bp, Artificial Sequence
  derived and/or modified sequence
atgaagcgtgccgcagcgaagcacctgatagagcgttattatcaccagttaactgaaggctgtggcaatgaagcttgcaccaacgaattctgtgcgtcctgcccaacatttctgcgcatggataacaacgccgcagctataaaggccctagaactttacaaaataaatgcaaagctgtgcgatccgcacccttcaaaaaaaggtgcctcttcagcctatctcgagaattccaagggcgcaccaaacaacagctgctcggaaatcaagatgaacaaaaaaggggcaagaattgattttaaggatgtgacatacctgactgaggagaaggtttacgagatcttagagctgtgccgcgaacgggaagattactcccctcttatcagggtcatcggacgagtcttctcatcggcagaggcactggtacagtcattccggaaggtgaaacagcacaccaaggaggagctcaaatcgctgcaagctaaagatgaggataaagatgaagacgagaaagagaaagctgcgtgttccgctgctgcaatggaggaggatagtgaggcatcctccagccgaattggggactcctcacagggcgacaataacctgcaaaaactgggtcccgacgatgtgagcgttgacatagatgccatcagaagggtgtacactcggctgctgtctaacgaaaagatcgagaccgctttccttaatgcgctagtgtacctctcgccgaacgtcgagtgtgacttgacataccataacgtttacagtagggacccgaactacttgaatctgtttataatcgtgatggagaatcggaacctgcatagtcccgagtatttggaaatggccctccctctcttctgcaaggccatgtctaagttgcccctcgcagcgcagggtaaactaatccgcctttggagcaagtacaatgcagaccaaattcggaggatgatggagacttttcaacagctcatcacgtacaaggtcataagtaatgaatttaattcccgcaatctggttaacgacgacgacgcaattgtggccgcttccaaatgtctgaagatggtgtactacgccaacgtcgtagggggagaagttgatacgaatcacaacgaggaagacgatgaagagccgatacctgagagctcagagctgactctgcaggagctgctgggcgaagagcgtagaaataagaagggccctcgcgtagatccgttggaaaccgaactaggtgtgaaaacgctcgactgtcgaaagcccttgatcccatttgaggagttcatcaatgagccattgaatgaggtcctggagatggataaagattacacgtttttcaaagtggaaacagagaataaattctccttcatgacctgtccgttcatactgaatgccgttacgaaaaacttggggctgtattatgacaatagaatcagaatgtactctgagagaagaatcaccgtactgtactcactggtccagggacaacagttaaacccctatcttcggttaaaagttcgacgcgatcacatcatcgacgacgctctggtacggctggaaatgatcgctatggaaaatcctgccgatctcaagaagcaactgtacgtggaatttgaaggagaacagggggttgacgaaggtggtgtttcaaaggagttcttccagctggtcgttgaggaaattttcaatcccgatatcggaatgtttacctatgacgagagtacaaaacttttttggttcaacccctctagttttgaaaccgaaggccaatttacactcataggcatcgtgctgggtctggccatctacaataattgcattctggatgtgcactttcccatggttgtctatagaaaattgatggggaagaaggggacttttcgagacttgggcgatagccaccctgtgctttatcagtccctgaaagacttgctcgagtacgagggaaacgtggaggacgacatgatgataacttttcagatctctcaaactgatctgttcggaaaccccatgatgtacgacctgaaagaaaacggagacaaaattccgatcactaacgagaatcgtaaggaattcgttaatctgtattcggactacatcttaaacaagagcgtggagaagcagttcaaagcatttagacgtggctttcatatggttactaatgagagccccttgaagtatctatttcgaccagaggagattgaacttcttatctgtggttcacgcaacctcgattttcaggcactggaagagaccaccgaatatgacgggggatacacccgggactctgtgcttatccgagagttctgggaaatcgtgcactccttcaccgacgagcagaaaaggctctttcttcaatttacaaccgggactgaccgggctccagtggggggactaggcaagctgaaaatgattattgcgaaaaatggacctgacactgagcgccttcccacctctcacacatgcttcaacgtccttctgctccccgagtacagctcaaaggaaaagctgaaggaacgactgttgaaggctattacgtacgctaagggatttggcatgttatag

SEQ ID NO: 281747 - DNA, 2559 bp, Artificial Sequence
  derived and/or modified sequence
atgaaacgggctgctgccaagcatctgatcgaacgttactatcaccagttgactgaagggtgcgggaatgaagcttgtacaaacgagttttgcgccagctgcccaacattcctgagaatggataacaatgcagccgcaattaaggcccttgaattgtacaagatcaacgccaagctctgtgatccccacccctctaaaaagggggcttctagcgcttatttagagaatagtaagggcgcacctaacaactcttgctctgagatcaaaatgaacaagaagggagctaggatagatttcaaggacgtgacctaccttacagaggaaaaggtctacgagatcctggagctctgtagagagcgggaggactatagcccactaattcgcgtgatcggccgtgtgttcagcagcgctgaagctctagtgcagtcctttcgcaaagttaaacagcatactaaagaggagctcaaaagtctgcaggccaaagatgaggataaagacgaggatgagaaggagaaagcagcgtgcagtgctgcggctatggaggaagattcggaagcctcttcaagtcggattggcgattcaagccaaggggacaacaaccttcagaagcttggacctgacgatgtgtccgttgacatagacgcaatccgccgagtctacacgcggctcctttcgaacgagaagattgagacagccttcctaaacgccctggtgtacctcagtccaaacgtggaatgcgacctcacctatcacaatgtctactcgagggaccccaactatctcaacctatttatcattgtgatggagaacaggaacctgcacagtccagaataccttgagatggctttaccactgttctgtaaggctatgagtaagttgcccctggccgctcagggaaagctgattcggctgtggtcaaaatacaatgctgatcagattcgaaggatgatggaaacttttcaacagctaattacttacaaggttatcagtaacgagttcaacagcagaaaccttgttaacgatgacgacgcaatcgtggctgcatccaagtgcctgaagatggtgtattatgccaacgtagtcggcggagaagtcgatactaaccataatgaggaggacgacgaagagcccatcccagaaagctcagaattaaccctgcaggaactcttaggcgaagagcgcagaaacaagaaaggcccacgcgtggatcctctggagactgaactaggtgtcaaaacacttgactgccggaagcccctgatcccgttcgaagagttcatcaatgagcccctgaatgaagttctcgagatggacaaggattatacgttcttcaaggttgagaccgagaataagttctcatttatgacctgccccttcatcctcaatgcggtcaccaagaacttaggcctttattacgataacagaatcagaatgtattccgagcgacggatcactgtactgtactctctcgtgcagggtcagcaactcaacccatatcttaggctgaaggtcagacgggatcacattatcgatgatgcattagtgcgcctcgagatgatcgcgatggaaaatccggcagatctgaagaaacagctgtatgttgaatttgaaggtgaacagggagtagacgagggcggagtttccaaggagttctttcagcttgtagtggaggaaatcttcaatcccgacatcggaatgtttacttacgacgagtcaactaaactgttctggtttaacccttcttccttcgaaaccgaggggcagttcacgcttattggcattgtgttgggccttgctatctacaataactgcatcttagatgtacattttccaatggtggtctaccgcaaactgatgggaaagaagggcacatttagggacctgggggacagccaccctgtgctgtaccagtccctgaaggacttactcgagtacgaaggcaatgtcgaggacgatatgatgattacttttcagatcagccagactgatctgttcgggaaccccatgatgtatgacctgaaggaaaacggcgataaaatcccaatcaccaatgaaaaccgtaaggaatttgtgaatctgtatagtgattatatcctcaacaaaagtgtcgagaagcagtttaaagcgtttaggcgcggttttcacatggttactaatgaatcccccctgaagtatctgttccgacccgaagaaattgaactcctgatttgcggctctagaaacctcgattttcaagcgctcgaagagacgacagaatatgatggaggctacacccgggacagcgtgctgatccgcgaattttgggagatcgtccactcatttactgatgagcagaaaaggctgttcttacagtttaccactgggaccgaccgagctcctgtggggggactgggcaagctgaagatgatcatcgccaagaacgggcctgatacggaaaggcttcctacctcgcacacatgcttcaatgttctcctgctgcctgaatactcctcaaaggaaaaattaaaagaaagactacttaaggctatcacttatgcgaaaggcttcggtatgctgtag

SEQ ID NO: 281748 - DNA, 8795 bp, Artificial Sequence
  derived and/or modified sequence
gcggccgcactagtaccccggagcccatgggcgcgccgagccgggcgcgggggcgctgaacggcggagcgggagcggccggaggagccatggactgcagcctcgtgcggacgctcgtgcacagatactgtgcaggagaagagaattgggtggacagcaggaccatctacgtgggacacagggagccacctccgggcgcagaggcctacatcccacagagatacccagacaacaggatcgtctcgtccaagtacacattttggaactttatacccaagaatttatttgaacaattcagaagagtagccaacttttatttccttatcatatttctggtgcagttgattattgatacacccacaagtccagtgacaagcggacttccactcttctttgtcattactgtgacggctatcaaacagggttatgaagactggcttcgacataaagcagacaatgccatgaaccagtgtcctgttcatttcattcagcacggcaagctcgttcggaaacaaagtcgaaagctgcgagttggggacattgtcatggttaaggaggacgagacctttccctgcgacttgatcttcctttccagcaaccggggagatgggacgtgccacgtcaccaccgccagcttggatggagaatccagccataaaacgcattacgcggtccaggacaccaaaggcttccacacagaggaggatatcggcggacttcacgccaccatcgagtgtgagcagccccagcccgacctctacaagttcgtgggtcgcatcaacgtttacagtgacctgaatgaccccgtggtgaggcccttaggatcggaaaacctgctgcttagaggagctacactgaagaacactgagaaaatctttggtgtggctatttacacgggaatggaaaccaagatggcattaaattatcaatcaaaatctcagaagcgatctgccgtggaaaaatcgatgaatgcgttcctcattgtgtatctctgcattctgatcagcaaagccctgataaacactgtgctgaaatacatgtggcagagtgagccctttcgggatgagccgtggtataatcagaaaacggagtcggaaaggcagaggaatctgttcctcaaggcattcacggacttcctggccttcatggtcctctttaactacatcatccctgtgtccatgtacgtcacggtcgagatgcagaagttcctcggctcttacttcatcacctgggacgaagacatgtttgacgaggagactggcgaggggcctctggtgaacacgtcggacctcaatgaagagctgggacaggtggagtacatcttcacagacaagaccggcaccctcacggaaaacaacatggagttcaaggagtgctgcatcgaaggccatgtctacgtgccccacgtcatctgcaacgggcaggtcctcccagagtcgtcaggaatcgacatgattgactcgtcccccagcgtcaacgggagggagcgcgaggagctgtttttccgggccctctgtctctgccacaccgtccaggtgaaagacgatgacagcgtagacggccccaggaaatcgccggacggggggaaatcctgtgtgtacatctcatcctcgcccgacgaggtggcgctggtcgaaggtgtccagagacttggctttacctacctaaggctgaaggacaattacatggagatattaaacagggagaaccacatcgaaaggtttgaattgctggaaattttgagttttgactcagtcagaaggagaatgagtgtaattgtaaaatctgctacaggagaaatttatctgttttgcaaaggagcagattcttcgatattcccccgagtgatagaaggcaaagttgaccagatccgagccagagtggagcgtaacgcagtggaggggctccgaactttgtgtgttgcttataaaaggctgatccaagaagaatatgaaggcatttgtaagctgctgcaggctgccaaagtggcccttcaagatcgagagaaaaagttagcagaagcctatgagcaaatagagaaagatcttactctgcttggtgctacagctgttgaggaccggctgcaggagaaagctgcagacaccatcgaggccctgcagaaggccgggatcaaagtctgggttctcacgggagacaagatggagacggccgcggccacgtgctacgcctgcaagctcttccgcaggaacacgcagctgctggagctgaccaccaagaggatcgaggagcagagcctgcacgacgtcctgttcgagctgagcaagacggtcctgcgccacagcgggagcctgaccagagacaacctgtccggactttcagcagatatgcaggactacggtttaattatcgacggagctgcactgtctctgataatgaagcctcgagaagacgggagttccggcaactacagggagctcttcctggaaatctgccggagctgcagcgcggtgctctgctgccgcatggcgcccttgcagaaggctcagattgttaaattaatcaaattttcaaaagagcacccaatcacgttagcaattggcgatggtgcaaatgatgtcagcatgattctggaagcgcacgtgggcataggtgtcatcggcaaggaaggccgccaggctgccaggaacagcgactatgcaatcccaaagtttaagcatttgaagaagatgctgcttgttcacgggcatttttattacattaggatctctgagctcgtgcagtacttcttctataagaacgtctgcttcatcttccctcagtttttataccagttcttctgtgggttttcacaacagactttgtacgacaccgcgtatctgaccctctacaacatcagcttcacctccctccccatcctcctgtacagcctcatggagcagcatgttggcattgacgtgctcaagagagacccgaccctgtacagggacgtcgccaagaatgccctgctgcgctggcgcgtgttcatctactggacgctcctgggactgtttgacgcactggtgttcttctttggtgcttatttcgtgtttgaaaatacaactgtgacaagcaacgggcagatatttggaaactggacgtttggaacgctggtattcaccgtgatggtgttcacagttacactaaagcttgcattggacacacactactggacttggatcaaccattttgtcatctgggggtcgctgctgttctacgttgtcttttcgcttctctggggaggagtgatctggccgttcctcaactaccagaggatgtactacgtgttcatccagatgctgtccagcgggcccgcctggctggccatcgtgctgctggtgaccatcagcctccttcccgacgtcctcaagaaagtcctgtgccggcagctgtggccaacagcaacagagagagtccagactaagagccagtgcctttctgtcgagcagtcaaccatctttatgctttctcagacttccagcagcctgagtttctgatggaacaagagcccaggctaccagagcacctgtccctcggccgcctggtacagctcccactctcagcaggtgacactcgcggcctggaaggagaaggtgtccacggagcccccacccatcctcggcggttcccatcaccactgcagttccatcccaagtcacagctgccctaggtcccgtgtgggaatgctcgtgtgatggatggtcctaagcctgtggagactgtgcacgtgcctcttcctggcccccagcaggcaaggaggggggtcacaggccttgccctcgagcatggcaccctggccgcctggacccagcactgtggttgttgagccacaccagtggcctctgggcattcggctcaacgcaggagggacattctgctggcccaccctgcgcgctgtcatgcagaggccattcccccaggcctgtgtcttcacccacctgccatcattggcctttgctgtcactgggagagaagagccgtccagggacccatggtggcccacatgtggatgccacatgctgctgtttcctgcttgcccggccaccacccatgccctccatagggtgaggtggagccatggtggtgcgtcctttactcaacaaccctccaatccggatgctgtgggaagggccgggtcactcggataccatcatccctgcggatgcaccgccgtaccctgctcatctgggagtggtttccctgcggttacgtccaagcccgcctgccctgtgtgttggggctggctgagtttcggtctccccatcaccggccgcctcgtggagaaggcagtgccacgtgggaggacaaggccacgccggcagcttccagccctgccgcagaagtgccaggatgtccatcagccactcgccagggcacggagccgtcagtccactgttacgggagaatgttgatttcgcgggtgcgagggccgggagacagatacttggctgtgatgagcagacatcctctgtccccgtggaggggtcaacaccaaggtggtgttcgtgcaccagaacctgtctcgggctgacgggggtggcacacaggacacgggtggatcccaacaggcagcaccgcacctctgcccgcctcccgcactgcagctccgcccgccgggctctgcgtccccacgtcccctcgtcccatccccacgtcccctcatcccgtcacctcgtccccacatccccttgccccgtcacctcgtcctcatgtccccttgtcctgtcacctcgtccccacgtcccctcgtctcctcatccccacgtcctctcgtccccttgtcccgtccccacataccctcgtccccatgtccccacgcagggctctccttcgtcttaggatctgtccagcgctgctctgggtgggttagcaaccccagggctgctgtgataggaagtccctgttgttctccgtactggcatttctatttctagaaataatatttgacatagccttaatggtccttaaagaagacatttcagtgtgagattcagacttcagacgctgaaactgctgcctttcaggaaagcaccaccaacgctggaggaggagccggccctcacgcccgccccgcgccacgctgtggaacggggctccggcaagtgaaacccagagggtgtttccgaggtgctcgacagtaggtatttttggaagctcagatttcaccatttgattgtataatcttttacctataaaatatttatttgaagtagagggtaaatcagcggtaagaacagtgaacacagtggttgggataaaataaggtgacaaacatcacaccaaagatgagggtagcgagcaactggcttgagcagacagaacggggaagactccactctgtcccgaggggccagccgcaggcgtccccagggccaccctgccctgaggtccttgtgtggccgccctggcttggcagccctgcccacgctgcccccgcaaacaatggtgtgtgcgtttttacagccctttttaggaacccaatatgggcataaatgtaacacctgtagcgggggcagattctctgtatgttcagttaacaaattatttgtaatgtatttttttagaaatcttaaaattgcctttgcactgaagtattttcatagctgtttatatctcttttattcatttatttaacatactgtctaattttaaaaataggtttttaaagctttcatttttaagtttatgaaattttggccactttacatttagattctggtgagagttttgactgaatgttccaatctctgatgaatgcgaattttcagatttgattttattctctacacacacctcttcttttcttggtatttctggtggcagtgattagttgaacagcacatttaaggcacgataatttgctacactttttctttacaatttgttgcaatttcatctgctttctatgtttcattgttaattgccatccttcagccttaaaaatagaagattctcacgtgaaggtttagtaagttgggtcccagctctgcctgtgtggagatagtcaccatgtacctctgacaacaagttttagtgtgaaagtcactaaacttttacacactcccaaacgtctttttaaaaattgcttgggaaattattaaatgaatgtgcctgatgatttgaaatagacaaggggcacgagataaaaaagaaaaggatgagaagatcctcagtgaatgacgttgcagggtcttcatgcaattttccacctcgcagtagttagtatttacttgccttaaactaactttgaagcaagtaatgtcaactttgagcactttgttgagttttgaaaaatcttatttgttgctgcacaggttaataaattatcaatttgtaattcagcatgttggtcagagacacggtcactgattcacacccagtccctgccacagaccgtctcagacacgcacagtgggcctgctgcatgattcacacccagtccctgccacagaccgtctcagacacgcacagtgggcctgctgcatgattcacacccagtccctgccacagaccgtctcagacacgcacagtgggcctgctgcatgcgtgttacctggcttttggctccacgctcactcatagccatgtccacatgggggcttgcacacaggatcactcacatatgtacatgtacccaccacaaacgtgcaagctcctgcacacatgcatgcacacaaacgtgtacacaagtgtgagctcctacacgcatacacacacacacgtgtacatgcaccaaagcatgtgtgacctacagacatgcagaacatgcacgtgtacacataccacagacacgcgtgtgcatgctcctacacaatacatatgcacatatcatgaacagcgtaagttcctacacacggacgtgtgatacacacatgcatgtacaggtaagcacacatgtacaagctcctacaggcttgctctcacacacgtgtatgcacagcagagagacgtatgagcttctactgcacacatgcacacacacacgcacacgtacattcactacaaacgtgcagcctcctgcacacgtgcacattcatgtgtacaccacaaatgagttcccagacgtgtaaacacacgtgcacacatcgtacacatgtgagctcccacacgtacacacagatgcacatggacacaccccaaacacgcacaggctcctacacacatgcacacacgtgtacaccacaaacgagctcccagacatgtaaacacacgtctcccacacgtgagctcccacacgtacacatgcacatgtacgcaccacaaacacatgcgcaggctcctgcaggcgtgaatacacacatgcacacacatatacacacatgtgccacaaacaagtgcacactgtcctggtgtcctgcactgcatcctgcctccttgctgaggggcccctgtgagaggcctctggatgggcatgggaagatgggctccctggcccccagcccatgcctccctgggatgaagagtccccctcctggcagaatgtctgggctttgcagagcaggccccgggggtgaagtcgcagcttcacttacaccagctgctctgtgagcaaggcttggtgccctggacaaggcccttcccctttagggaggtccagcctcgcaagctgaaacctcccctcggctcagccctataccaggcggccacagcaggactggccacacccacgccgcacctcatccgtgcacgcgtcggagcacggccagccttccgccacgagccagctgggaagggccgcggccgcctaaagccccagtcaacccagcctgtgtctgagcagacagggcgaacaagcaggccacaccgtctcgagggaggaggccagatgcggccagcgtctccaacagggtgaccatccgctcggcttgctgagcgtttaaacaaatgtttagacaggctgtggggactcccctgagttgagccttggccaggggtccggtgctgtcgcgggaaacctccagccttgttcttcaaaccactcagctcatgtgttttgcactgactagtactgaataatacaaccactcttatttaatgttagtattatttatttgacaactcagtgtctaacagcttgatatgcaggtccttgcatcctacatttctttaggaagttacccatttgtaactttaaaaacaggaaaaatatcagttggcaaatgcaatcttttttttttttaagctaaaggtgggtgaactggaatgaaaatctttctgatgttgtgtctataagcagccttgatgggatatgttagaagtgtcatgaaagtgtgattctacttttgcagaaaaatctaaagatcaatttatatagctttattttttactttatcaaagtatacagaattttaatatgcatatattgtgtctgacttaaaattataatgtctgcgtcaccatttaaaatgtctgttcattatgtaatgtaataaaagaaggtcttcaaaaatgtatttaacatgaatggtatccatagttgtcatcatcataaatactggagtttatttttaaattattaaacatagtaggtgcattaacataaatcagtctccacacagtaacatttaactgataattcattaatcagctttgaaaaattaaattgttaattaaaccaatctaacatttcagtaaagtttattttgtatgcttctgtttttaacttttatttctgtagataaactgactggataatattatattggacttttctctagattatctaagcaggagacctgaatctgcttgcaataaagaataaaagtctgcttcagtttctttataaagaaactcacacaa

SEQ ID NO: 281749 - DNA, 8858 bp, Artificial Sequence
  derived and/or modified sequence
gcggccgcactagtaccccggagcccatgggcgcgccgagccgggcgcgggggcgctgaacggcggagcgggagcggccggaggagccatggactgcagcctcgtgcggacgctcgtgcacagatactgtgcaggagaagagaattgggtggacagcaggaccatctacgtgggacacagggagccacctccgggcgcagaggcctacatcccacagagatacccagacaacaggatcgtctcgtccaagtacacattttggaactttatacccaagaatttatttgaacaattcagaagagtagccaacttttatttccttatcatatttctggtgcagttgattattgatacacccacaagtccagtgacaagcggacttccactcttctttgtcattactgtgacggctatcaaacagggttatgaagactggcttcgacataaagcagacaatgccatgaaccagtgtcctgttcatttcattcagcacggcaagctcgttcggaaacaaagtcgaaagctgcgagttggggacattgtcatggttaaggaggacgagacctttccctgcgacttgatcttcctttccagcaaccggggagatgggacgtgccacgtcaccaccgccagcttggatggagaatccagccataaaacgcattacgcggtccaggacaccaaaggcttccacacagaggaggatatcggcggacttcacgccaccatcgagtgtgagcagccccagcccgacctctacaagttcgtgggtcgcatcaacgtttacagtgacctgaatgaccccgtggtgaggcccttaggatcggaaaacctgctgcttagaggagctacactgaagaacactgagaaaatctttggtgtggctatttacacgggaatggaaaccaagatggcattaaattatcaatcaaaatctcagaagcgatctgccgtggaaaaatcgatgaatgcgttcctcattgtgtatctctgcattctgatcagcaaagccctgataaacactgtgctgaaatacatgtggcagagtgagccctttcgggatgagccgtggtataatcagaaaacggagtcggaaaggcagaggaatctgttcctcaaggcattcacggacttcctggccttcatggtcctctttaactacatcatccctgtgtccatgtacgtcacggtcgagatgcagaagttcctcggctcttacttcatcacctgggacgaagacatgtttgacgaggagactggcgaggggcctctggtgaacacgtcggacctcaatgaagagctgggacaggtggagtacatcttcacagacaagaccggcaccctcacggaaaacaacatggagttcaaggagtgctgcatcgaaggccatgtctacgtgccccacgtcatctgcaacgggcaggtcctcccagagtcgtcaggaatcgacatgattgactcgtcccccagcgtcaacgggagggagcgcgaggagctgtttttccgggccctctgtctctgccacaccgtccaggtgaaagacgatgacagcgtagacggccccaggaaatcgccggacggggggaaatcctgtgtgtacatctcatcctcgcccgacgaggtggcgctggtcgaaggtgtccagagacttggctttacctacctaaggctgaaggacaattacatggagatattaaacagggagaaccacatcgaaaggtttgaattgctggaaattttgagttttgactcagtcagaaggagaatgagtgtaattgtaaaatctgctacaggagaaatttatctgttttgcaaaggagcagattcttcgatattcccccgagtgatagaaggcaaagttgaccagatccgagccagagtggagcgtaacgcagtggaggggctccgaactttgtgtgttgcttataaaaggctgatccaagaagaatatgaaggcatttgtaagctgctgcaggctgccaaagtggcccttcaagatcgagagaaaaagttagcagaagcctatgagcaaatagagaaagatcttactctgcttggtgctacagctgttgaggaccggctgcaggagaaagctgcagacaccatcgaggccctgcagaaggccgggatcaaagtctgggttctcacgggagacaagatggagacggccgcggccacgtgctacgcctgcaagctcttccgcaggaacacgcagctgctggagctgaccaccaagaggatcgaggagcagagcctgcacgacgtcctgttcgagctgagcaagacggtcctgcgccacagcgggagcctgaccagagacaacctgtccggactttcagcagatatgcaggactacggtttaattatcgacggagctgcactgtctctgataatgaagcctcgagaagacgggagttccggcaactacagggagctcttcctggaaatctgccggagctgcagcgcggtgctctgctgccgcatggcgcccttgcagaaggctcagattgttaaattaatcaaattttcaaaagagcacccaatcacgttagcaattggcgatggtgcaaatgatgtcagcatgattctggaagcgcacgtgggcataggtgtcatcggcaaggaaggccgccaggctgccaggaacagcgactatgcaatcccaaagtttaagcatttgaagaagatgctgcttgttcacgggcatttttattacattaggatctctgagctcgtgcagtacttcttctataagaacgtctgcttcatcttccctcagtttttataccagttcttctgtgggttttcacaacagactttgtacgacaccgcgtatctgaccctctacaacatcagcttcacctccctccccatcctcctgtacagcctcatggagcagcatgttggcattgacgtgctcaagagagacccgaccctgtacagggacgtcgccaagaatgccctgctgcgctggcgcgtgttcatctactggacgctcctgggactgtttgacgcactggtgttcttctttggtgcttatttcgtgtttgaaaatacaactgtgacaagcaacgggcagatatttggaaactggacgtttggaacgctggtattcaccgtgatggtgttcacagttacactaaagcttgcattggacacacactactggacttggatcaaccattttgtcatctgggggtcgctgctgttctacgttgtcttttcgcttctctggggaggagtgatctggccgttcctcaactaccagaggatgtactacgtgttcatccagatgctgtccagcgggcccgcctggctggccatcgtgctgctggtgaccatcagcctccttcccgacgtcctcaagaaagtcctgtgccggcagctgtggccaacagcaacagagagagtccagactaagagccagtgcctttctgtcgagcagtcaaccatctttatgctttctcagacttccagcagcctgagtttctgatggaacaagcagaatgggtgcgcacagcctcgggaccgcgactcagaattcacccctcttgcctctctgcagagcccaggctaccagagcacctgtccctcggccgcctggtacagctcccactctcagcaggtgacactcgcggcctggaaggagaaggtgtccacggagcccccacccatcctcggcggttcccatcaccactgcagttccatcccaagtcacagctgccctaggtcccgtgtgggaatgctcgtgtgatggatggtcctaagcctgtggagactgtgcacgtgcctcttcctggcccccagcaggcaaggaggggggtcacaggccttgccctcgagcatggcaccctggccgcctggacccagcactgtggttgttgagccacaccagtggcctctgggcattcggctcaacgcaggagggacattctgctggcccaccctgcgcgctgtcatgcagaggccattcccccaggcctgtgtcttcacccacctgccatcattggcctttgctgtcactgggagagaagagccgtccagggacccatggtggcccacatgtggatgccacatgctgctgtttcctgcttgcccggccaccacccatgccctccatagggtgaggtggagccatggtggtgcgtcctttactcaacaaccctccaatccggatgctgtgggaagggccgggtcactcggataccatcatccctgcggatgcaccgccgtaccctgctcatctgggagtggtttccctgcggttacgtccaagcccgcctgccctgtgtgttggggctggctgagtttcggtctccccatcaccggccgcctcgtggagaaggcagtgccacgtgggaggacaaggccacgccggcagcttccagccctgccgcagaagtgccaggatgtccatcagccactcgccagggcacggagccgtcagtccactgttacgggagaatgttgatttcgcgggtgcgagggccgggagacagatacttggctgtgatgagcagacatcctctgtccccgtggaggggtcaacaccaaggtggtgttcgtgcaccagaacctgtctcgggctgacgggggtggcacacaggacacgggtggatcccaacaggcagcaccgcacctctgcccgcctcccgcactgcagctccgcccgccgggctctgcgtccccacgtcccctcgtcccatccccacgtcccctcatcccgtcacctcgtccccacatccccttgccccgtcacctcgtcctcatgtccccttgtcctgtcacctcgtccccacgtcccctcgtctcctcatccccacgtcctctcgtccccttgtcccgtccccacataccctcgtccccatgtccccacgcagggctctccttcgtcttaggatctgtccagcgctgctctgggtgggttagcaaccccagggctgctgtgataggaagtccctgttgttctccgtactggcatttctatttctagaaataatatttgacatagccttaatggtccttaaagaagacatttcagtgtgagattcagacttcagacgctgaaactgctgcctttcaggaaagcaccaccaacgctggaggaggagccggccctcacgcccgccccgcgccacgctgtggaacggggctccggcaagtgaaacccagagggtgtttccgaggtgctcgacagtaggtatttttggaagctcagatttcaccatttgattgtataatcttttacctataaaatatttatttgaagtagagggtaaatcagcggtaagaacagtgaacacagtggttgggataaaataaggtgacaaacatcacaccaaagatgagggtagcgagcaactggcttgagcagacagaacggggaagactccactctgtcccgaggggccagccgcaggcgtccccagggccaccctgccctgaggtccttgtgtggccgccctggcttggcagccctgcccacgctgcccccgcaaacaatggtgtgtgcgtttttacagccctttttaggaacccaatatgggcataaatgtaacacctgtagcgggggcagattctctgtatgttcagttaacaaattatttgtaatgtatttttttagaaatcttaaaattgcctttgcactgaagtattttcatagctgtttatatctcttttattcatttatttaacatactgtctaattttaaaaataggtttttaaagctttcatttttaagtttatgaaattttggccactttacatttagattctggtgagagttttgactgaatgttccaatctctgatgaatgcgaattttcagatttgattttattctctacacacacctcttcttttcttggtatttctggtggcagtgattagttgaacagcacatttaaggcacgataatttgctacactttttctttacaatttgttgcaatttcatctgctttctatgtttcattgttaattgccatccttcagccttaaaaatagaagattctcacgtgaaggtttagtaagttgggtcccagctctgcctgtgtggagatagtcaccatgtacctctgacaacaagttttagtgtgaaagtcactaaacttttacacactcccaaacgtctttttaaaaattgcttgggaaattattaaatgaatgtgcctgatgatttgaaatagacaaggggcacgagataaaaaagaaaaggatgagaagatcctcagtgaatgacgttgcagggtcttcatgcaattttccacctcgcagtagttagtatttacttgccttaaactaactttgaagcaagtaatgtcaactttgagcactttgttgagttttgaaaaatcttatttgttgctgcacaggttaataaattatcaatttgtaattcagcatgttggtcagagacacggtcactgattcacacccagtccctgccacagaccgtctcagacacgcacagtgggcctgctgcatgattcacacccagtccctgccacagaccgtctcagacacgcacagtgggcctgctgcatgattcacacccagtccctgccacagaccgtctcagacacgcacagtgggcctgctgcatgcgtgttacctggcttttggctccacgctcactcatagccatgtccacatgggggcttgcacacaggatcactcacatatgtacatgtacccaccacaaacgtgcaagctcctgcacacatgcatgcacacaaacgtgtacacaagtgtgagctcctacacgcatacacacacacacgtgtacatgcaccaaagcatgtgtgacctacagacatgcagaacatgcacgtgtacacataccacagacacgcgtgtgcatgctcctacacaatacatatgcacatatcatgaacagcgtaagttcctacacacggacgtgtgatacacacatgcatgtacaggtaagcacacatgtacaagctcctacaggcttgctctcacacacgtgtatgcacagcagagagacgtatgagcttctactgcacacatgcacacacacacgcacacgtacattcactacaaacgtgcagcctcctgcacacgtgcacattcatgtgtacaccacaaatgagttcccagacgtgtaaacacacgtgcacacatcgtacacatgtgagctcccacacgtacacacagatgcacatggacacaccccaaacacgcacaggctcctacacacatgcacacacgtgtacaccacaaacgagctcccagacatgtaaacacacgtctcccacacgtgagctcccacacgtacacatgcacatgtacgcaccacaaacacatgcgcaggctcctgcaggcgtgaatacacacatgcacacacatatacacacatgtgccacaaacaagtgcacactgtcctggtgtcctgcactgcatcctgcctccttgctgaggggcccctgtgagaggcctctggatgggcatgggaagatgggctccctggcccccagcccatgcctccctgggatgaagagtccccctcctggcagaatgtctgggctttgcagagcaggccccgggggtgaagtcgcagcttcacttacaccagctgctctgtgagcaaggcttggtgccctggacaaggcccttcccctttagggaggtccagcctcgcaagctgaaacctcccctcggctcagccctataccaggcggccacagcaggactggccacacccacgccgcacctcatccgtgcacgcgtcggagcacggccagccttccgccacgagccagctgggaagggccgcggccgcctaaagccccagtcaacccagcctgtgtctgagcagacagggcgaacaagcaggccacaccgtctcgagggaggaggccagatgcggccagcgtctccaacagggtgaccatccgctcggcttgctgagcgtttaaacaaatgtttagacaggctgtggggactcccctgagttgagccttggccaggggtccggtgctgtcgcgggaaacctccagccttgttcttcaaaccactcagctcatgtgttttgcactgactagtactgaataatacaaccactcttatttaatgttagtattatttatttgacaactcagtgtctaacagcttgatatgcaggtccttgcatcctacatttctttaggaagttacccatttgtaactttaaaaacaggaaaaatatcagttggcaaatgcaatcttttttttttttaagctaaaggtgggtgaactggaatgaaaatctttctgatgttgtgtctataagcagccttgatgggatatgttagaagtgtcatgaaagtgtgattctacttttgcagaaaaatctaaagatcaatttatatagctttattttttactttatcaaagtatacagaattttaatatgcatatattgtgtctgacttaaaattataatgtctgcgtcaccatttaaaatgtctgttcattatgtaatgtaataaaagaaggtcttcaaaaatgtatttaacatgaatggtatccatagttgtcatcatcataaatactggagtttatttttaaattattaaacatagtaggtgcattaacataaatcagtctccacacagtaacatttaactgataattcattaatcagctttgaaaaattaaattgttaattaaaccaatctaacatttcagtaaagtttattttgtatgcttctgtttttaacttttatttctgtagataaactgactggataatattatattggacttttctctagattatctaagcaggagacctgaatctgcttgcaataaagaataaaagtctgcttcagtttctttataaagaaactcacacaa

SEQ ID NO: 281750 - protein, 793 aa, Artificial Sequence
  derived and/or modified sequence
  misc_feature (1)..(1): Xaa can be any naturally occurring amino acid
XSQKIATFTDIGNSLAHVEHLLRDLASFEEKSGVAVERARALSLDGEQLIGNKHYAVDSIRPKCQELRHLCDQFSAEIARRRGLLSKSLELHRRLETSMKWCDEGIYLLASQPVDKCQSQDGAEAALQEIEKFLETGAENKIQELNAIYKEYESILNQDLMEHVRKVFQKQASMEEVFHRRQASLKKLAARQTRPVQPVAPRPEALAKSPCPSPGIRRGSENSSSEGGALRRGPYRRAKSEMSESRQGRGSAGEEEESLAILRRHVMSELLDTERAYVEELLCVLEGYAAEMDNPLMAHLLSTGLHNKKDVLFGNMEEIYHFHNRIFLRELENYTDCPELVGRCFLERMEDFQIYEKYCQNKPRSESLWRQCSDCPFFQECQRKLDHKLSLDSYLLKPVQRITKYQLLLKEMLKYSRNCEGAEDLQEALSSILGILKAVNDSMHLIAITGYDGNLGDLGKLLMQGSFSVWTDHKRGHTKVKELARFKPMQRHLFLHEKAVLFCKKREENGEGYEKAPSYSYKQSLNMAAVGITENVKGDAKKFEIWYNAREEVYIVQAPTPEIKAAWVNEIRKVLTSQLQACREASQHRALEQSQSLPLPAPTSTSPSRGNSRNIKKLEERKTDPLSLEGYVSSAPLTKPPEKGKASPTSPDKKAKRHEVKSDPTPFGVRGWSKTSHSLEAPEDDGGWSSAEEQINSSDAEEDGGLGPKKLVPGKYTVVADHEKGGPDALRVRSGDVVELVQEGDEGLWYVRDPTTGKEGWVPASSLSVRLGPSGSAQCLSSSGKAHVPRAHP

SEQ ID NO: 281751 - DNA, 2382 bp, Artificial Sequence
  derived and/or modified sequence
tagagtcagaaaatagccactttcacagacatcgggaactccctggcgcatgtggagcatctactcagggatctcgctagcttcgaagaaaagagcggtgtggcggttgagagagctcgggccctgtcactggacggcgagcagctaattggaaacaaacactatgctgtcgacagcatccgccccaagtgtcaggaactacgccatctctgcgaccaattctcagctgagatcgctcggaggcgtggtctgttaagtaagtccctggaattacatagaagacttgagaccagtatgaaatggtgcgacgaggggatttatctgttagcatctcagccagtcgataaatgtcagagtcaggacggcgccgaggccgcactccaggaaatcgagaagttcctcgaaaccggagcagaaaacaaaatccaggagctgaatgctatctacaaggagtatgagagcatcctgaaccaggatttaatggagcacgtgaggaaagtgtttcaaaagcaagccagcatggaagaggtatttcatcggcggcaggcaagtctcaagaagctggcagccaggcagacacggcccgtccaaccagttgcccctcgacctgaagccctggccaaatctccatgtcccagcccagggatccgacgcggctctgaaaatagctcatccgaggggggggcactgcggaggggcccttatagacgggctaagagtgagatgagcgagtctcgacagggccggggtagcgccggggaggaggaagaatccctggccatattgagacggcacgtaatgtcagagttgctcgatacggaaagagcttatgttgaggagttgctgtgtgtcttggaggggtatgctgccgagatggacaatcctctcatggcacacttgctgtccaccggcctgcacaataaaaaggacgtgctgttcggtaacatggaggagatctaccacttccacaacagaattttcctgagggagctggagaactataccgactgtcctgaactcgtgggccggtgttttttagaaaggatggaggacttccaaatttacgagaaatattgccagaataaacccaggtcagaaagcttatggcggcagtgttctgactgcccattctttcaggaatgtcagcgcaaattggatcacaagctctcactagactcgtacctactgaagccagtgcaaaggatcaccaaatatcaattgttgctgaaggaaatgctgaaatactcacggaattgcgaaggggccgaggacctccaagaagccctctcttcaattttaggtatcctgaaggccgtcaatgattccatgcatctcatcgccatcaccggatatgacggaaatctgggtgatctcggtaagctcttaatgcagggttctttttcagtctggactgatcataaaagaggccataccaaggtcaaagaattggctcggttcaaacccatgcaacgtcacctctttctgcacgagaaagccgttctgttctgtaaaaaacgagaggaaaatggcgaggggtatgagaaagccccatcatatagttataagcagtccctgaacatggcagcagtcggcattactgagaacgtgaagggtgatgcaaaaaaattcgaaatatggtataacgcccgggaagaagtgtacatagtgcaggcaccaacacccgagatcaaagccgcctgggtgaacgagatccgaaaggtattgactagccagttacaggcgtgtcgggaggcttcgcagcatcgagctttggaacagagccaaagcctccctctgcctgctccaacttcaacttcaccaagcaggggcaattcaagaaacataaagaagctagaggagcggaaaacagaccccctcagtctggaaggttacgtcagcagcgcaccactcacaaaacctccagaaaagggaaaggcatctccaacctcgccagataagaaagcaaagcgacacgaggtgaagtccgatcctaccccatttggtgtgagaggctggtccaaaacctcgcactcactcgaggcaccggaggacgatggtggatggagtagcgcagaggagcagattaattcctcagacgcggaggaggatgggggcctgggacccaaaaagctggtgccaggtaaatacacagtggtggccgaccacgagaagggcggcccagatgccctgcgggttcgcagcggagatgttgtcgagcttgttcaggaaggagatgaagggctgtggtatgttagagacccaaccacaggtaaagaggggtgggtgcccgcatcttctctatctgtacggttgggtccatctggctcagcacagtgtctgtcctcaagcggaaaggcacacgtgccgagggcacacccatag

SEQ ID NO: 281752 - DNA, 2382 bp, Artificial Sequence
  derived and/or modified sequence
tgaagccagaagatcgccaccttcacagacatcggcaacagcctggcccacgtggagcacctgctgcgggacctggccagctttgaggagaagagcggcgtggccgtggagcgggcccgggccctgagcctggatggagagcagctgattggcaacaagcactatgctgtggacagcatccggcccaagtgccaggagctgcggcacctgtgtgaccagttctctgctgagatcgccaggagaagaggcctgctgagcaagagcctggagctgcaccggcggctggagacctccatgaagtggtgtgatgagggcatctacctgctggccagccagcctgtggacaagtgccagagccaggatggagctgaggccgccctgcaggagattgagaagttcctggagaccggggctgagaacaagatccaggagctgaatgccatctacaaggagtatgagagcatcctgaaccaggacctgatggagcacgtgaggaaggtgttccagaagcaggcctccatggaggaggtgttccaccggcggcaggccagcctgaagaagctggccgcccggcagaccaggcctgtgcagcctgtggcccccaggcctgaggccctggccaagagcccctgccccagccctggcatcagaagaggcagcgagaacagcagcagcgagggcggggccctgcggcggggcccctaccgccgggccaagtctgagatgtctgagagccggcagggccggggcagcgctggggaggaggaggagagcctggccatcctgcggagacatgtgatgtctgagctgctggacacagagcgggcctacgtggaggagctgctgtgtgtgctggagggctatgctgctgagatggacaaccccctgatggcccacctgctgagcacaggcctgcacaacaagaaggatgtgctgtttggaaacatggaggagatctaccacttccacaaccgcatcttcctgcgggagctggagaactacacagactgcccagagctggtgggccgctgcttcctggagaggatggaggacttccagatctatgagaagtactgccagaacaagcccaggtctgagagcctgtggaggcagtgcagcgactgccccttcttccaggagtgccagaggaagctggaccacaagctgagcctggacagctacctgctgaagcctgtgcagaggatcaccaagtaccagctgctgctgaaggagatgctgaagtacagcaggaactgtgagggcgctgaggacctgcaggaggccctgagcagcatcctgggcatcctgaaggctgtgaatgacagcatgcacctgattgccatcaccggctatgatggcaacctgggggacctgggcaagctgctgatgcagggcagcttctctgtgtggacagaccacaagaggggccacaccaaggtgaaggagctggcccgcttcaagcccatgcagaggcacctgttcctgcacgagaaggctgtgctcttctgcaagaagcgggaggagaatggagagggctatgagaaggcccccagctacagctacaagcagagcctgaacatggctgctgtgggcatcacagaaaatgtgaagggagatgccaagaagtttgagatctggtacaatgcccgggaggaggtgtacatcgtgcaggcccccaccccagagatcaaggccgcctgggtgaatgagatcaggaaggtgctgaccagccagctgcaggcctgccgggaggccagccagcaccgggccctggagcagagccagagcctgcccctgcctgcccccaccagcaccagccccagccggggcaacagcaggaacatcaagaagctggaggagaggaagacagaccccctgagcctggagggctacgtgagcagcgcccccctgaccaagcccccagagaagggcaaggccagccccaccagcccagacaagaaggccaagagacatgaggtgaagagtgaccccaccccatttggagtgcggggctggagcaagaccagccacagcctggaggccccagaagatgatggcggctggagcagcgctgaggagcagatcaacagcagtgatgctgaggaggatggcggcctgggccccaagaagctggtgcctgggaagtacacagtggtggccgaccacgagaagggcggcccagatgccctgcgggtgcgctctggagatgtggtggagctggtgcaggagggagatgagggcctgtggtacgtgcgggaccccaccaccgggaaggagggctgggtgcctgccagcagcctgtctgtgcggctgggccccagcggcagcgcccagtgcctgagcagcagcggcaaggcccacgtgccccgggcccacccctag

SEQ ID NO: 281753 - DNA, 3903 bp, Artificial Sequence
  derived and/or modified sequence
gtcccagaagatagcaaccttcacagacatcggcaacagcctggcgcatgtggagcacctgctgagggacctggccagcttcgaggagaaatcaggcgtggccgtggagagggcccgggccctgtctctggacggcgagcagctcattgggaacaagcactacgcggtagactccatccgcccaaagtgccaggagctccggcacctctgtgaccagttctctgcggagatcgcaaggaggagggggctgctcagcaagtccctggagctgcaccgccgcctggagacgtccatgaagtggtgtgatgaagggatttacctgctggcctcacaacctgtggacaagtgccagtcccaggacggcgcggaggctgccctccaggaaatcgagaagtttttggagaccggtgcggaaaataagatccaggagctcaacgcgatttacaaggaatacgaatccatcctcaaccaagatctcatggagcacgtgcgaaaggtcttccagaagcaggcaagcatggaggaggtgttccaccgcaggcaggccagcctgaagaagctggcggccaggcagacgcggcccgtgcagccggtggcccccagacccgaggcactggcaaagtcgccctgcccctccccaggcattcggcgaggctctgagaactccagctccgagggcggtgcgctccggagagggccctaccggagggccaagagtgagatgagtgagagccggcagggccgcggctcagcgggggaggaggaggaaagcctggccatcctgcgcaggcacgtgatgagcgagctcctggacacagaacgggcctacgtggaggagctgctgtgcgtcctggagggctacgccgcggagatggataacccactgatggctcacctcctgtcaacaggccttcacaacaagaaggatgttttgtttggaaacatggaggaaatctatcacttccacaacaggatattcctcagggagctggaaaactacactgactgcccagaactggttggaagatgctttctggagaggatggaagatttccagatctatgagaagtactgtcagaacaagccccgctctgagagcctgtggagacagtgctccgactgcccgtttttccaggaatgccagagaaagctggaccacaagctgagcctggactcctacctgctgaagccagtgcagaggatcaccaagtaccagctgctgctcaaggaaatgctgaaatacagcaggaactgcgagggggctgaggacctgcaggaggcgctgagctccatcctgggcatcctgaaggccgtgaacgactccatgcacctcatcgctatcaccggctatgacgggaatctcggcgacctgggcaagctgctgatgcagggctcgttcagcgtctggaccgaccacaagaggggccacaccaaggtgaaggagctggccaggttcaagcccatgcagcggcacctgttcctgcacgagaaggcagtgctcttctgcaagaagagggaggagaatggggaggggtatgagaaagctccctcctacagctacaagcagtccttaaacatggctgccgttggcattacggagaacgtgaagggagatgctaagaagttcgagatctggtacaacgcgcgcgaggaggtctacatcgtccaggcgccaactcctgagattaaagccgcgtgggtgaatgaaattcggaaagtgctgaccagccagctgcaggcttgtagagaagccagccagcaccgggcgctggagcagtcacagagcctgcccctgccggccccgaccagcaccagtccctcaagaggaaactcaaggaacatcaagaagctggaagaaaggaaaacagaccccctaagcctggagggatacgtcagctcagcgccactgacaaagccccccgaaaagggcaaagcttctcctaccagtcctgacaaaaaagccaagcggcatgaagtaaagagcgacccgactccctttggtgtgcgaggttggagcaaaacgtcccactcactggaggcacctgaggacgacgggggctggtcaagtgcagaggagcagattaactcgtccgacgcagaggaggacggcgggttgggccccaagaagctggttccaggtaaatacacggtcgtggcggaccacgagaagggaggccccgatgcgctgcgcgtgaggagcggggacgtggtggagctggtgcaggagggcgacgagggcctctggtacgtcagggacccgaccactggcaaggagggctgggtgccggccagcagcctgtccgtccggctcggcccgtccggctcggcccagtgcctgagcagctcaggtaaggcccacgtgccccgagcccacccgtgacgctgccaagggcccgggcgaggaagctgccccgtgtgtgcccggcagagccgacgccgaagcccgtccccgcctgatctccccgcagagtcgagcccggggtcggccgtgctgagcaactcgtccagctgcagcgagggcggccaggcccccttctccgacctgcaggggtagcgcggcctcggcgccggagacccgcgcgctgtctggggctgcggtggcgtggggagggcgcggcccccggacgccccgaggaaggggcacctcaccgcccccacccagagcgcctggccgtgcgggctgcagaggacccctccggggcagaggcaggttccacggaagaccccggcccgctggggcttccccggagactccagagcccacagaggaggggccgcagggaacagccccgggcggcaggcgccgggcagcggcatctcgtcctggctccaccgtgctgcttctgcctctggacggtgctttcaggggacgcgcggaccgtggtggagctgcttccggagaagtggaggatcctctggccaacggcctgaggagagcggggcacggggtctctttagcttttacaagttttaggattttttcaagcagggatcaatcccgtggccattttttgtggtactttggcctcaattcttcaccaggaatcactgtgtttacatgaaatgacaatttgatactgtatttgatagaaaactatttttttgttaccggggtttacatagaagcacgttgtttataccactaagtgactttgggggggctctcccatggaaacggatggcactccctgaagctccctggtcacaggtggatgaaaacgtgtccgtgggtgacatcaggtggtgtctccaccaccaaaagcagttagaagccaaggagattcctttatctacctagggttcattttcaaaagaaaatttaaactataatttaaacaattaacgttcttttctacaaaaaaaatgcagggacttgatttttttaaagagcttcactgaattaggatatttttattgcttttaaagaaaatacaaagatgcagtttctgcagggtgtggcgtggaccagtgctgccgaccatagctcagagagccctgcccctgcctcactgcactgcagcctcctcggaggccgcacctccactccactccccacgcgccccctgcctcccacccaggtccacctgccacctggtgaccaccttgagtacagaagtgaaagtggggagagtattttattcaagtcacagcagaactggaaaaaaactcttctgttttaccaacttcttgtgtttcagaaacatattctgttcaaaacttttgaagccctttcggtgtctagtctgcagatgtttttgtatgtgtgcacctctgaccatgtgtgtacatatgtgtcttgctggaaaggacatattcgctgtccccgtgctgctgggagggccgcctcacagcctcacggttcccagccccagcacagtggaggcaggcgtggctgcattcccc

SEQ ID NO: 281754 - DNA, 2382 bp, Artificial Sequence
  derived and/or modified sequence
tgaagccagaagatcgccaccttcaccgacatcggcaacagcctggctcacgttgaacaccttctcagggatctagctagtttcgaagagaagtccggcgtggccgttgagcgggcccgcgcactctctttggatggagagcaactgatcgggaataagcattatgcggtcgactctataagacctaagtgtcaagagctccgccatctctgcgatcagttttcagccgagatcgcccggagacgtggcttgctgtctaagtccctggaactgcaccgcaggctggagacaagcatgaagtggtgcgacgaaggcatctacctgctcgcttcgcagcccgtcgacaagtgtcaaagccaggacggagccgaggccgcactgcaggagatcgaaaaattcctggaaacgggggcagaaaacaaaatacaggagttaaacgcgatctacaaggagtacgaatcaattttgaaccaggatctgatggagcacgtgcgcaaagtcttccagaagcaggccagtatggaggaggtgttccaccgccgtcaggcatctctgaaaaagctggcagcacggcaaactcggcccgtccagccagtggcaccacgccccgaggctcttgcaaaaagcccctgtccatctcctgggattaggcgcggaagcgaaaactcttcatccgaagggggagccctgcggcggggcccttatcgccgggcgaaatctgaaatgagcgaatcaaggcaggggcgcgggtcggccggagaggaggaagagagccttgctatcctgcgtcgccacgttatgagcgagcttcttgacacagaaagagcctatgtagaggagctcctctgcgtgttggaaggttacgcagcggagatggataatccactcatggctcatctgctgtcaacaggactgcacaacaagaaagacgtgctcttcggaaacatggaggagatttatcactttcataaccggatcttcttgagggaactggaaaattacacggattgcccagaacttgtgggcagatgcttccttgagcgaatggaagactttcagatctacgagaaatactgccagaacaagcctcgctcggaatcattgtggagacaatgtagtgactgtcccttctttcaggagtgccagcgaaagctggatcataagctgtctctcgacagctacctgctaaagcccgtccaaagaattactaagtatcagctgcttctcaaagaaatgctaaaatactctcgcaactgcgaaggagctgaagacctgcaagaggctctctcgtccatcttgggtatacttaaggccgttaatgatagtatgcatttaatcgccattactggctatgacggaaacttgggggacctgggaaagctactcatgcagggctccttctccgtgtggactgatcataaacgcggacataccaaggtgaaggagttagccaggttcaagccaatgcagagacatctgttcttgcatgaaaaagcggtgctgttctgtaagaaaagggaagaaaacggcgagggctacgaaaaggcaccaagctactcgtacaaacagagtctgaacatggctgcagtggggataacagaaaacgttaaaggggatgcaaagaaattcgaaatttggtataatgccagggaggaggtttacatcgtccaagctccaacaccagagattaaggcagcttgggttaacgaaatccgtaaggtgttaacgtcgcaactgcaagcctgcagagaagcctctcagcacagggccctcgaacagtcacagagcctgccccttcccgccccaacctcgacctctcccagcagaggcaacagcaggaatatcaaaaagttggaagagaggaaaacagacccactttccctggaagggtacgtgtcaagcgcccccctgaccaaacctcccgaaaaagggaaggctagtcccacatcacctgataagaaagctaaacgccacgaggtgaagagcgaccccacacctttcggagtccggggttggagcaaaacatcccacagcctggaagcccccgaggacgatggaggttggagcagcgccgaagagcaaattaactctagcgacgctgaagaagacggtggtctagggcctaaaaaacttgtccccgggaagtatactgtcgtggccgaccacgaaaagggtgggccggacgcacttagggtcagaagtggcgacgtggttgagctcgtgcaagagggggatgaggggctgtggtatgtgagggatccaacaaccggcaaggaggggtgggtaccagcgtcctctttatcagtcaggcttggaccgagcggctccgctcagtgcctcagctcttcgggcaaggcccacgtgcctagggcacatccatag

SEQ ID NO: 281755 - DNA, 2382 bp, Artificial Sequence
  derived and/or modified sequence
tagagtcagaaaattgcgactttcaccgatataggcaattcacttgctcatgtagaacacctgttacgggacttggcctcattcgaagaaaaatcaggggtggccgtagaaagagcccgtgccttgtctttggatggagaacagttaatcggaaacaagcattacgccgttgatagtataagacctaaatgtcaggagctgcgccatctctgcgaccaattctcagcggaaattgccaggcgcagaggcttactgtctaaaagccttgagctgcaccgaaggctagagacatctatgaaatggtgcgacgagggtatatacctacttgcctcacagccagtggacaagtgccaatcacaggatggcgcagaggccgctctgcaggagatagagaaattcttggagactggcgctgagaataagatccaggaactgaacgcaatctataaggagtacgaatctatcctaaaccaggacttgatggagcacgtcaggaaagtattccagaaacaggcttcaatggaggaagtgttccaccgcagacaggcctctttaaaaaagcttgccgcacgtcagaccagaccggttcagcctgttgccccaaggcccgaggcacttgccaagtcaccatgtccctcccccggaatacgccgtgggagcgaaaactcatcttctgagggaggggcactgagacggggtccctaccgaagagcaaaatcagaaatgagcgagagccgacagggcagggggtccgctggagaggaagaggaatcactggccattttgaggcgccacgttatgtctgagcttttggataccgaaagagcttatgtagaagagctgctttgcgtcctagagggttacgccgcagagatggacaatccccttatggcccatctcttgtcaactggactgcataataagaaggacgtgctgttcgggaatatggaggaaatctaccacttccacaacagaattttcctgagagaacttgaaaactacaccgattgccctgagcttgtgggacggtgcttcctggaacgcatggaggatttccagatttatgaaaagtattgtcaaaataaacccagatccgaatctctgtggcgccagtgttctgactgccctttttttcaggagtgccagcgaaaactggaccataaattaagcctggactcctatctgctcaagccagtgcaacggataactaagtatcaactgctgctgaaagaaatgctcaagtattcacgcaactgcgaaggagcagaagatctgcaggaagcactcagctctattctcgggattttgaaggctgtcaatgactcaatgcacctgatcgcaatcaccggttacgatgggaatcttggcgacctgggcaagctgcttatgcagggttccttttccgtgtggactgaccataaaaggggccacacaaaggtgaaggaattggcccgtttcaaaccaatgcaaaggcatttgtttctgcacgaaaaggcggtgctcttctgtaagaagcgggaagaaaacggtgaaggctacgaaaaggctccctcttattcgtataagcagagcctcaacatggcagcggtgggaattactgagaatgtcaagggagacgcgaagaagtttgaaatttggtacaacgcgagagaggaagtctacatcgtgcaggccccaacccctgaaattaaagctgcctgggtgaacgaaatcaggaaagtgctcacttcacagctacaggcctgtcgcgaagcctctcagcaccgagcgctggaacaatcacagagtcttcctcttcctgcccctacaagtacgtctccaagccgtggtaattctcgcaatatcaagaagttggaagaacgtaagactgatccacttagtctggaggggtacgttagttcagcccctttgacaaaaccacctgagaaaggaaaggccagtcctacgagccctgacaagaaggcaaagagacacgaggtaaaatcggaccctaccccatttggcgttcggggatggagcaaaacgtcgcactccctggaagccccagaggacgatggaggctggagcagcgccgaggagcagattaactccagcgacgccgaggaggatggagggttagggcctaaaaaattagtccccggtaaatataccgtggtcgccgatcacgaaaagggaggcccagacgccctgcgcgtccggagcggagatgtggtagagcttgttcaggagggcgacgagggtctctggtacgtcagagatcccacaacggggaaggaagggtgggtaccagcgagcagcctgtccgttcggctcggacctagcgggtctgcccagtgcctgagttcgtctggcaaagcgcacgtgcctcgcgcacacccttag

SEQ ID NO: 281756 - DNA, 2382 bp, Artificial Sequence
  derived and/or modified sequence
tgaagccagaagatcgccaccttcaccgacatcggcaacagcctggcccacgtggagcacctgctgagagacctggccagcttcgaggagaagagcggcgtggccgtggagagagccagagccctgagcctggacggcgagcagctgatcggcaacaagcactacgccgtggacagcatcagacccaagtgccaggagctgagacacctgtgcgaccagttcagcgccgagatcgccagaagaagaggcctgctgagcaagagcctggagctgcacagaagactggagaccagcatgaagtggtgcgacgagggcatctacctgctggccagccagcccgtggacaagtgccagagccaggacggcgccgaggccgccctgcaggagatcgagaagttcctggagaccggcgccgagaacaagatccaggagctgaacgccatctacaaggagtacgagagcatcctgaaccaggacctgatggagcacgtgagaaaggtgttccagaagcaggccagcatggaggaggtgttccacagaagacaggccagcctgaagaagctggccgccagacagaccagacccgtgcagcccgtggcccccagacccgaggccctggccaagagcccctgccccagccccggcatcagaagaggcagcgagaacagcagcagcgagggcggcgccctgagaagaggcccctacagaagagccaagagcgagatgagcgagagcagacagggcagaggcagcgccggcgaggaggaggagagcctggccatcctgagaagacacgtgatgagcgagctgctggacaccgagagagcctacgtggaggagctgctgtgcgtgctggagggctacgccgccgagatggacaaccccctgatggcccacctgctgagcaccggcctgcacaacaagaaggacgtgctgttcggcaacatggaggagatctaccacttccacaacagaatcttcctgagagagctggagaactacaccgactgccccgagctggtgggcagatgcttcctggagagaatggaggacttccagatctacgagaagtactgccagaacaagcccagaagcgagagcctgtggagacagtgcagcgactgccccttcttccaggagtgccagagaaagctggaccacaagctgagcctggacagctacctgctgaagcccgtgcagagaatcaccaagtaccagctgctgctgaaggagatgctgaagtacagcagaaactgcgagggcgccgaggacctgcaggaggccctgagcagcatcctgggcatcctgaaggccgtgaacgacagcatgcacctgatcgccatcaccggctacgacggcaacctgggcgacctgggcaagctgctgatgcagggcagcttcagcgtgtggaccgaccacaagagaggccacaccaaggtgaaggagctggccagattcaagcccatgcagagacacctgttcctgcacgagaaggccgtgctgttctgcaagaagagagaggagaacggcgagggctacgagaaggcccccagctacagctacaagcagagcctgaacatggccgccgtgggcatcaccgagaacgtgaagggcgacgccaagaagttcgagatctggtacaacgccagagaggaggtgtacatcgtgcaggcccccacccccgagatcaaggccgcctgggtgaacgagatcagaaaggtgctgaccagccagctgcaggcctgcagagaggccagccagcacagagccctggagcagagccagagcctgcccctgcccgcccccaccagcaccagccccagcagaggcaacagcagaaacatcaagaagctggaggagagaaagaccgaccccctgagcctggagggctacgtgagcagcgcccccctgaccaagccccccgagaagggcaaggccagccccaccagccccgacaagaaggccaagagacacgaggtgaagagcgaccccacccccttcggcgtgagaggctggagcaagaccagccacagcctggaggcccccgaggacgacggcggctggagcagcgccgaggagcagatcaacagcagcgacgccgaggaggacggcggcctgggccccaagaagctggtgcccggcaagtacaccgtggtggccgaccacgagaagggcggccccgacgccctgagagtgagaagcggcgacgtggtggagctggtgcaggagggcgacgagggcctgtggtacgtgagagaccccaccaccggcaaggagggctgggtgcccgccagcagcctgagcgtgagactgggccccagcggcagcgcccagtgcctgagcagcagcggcaaggcccacgtgcccagagcccacccctag

SEQ ID NO: 281757 - protein, 984 aa, Artificial Sequence
  derived and/or modified sequence
MTVRRLSLLCRDLWALWLLLKAGADEIMHQDIVPLCAADIQDQLKKRFAYLSGGRGQDGSPVITFPDYPAFSEIPDKEFQNVMTYLTSIPSLQDAGIGFILVIDRRRDKWTSVKASVLRIAASFPANLQLVLVLRPTGFFQRTLSDIAFKFNRDDFKMKVPVIMLSSVPDLHGYIDKSQLTEDLGGTLDYCHSRWLCQRTAIESFALMVKQTAQMLQSFGTELAETELPNDVQSTSSVLCAHTEKKDKAKEDLRLALKEGHSVLESLRELQAEGSEPSVNQDQLDNQATVQRLLAQLNETEAAFDEFWAKHQQKLEQCLQLRHFEQGFREVKAILDAASQKIATFTDIGNSLAHVEHLLRDLASFEEKSGVAVERARALSLDGEQLIGNKHYAVDSIRPKCQELRHLCDQFSAEIARRRGLLSKSLELHRRLETSMKWCDEGIYLLASQPVDKCQSQDGAEAALQEIEKFLETGAENKIQELNAIYKEYESILNQDLMEHVRKVFQKQASMEEVFHRRQASLKKLAARQTRPVQPVAPRPEALAKSPCPSPGIRRGSENSSSEGGALRRGPYRRAKSEMSESRQGRGSAGEEEESLAILRRHVMSELLDTERAYVEELLCVLEGYAAEMDNPLMAHLLSTGLHNKKDVLFGNMEEIYHFHNRIFLRELENYTDCPELVGRCFLERMEDFQIYEKYCQNKPRSESLWRQCSDCPFFQECQRKLDHKLSLDSYLLKPVQRITKYQLLLKEMLKYSRNCEGAEDLQEALSSILGILKAVNDSMHLIAITGYDGNLGDLGKLLMQGSFSVWTDHKRGHTKVKELARFKPMQRHLFLHEKAVLFCKKREENGEGYEKAPSYSYKQSLNMAAVGITENVKGDAKKFEIWYNAREEVYIVQAPTPEIKAAWVNEIRKVLTSQLQACREASQHRALEQSQSLPLPAPTSTSPSRGNSRNIKKLEERKTDPLSLEGYVSSAPLTKPPEKGKEP

SEQ ID NO: 281758 - DNA, 2955 bp, Artificial Sequence
  derived and/or modified sequence
atgaccgtgcgcagattgtctctgctctgtcgcgacctttgggcattatggctgcttctgaaagctggggcagatgagatcatgcaccaagacatagtccccttgtgtgcagcagatatccaggatcagctcaagaagagattcgcttatctaagcggtggacgaggacaggatggttccccggtgatcacattcccagattaccctgccttctctgaaatccccgataaagagtttcagaacgtcatgacctacctcacctcaataccgagcttacaggatgccggtattggctttattctggttatcgaccgccggagggataagtggacatctgtgaaggcttctgtgctcaggattgctgccagttttcccgctaatcttcagttagtcctggtcttgcgtcctaccgggttttttcaacgcactcttagtgacattgcctttaaatttaatcgcgatgatttcaaaatgaaggtcccagtgatcatgctgtctagcgttcccgatctgcacgggtacatcgataaatcgcaacttactgaggacctgggcgggacgctggattattgtcacagtcgatggttgtgccagcgaaccgccatcgaatcattcgctttgatggttaaacagactgctcagatgctgcagagcttcggtactgagctggctgagactgagctccctaacgacgtgcaatcgactagctctgtgctgtgcgcacacacagaaaaaaaagataaggccaaagaagacctcagactcgccctgaaagagggtcatagtgtgctggaatctcttagggaactccaggctgagggctcagagccttctgtcaaccaggaccaattggacaatcaggcaacggtacagaggttgcttgctcagctcaatgagacagaggctgctttcgacgagttctgggcgaaacatcaacaaaagttagagcaatgcctacagctgcgacactttgagcaagggtttcgcgaggttaaagccatcctagacgcggcatcacagaagatcgctaccttcaccgatatcggcaattctctggcccacgtggaacacctgctcagggacctggcttcttttgaggaaaagtccggcgttgccgtggagcgcgcccgggccctgtccttagatggggaacaactgatcggcaacaagcattatgcagttgattccattcgacctaagtgccaagagctcaggcacctttgcgaccagttttcagccgaaatcgccaggaggagaggattattatccaaaagcttagaactgcataggcgcctggagacctccatgaaatggtgcgacgaagggatctatctgctggcctcccaacccgtggacaagtgtcagtcccaggacggcgctgaagcggctctccaggagattgagaagttcttagaaaccggtgcagagaacaagatccaggagctgaatgcgatttataaggagtatgaaagcatcctcaatcaggaccttatggaacacgtgcgaaaggtctttcagaaacaggcatcaatggaggaagtttttcaccgtcgacaggcttctttgaaaaagctagcagccagacagacacggcccgttcaacctgtagccccaagacctgaggctttggccaagtcaccatgtcctagtcccgggatacggcgggggagcgagaactcctcatcagagggaggggccctgcgaagagggccctacagaagggcaaagtctgagatgtctgaaagtaggcagggcagagggtccgccggagaggaagaggagtcactggctatcctaagacgccacgtcatgtctgagctgctggataccgaacgagcatatgttgaggaactgctgtgcgtgctcgaaggctacgccgctgagatggataatccgttaatggcccacttgctgagcaccggccttcacaacaagaaggatgtactatttgggaatatggaagaaatctatcactttcacaacaggatctttttgcgtgaactggaaaactacaccgactgccccgagctggtcggacgatgcttcctggaaaggatggaagattttcagatctacgaaaaatactgccagaataagcctcgctctgaaagcttgtggagacagtgctctgattgtccattctttcaggagtgtcaaagaaaacttgatcacaagcttagtctggattcttaccttttgaagcctgttcaaagaattacgaaatatcagctgcttctcaaagagatgctcaaatattctcggaattgtgagggcgcagaggacctgcaagaggccttgagcagcattcttggcatcctgaaagctgtgaatgactcaatgcatcttattgccattaccggatacgacggtaacctgggcgacctcggtaaactattgatgcaaggtagcttcagcgtgtggaccgatcacaaacggggtcataccaaagtgaaggaactggcgcgattcaaaccaatgcagagacatctgttcctgcatgaaaaagcagtgctcttctgtaagaaaagggaggagaatggtgagggctatgaaaaagccccgagttattcctacaaacaatcgctcaacatggccgctgtcggaattacagaaaatgttaaaggtgatgctaaaaaattcgagatctggtacaatgctagagaggaggtgtacatcgtccaggcacctactcctgagattaaggctgcctgggtcaatgaaatcaggaaagtccttacttctcagctccaggcttgcagggaggcctctcagcaccgtgctctcgagcagagccagagtctaccgttacccgcacccaccagcacgagccccagccgcggcaacagtcgcaacattaaaaagctggaagaaaggaaaacagaccccttgtctctggaaggttatgtgtccagtgccccgctgactaagccaccggaaaaaggcaaagaaccctag

SEQ ID NO: 281759 - DNA, 411 bp, Artificial Sequence
  derived and/or modified sequence
atgcaccaagacatcgtgcccctgtgtgctgcggatatacaggatcagttgaagaagaggttcgcatacttgtcaggcgggcggggccaagacggatcccccgtgatcacatttcctgactatcccgcattttcagagatcccggacaaggaattccagaacgtcatgacctatctcacgtcaatcccatccctgcaagacgcaggcatcggttttattcttgtgatcgaccggaggcgggataaatggacgagtgtgaaggccagcgttctccggatcgccgcctcatttccagccaatctgcagttggtgcttgtgctgcgaccaaccggcttcttccaacgaaccttgagcgatatagctttcaagtttaaccgtgatgatttcaaaatgaaggtccccgtgatttag

SEQ ID NO: 281760 - DNA, 2955 bp, Artificial Sequence
  derived and/or modified sequence
atgacagtgcggcggctgagcctgctgtgccgggacctgtgggccctgtggctgctgctgaaggccggggctgatgagatcatgcaccaggacatcgtgcccctgtgtgccgctgacatccaggaccagctgaagaagagatttgcctacctgagcggcggccggggccaggacggcagccctgtgatcaccttcccagactacccagccttcagcgagatcccagacaaggagttccagaatgtgatgacctacctgaccagcatccccagcctgcaggatgctggcatcggcttcatcctggtgattgacagaagaagagacaagtggacctctgtgaaggcctctgtgctgagaattgctgccagcttccctgccaacctgcagctggtgctggtgctgcggcccaccggcttcttccagaggaccctgagtgacatcgccttcaagttcaacagagatgacttcaagatgaaggtgcctgtgatcatgctgagctctgtgcctgacctgcacggctacatcgacaagagccagctgacagaggacctgggcggcaccctggactactgccacagccgctggctgtgccagaggacagccatcgagagctttgccctgatggtgaagcagacagcccagatgctgcagagctttggaacagagctggccgagacagagctgcccaatgatgtgcagagcaccagctctgtgctgtgtgcccacacagagaagaaggacaaggccaaggaggacctgcggctggccctgaaggagggccacagcgtgctggagagcctgcgggagctgcaggccgagggcagcgagcccagcgtgaaccaggaccagctggacaaccaggccaccgtgcagaggctgctggcccagctgaatgaaacagaggccgcctttgatgagttctgggccaagcaccagcagaagctggagcagtgcctgcagctgcggcactttgagcagggcttccgggaggtgaaggccatcctggatgctgccagccagaagatcgccaccttcacagacatcggcaacagcctggcccacgtggagcacctgctgcgggacctggccagctttgaggagaagtctggagtggccgtggagcgggcccgggccctgagcctggatggagagcagctgattggcaacaagcactatgctgtggacagcatccggcccaagtgccaggagctgcggcacctgtgtgaccagttctctgctgagatcgcccggcggcggggcctgctgagcaagagcctggagctgcaccggcggctggagacctccatgaagtggtgtgatgagggcatctacctgctggccagccagcctgtggacaagtgccagagccaggatggagctgaggccgccctgcaggagattgagaagttcctggagactggagctgagaacaagatccaggagctgaatgccatctacaaggagtatgagagcatcctgaaccaggacctgatggagcacgtgaggaaggtgttccagaagcaggcctccatggaggaggtgttccaccggcggcaggccagcctgaagaagctggccgcccggcagaccaggcctgtgcagcctgtggcccccaggcctgaggccctggccaagagcccctgccccagccctggcatccggcggggcagcgagaacagcagcagcgagggcggggccctgcggcggggcccctacagaagagccaagtctgagatgtctgagagccggcagggccggggcagcgctggggaggaggaggagagcctggccatcctgcggcggcacgtgatgtctgagctgctggacacagagcgggcctacgtggaggagctgctgtgtgtgctggagggctacgccgctgagatggacaaccccctgatggcccacctgctgagcacaggcctgcacaacaagaaggatgtgctgtttggaaacatggaggagatctaccacttccacaaccgcatcttcctgcgggagctggagaactacacagactgcccagagctggtgggccgctgcttcctggagaggatggaggacttccagatctatgagaagtactgccagaacaagcccaggtctgagagcctgtggaggcagtgcagcgactgccccttcttccaggagtgccagaggaagctggaccacaagctgagcctggacagctacctgctgaagcctgtgcagaggatcaccaagtaccagctgctgctgaaggagatgctgaagtacagcaggaactgtgagggcgctgaggacctgcaggaggccctgagcagcatcctgggcatcctgaaggctgtgaatgacagcatgcacctgattgccatcaccggctatgatggcaacctgggggacctgggcaagctgctgatgcagggcagcttctctgtgtggacagaccacaagaggggccacaccaaggtgaaggagctggcccgcttcaagcccatgcagaggcacctgttcctgcacgagaaggctgtgctcttctgcaagaagcgggaggagaatggagagggctatgagaaggcccccagctacagctacaagcagagcctgaacatggctgctgtgggcatcacagaaaatgtgaagggagatgccaagaagtttgagatctggtacaatgcccgggaggaggtgtacatcgtgcaggcccccaccccagagatcaaggccgcctgggtgaatgagatcaggaaggtgctgaccagccagctgcaggcctgccgggaggccagccagcaccgggccctggagcagagccagagcctgcccctgcctgcccccaccagcaccagccccagccggggcaacagcaggaacatcaagaagctggaggagaggaagacagaccccctgagcctggagggctacgtgtcctctgcccccctgaccaagcccccagagaagggcaaggagccctag

SEQ ID NO: 281761 - DNA, 411 bp, Artificial Sequence
  derived and/or modified sequence
atgcaccaggacatcgtgcccctgtgtgccgctgacatccaggaccagctgaagaagagatttgcctacctgagcggcggccggggccaggacggcagccctgtgatcaccttcccagactacccagccttcagcgagatcccagacaaggagttccagaatgtgatgacctacctgaccagcatccccagcctgcaggatgctggcatcggcttcatcctggtgattgacagaagaagagacaagtggacctctgtgaaggcctctgtgctgagaattgctgccagcttccctgccaacctgcagctggtgctggtgctgcggcccaccggcttcttccagaggaccctgagtgacatcgccttcaagttcaacagagatgacttcaagatgaaggtgcctgtgatctag

SEQ ID NO: 281762 - DNA, 574 bp, Artificial Sequence
  derived and/or modified sequence
aaggaactcagtgaccacagacggatgagaacagcggacgcagctgcctcccaggcactcaaaggctcaactccccacaggcgtgtgttgccaggggcagaaggcttggcccctgggtcagcatactctccggacagctcatccctgccagcccagatgaaatcatgcaccaggacatcgtcccgctctgtgctgccgacatccaggaccagctaaagaagcgctttgcttacctgtccggtgggcgggggcaggacggaagcccggttatcaccttccctgactacccggccttcagcgagattccggacaaggagttccagaatgtcatgacctacctcaccagcatccccagcctgcaggacgctggcatcggattcatcctggtgatagaccggcgacgggacaaatggacctccgtgaaggcgtccgtcctgcgcatcgcagcatctttcccggcaaacctgcagctcgtcctcgtgcttcgcccgacgggttttttccaaaggactctctccgacatcgctttcaaattcaatagagatgactttaagatgaaggtgccggtcataat

SEQ ID NO: 281763 - DNA, 2955 bp, Artificial Sequence
  derived and/or modified sequence
atgaccgtgcggcggctgagcctgctgtgccgggacctgtgggccctgtggcttcttctgaaggctggtgctgatgaaataatgcaccaggatatcgtcccactgtgtgctgctgacatacaagaccagcttaaaaaaaggtttgcttatctctcaggcggcaggggtcaggacgggagccccgtgattacatttccagactatcccgctttttccgagatcccagacaaggaattccaaaatgtgatgacatacttgacatccattccctccttgcaggatgccggtatcggcttcattctggtgatcgaccgcagacgcgataagtggacttctgtgaaagcttctgtgctgcgcatcgctgcctccttcccggctaatttgcagctcgtcctggtgctccggcccacaggtttcttccagcgtactctctcagatatcgctttcaaattcaaccgtgacgactttaagatgaaggtgccagtgattatgctttcaagcgtaccggacctccatggctatatcgacaaatcgcaattaaccgaagacctcggtggtaccctggattactgccactcaagatggctatgccagcgaacggccatcgagagctttgccctgatggtcaaacagacagcccagatgctgcaatcattcggcacggagctcgcagagacagagctacctaacgatgtgcagtcaacctcttccgtgctgtgcgcccacacggaaaagaaggataaggcaaaggaggacttacgactggcattaaaggaggggcatagcgtgctggagagcctgcgggaactacaagcagaaggatctgaacccagtgtcaaccaggatcagcttgataaccaagcgacggtccagaggctgttggctcagctgaatgagacagaagcagcgttcgatgaattttgggctaagcaccaacaaaagcttgagcaatgcctccagttgcgccatttcgaacagggctttcgcgaggtgaaggctatacttgatgcagcgtctcagaaaatcgccacgtttacagacattggcaatagtctcgctcacgtcgaacacctgctgcgtgatttggcatcctttgaagaaaaaagtggcgtagcagtcgaaagggcaagggcgcttagtttggacggagaacagctcatcggcaataagcactatgctgtagatagtattcggccaaagtgccaggagttgcggcatctgtgcgaccagttctctgctgagatcgctcgcaggaggggtcttctcagcaagtctcttgaactccacagacgactagaaaccagcatgaagtggtgcgatgagggcatctacctcctcgcttctcagcctgtggacaaatgccagagccaggacggggccgaagctgcactgcaggaaattgagaaattcctggaaacaggtgccgaaaataagatccaggagcttaacgcaatctataaggaatatgagtctatcctaaaccaggatctgatggagcatgtccgcaaagttttccaaaaacaagctagcatggaagaggtgttccaccggcgccaggcaagcttaaaaaagctggctgccaggcagaccaggccggtgcaacctgtcgccccccgcccggaagctctggctaaatcgccatgcccgtctcccgggatccgcaggggatcagagaacagttcatcagaaggaggggcgctgagacgtggaccttaccgcagagcaaagtctgagatgtccgagtctcgccagggcagaggttcagccggggaagaggaagagagcctggccatcttgcggcgccatgtgatgtcagagttgcttgatactgaaagagcgtacgtagaggaactcctgtgcgttctggagggttacgcagctgaaatggacaacccactcatggcgcatctgctaagcacaggtctccataataagaaagacgttttgttcggaaacatggaagaaatctaccattttcataacagaatctttttgcgggagctggagaattacaccgactgtccggagcttgttggcaggtgttttctcgaaagaatggaagactttcaaatctatgaaaagtattgccagaataagcccaggagcgagagtctgtggaggcagtgcagcgactgcccctttttccaggaatgtcagaggaaacttgaccataagctcagcctagatagctacttactgaaacccgtccagagaatcaccaaatatcagttattgcttaaggagatgctaaagtacagccggaattgcgagggtgccgaagacctccaggaggctctgtccagtatcctcggaatccttaaagccgtgaacgattcaatgcacctcattgccattacaggatatgacggcaacctgggcgacttaggcaaactactaatgcagggctcattttcggtatggacggatcataagagaggtcacactaaagttaaagagctggcgcgcttcaagccaatgcaacggcacttgtttctgcacgaaaaggctgtactcttctgtaagaaacgagaagagaacggcgaagggtatgaaaaggctccctcttactcatacaagcagtcattgaacatggcagctgtcggcattactgagaatgtgaaaggggacgctaagaagtttgaaatctggtataacgcaagagaagaggtgtacatcgtgcaggcccccacgcctgaaattaaggcggcttgggtgaacgagatcaggaaggtgctaacgagtcagctgcaggcatgtcgggaagcttcccagcaccgggcactggaacagagtcagagcctacccttacctgctcccacatctacgtccccctctaggggcaattctaggaatattaagaagttagaggaacgaaagacagatccactcagtttagaagggtacgtaagcagcgcccccttgacaaagcctcccgaaaaagggaaagagccttag

SEQ ID NO: 281764 - DNA, 411 bp, Artificial Sequence
  derived and/or modified sequence
atgcaccaggacatcgtgcccctgtgcgccgccgacatccaggaccagctgaaaaagcgattcgcatatctgtccggagggcgggggcaggacggatcccccgtcataactttcccagattaccctgcgttcagcgagattcccgataaagaattccagaacgtgatgacctatttaacgtccattcccagcctgcaggatgctggcatcggattcatcctggtgattgaccgaaggcgggacaaatggacgtccgtcaaagcttctgtcctgagaatcgcagcatcgttcccagccaatttgcagctggtacttgttctccgtccaaccggcttcttccaaagaactctgagtgacatcgctttcaagtttaacagagatgatttcaagatgaaagttcccgttatttag

SEQ ID NO: 281765 - DNA, 2955 bp, Artificial Sequence
  derived and/or modified sequence
atgaccgtacggaggctgtcactactttgcagagacttgtgggcactctggctactgttgaaagccggtgccgatgagataatgcaccaagacatcgtgcctttgtgcgctgccgatatccaggatcagctgaagaagaggtttgcctacctatccggagggcgaggacaagacggctcgcctgtcatcacatttcccgattatcctgcgttcagtgaaatcccggacaaggagttccaaaatgtgatgacatacctgacaagtattcctagtctgcaggacgctgggatcggtttcattttggtaattgaccgccgacgggataaatggacaagcgttaaggcctctgtactccgaatcgcggcatcattccccgctaatctccagctagttttggtgctccggcctaccgggttctttcagaggaccctatctgatatcgcgttcaaattcaacagggacgactttaaaatgaaagttcccgtgattatgctcagcagcgtgcctgatttgcacggctacatagacaagagtcagctcactgaagatttaggagggactctggactactgtcattccagatggctgtgtcagcgcaccgcaattgagtcttttgcccttatggtcaaacagactgcacaaatgcttcaatcctttggcactgaactagcggagaccgaactcccaaacgatgtgcaatccacctccagcgttctgtgtgctcacacggagaaaaaggataaagcaaaggaagacctcaggcttgcattgaaggagggccattccgtcctcgagtctctaagagaactccaggctgagggctcagaaccaagtgtgaatcaggaccagctcgataatcaggcaacggtgcagagactactggcccagctcaacgagactgaagcggcattcgatgagttctgggccaagcaccaacagaaactggaacagtgtcttcagttgcggcacttcgagcagggattccgagaggttaaagcgatcctcgatgccgcttctcagaaaatagcgactttcactgacattggaaatagcctggcgcacgtagagcatttgctgcgcgatctggcgtcttttgaggaaaagagcggagtggctgtagagcgggctcgtgccctgagtctggatggcgaacagctgatcggaaataagcattacgcggtcgattcgatcagaccaaagtgccaggaactcagacatctgtgtgaccagtttagtgccgaaatagcccgtaggagaggattgctgtctaagtcactggaactccaccggcgactggaaacttcaatgaaatggtgtgacgaaggcatctacctcctggcttcacagccagtggataagtgccagagccaggatggcgcagaagcagctctgcaggaaatcgaaaaattcctcgaaaccggcgctgagaacaagatccaggagctgaatgctatttacaaggagtatgagagtattctcaatcaggacttgatggaacatgtccggaaggtgttccagaagcaagcttcaatggaggaagtctttcaccgacggcaggcttctttgaagaaactggcagctaggcagactcgacccgttcaacctgttgctcctcggccagaggctcttgccaagagtccttgtccgagtcccggaattaggaggggctcggaaaacagctcatcagaaggcggagctctgagaaggggaccataccggagggccaaatcggaaatgtctgaaagtcgacaaggaagggggagcgccggtgaagaggaggaaagcctggctatcctgcggaggcatgtcatgtcagaacttctagacaccgagagagcgtatgtagaggagctgttgtgtgtcctggagggctacgcagcagaaatggacaatccgcttatggcacatctcctttctaccgggctgcacaacaagaaggatgtcctgttcgggaatatggaggaaatttatcacttccataacagaattttcctccgtgagctggagaattacacagattgtccagagctcgtcggccgatgcttcctggagcgtatggaggacttccagatatatgaaaagtattgtcaaaataaacccagatctgagagtctttggaggcagtgcagcgattgccccttcttccaggagtgccagcgaaagctggaccacaagttgagcctcgactcgtatctcttaaagcccgtccaacgcatcaccaagtatcagctgcttttgaaggaaatgctaaagtacagccgcaattgcgaaggggcagaagacctccaagaggccttgagctccatcctgggcattctgaaagccgtcaatgacagtatgcatctgattgccattactggttatgatgggaatctcggagatttggggaagctgctaatgcaaggaagctttagcgtttggactgaccacaaaagagggcacaccaaagtaaaggagctcgctcgctttaaaccaatgcagcggcacctctttctgcacgaaaaggctgtgctgttttgcaagaaacgggaggaaaacggagagggctacgaaaaggccccttcatactcctacaagcagtctttaaacatggccgctgttggaatcaccgaaaacgtgaagggcgatgctaaaaagtttgagatttggtacaatgctcgagaggaggtctacattgtccaggcacccacccccgagatcaaagccgcatgggtgaacgaaatcaggaaggtgctgactagccagctacaagcatgccgagaagctagtcagcacagagccctggaacagtcacaatccctgcctctcccagctcccacatcaactagtccaagcagagggaactcacgaaacattaagaaactggaggaaaggaagactgatccactgtccctggagggttatgtgagcagcgccccattgaccaagccccctgagaagggcaaggagccatag

SEQ ID NO: 281766 - DNA, 411 bp, Artificial Sequence
  derived and/or modified sequence
atgcaccaggacatcgtgcctttatgcgcagcagacattcaggatcagctgaaaaagcggtttgcttacctgagcggaggcagagggcaggacggatctccagttataacctttcctgactatcccgctttttccgagattcccgacaaggaatttcagaacgtgatgacatatctaacttcaatacctagcctgcaggatgcgggtatcggctttatcctggttattgacaggagacgagataaatggacaagtgttaaagcaagcgtgctgagaattgccgcttctttccctgccaatttacaactcgtgttggtgctgagacctaccggcttcttccagagaacattaagcgacatcgcctttaagttcaatcgagacgactttaaaatgaaagtacctgtgatctag

SEQ ID NO: 281767 - DNA, 2955 bp, Artificial Sequence
  derived and/or modified sequence
atgaccgtgagaagactgagcctgctgtgcagagacctgtgggccctgtggctgctgctgaaggccggcgccgacgagatcatgcaccaggacatcgtgcccctgtgcgccgccgacatccaggaccagctgaagaagagattcgcctacctgagcggcggcagaggccaggacggcagccccgtgatcaccttccccgactaccccgccttcagcgagatccccgacaaggagttccagaacgtgatgacctacctgaccagcatccccagcctgcaggacgccggcatcggcttcatcctggtgatcgacagaagaagagacaagtggaccagcgtgaaggccagcgtgctgagaatcgccgccagcttccccgccaacctgcagctggtgctggtgctgagacccaccggcttcttccagagaaccctgagcgacatcgccttcaagttcaacagagacgacttcaagatgaaggtgcccgtgatcatgctgagcagcgtgcccgacctgcacggctacatcgacaagagccagctgaccgaggacctgggcggcaccctggactactgccacagcagatggctgtgccagagaaccgccatcgagagcttcgccctgatggtgaagcagaccgcccagatgctgcagagcttcggcaccgagctggccgagaccgagctgcccaacgacgtgcagagcaccagcagcgtgctgtgcgcccacaccgagaagaaggacaaggccaaggaggacctgagactggccctgaaggagggccacagcgtgctggagagcctgagagagctgcaggccgagggcagcgagcccagcgtgaaccaggaccagctggacaaccaggccaccgtgcagagactgctggcccagctgaacgagaccgaggccgccttcgacgagttctgggccaagcaccagcagaagctggagcagtgcctgcagctgagacacttcgagcagggcttcagagaggtgaaggccatcctggacgccgccagccagaagatcgccaccttcaccgacatcggcaacagcctggcccacgtggagcacctgctgagagacctggccagcttcgaggagaagagcggcgtggccgtggagagagccagagccctgagcctggacggcgagcagctgatcggcaacaagcactacgccgtggacagcatcagacccaagtgccaggagctgagacacctgtgcgaccagttcagcgccgagatcgccagaagaagaggcctgctgagcaagagcctggagctgcacagaagactggagaccagcatgaagtggtgcgacgagggcatctacctgctggccagccagcccgtggacaagtgccagagccaggacggcgccgaggccgccctgcaggagatcgagaagttcctggagaccggcgccgagaacaagatccaggagctgaacgccatctacaaggagtacgagagcatcctgaaccaggacctgatggagcacgtgagaaaggtgttccagaagcaggccagcatggaggaggtgttccacagaagacaggccagcctgaagaagctggccgccagacagaccagacccgtgcagcccgtggcccccagacccgaggccctggccaagagcccctgccccagccccggcatcagaagaggcagcgagaacagcagcagcgagggcggcgccctgagaagaggcccctacagaagagccaagagcgagatgagcgagagcagacagggcagaggcagcgccggcgaggaggaggagagcctggccatcctgagaagacacgtgatgagcgagctgctggacaccgagagagcctacgtggaggagctgctgtgcgtgctggagggctacgccgccgagatggacaaccccctgatggcccacctgctgagcaccggcctgcacaacaagaaggacgtgctgttcggcaacatggaggagatctaccacttccacaacagaatcttcctgagagagctggagaactacaccgactgccccgagctggtgggcagatgcttcctggagagaatggaggacttccagatctacgagaagtactgccagaacaagcccagaagcgagagcctgtggagacagtgcagcgactgccccttcttccaggagtgccagagaaagctggaccacaagctgagcctggacagctacctgctgaagcccgtgcagagaatcaccaagtaccagctgctgctgaaggagatgctgaagtacagcagaaactgcgagggcgccgaggacctgcaggaggccctgagcagcatcctgggcatcctgaaggccgtgaacgacagcatgcacctgatcgccatcaccggctacgacggcaacctgggcgacctgggcaagctgctgatgcagggcagcttcagcgtgtggaccgaccacaagagaggccacaccaaggtgaaggagctggccagattcaagcccatgcagagacacctgttcctgcacgagaaggccgtgctgttctgcaagaagagagaggagaacggcgagggctacgagaaggcccccagctacagctacaagcagagcctgaacatggccgccgtgggcatcaccgagaacgtgaagggcgacgccaagaagttcgagatctggtacaacgccagagaggaggtgtacatcgtgcaggcccccacccccgagatcaaggccgcctgggtgaacgagatcagaaaggtgctgaccagccagctgcaggcctgcagagaggccagccagcacagagccctggagcagagccagagcctgcccctgcccgcccccaccagcaccagccccagcagaggcaacagcagaaacatcaagaagctggaggagagaaagaccgaccccctgagcctggagggctacgtgagcagcgcccccctgaccaagccccccgagaagggcaaggagccctag

SEQ ID NO: 281768 - DNA, 411 bp, Artificial Sequence
  derived and/or modified sequence
atgcaccaggacatcgtgcccctgtgcgccgccgacatccaggaccagctgaagaagagattcgcctacctgagcggcggcagaggccaggacggcagccccgtgatcaccttccccgactaccccgccttcagcgagatccccgacaaggagttccagaacgtgatgacctacctgaccagcatccccagcctgcaggacgccggcatcggcttcatcctggtgatcgacagaagaagagacaagtggaccagcgtgaaggccagcgtgctgagaatcgccgccagcttccccgccaacctgcagctggtgctggtgctgagacccaccggcttcttccagagaaccctgagcgacatcgccttcaagttcaacagagacgacttcaagatgaaggtgcccgtgatctag

SEQ ID NO: 281769 - protein, 410 aa, Artificial Sequence
  derived and/or modified sequence
MAKDAGLIEANGELKVFIDQNLSPGKGVVSLVAVHPSTVNPLGKQLLPKTFGQSNVNIAQQVVIGTPQRPAASNTLVVGSPHTPSTHFASQNQPSDSSPWSAGKRNRKGEKNGKGLRHFSMKVCEKVQRKGTTSYNEVADELVAEFSAADNHILPNESAYDQKNIRRRVYDALNVLMAMNIISKEKKEIKWIGLPTNSAQECQNLEVERQRRLERIKQKQSQLQELILQQIAFKNLVQRNRHAEQQASRPPPPNSVIHLPFIIVNTSKKTVIDCSISNDKFEYLFNFDNTFEIHDDIEVLKRMGMACGLESGSCSAEDLKMARSLVPKALEPYVTEMAQGTVGGVFITTAGSTSNGTRFSASDLTNGADGMLATSSNGSQYSGSRVETPVSYVGEDDEEDDDFNENDEDD

SEQ ID NO: 281770 - protein, 159 aa, Artificial Sequence [sequence omitted]

SEQ ID NO: 281771 - DNA, 1233 bp, Artificial Sequence
  derived and/or modified sequence
atggccaaggacgccggcctgatcgaggccaacggcgagctgaaggtgttcatcgaccagaacctgagccccggcaagggcgtggtgagcctggtggccgtgcaccccagcaccgtgaaccccctgggcaagcagctgctgcccaagaccttcggccagagcaacgtgaacatcgcccagcaggtggtgatcggcaccccccagagacccgccgccagcaacaccctggtggtgggcagcccccacacccccagcacccacttcgccagccagaaccagcccagcgacagcagcccctggagcgccggcaagagaaacagaaagggcgagaagaacggcaagggcctgagacacttcagcatgaaggtgtgcgagaaggtgcagagaaagggcaccaccagctacaacgaggtggccgacgagctggtggccgagttcagcgccgccgacaaccacatcctgcccaacgagagcgcctacgaccagaagaacatcagaagaagagtgtacgacgccctgaacgtgctgatggccatgaacatcatcagcaaggagaagaaggagatcaagtggatcggcctgcccaccaacagcgcccaggagtgccagaacctggaggtggagagacagagaagactggagagaatcaagcagaagcagagccagctgcaggagctgatcctgcagcagatcgccttcaagaacctggtgcagagaaacagacacgccgagcagcaggccagcagaccccccccccccaacagcgtgatccacctgcccttcatcatcgtgaacaccagcaagaagaccgtgatcgactgcagcatcagcaacgacaagttcgagtacctgttcaacttcgacaacaccttcgagatccacgacgacatcgaggtgctgaagagaatgggcatggcctgcggcctggagagcggcagctgcagcgccgaggacctgaagatggccagaagcctggtgcccaaggccctggagccctacgtgaccgagatggcccagggcaccgtgggcggcgtgttcatcaccaccgccggcagcaccagcaacggcaccagattcagcgccagcgacctgaccaacggcgccgacggcatgctggccaccagcagcaacggcagccagtacagcggcagcagagtggagacccccgtgagctacgtgggcgaggacgacgaggaggacgacgacttcaacgagaacgacgaggacgactag

SEQ ID NO: 281772 - DNA, 1233 bp, Artificial Sequence
  derived and/or modified sequence
atggccaaggacgctgggctcatcgaggctaacggtgagcttaaggtatttatagaccaaaatctgtctcctgggaaaggtgtggtgagtctggttgcagtgcatccctctacagtgaatccgctgggaaaacaactgctacctaagaccttcggccaatcaaatgtaaacatcgcccagcaagtcgtcatcggcaccccacagagacctgctgccagtaacaccctggtggtagggagccctcatacccccagcactcattttgcctcccaaaatcaaccctccgattccagcccatggagtgcaggcaaaagaaatcgaaaaggggaaaagaatggaaagggtctgaggcatttttcgatgaaagtttgtgagaaggtgcaacgcaaaggcactacgtcttacaacgaggtcgcagacgagcttgtggccgaattcagtgcggccgacaaccacattctccctaatgagtctgcctatgatcaaaaaaacatcaggcgacgagtgtacgatgctctgaacgtcctgatggcaatgaatatcatcagtaaggaaaagaaggaaattaagtggataggcctgcctacaaatagtgcccaggaatgccagaacctggaggtagaacgccagagaagactggaaagaatcaagcagaagcagagtcagctgcaggagctcatccttcagcagattgctttcaagaacctggtccagcgaaatagacatgccgaacaacaggcgtctcgccctccaccgcctaacagtgtgattcaccttccctttataattgtcaatacgagcaagaagaccgtgatcgattgctccataagcaatgacaagtttgaatatctcttcaatttcgacaataccttcgaaatccatgacgacatcgaggtgctcaagcgaatgggaatggcctgtgggctggaatccggctcatgtagcgctgaagatttgaaaatggcgcgtagcctggttcctaaggctctggagccatatgtgactgagatggcccaagggactgtcggtggagtttttattaccaccgcagggtctacaagtaacggcacccgcttttccgccagcgacctgaccaacggtgccgacgggatgctagccaccagttcgaacggcagccaatatagcggcagcagagtcgagacgccggtttcctatgtcggcgaggatgatgaggaagacgatgattttaatgaaaacgatgaagatgattag

SEQ ID NO: 281773 - DNA, 1233 bp, Artificial Sequence
  derived and/or modified sequence
atggccaaggatgctggcctcatcgaggccaatggagagctgaaggtgttcatcgaccagaacctgagccctgggaagggcgtggtgtccctggtggccgtgcaccccagcacagtgaaccccctgggcaagcagctgctgcccaagaccttcggccagagcaatgtgaacatcgcccagcaggtggtgattggcaccccccagaggcctgctgccagcaacaccctggtggtgggcagcccccacacccccagcacccactttgccagccagaaccagcccagcgacagcagcccctggagcgctgggaagaggaacaggaagggggagaagaatggcaagggcctgcggcacttctccatgaaggtgtgtgagaaggtgcagaggaagggcaccaccagctacaatgaggtggctgatgagctggtggccgagttctctgctgctgacaaccacatcctgcccaatgaaagtgcctatgaccagaagaacatcagaagaagagtgtatgatgccctgaatgtgctgatggccatgaacatcatcagcaaggagaagaaggagatcaagtggattggcctgcccaccaacagcgcccaggagtgccagaacctggaggtggagcggcagaggcggctggagcgcatcaagcagaagcagagccagctgcaggagctgatcctgcagcagatcgccttcaagaacctggtgcagaggaacagacatgctgagcagcaggccagccggcccccaccacccaacagcgtcatccacctgcccttcatcatcgtgaacaccagcaagaagacagtcatcgactgcagcatcagcaatgacaagtttgagtacctgttcaactttgacaacacctttgagatccatgatgacatcgaggtgctgaagaggatgggcatggcctgtggcctggagagcggcagctgcagcgctgaggacctgaagatggcccggagcctggtgcccaaggccctggagccctacgtgacagagatggcccagggcaccgtgggcggcgtcttcatcaccacagctggcagcaccagcaatggcacccgcttcagcgccagtgacctgaccaacggggctgatggcatgctggccaccagcagcaatggcagccagtacagcggcagccgggtggagacccctgtgtcctatgtgggagaagatgatgaagaagatgatgacttcaatgaaaatgatgaagatgactag

SEQ ID NO: 281774 - DNA, 1233 bp, Artificial Sequence
  derived and/or modified sequence
atggccaaggacgccggcctgatcgaggccaacggcgagctgaaggtattcattgaccagaatctcagcccagggaaaggcgtggtgtctctggtcgccgttcatccatcaaccgtgaatcctctggggaagcagctcctacccaagacatttggccaatcaaatgtcaacatcgctcaacaagtggttataggaactccacaaaggccagcagcctcgaacacgctagttgtgggtagcccacacacaccaagcacacacttcgccagccaaaatcagcctagtgatagtagcccctggtctgccggcaaaagaaatagaaagggtgaaaagaatggaaaaggactgcggcatttctccatgaaggtctgtgagaaagtccagcgcaaggggacaacatcctacaatgaggtggctgatgagctggtggctgagtttagtgccgcagataaccacatattgcccaacgagtccgcatacgaccagaagaatatccggcgaagagtgtacgacgcattgaacgtcctaatggcaatgaatataatatctaaggagaaaaaagagatcaagtggattggcttgccaacgaattcagcccaggagtgtcagaacctcgaggtggaacggcagcgacggctcgaacgtataaagcagaaacaaagtcagctgcaggagctgatacttcagcagatcgcgttcaaaaatcttgtgcagagaaacaggcacgctgagcagcaggccagtcggccgccacctccaaattctgttattcacttgccctttattatcgtgaacacatctaagaaaaccgtgattgactgttctatcagcaatgataagttcgaatacctttttaatttcgataatacattcgagattcatgacgatattgaggtcctcaagagaatgggtatggcctgcggtcttgagagcggatcatgctcggctgaagacctgaagatggcacggtccctggtgcctaaggccctggagccgtacgtcaccgaaatggcccaggggaccgtgggcggggtttttatcacaacagccggatcaacatcaaacggcactcgcttcagcgccagcgaccttactaatggggcagacggcatgctagccaccagctccaacgggagtcagtattccggcagtcgggtggagacacccgttagttatgtgggggaagacgacgaagaagatgatgattttaacgaaaatgacgaggacgactag

SEQ ID NO: 281775 - DNA, 1233 bp, Artificial Sequence
  derived and/or modified sequence
atggcaaaagatgccggtctgatcgaagcgaacggagagttaaaggtgttcatcgaccagaacttgagtccaggcaagggcgtggtgtccctggtggccgtgcatcccagcactgtgaaccctttggggaagcagttgctacccaaaacttttgggcaatccaacgtgaacatcgcgcagcaggtggtgattgggactcctcagcgacctgccgcatccaacaccctcgttgtcggatccccccatacaccgtccacccattttgcttcccagaaccagccatctgattcttctccgtggagtgccggtaagaggaatagaaagggggaaaagaatggcaaaggactgagacacttttccatgaaagtctgcgagaaggtgcagagaaagggcacaacgtcatacaacgaagtggcagacgagctcgtcgctgagttctctgcagctgacaatcacatacttccgaatgagtcagcttacgaccagaaaaacatccgtcgcagggtatacgacgcattgaacgtgctgatggccatgaacatcatctcaaaagaaaaaaaggaaattaaatggatcggcctaccgactaactcggcccaggagtgtcaaaacctcgaggtggagaggcaacgaagattagaacggattaagcaaaagcagagccagcttcaggagcttatcctgcagcagattgcttttaagaatcttgtacagaggaaccggcacgcagagcaacaggcctcccggcctcccccaccaaattccgtgattcacctgcccttcattattgtgaacaccagcaagaaaactgtaattgactgcagcatcagcaacgataagttcgaatacctgtttaatttcgataatacgttcgagattcacgacgacatcgaggttctcaagagaatgggaatggcctgtggactcgagtccggcagttgttccgcagaagacttaaagatggcccgatctctggtgcccaaggctttagagccttatgtaactgagatggcacagggtacagttggaggggtgtttataaccaccgcagggtcgaccagtaatggcactcggtttagcgcatctgacctcacgaacggggcagatggtatgcttgccacgtcaagcaacggctcccagtactcgggctcacgagtggagacacctgtatcctatgttggcgaagacgacgaagaggatgatgacttcaatgaaaatgacgaggacgactag

SEQ ID NO: 281776 - DNA, 2367 bp, Artificial Sequence
  derived and/or modified sequence
cgtcccggcgccactcggcccagggcagggaccccgccacggccgggaccgcccggcccggccccagcccgcgcctctccgcgccgccccgcgctccgcaccgcgccctctccgcgtccccgcccgcgcggccggaccgggcagccagaaaaatcatttttcttctctgggaaggtgaacatttgtagcattgatttcccggatctggtaacatggcaaaagatgccggtctaattgaagccaacggagaactcaaggtcttcatagaccagaaccttagtcccgggaaaggcgtggtgtccctcgtggccgttcacccctccaccgtcaacccgctcgggaagcagctcttgccaaaaacctttggacagtccaatgtcaacattgcccagcaagtggtaattggtacgcctcagagaccggcagcgtcaaacaccctggtggtaggaagcccacacacccccagcactcactttgcctctcagaaccagccttccgactcctcaccttggtctgccgggaagcgcaacaggaaaggagagaagaatggcaagggcctacggcatttctccatgaaggtctgcgagaaggtgcagaggaaagggaccacttcctacaacgaagtggcagacgagctggttgcggagttcagtgctgccgacaaccacatcttaccaaacgagtcagcttatgaccagaaaaacataagacggcgcgtctacgatgccttaaacgtgctaatggccatgaacatcatctccaaggagaagaaggagatcaagtggattggtctgcccaccaactcggctcaggaatgtcagaacttagaggtggaaagacagaggagacttgaaagaataaaacagaaacagtctcaacttcaagaacttattctacagcaaattgccttcaagaacctggtgcagagaaaccggcatgcggagcagcaggccagccggccaccgccacccaactcagtcatccacctgcccttcatcatcgtcaacaccagcaagaagacggtcatcgactgcagcatctccaatgacaaatttgagtatctgtttaattttgacaacacatttgaaatccacgatgacatagaagtgctgaagcggatgggcatggcttgcgggctggagtcggggagctgctctgccgaagaccttaaaatggccagaagtctggtccccaaggctctggagccatacgtgacagaaatggctcagggaactgttggaggcgtgttcatcacgacggcaggttccacgtctaacggcacaaggttctctgccagtgacctgaccaacggtgcagatgggatgctggccacaagctccaatgggtctcagtacagcggctccagggtggagactccggtgtcctacgtcggggaggacgacgaggaggacgatgacttcaacgagaatgacgaggacgactgacgtcctccccacttcagattcggcttcaggaaaacgtttagcgaaaagaaactttttttttaatgtgggttttctgtttccttttggcctactcccaagaagatattggtaagctattgaatttagatatgcacctctgataagcaaggattgtttcccgtaggattaggacgtgctgtggatgtgtgttttgataccagtgtgctgatgcagagcgtttatttacttgttaggattttgtgttttcatttgctatttttctttaagtgcagagttcatttttgcccctgaaaagtttttgctgagtttgctgaagaaattgtatttcaaccacatccatgaaaataaaacacctcctgttgtggatggtgagcccctgatgccgcttatttgccgtgagtttggacggcacccctgctggcggatagcaagactctgtggagtttgttcagtggtacggtgtccaagcaaacagcagaatgcaactttctaaacagccccaagcaaacagcagaattcaactttttaaacaataaacaccatcaaccttattgactttattgtcccttaaattatattgactgttgtgattccatcaagtttgtacactcttttctctccctgttttgcagcaacaaattgcgaagtgcttttgtttgtttgttttcgtttggttaaagcttattgccatgctggtgcggctatggagactgtctggaaggcttggaatggtttattgcttatggtaaaatttgcctgatttcttacaggcagcgtttggaaaccttttattatatagttgtttacatacttataagtctatcatttaaagacatgtactgaaacaaatgtatttgtttcataagcatcttcctgtaatctattataaaattgaaattaaatatagagaatgttttaacaa

SEQ ID NO: 281777 - protein, 236 aa, Artificial Sequence
  derived and/or modified sequence
MAKDAGLIEANGELKVFIDQNLSPGKGVVSLVAVHPSTVNPLGKQLLPKTFGQSNVNIAQQVVIGTPQRPAASNTLVVGSPHTPSTHFASQNQPSDSSPWSAGKRNRKGEKNGKGLRHFSMKVCEKVQRKGTTSYNEVADELVAEFSAADNHILPNESAYDQKNIRRRVYDALNVLMAMNIISKEKKEIKWIGLPTNSAQECQNLEVERQRRLERIKQKQSQLQELILQQIAFKNL

SEQ ID NO: 281778 - DNA, 711 bp, Artificial Sequence
  derived and/or modified sequence
atggccaaggacgccggcctgatcgaggccaacggcgagctgaaggtgttcatcgaccagaacctgagccccggcaagggcgtggtgagcctggtggccgtgcaccccagcaccgtgaaccccctgggcaagcagctgctgcccaagaccttcggccagagcaacgtgaacatcgcccagcaggtggtgatcggcaccccccagagacccgccgccagcaacaccctggtggtgggcagcccccacacccccagcacccacttcgccagccagaaccagcccagcgacagcagcccctggagcgccggcaagagaaacagaaagggcgagaagaacggcaagggcctgagacacttcagcatgaaggtgtgcgagaaggtgcagagaaagggcaccaccagctacaacgaggtggccgacgagctggtggccgagttcagcgccgccgacaaccacatcctgcccaacgagagcgcctacgaccagaagaacatcagaagaagagtgtacgacgccctgaacgtgctgatggccatgaacatcatcagcaaggagaagaaggagatcaagtggatcggcctgcccaccaacagcgcccaggagtgccagaacctggaggtggagagacagagaagactggagagaatcaagcagaagcagagccagctgcaggagctgatcctgcagcagatcgccttcaagaacctgtag

SEQ ID NO: 281779 - DNA, 480 bp, Artificial Sequence
  derived and/or modified sequence
atggccaaggacgccggcctgatcgaggccaacggcgagctgaaggtgttcatcgaccagaacctgagccccggcaagggcgtggtgagcctggtggccgtgcaccccagcaccgtgaaccccctgggcaagcagctgctgcccaagaccttcggccagagcaacgtgaacatcgcccagcaggtggtgatcggcaccccccagagacccgccgccagcaacaccctggtggtgggcagcccccacacccccagcacccacttcgccagccagaaccagcccagcgacagcagcccctggagcgccggcaagagaaacagaaagggcgagaagaacggcaagggcctgagacacttcagcatgaaggtgtgcgagaaggtgcagagaaagggcaccaccagctacaacgaggtggccgacgagctggtggccgagttcagcgccgccgacaaccacatcctgcccaacgagagcgtgtag

SEQ ID NO: 281780 - DNA, 711 bp, Artificial Sequence
  derived and/or modified sequence
atggccaaggatgccggcctgatcgaggccaatggggaactgaaagtcttcattgaccagaatttgtcccccggcaagggcgttgtcagcctggttgctgtgcacccttccaccgtgaacccactcgggaaacaacttcttcctaagacgtttggacagagcaacgttaacatcgcgcaacaagtcgtcatcgggacccctcagcggcctgcagcctccaatacccttgtcgtgggttctccccacacaccatcgacacacttcgcctcccaaaatcagcccagtgactccagtccatggtctgcgggcaagaggaaccggaagggcgaaaagaacggaaaaggacttcgccacttctccatgaaggtgtgtgagaaggttcagagaaagggaacgacctcctataatgaagttgctgatgagctagtggcggagttttccgccgcagacaaccacatcttgccaaacgagtccgcgtatgaccaaaaaaatatccgccggagagtgtatgatgccctgaacgtgctgatggctatgaacattattagcaaggagaagaaggagatcaaatggattggccttcccacgaactccgctcaggagtgccagaacctagaagtggagcgacaacggagactagagagaataaaacagaagcaatcacaactgcaggagctaatcctgcagcagattgcattcaaaaatctgtag

SEQ ID NO: 281781 - DNA, 480 bp, Artificial Sequence
  derived and/or modified sequence
atggcgaaggacgctggcctaatcgaggctaacggagaactaaaggtgtttatagaccagaacctctcccctggcaagggggtggtgtccctggtggcagtgcacccatctactgttaaccccttggggaaacagctgttgcctaagacgttcgggcaatccaacgtgaacatagcccagcaggtagtcatcggcactccccagaggcccgctgctagcaatactttagtagttggctcgcctcacacccctagcacccacttcgcatcacaaaaccagcccagtgattcaagtccatggagcgcaggaaagcgcaataggaagggcgagaaaaacggtaaaggcttgaggcatttttccatgaaggtgtgtgagaaagtgcaaaggaaaggcaccacctcgtataacgaggtggctgatgaacttgtggccgagttctcggccgctgataaccacattcttccaaatgaaagcgtgtag

SEQ ID NO: 281782 - DNA, 711 bp, Artificial Sequence
  derived and/or modified sequence
atggccaaggatgctggcctcatcgaggccaatggagagctgaaggtgttcatcgaccagaacctgagccctgggaagggcgtggtgtccctggtggccgtgcaccccagcacagtgaaccccctgggcaagcagctgctgcccaagaccttcggccagagcaatgtgaacatcgcccagcaggtggtgattggcaccccccagaggcctgctgccagcaacaccctggtggtgggcagcccccacacccccagcacccactttgccagccagaaccagcccagcgacagcagcccctggagcgctgggaagaggaacaggaagggggagaagaatggcaagggcctgcggcacttctccatgaaggtgtgtgagaaggtgcagaggaagggcaccaccagctacaatgaggtggctgatgagctggtggccgagttctctgctgctgacaaccacatcctgcccaatgaaagtgcctatgaccagaagaacatcagaagaagagtgtatgatgccctgaatgtgctgatggccatgaacatcatcagcaaggagaagaaggagatcaagtggattggcctgcccaccaacagcgcccaggagtgccagaacctggaggtggagcggcagaggcggctggagcgcatcaagcagaagcagagccagctgcaggagctgatcctgcagcagatcgccttcaagaacctgtag

SEQ ID NO: 281783 - DNA, 480 bp, Artificial Sequence
  derived and/or modified sequence
atggccaaggatgctggcctcatcgaggccaatggagagctgaaggtgttcatcgaccagaacctgagccctgggaagggcgtggtgtccctggtggccgtgcaccccagcacagtgaaccccctgggcaagcagctgctgcccaagaccttcggccagagcaatgtgaacatcgcccagcaggtggtgattggcaccccccagaggcctgctgccagcaacaccctggtggtgggcagcccccacacccccagcacccactttgccagccagaaccagcccagcgacagcagcccctggagcgctgggaagaggaacaggaagggggagaagaatggcaagggcctgcggcacttctccatgaaggtgtgtgagaaggtgcagaggaagggcaccaccagctacaatgaggtggctgatgagctggtggccgagttctctgctgctgacaaccacatcctgcccaatgaatctgtgtag

SEQ ID NO: 281784 - DNA, 711 bp, Artificial Sequence
  derived and/or modified sequence
atggccaaggacgccggcctgatcgaggccaacggcgagctgaaggtgttcatcgatcagaatttgagcccaggaaaaggagtggtcagcctggtggcagtgcaccctagcaccgttaacccgttagggaaacagctgttaccaaagaccttcggccagagcaatgtcaatatcgcgcagcaggtcgttattggcacaccccagcgacccgccgcatcaaatactctggtggttgggtcccctcacactccgagcactcacttcgcctcccaaaaccaacccagcgactctagcccctggagcgcaggtaaacgcaatagaaaaggcgaaaagaatggaaaaggactgcggcactttagtatgaaagtctgcgagaaggtacagcgcaaaggcaccaccagttacaatgaagtagccgatgaactggttgccgagttctcagctgcggataatcatatcctgccaaatgaaagcgcatacgatcagaaaaatatccgccgcagggtttacgatgcattgaatgttctgatggctatgaacatcatctcaaaggaaaagaaggagatcaaatggatcggactgcctaccaacagcgcacaggagtgtcaaaacttggaagtggagcggcagcgccgacttgagcgaataaagcaaaaacagagtcagctgcaggagctgatactgcagcagatcgctttcaaaaatctttag

SEQ ID NO: 281785 - DNA, 480 bp, Artificial Sequence
  derived and/or modified sequence
atggccaaggacgccggcctgatcgaggccaacggcgagctgaaggtcttcatcgaccagaatctttcacccgggaagggagtagtgagcttggtggcggtacacccctccaccgtgaatccacttggaaaacagctgctccctaagacctttgggcagagtaatgtcaacatcgctcagcaagtcgtaattgggactccgcagagacctgcagcctcgaacaccctggtcgtggggagtccccacacgccttctactcacttcgcaagtcagaatcagcccagtgatagtagcccttggagtgctgggaagcgcaatcggaaaggcgaaaagaacggcaaggggctacggcacttttccatgaaggtttgcgagaaagtgcagagaaaggggacaacatcctacaacgaagtggccgacgaactggtcgcggagtttagcgctgccgacaatcacattctcccgaatgagagcgtctag

SEQ ID NO: 281786 - DNA, 711 bp, Artificial Sequence
  derived and/or modified sequence
atggcgaaggatgccggattgatagaggccaacggggaacttaaggtgtttatcgatcagaacctatcccccggaaagggggttgttagccttgttgccgttcacccatctacagttaaccctttgggtaaacaactgctgcctaagaccttcggtcaatcaaacgtgaacatcgctcagcaagtggttattggcaccccccagcgccctgctgcctctaatacgctggtagtcggttccccgcataccccaagcacacatttcgctagccagaaccaacctagtgacagcagcccttggagcgcagggaaacgcaataggaaaggcgaaaagaacggaaagggactgcgtcactttagcatgaaggtctgtgaaaaagtgcagcggaaaggcactacctcatataatgaggtggcagatgagctcgtagccgaattttctgctgcagataaccacatcttacccaatgagtctgcctatgatcaaaaaaacatcagacgcagagtctatgacgccctgaacgtactgatggcaatgaacattatcagtaaagagaagaaagaaattaagtggataggcctgccaacaaattccgcacaggagtgccagaatctggaggtggaacgccagaggcgcctggagcgtattaagcagaaacagagtcagctgcaggagctgatattgcagcaaatcgccttcaaaaacctttag

SEQ ID NO: 281787 - DNA, 480 bp, Artificial Sequence
  derived and/or modified sequence
atggccaaagacgctggtctcattgaggcgaacggggaactcaaggtattcatcgatcagaacctgtcacccggaaaaggagtcgtgagcctcgtggccgtacacccatccactgtgaaccccttaggcaaacagctgctgcccaagacattcgggcaatctaacgtgaacatcgcacagcaggtggtcatcggtacgccccagcggccagcagctagtaatacgctggtggtcgggtccccgcacacacctagcacacatttcgcatcacagaaccagccatccgatagctcgccttggagcgcaggtaagcggaatagaaagggcgaaaagaacggcaagggcctccgacattttagcatgaaggtatgcgaaaaggtccagcgcaagggaactacaagctataatgaggttgctgatgagttagtggccgagttcagcgccgctgataatcacattttacctaacgaatcagtctag

SEQ ID NO: 281788 - DNA, 866 bp, Artificial Sequence
  derived and/or modified sequence
gtcagagttaccggtcagccgggcgggcgccgccggggtctggggtggacgccgcgagcctgcacgttgcgccgggaccccggggctgtgcccagaaaaatcatttttcttctctgggaaggtgaacatttgtagcattgatttcccggatctggtaacatggcaaaagatgccggtctaattgaagccaacggagaactcaaggtcttcatagaccagaaccttagtcccgggaaaggcgtggtgtccctcgtggccgttcacccctccaccgtcaacccgctcgggaagcagctcttgccaaaaacctttggacagtccaatgtcaacattgcccagcaagtggtaattggtacgcctcagagaccggcagcgtcaaacaccctggtggtaggaagcccacacacccccagcactcactttgcctctcagaaccagccttccgactcctcaccttggtctgccgggaagcgcaacaggaaaggagagaagaatggcaagggcctacggcatttctccatgaaggtctgcgagaaggtgcagaggaaagggaccacttcctacaacgaagtggcagacgagctggttgcggagttcagtgctgccgacaaccacatcttaccaaacgagtcagcttatgaccagaaaaacataagacggcgcgtctacgatgccttaaacgtgctaatggccatgaacatcatctccaaggagaagaaggagatcaagtggattggtctgcccaccaactcggctcaggaatgtcagaacttagaggtggaaagacagaggagacttgaaagaataaaacagaaacagtctcaacttcaagaacttattctacagcaaattgccttcaagaacct

SEQ ID NO: 281789 - DNA, 792 bp, Artificial Sequence
  derived and/or modified sequence
aggtgggtggtggggcacccccctgcagcggcgggagggaggcgctgcgccctggctcctggggctcggccccaccctcggccgctgggcgggccgtcggggacctgggggtagtggtggtgaccctgcgggcccgcgggccacttttccgcagggggcatttccgtctggcgaggcgactgaaaatcctgagtgtgggagtcggtttggccagctccgctctcaggatggagggtgcctttgggaaggaagaaaaatcatttttcttctctgggaaggtgaacatttgtagcattgatttcccggatctggtaacatggcaaaagatgccggtctaattgaagccaacggagaactcaaggtcttcatagaccagaaccttagtcccgggaaaggcgtggtgtccctcgtggccgttcacccctccaccgtcaacccgctcgggaagcagctcttgccaaaaacctttggacagtccaatgtcaacattgcccagcaagtggtaattggtacgcctcagagaccggcagcgtcaaacaccctggtggtaggaagcccacacacccccagcactcactttgcctctcagaaccagccttccgactcctcaccttggtctgccgggaagcgcaacaggaaaggagagaagaatggcaagggcctacggcatttctccatgaaggtctgcgagaaggtgcagaggaaagggaccacttcctacaacgaagtggcagacgagctggttgcggagttcagtgctgccgacaaccacatcttaccaaacgagtcagt

SEQ ID NO: 281790 - protein, 311 aa, Artificial Sequence
  derived and/or modified sequence
MSTLPSKWKRNRKGEKNGKGLRHFSMKVCEKVQRKGTTSYNEVADELVAEFSAADNHILPNESAYDQKNIRRRVYDALNVLMAMNIISKEKKEIKWIGLPTNSAQECQNLEVERQRRLERIKQKQSQLQELILQQIAFKNLVQRNRHAEQQASRPPPPNSVIHLPFIIVNTSKKTVIDCSISNDKFEYLFNFDNTFEIHDDIEVLKRMGMACGLESGSCSAEDLKMARSLVPKALEPYVTEMAQGTVGGVFITTAGSTSNGTSDLTNGADGMLATSSNGSQYSGSRVETPVSYVGEDDEEDDDFNENDEDD

SEQ ID NO: 281791 - DNA, 936 bp, Artificial Sequence
  derived and/or modified sequence
atgagcaccctgcccagcaagtggaagagaaacagaaagggcgagaagaacggcaagggcctgagacacttcagcatgaaggtgtgcgagaaggtgcagagaaagggcaccaccagctacaacgaggtggccgacgagctggtggccgagttcagcgccgccgacaaccacatcctgcccaacgagagcgcctacgaccagaagaacatcagaagaagagtgtacgacgccctgaacgtgctgatggccatgaacatcatcagcaaggagaagaaggagatcaagtggatcggcctgcccaccaacagcgcccaggagtgccagaacctggaggtggagagacagagaagactggagagaatcaagcagaagcagagccagctgcaggagctgatcctgcagcagatcgccttcaagaacctggtgcagagaaacagacacgccgagcagcaggccagcagaccccccccccccaacagcgtgatccacctgcccttcatcatcgtgaacaccagcaagaagaccgtgatcgactgcagcatcagcaacgacaagttcgagtacctgttcaacttcgacaacaccttcgagatccacgacgacatcgaggtgctgaagagaatgggcatggcctgcggcctggagagcggcagctgcagcgccgaggacctgaagatggccagaagcctggtgcccaaggccctggagccctacgtgaccgagatggcccagggcaccgtgggcggcgtgttcatcaccaccgccggcagcaccagcaacggcaccagcgacctgaccaacggcgccgacggcatgctggccaccagcagcaacggcagccagtacagcggcagcagagtggagacccccgtgagctacgtgggcgaggacgacgaggaggacgacgacttcaacgagaacgacgaggacgactag

SEQ ID NO: 281792 - DNA, 936 bp, Artificial Sequence
  derived and/or modified sequence
atgagcaccctgccatccaagtggaagcggaataggaagggtgaaaagaacggcaagggccttaggcacttctctatgaaagtctgcgagaaagtgcagcgaaaaggcacaacttcttacaatgaggtggccgacgaactagtggcagagttttctgctgctgacaaccatatcttgcctaatgaatctgcatatgatcagaagaatattagaaggcgcgtttacgacgccctgaacgttcttatggctatgaatattatcagcaaggagaagaaagagattaaatggattggactgcctaccaactcagcccaggagtgccagaatctcgaagttgaacggcagagaaggctggaaaggatcaaacagaagcagtcgcagctgcaggaacttatccttcagcaaatcgcgtttaagaacctggtccagagaaaccgtcacgcagaacagcaggcaagccgccctcctcctccgaatagcgtgatccacctgccttttatcatagtcaacacttcgaagaagaccgttatagattgctcaatctcaaacgataaatttgaatacttattcaactttgacaatactttcgagattcatgacgatattgaggtgctgaagcgtatggggatggcttgcggacttgagagcggctcttgcagcgcggaggacctgaaaatggcgaggagtttggttcccaaagcgctggaaccttatgtaacagagatggcacagggaaccgtgggtggggtgttcattactaccgccggctccacatcaaacggcacaagtgacctgaccaatggagcggacggaatgctggctaccagcagtaatggttctcaatacagcgggtcgcgcgtggagaccccagtctcttacgtgggggaggacgacgaggaggatgacgactttaatgagaatgatgaggacgactag

SEQ ID NO: 281793 - DNA, 936 bp, Artificial Sequence
  derived and/or modified sequence
atgagcaccctgcccagcaagtggaagaggaacagaaaaggagagaagaatggcaagggcctgcggcacttctccatgaaggtgtgtgagaaggtgcagaggaagggcaccaccagctacaatgaggtggctgatgagctggtggccgagttctctgctgctgacaaccacatcctgcccaatgaaagtgcctatgaccagaagaacatcagaagaagagtgtatgatgccctgaatgtgctgatggccatgaacatcatcagcaaggagaagaaggagatcaagtggattggcctgcccaccaacagcgcccaggagtgccagaacctggaggtggagcggcagaggcggctggagcgcatcaagcagaagcagagccagctgcaggagctgatcctgcagcagatcgccttcaagaacctggtgcagaggaacagacatgctgagcagcaggccagcaggcctcctccacccaacagcgtcatccacctgcccttcatcatcgtgaacaccagcaagaagacagtgattgactgcagcatcagcaatgacaagtttgagtacctgttcaactttgacaacacctttgagatccatgatgacatcgaggtgctgaagaggatgggcatggcctgtggcctggagagcggcagctgcagcgctgaggacctgaagatggcccggagcctggtgcccaaggccctggagccctacgtgacagagatggcccagggcaccgtgggcggcgtcttcatcaccacagctggcagcaccagcaatggcaccagtgacctgaccaatggagcagatggcatgctggccaccagcagcaatggcagccagtacagcggcagccgggtggagacccctgtgtcctatgtgggggaggatgatgaggaggatgatgacttcaatgaaaatgatgaagatgactag

SEQ ID NO: 281794 - DNA, 936 bp, Artificial Sequence
  derived and/or modified sequence
atgagcaccctgcccagcaagtggaagcggaaccggaagggcgagaagaatggcaagggccttagacattttagcatgaaggtgtgtgagaaagtacaacggaagggcactacgagttacaacgaggtggccgacgaactggttgccgaattctcagcagccgacaaccacatcctccctaatgaatccgcctacgatcagaaaaacattagaaggcgggtctatgacgctctcaatgtcctgatggccatgaacatcatatcaaaagagaagaaagagatcaaatggattggacttcctaccaactctgcccaggagtgtcagaaccttgaggtggagaggcagcgaagattagagagaatcaaacagaagcagagccagctccaggagttgattctgcagcagattgcttttaagaacctcgtgcaacgcaatcgccatgccgagcaacaggcatccaggccaccgccccccaatagtgtgattcatctgcccttcatcatcgtgaataccagtaagaagacagtgatagattgttccattagtaacgacaagttcgaatatctgtttaatttcgataatacattcgagattcatgatgatatcgaggtgctcaagcggatggggatggcctgtggacttgagagtggtagttgctcggccgaagatttgaagatggcccgatccctggtacctaaggctctggaaccgtatgtcaccgaaatggcacaagggaccgtgggcggggtgttcatcactaccgccggcagcacaagcaatggcacttccgacctgacaaacggtgcagacggtatgctggccacatcctcaaacggcagtcagtattctgggagccgggtagagacgcctgtctcctacgttggagaagatgatgaggaggacgacgatttcaacgaaaacgacgaagatgattag

SEQ ID NO: 281795 - DNA, 936 bp, Artificial Sequence
  derived and/or modified sequence
atgagtactctcccaagcaaatggaagcgtaatcgaaaaggggaaaagaacggtaaagggctgaggcatttttccatgaaggtgtgcgagaaggtacagcggaagggaactactagctacaatgaagttgcagatgagctggtggccgagttttccgctgctgataatcatattctgcccaacgagtcagcctacgaccagaaaaatattagacgtcgcgtgtatgacgctctaaacgtgctaatggctatgaatatcatttccaaagaaaagaaggaaattaaatggatcgggctacctacgaattcagcacaggagtgccagaacctggaagttgaacggcagaggaggttggagcgaattaaacagaaacagtcacagttgcaggaactgattttacaacagattgcctttaagaacctcgtgcagcggaaccggcacgcagagcagcaggcttccaggccaccccctccaaactccgtgatccacctgccctttattatcgtgaatacatctaagaagacagtcatcgattgcagtatatccaacgataagttcgaatacctttttaactttgacaacaccttcgagattcacgatgatatcgaggtcctcaagagaatgggcatggcatgcgggctggaaagcggcagctgttctgcagaagatctgaagatggctagaagcctcgttcccaaagcgctggagccatacgttactgagatggcacaaggcactgtgggtggtgtgttcatcactacggccggatctacaagcaatggtacatctgaccttacgaacggtgcagacgggatgttagccacctcatctaatggctcccagtatagcgggagcagagttgaaactcctgtcagctatgtcggggaggatgacgaagaggacgatgatttcaacgagaacgacgaggatgactag

SEQ ID NO: 281796 - DNA, 1327 bp, Artificial Sequence
  derived and/or modified sequence
gcgcacgtcacgccggcccgacgctcggccaggaaaaatcatttttcttctctgggaaggtgaacatttgtagcattgatttcccggatctggtaacatggcaaaagatgccggtctaattgaagccaacggagaactcaaggtcttcatagaccagaaccttagtcccgggaaaggcgtggtgtccctcgtggccgttcacccctccaccgtcaacccgctcgggaagcagctcttgccaaaaacctttggacagtccaatgtcaacattgcccagcaagtggaagcgcaacaggaaaggagagaagaatggcaagggcctacggcatttctccatgaaggtctgcgagaaggtgcagaggaaagggaccacttcctacaacgaagtggcagacgagctggttgcggagttcagtgctgccgacaaccacatcttaccaaacgagtcagcttatgaccagaaaaacataagacggcgcgtctacgatgccttaaacgtgctaatggccatgaacatcatctccaaggagaagaaggagatcaagtggattggtctgcccaccaactcggctcaggaatgtcagaacttagaggtggaaagacagaggagacttgaaagaataaaacagaaacagtctcaacttcaagaacttattctacagcaaattgccttcaagaacctggtgcagagaaaccggcatgcggagcagcaggccagccggccaccgccacccaactcagtcatccacctgcccttcatcatcgtcaacaccagcaagaagacggtcatcgactgcagcatctccaatgacaaatttgagtatctgtttaattttgacaacacatttgaaatccacgatgacatagaagtgctgaagcggatgggcatggcttgcgggctggagtcggggagctgctctgccgaagaccttaaaatggccagaagtctggtccccaaggctctggagccatacgtgacagaaatggctcagggaactgttggaggcgtgttcatcacgacggcaggttccacgtctaacggcacaagtgacctgaccaacggtgcagatgggatgctggccacaagctccaatgggtctcagtacagcggctccagggtggagactccggtgtcctacgtcggggaggacgacgaggaggacgatgacttcaacgagaatgacgaggacgactgacgtcctccccacttcagattcggcttcaggaaaacgtttagcgaaaagaaactttttttttaatgtgggttttctgtttccttttggcctactcccaagaagatattggtaagctattgaatttagatatg

SEQ ID NO: 281797 - protein, 231 aa, Artificial Sequence
  derived and/or modified sequence
MLKKKRIKDRTIVKRNRLQDSNQKLIDIAIGEEKCSDNYEAQAEKNQGQSEGNQHQSEGNPDKSEESQGQPEENHHSERSRNHLERSLSQSDRSQGQLKRHHPQYERSHGQYKRSHGQSERSHGHSERSHGHSERSHGHSERSHGHSKRSRSQGDLVDTQSDLIATQRDLIATQKDLIATQRDLIATQRDLIVTQRDLVATERDLINQSGRSHGQSERHQRYSTGKNTITT

SEQ ID NO: 281798 - DNA, 1606 bp, Artificial Sequence
  derived and/or modified sequence
cctcggagtgtgtggcgccatgatgcagggaagatggcttcgtttcggaagctaacgctttctgaaaaagtgccgccaaatcatcccagtcggaaaaaggttaacttcctagatatgtctctagacgacattataatctataaagagttagaagggacaaatgctgaagaagaaaagaataaaagacagaaccatagtaaaaaggaatcgccttcaagacagcaatcaaaagctcatagacatcgccatcggagaggagaagtgcagtgacaattatgaggcccaagcagagaagaatcaaggccagtcagaggggaaccagcatcaatcagaaggaaatccggacaaatcagaagaatcccagggccaaccagaagaaaatcatcattctgagcgatcccgaaaccacttagagagatctctttctcagtcagacagatctcaagggcagctaaagagacatcatccccaatatgagagatctcatggccaatacaagagatctcatggtcaatctgagagatctcatggccactcagagagatctcatggtcactcagagagatctcatggtcactcagagagatctcatggtcactcaaagagatctcgtagccagggagatcttgtggacactcagagtgatctcatagccactcagagagatctcatagccactcagaaagatctcatagccactcagagagatctcatagccactcagagagatctcatagtcactcagagagatctcgtggccactgagagagatctcataaatcagtcagggagatctcatggccaatcagaaagacatcagagatactcaacaggtaaaaatacaataactacttaatcatcagaacaatgtgttgaattctgtggaaatagaaaagcatatatctatattctaatggctaaatatgtatttgttgaaacatgtatattgggacaaagacataaatattagaatggaggtaatacatacatagtatcaatattgtttcaacttgatgtcctctaagctatcatccagttacccaagatgtcccattaagttgttcccggtaggtctgctttccctggaagagccgtatgtactcagcctttcctattgggccttccccacaattagaatattttgacttagtgtcctgtcccccttggacgttccaacttgacttagtgtccagtgccccttggacattccaacctggtaggtaagctaatctaacaactaactgccaaattgataatatataatctatgataatgaatatctcttttgtgtctccttcctaagccatcctcagagagtccttagcagacaaatggtagatgtatctttgggcagctgaacttttctgctttcctcaaatcagaccatatgagaggatatattctatgcatagatgtaatgctaaccttctgaatatattttgaatacatttatatattcactgttgccttataaaactgttagggtaggtctgtctaccctagcaaaagaaacacagaaatttaaatgtactgggagttatgttgttaaaaacacaagatatgttaactgcagtttgtttggttattcaataaaagttttagtttt

SEQ ID NO: 281799 - DNA, 696 bp, Artificial Sequence
  derived and/or modified sequence
atgctcaaaaaaaaaagaatcaaggatcgcactatcgtaaagcgcaacagactccaagacagtaatcagaagcttatcgatatcgccataggtgaagaaaaatgttccgataactacgaggcacaggccgagaaaaatcagggtcagagtgagggaaatcagcaccaatccgaaggtaacccagacaaaagcgaggagtcacaggggcagccagaggaaaatcatcactcagagagaagtaggaaccatctagagcggtccctgtctcagagcgaccggtcccagggccagctgaagcgccatcaccctcagtatgagcggtcgcacggacaatacaagcggagtcacggccagtccgaacgatcccacggacacagtgaaagatcccacgggcattccgaacggtctcacggacactccgaaaggtcccatgggcatagtaagaggtcgcgctcgcagggtgatctcgtggacactcaaagcgatctcatagcaacccagcgggacctgatcgctacgcagaaggatctcattgccactcagagagacttaattgccactcagcgtgacttgattgtgacacaaagggacctggtggcaacagagagagacttaataaatcagtccggtcgtagtcacggacaaagcgaaagacaccagcgctactcaacgggtaagaataccatcacgacctag

SEQ ID NO: 281800 - DNA, 696 bp, Artificial Sequence
  derived and/or modified sequence
atgctgaagaagaagaggatcaaggacaggaccatcgtgaagaggaaccggctgcaggacagcaaccagaagctgattgacatcgccatcggggaggagaagtgcagcgacaactatgaggcccaggccgagaagaaccagggccagagcgagggcaaccagcaccagagcgagggcaacccagacaagtctgaggagagccagggccagcctgaggagaaccaccacagcgagaggagcaggaaccacctggagaggagcctgagccagagcgacaggagccagggccagctgaagaggcaccacccccagtatgaaagaagccacggccagtacaagaggagccacggccagagcgagaggagccacggccacagcgagaggagccacggccacagcgagaggagccacggccacagcgagaggagccacggccacagcaagaggagccgcagccagggcgacctggtggacacccagagcgacctgattgccacccagagggacctgattgccacccagaaggacctgattgccacccagagggacctgattgccacccagagggacctgattgtgacccagagggacctggtggccacagagcgggacctgatcaaccagagcggccgcagccacggccagagcgagcggcaccagcgctacagcacaggcaagaacaccatcaccacctag

SEQ ID NO: 281801 - DNA, 696 bp, Artificial Sequence
  derived and/or modified sequence
atgctgaagaagaagcggatcaaggaccggaccatcgtgaagcggaatcgcctgcaagatagcaaccagaaattaatcgacatcgccataggtgaggagaaatgttctgacaattacgaagctcaggcagaaaagaatcaggggcagagcgaggggaaccagcaccagtcagaggggaacccggataaatccgaggagtcccagggacagcctgaagaaaatcatcatagcgaacgctcacggaaccacctggagcgaagtttgagccagagtgataggagtcagggacagctgaagcgacaccacccacagtacgaaagatcccacggtcagtataagaggtcgcacggacagtcggagcgctcacatggacattccgaaagatcccacggccacagcgagcgatctcacggccatagtgagcggtcccacggacactccaaacggagtcgctcacagggtgacctcgtcgatacccagagtgacctgatagcgacacagcgggatcttatcgcaactcaaaaagatctgatcgccacccagagagacctcatcgcaacccaacgcgatctgatcgtaacccagcgggatttggtcgcgactgaaagagatctgatcaatcagtctggccggtcccacggtcagtcagagcggcatcagaggtacagcacaggcaagaataccatcacaacatag

SEQ ID NO: 281802 - DNA, 696 bp, Artificial Sequence
  derived and/or modified sequence
atgctaaaaaaaaagcgcattaaggatcgtaccatcgtgaagaggaaccggctgcaggatagtaatcaaaaactgatagacatcgccataggcgaagaaaagtgcagtgataattatgaggctcaagctgagaagaatcagggtcagagcgaaggaaatcagcaccagagtgagggcaaccccgacaagagtgaggagtcgcaaggacagccggaggagaaccatcacagtgaacgatcccggaaccatttagagcgatctctgtcacagtcagaccggagccaaggccagctcaagaggcaccacccacagtacgagcgctcccatgggcagtacaaacgctcacatggacagagcgagcggtcacacggccacagcgagagaagccacgggcattccgaacgctctcatgggcattccgaaagatcacacggccactccaaacggagtaggtcacagggagatctggtggatacccaatctgaccttattgctacgcagagagatcttatagctacacagaaagacctgattgctacacagcgggatttaattgctacgcaacgagacctgatagtaacacaacgtgatcttgtggcaaccgaacgagatctcataaaccagagtggtcggtcccacgggcagtccgagcgccaccagcgctattcaactggaaaaaacactatcacaacctag

SEQ ID NO: 281803 - DNA, 696 bp, Artificial Sequence
  derived and/or modified sequence
atgctgaagaagaagagaatcaaggacagaaccatcgtgaagagaaacagactgcaggacagcaaccagaagctgatcgacatcgccatcggcgaggagaagtgcagcgacaactacgaggcccaggccgagaagaaccagggccagagcgagggcaaccagcaccagagcgagggcaaccccgacaagagcgaggagagccagggccagcccgaggagaaccaccacagcgagagaagcagaaaccacctggagagaagcctgagccagagcgacagaagccagggccagctgaagagacaccacccccagtacgagagaagccacggccagtacaagagaagccacggccagagcgagagaagccacggccacagcgagagaagccacggccacagcgagagaagccacggccacagcgagagaagccacggccacagcaagagaagcagaagccagggcgacctggtggacacccagagcgacctgatcgccacccagagagacctgatcgccacccagaaggacctgatcgccacccagagagacctgatcgccacccagagagacctgatcgtgacccagagagacctggtggccaccgagagagacctgatcaaccagagcggcagaagccacggccagagcgagagacaccagagatacagcaccggcaagaacaccatcaccacctag

SEQ ID NO: 281804 - DNA, 2273 bp, Artificial Sequence
  derived and/or modified sequence
cggcgcagtcgctgcagccgccgcgggaggcgtccgtgacaagatgaagctcatcatcctggagcactattctcaggcgagcgagtgggcggctaaatacatcaggaaccgcatcatccagtttaacccagggccagagaagtacttcaccctggggctccccactgggagtaccccacttggctgctacaagaagctgattgaatactataagaatggggacctgtcctttaaatatgtgaagaccttcaacatggatgagtacgtgggccttcctcgagaccacccggagagttaccactccttcatgtggaacaacttcttcaagcacattgacatccacccagaaaacacccacattctggatgggaatgcagtcgacctacaggcagaatgtgatgcctttgaagagaagatcaaggctgcaggtgggatcgagctatttgttggaggcatcggccctgatggacacattgccttcaacgagccaggctccagtctggtgtccaggacccgtgtgaagacgctggccatggataccatcctggccaatgctaggttcttcgatggagaactcaccaaggtgcccaccatggccttgacggtgggggtgggcactgtcatggatgctagagaggtgatgatccttatcacaggtgctcacaaggcatttgctctgtacaaggccatcgaggagggagtgaaccacatgtggaccgtgtctgccttccagcagcatccccgcaccgtgtttgtgtgtgacgaggatgccaccttggagctgaaagtgaagactgtcaagtatttcaaaggtttaatgcttgttcataacaagttggtggaccccttgtacagtatcaaagagaaagaaactgagaaaagccaatcttcgaagaaaccatacagcgattagcctgtgctgggacctagtgtcaagtacccatagggaaaggcaggtctttctggaaattgtctttagaagaaagaattgtatttctttaatctagtatggttactccagataagtgggtgaacttattgttcttggccatgaggctgggagcctagtcacggagtttagctatagggagaatgtttgtaacttaatcagaaaaaaaatatctgcaaaatgtactccatcattttgatgtctgccaaacccaggttgggagttttaaactttttgttctgcttcagccatggttcacacatatgacacactcccgtcaggaatttctctccttacacgcactgattttcaagtgggagggaattaggggcttatgtatattggataccacctctttgaagagtcttgagagtccttcttgcacaggcctgccccttggttgagaaccattgttccaagtgaaggcacaaactctcaatatctaaaataagtgcaaggaagcagtctctttggtcagtaacaagtgcaatggaaagaaaacgatcccttccttcttccactttcacagcttttctctgaactaggagaacctgggggtggatttgggtgggtggggccaaagaggaggcttctattgataaatccagagcctcaaggggcccagccacgtcaaacttctctccctcagggactctccagcaccaaaaggcagaaggtggaagccgtttttcccccagagccctgtgtttttgtgaaagcctcactgtggctcctctgttttacatactcattagtaagtgggaggtccactggggcaacagacactgccacaatttcagtgttgtgttcagccaaggggacggtctgggcaggcagcttaagtgtgagtttagtcacaactcctgagtgtcccgctctcctgcttacctaggaggtgagtgccaggaaaatacaccaaatgcttctagtattgtttccccacttaaaatagtcctgcttaaattcacatggtgtggtctgatgttctgagagcatcaggaaatacaacccttttgcccatttacccttctccccggatcccaaggtggtctgttgctctggcttcctttcattgtcttaggccttcatggagtggatgctgcctcctcctggctgtttttgtgcctgtttgaagctactgctgcctccatttctgggaaagacctttgagagcctagcccaggcctaagggctatgtttggtaccagtgttttgtctttagcttttctatgtgattgtgccgtcattctgttttaagctcatggatcaatggatttgtttacaatgtgatattttctattaaatccagtattttcaaataaca

SEQ ID NO: 281805 - DNA, 2163 bp, Artificial Sequence
  derived and/or modified sequence
gcagtcgctgcagccgccgcgggaggcgtccgtgacaagatgaagctcatcatcctggagcactattctcaggcgagcgagtgggcggctaaatacatcaggaaccgcatcatccagtttaacccagggccagagaagtacttcaccctggggctccccactggccttcctcgagaccacccggagagttaccactccttcatgtggaacaacttcttcaagcacattgacatccacccagaaaacacccacattctggatgggaatgcagtcgacctacaggcagaatgtgatgcctttgaagagaagatcaaggctgcaggtgggatcgagctatttgttggaggcatcggccctgatggacacattgccttcaacgagccaggctccagtctggtgtccaggacccgtgtgaagacgctggccatggataccatcctggccaatgctaggttcttcgatggagaactcaccaaggtgcccaccatggccttgacggtgggggtgggcactgtcatggatgctagagaggtgatgatccttatcacaggtgctcacaaggcatttgctctgtacaaggccatcgaggagggagtgaaccacatgtggaccgtgtctgccttccagcagcatccccgcaccgtgtttgtgtgtgacgaggatgccaccttggagctgaaagtgaagactgtcaagtatttcaaaggtttaatgcttgttcataacaagttggtggaccccttgtacagtatcaaagagaaagaaactgagaaaagccaatcttcgaagaaaccatacagcgattagcctgtgctgggacctagtgtcaagtacccatagggaaaggcaggtctttctggaaattgtctttagaagaaagaattgtatttctttaatctagtatggttactccagataagtgggtgaacttattgttcttggccatgaggctgggagcctagtcacggagtttagctatagggagaatgtttgtaacttaatcagaaaaaaaatatctgcaaaatgtactccatcattttgatgtctgccaaacccaggttgggagttttaaactttttgttctgcttcagccatggttcacacatatgacacactcccgtcaggaatttctctccttacacgcactgattttcaagtgggagggaattaggggcttatgtatattggataccacctctttgaagagtcttgagagtccttcttgcacaggcctgccccttggttgagaaccattgttccaagtgaaggcacaaactctcaatatctaaaataagtgcaaggaagcagtctctttggtcagtaacaagtgcaatggaaagaaaacgatcccttccttcttccactttcacagcttttctctgaactaggagaacctgggggtggatttgggtgggtggggccaaagaggaggcttctattgataaatccagagcctcaaggggcccagccacgtcaaacttctctccctcagggactctccagcaccaaaaggcagaaggtggaagccgtttttcccccagagccctgtgtttttgtgaaagcctcactgtggctcctctgttttacatactcattagtaagtgggaggtccactggggcaacagacactgccacaatttcagtgttgtgttcagccaaggggacggtctgggcaggcagcttaagtgtgagtttagtcacaactcctgagtgtcccgctctcctgcttacctaggaggtgagtgccaggaaaatacaccaaatgcttctagtattgtttccccacttaaaatagtcctgcttaaattcacatggtgtggtctgatgttctgagagcatcaggaaatacaacccttttgcccatttacccttctccccggatcccaaggtggtctgttgctctggcttcctttcattgtcttaggccttcatggagtggatgctgcctcctcctggctgtttttgtgcctgtttgaagctactgctgcctccatttctgggaaagacctttgagagcctagcccaggcctaagggctatgtttggtaccagtgttttgtctttagcttttctatgtgattgtgccgtcattctgttttaagctcatggatcaatggatttgtttacaatgtgatattttctattaaatccagtattttcaaat

SEQ ID NO: 281806 - DNA, 2319 bp, Artificial Sequence
  derived and/or modified sequence
ggcgcagtcgctgcagccgccgcgggaggcgtccgtgaggaaacggctcagagagaacttaggtcctttgaccgaggtcctgcaggtggacaagatgaagctcatcatcctggagcactattctcaggcgagcgagtgggcggctaaatacatcaggaaccgcatcatccagtttaacccagggccagagaagtacttcaccctggggctccccactgggagtaccccacttggctgctacaagaagctgattgaatactataagaatggggacctgtcctttaaatatgtgaagaccttcaacatggatgagtacgtgggccttcctcgagaccacccggagagttaccactccttcatgtggaacaacttcttcaagcacattgacatccacccagaaaacacccacattctggatgggaatgcagtcgacctacaggcagaatgtgatgcctttgaagagaagatcaaggctgcaggtgggatcgagctatttgttggaggcatcggccctgatggacacattgccttcaacgagccaggctccagtctggtgtccaggacccgtgtgaagacgctggccatggataccatcctggccaatgctaggttcttcgatggagaactcaccaaggtgcccaccatggccttgacggtgggggtgggcactgtcatggatgctagagaggtgatgatccttatcacaggtgctcacaaggcatttgctctgtacaaggccatcgaggagggagtgaaccacatgtggaccgtgtctgccttccagcagcatccccgcaccgtgtttgtgtgtgacgaggatgccaccttggagctgaaagtgaagactgtcaagtatttcaaaggtttaatgcttgttcataacaagttggtggaccccttgtacagtatcaaagagaaagaaactgagaaaagccaatcttcgaagaaaccatacagcgattagcctgtgctgggacctagtgtcaagtacccatagggaaaggcaggtctttctggaaattgtctttagaagaaagaattgtatttctttaatctagtatggttactccagataagtgggtgaacttattgttcttggccatgaggctgggagcctagtcacggagtttagctatagggagaatgtttgtaacttaatcagaaaaaaaatatctgcaaaatgtactccatcattttgatgtctgccaaacccaggttgggagttttaaactttttgttctgcttcagccatggttcacacatatgacacactcccgtcaggaatttctctccttacacgcactgattttcaagtgggagggaattaggggcttatgtatattggataccacctctttgaagagtcttgagagtccttcttgcacaggcctgccccttggttgagaaccattgttccaagtgaaggcacaaactctcaatatctaaaataagtgcaaggaagcagtctctttggtcagtaacaagtgcaatggaaagaaaacgatcccttccttcttccactttcacagcttttctctgaactaggagaacctgggggtggatttgggtgggtggggccaaagaggaggcttctattgataaatccagagcctcaaggggcccagccacgtcaaacttctctccctcagggactctccagcaccaaaaggcagaaggtggaagccgtttttcccccagagccctgtgtttttgtgaaagcctcactgtggctcctctgttttacatactcattagtaagtgggaggtccactggggcaacagacactgccacaatttcagtgttgtgttcagccaaggggacggtctgggcaggcagcttaagtgtgagtttagtcacaactcctgagtgtcccgctctcctgcttacctaggaggtgagtgccaggaaaatacaccaaatgcttctagtattgtttccccacttaaaatagtcctgcttaaattcacatggtgtggtctgatgttctgagagcatcaggaaatacaacccttttgcccatttacccttctccccggatcccaaggtggtctgttgctctggcttcctttcattgtcttaggccttcatggagtggatgctgcctcctcctggctgtttttgtgcctgtttgaagctactgctgcctccatttctgggaaagacctttgagagcctagcccaggcctaagggctatgtttggtaccagtgttttgtctttagcttttctatgtgattgtgccgtcattctgttttaagctcatggatcaatggatttgtttacaatgtgatattttctattaaatccagtattttcaaa

SEQ ID NO: 281807 - DNA, 543 bp, Artificial Sequence
  derived and/or modified sequence
gcagtcgctgcagccgccgcgggaggcgtccgttctgtgaagtaggtactattgtcccaatttttacataggaggaaacggctcagagagaacttaggtcctttgaccgaggtcctgcaggtggacaagatgaagctcatcatcctggagcactattctcaggcgagcgagtgggcggctaaatacatcaggaaccgcatcatccagtttaacccagggccagagaagtacttcaccctggggctccccactgggagtaccccacttggctgctacaagaagctgattgaatactataagaatggggacctgtcctttaaatatgtgaagaccttcaacatggatgagtacgtgggccttcctcgagaccacccggagagttaccactccttcatgtggaacaacttcttcaagcacattgacatccacccagaaaacacccacattctggatgggaatgcagtcgacctacaggcagaatgtgatgcctttgaagagaagatcaaggctgcaggtgggatcgagctatttgttggaggcatc

SEQ ID NO: 281808 - DNA, 2622 bp, Artificial Sequence
  derived and/or modified sequence
cggggaccttcctcgcgggccggagcgcggagcgctgccccagccctacggcactcggggtcgggaccccggggagccgccctcacacattttccaggagggatcggaggggcgatggggtggtaatgggggtgggggacacgctgtaccccaccgacgaccgcgcgggccaccttcgcctctttccttcacactcccactaaccgcagtgctgggggaacaaaatgtcctccttctggagcgattaccttttcccttttgtgctttgggggaaactgaagacccagaggggttcgcaaagcaagtctgtgaagtaggtactattgtcccaatttttacataggaggaaacggctcagagagaacttaggtcctttgaccgaggtcctgcaggtggacaagatgaagctcatcatcctggagcactattctcaggcgagcgagtgggcggctaaatacatcaggaaccgcatcatccagtttaacccagggccagagaagtacttcaccctggggctccccactgggagtaccccacttggctgctacaagaagctgattgaatactataagaatggggacctgtcctttaaatatgtgaagaccttcaacatggatgagtacgtgggccttcctcgagaccacccggagagttaccactccttcatgtggaacaacttcttcaagcacattgacatccacccagaaaacacccacattctggatgggaatgcagtcgacctacaggcagaatgtgatgcctttgaagagaagatcaaggctgcaggtgggatcgagctatttgttggaggcatcggccctgatggacacattgccttcaacgagccaggctccagtctggtgtccaggacccgtgtgaagacgctggccatggataccatcctggccaatgctaggttcttcgatggagaactcaccaaggtgcccaccatggccttgacggtgggggtgggcactgtcatggatgctagagaggtgatgatccttatcacaggtgctcacaaggcatttgctctgtacaaggccatcgaggagggagtgaaccacatgtggaccgtgtctgccttccagcagcatccccgcaccgtgtttgtgtgtgacgaggatgccaccttggagctgaaagtgaagactgtcaagtatttcaaaggtttaatgcttgttcataacaagttggtggaccccttgtacagtatcaaagagaaagaaactgagaaaagccaatcttcgaagaaaccatacagcgattagcctgtgctgggacctagtgtcaagtacccatagggaaaggcaggtctttctggaaattgtctttagaagaaagaattgtatttctttaatctagtatggttactccagataagtgggtgaacttattgttcttggccatgaggctgggagcctagtcacggagtttagctatagggagaatgtttgtaacttaatcagaaaaaaaatatctgcaaaatgtactccatcattttgatgtctgccaaacccaggttgggagttttaaactttttgttctgcttcagccatggttcacacatatgacacactcccgtcaggaatttctctccttacacgcactgattttcaagtgggagggaattaggggcttatgtatattggataccacctctttgaagagtcttgagagtccttcttgcacaggcctgccccttggttgagaaccattgttccaagtgaaggcacaaactctcaatatctaaaataagtgcaaggaagcagtctctttggtcagtaacaagtgcaatggaaagaaaacgatcccttccttcttccactttcacagcttttctctgaactaggagaacctgggggtggatttgggtgggtggggccaaagaggaggcttctattgataaatccagagcctcaaggggcccagccacgtcaaacttctctccctcagggactctccagcaccaaaaggcagaaggtggaagccgtttttcccccagagccctgtgtttttgtgaaagcctcactgtggctcctctgttttacatactcattagtaagtgggaggtccactggggcaacagacactgccacaatttcagtgttgtgttcagccaaggggacggtctgggcaggcagcttaagtgtgagtttagtcacaactcctgagtgtcccgctctcctgcttacctaggaggtgagtgccaggaaaatacaccaaatgcttctagtattgtttccccacttaaaatagtcctgcttaaattcacatggtgtggtctgatgttctgagagcatcaggaaatacaacccttttgcccatttacccttctccccggatcccaaggtggtctgttgctctggcttcctttcattgtcttaggccttcatggagtggatgctgcctcctcctggctgtttttgtgcctgtttgaagctactgctgcctccatttctgggaaagacctttgagagcctagcccaggcctaagggctatgtttggtaccagtgttttgtctttagcttttctatgtgattgtgccgtcattctgttttaagctcatggatcaatggatttgtttacaatgtgatattttctattaaatccagtatttt

SEQ ID NO: 281809 - DNA, 473 bp, Artificial Sequence
  derived and/or modified sequence
gtgtaagtgggtagcagggctggcggggaccttcctcgcgggccggagcgcggagcgctgccccagccctacggcactcggggtcgggaccccggggagccgccctcacacattttccaggagggatcggaggggcgatggggtggtaatgggggtgggggacacgctgtaccccaccgacgaccgcgcgggccaccttcgcctctttccttcacactcccactaaccgcagtgctgggggaacaaaatgtcctccttctggagcgattaccttttcccttttgtgctttgggggaaactgaagacccagaggggttcgcaaagcaaggaggaaacggctcagagagaacttaggtcctttgaccgaggtcctgcaggtggacaagatgaagctcatcatcctggagcactattctcaggcgagcgagtgggcggctaaatacatcaggaaccgcatcatccagtttaaccca

SEQ ID NO: 281810 - DNA, 2980 bp, Artificial Sequence
  derived and/or modified sequence
ctctttccttcacactcccactaaccgcagtgctgggggaacaaaatgtcctccttctggagcgattaccttttcccttttgtgctttgggggaaactgaagacccagaggggttcgcaaagcaaggtgggccagtaggaagacccctccgctagtccagagagagcacacagctccccaggcagagctcattgccccacctgctctagtggcccagcatgatcccatgacctctctacttctggaggaagagtcttggggtagacggcggggagggggtagggtatcccgttccggtaggggcagggatgagggaggcggggctgagccgagcatctatctggatggtaacagccaacgtagaaaatactaagttgtttacatgcattctctcatttcatattacccgtcgtgaagtctgtgaagtaggtactattgtcccaatttttacataggaggaaacggctcagagagaacttaggtcctttgaccgaggtcctgcaggtggtaagtgaaggagctgagattagaacccagatctgcccccagtggcgcctcctcgtggtctgtgggtggtggagacgactggcctagcctcttagctcctctgtgaatagaaaggcctttttcctggctcagacagcttgggaaggggattgttgctgggtaagagaagcttctcccaccacctccatctctttctctgccccttaccattgattcctttctgtcatcccctctcccccactgcaggacaagatgaagctcatcatcctggagcactattctcaggcgagcgagtgggcggctaaatacatcaggaaccgcatcatccagtttaacccagggccagagaagtacttcaccctggggctccccactgggagtaccccacttggctgctacaagaagctgattgaatactataagaatggggacctgtcctttaaatatgtgaagaccttcaacatggatgagtacgtgggccttcctcgagaccacccggagagttaccactccttcatgtggaacaacttcttcaagcacattgacatccacccagaaaacacccacattctggatgggaatgcagtcgacctacaggcagaatgtgatgcctttgaagagaagatcaaggctgcaggtgggatcgagctatttgttggaggcatcggccctgatggacacattgccttcaacgagccaggctccagtctggtgtccaggacccgtgtgaagacgctggccatggataccatcctggccaatgctaggttcttcgatggagaactcaccaaggtgcccaccatggccttgacggtgggggtgggcactgtcatggatgctagagaggtgatgatccttatcacaggtgctcacaaggcatttgctctgtacaaggccatcgaggagggagtgaaccacatgtggaccgtgtctgccttccagcagcatccccgcaccgtgtttgtgtgtgacgaggatgccaccttggagctgaaagtgaagactgtcaagtatttcaaaggtttaatgcttgttcataacaagttggtggaccccttgtacagtatcaaagagaaagaaactgagaaaagccaatcttcgaagaaaccatacagcgattagcctgtgctgggacctagtgtcaagtacccatagggaaaggcaggtctttctggaaattgtctttagaagaaagaattgtatttctttaatctagtatggttactccagataagtgggtgaacttattgttcttggccatgaggctgggagcctagtcacggagtttagctatagggagaatgtttgtaacttaatcagaaaaaaaatatctgcaaaatgtactccatcattttgatgtctgccaaacccaggttgggagttttaaactttttgttctgcttcagccatggttcacacatatgacacactcccgtcaggaatttctctccttacacgcactgattttcaagtgggagggaattaggggcttatgtatattggataccacctctttgaagagtcttgagagtccttcttgcacaggcctgccccttggttgagaaccattgttccaagtgaaggcacaaactctcaatatctaaaataagtgcaaggaagcagtctctttggtcagtaacaagtgcaatggaaagaaaacgatcccttccttcttccactttcacagcttttctctgaactaggagaacctgggggtggatttgggtgggtggggccaaagaggaggcttctattgataaatccagagcctcaaggggcccagccacgtcaaacttctctccctcagggactctccagcaccaaaaggcagaaggtggaagccgtttttcccccagagccctgtgtttttgtgaaagcctcactgtggctcctctgttttacatactcattagtaagtgggaggtccactggggcaacagacactgccacaatttcagtgttgtgttcagccaaggggacggtctgggcaggcagcttaagtgtgagtttagtcacaactcctgagtgtcccgctctcctgcttacctaggaggtgagtgccaggaaaatacaccaaatgcttctagtattgtttccccacttaaaatagtcctgcttaaattcacatggtgtggtctgatgttctgagagcatcaggaaatacaacccttttgcccatttacccttctccccggatcccaaggtggtctgttgctctggcttcctttcattgtcttaggccttcatggagtggatgctgcctcctcctggctgtttttgtgcctgtttgaagctactgctgcctccatttctgggaaagacctttgagagcctagcccaggcctaagggctatgtttggtaccagtgttttgtctttagcttttctatgtgattgtgccgtcattctgttttaagctcatggatcaatggatttgtttacaatgtgatattttctattaaatccagtatttt

SEQ ID NO: 281811 - DNA, 570 bp, Artificial Sequence
  derived and/or modified sequence
gtgtaagtgggtagcagggctggcggggaccttcctcgcgggccggagcgcggagcgctgccccagccctacggcactcggggacaagatgaagctcatcatcctggagcactattctcaggcgagcgagtgggcggctaaatacatcaggaaccgcatcatccagtttaacccagggccagagaagtacttcaccctggggctccccactgggagtaccccacttggctgctacaagaagctgattgaatactataagaatggggacctgtcctttaaatatgtgaagaccttcaacatggatgagtacgtgggccttcctcgagaccacccggagagttaccactccttcatgtggaacaacttcttcaagcacattgacatccacccagaaaacacccacattctggatgggaatgcagtcgacctacaggcagaatgtgatgcctttgaagagaagatcaaggctgcaggtgggatcgagctatttgttggaggcatcggccctgatggacacattgccttcaacgagccaggctccagtctggtgtccaggacccgtgtgaagac

SEQ ID NO: 281812 - protein, 154 aa, Artificial Sequence
  derived and/or modified sequence
MAEGEITTFTALTEKFNLPPGNYKKPKLLYCSNGGHFLRILPDGTVDGTRDRSDQHIQLQLSAESVGEVYIKSTETGQYLAMDTDGLLYGSTPNEECLFLERLEENHYNTYISKKHAEKNWFVGLKKNGSCKRGPRTHYGQKAILFLPLPVSSD

SEQ ID NO: 281813 - DNA, 177 bp, Artificial Sequence
  derived and/or modified sequence
atggccgagggcgagatcaccaccttcaccgccctgaccgagaagttcaacctgccccccggcaactacaagaagcccaagctgctgtactgcagcaacggcggccacttcctgagaatcctgcccgacggcaccgtggacggcaccagagacagaagcgaccagcacatccagtag

SEQ ID NO: 281814 - DNA, 177 bp, Artificial Sequence
  derived and/or modified sequence
atggctgagggagagattactactttcactgcactcactgagaaattcaacctacctcccggaaactataagaaaccaaaactgttgtattgttcgaatggaggacattttttgcggatactacccgacgggacggttgacggcactagggacagatctgaccaacatattcaatag

SEQ ID NO: 281815 - DNA, 298 bp, Artificial Sequence
  derived and/or modified sequence
agactcttgggggattccttagtgagtgagttcactgctcaaagaagggctttgccacttctgcagggaagccagccacgggccagcagtcttgaaagcgccacaagcagcagctgctgagccatggctgaaggggaaatcaccaccttcacagccctgaccgagaagtttaatctgcctccagggaattacaagaagcccaaactcctctactgtagcaacgggggccacttcctgaggatccttccggatggcacagtggatgggacaagggacaggagcgaccagcacattcagc

SEQ ID NO: 281816 - DNA, 177 bp, Artificial Sequence
  derived and/or modified sequence
atggccgagggggagatcaccaccttcaccgccctgacagagaagttcaacctgcccccaggcaactacaagaagcccaagctgctgtactgcagcaatggaggccacttcctgcgcatcctgcctgatggcaccgtggatggcacccgggacagaagtgaccagcacatccagtag

SEQ ID NO: 281817 - DNA, 177 bp, Artificial Sequence
  derived and/or modified sequence
atggccgagggcgagatcaccaccttcaccgccctgaccgagaagtttaatttgcctccgggcaactacaagaaacccaaactgctgtactgttctaatggcggacacttcctgagaattctcccagatgggacggtggatggcacccgcgataggtcggaccagcacatccagtag

SEQ ID NO: 281818 - DNA, 177 bp, Artificial Sequence
  derived and/or modified sequence
atggccgagggcgaaatcaccacatttactgctctgacggagaagtttaacctaccccctggaaactacaaaaaacctaagctgctgtactgtagcaatgggggacacttcctcaggatcctccctgacggaacggttgacggtaccagagatcgaagcgatcagcacatccagtag

SEQ ID NO: 281819 - DNA, 4069 bp, Artificial Sequence
  derived and/or modified sequence
acatgagagggggagaaataaatatacagtgcttgtccttagcctttctgtgggcataccagtgtcagctgcacttgtaggggcccaagtgcctcatgacccactcggcagccttcctctccaggatccccaaggctaggaggccaacctactaacaggtgggtgggtatggtgtgtggtttcactcagttcttctcatggggtttctctgagctccattcataccagaaagggagcaggagagagaggacaagtggatccaacagccttcgctccaggggaatcagggcatcgcctccttttctgggaggacactcccttctgatggtgaatgggaactcccttcctcctgcagcagcctgcctgcagctgtcctggtagaacagtgtggacattgcagaagctgtcactgccccagaaagaaagcaccccagagccaaggcaaagagtcttgaaagcgccacaagcagcagctgctgagccatggctgaaggggaaatcaccaccttcacagccctgaccgagaagtttaatctgcctccagggaattacaagaagcccaaactcctctactgtagcaacgggggccacttcctgaggatccttccggatggcacagtggatgggacaagggacaggagcgaccagcacattcagctgcagctcagtgcggaaagcgtgggggaggtgtatataaagagtaccgagactggccagtacttggccatggacaccgacgggcttttatacggctcaacaccaaatgaggaatgtttgttcctggaaaggctggaggagaaccattacaacacctatatatccaagaagcatgcagagaagaattggtttgttggcctcaagaagaatgggagctgcaaacgcggtcctcggactcactatggccagaaagcaatcttgtttctccccctgccagtctcttctgattaaagagatctgttctgggtgttgaccactccagagaagtttcgaggggtcctcacctggttgacccaaaaatgttcccttgaccattggctgcgctaacccccagcccacagagcctgaatttgtaagcaacttgcttctaaatgcccagttcacttctttgcagagccttttacccctgcacagtttagaacagagggaccaaattgcttctaggagtcaactggctggccagtctgggtctgggtttggatctccaattgcctcttgcaggctgagtccctccatgcaaaagtggggctaaatgaagtgtgttaaggggtcggctaagtgggacattagtaactgcacactatttccctctactgagtaaaccctatctgtgattcccccaaacatctggcatggctcccttttgtccttcctgtgccctgcaaatattagcaaagaagcttcatgccaggttaggaaggcagcattccatgaccagaaacagggacaaagaaatccccccttcagaacagaggcatttaaaatggaaaagagagattggattttggtgggtaacttagaaggatggcatctccatgtagaataaatgaagaaagggaggcccagccgcaggaaggcagaataaatccttgggagtcattaccacgccttgaccttcccaaggttactcagcagcagagagccctgggtgacttcaggtggagagcactagaagtggtttcctgataacaagcaaggatatcagagctgggaaattcatgtggatctggggactgagtgtgggagtgcagagaaagaaagggaaactggctgaggggataccataaaaagaggatgatttcagaaggagaaggaaaaagaaagtaatgccacacattgtgcttggcccctggtaagcagaggctttggggtcctagcccagtgcttctccaacactgaagtgcttgcagatcatctggggacctggtttgaatggagattctgattcagtgggttgggggcagagtttctgcagttccatcaggtcccccccaggtgcaggtgctgacaatactgctgccttacccgccatacattaaggagcagggtcctggtcctaaagagttattcaaatgaaggtggttcgacgccccgaacctcacctgacctcaactaacccttaaaaatgcacacctcatgagtctacctgagcattcaggcagcactgacaatagttatgcctgtactaaggagcatgattttaagaggctttggcccaatgcctataaaatgcccatttcgaagatatacaaaaacatacttcaaaaatgttaaacccttaccaacagcttttcccaggagaccatttgtattaccattacttgtataaatacacttcctgcttaaacttgacccaggtggctagcaaattagaaacaccattcatctctaacatatgatactgatgccatgtaaaggcctttaataagtcattgaaatttactgtgagactgtatgttttaattgcatttaaaaatatatagcttgaaagcagttaaactgattagtattcaggcactgagaatgatagtaataggatacaatgtataagctactcacttatctgatacttatttacctataaaatgagatttttgttttccactgtgctattacaaattttcttttgaaagtaggaactcttaagcaatggtaattgtgaataaaaattgatgagagtgttagctcctgtttcatatgaaattgaagtaattgttaactaaaaacaattccttagtaactgaactgtcatatttagaatggaaggaaaatgacagtttgtgaaagttcaaagcaatagtgcaattgaagaattgacctaagtaagctgacattatggttaataatagtattttagatttgtgcagcaaaataatttcataacttttttgtttttgttacttggataagatcaatctgttttattttagtaaatctttgcaggcaagttagagaaaatgcagtgtggcttaacgtctctttagtatgaagatttggccagaaaaagatacccagagaggaaatctaagataattataatggtccatactttttattgtatgaatcaaactcaagcataacattggccaaggaaaattaaataccattgctaacttgtgaaatggaagtctgtgatttcggagatgcaaagcattgtagtaaaaacaccaatgtgacctcgaccatctcagcccagatatcattcatatatctgttcaatgactattaaggtgcctactgtgtgctaggcactgtactggatactggggaccttgtctgtctggtttgctgctgtatcttctcccagggcattatatttatgatgaaagatgctgtggattcaattctttcagtcaagaataaacacagactttgtaggttcctgctgaataaagcaaatcccagaaacccagattttggaagaatcagcaaccccagcataaaataaacccctatcaaaatgtcagaggacatggcaaggtaaacttagcattttcaactttagaaccgggtcagcttcagggggactgctttcaaatcagccaaagagcctgtcagatcttcttagaaggaagaggttggtagttccctgctctgttttgaacatgctctagtttattaacctggggacattcccattgctgtcttaagtaagtctcatagccagctcctgtcacgtgactctcatatggattcattttcgggccagctctgaacaaagcatcatgaacatatgtgcttttggtcgtttgcaatgtgatggtggtggaggtaggtattggtttccttggaaggcatgataagaaagattcacaatggccaacagtgtgtatgaacaaaaaactgattggagcatcagctagtactgaaggtccttgctttgtgtcagaggcaaaggaacccaaggcgccaagtcctcagccttgagtgtactgctgacaactaaactcacaggctgcaaagcagacctctgatgaagatgcctgttatttcacatcactgtctttttgtgtatcatagtctgcaccttacaaatattaataaatgttccaataataggtgaaaaaaaaaa

SEQ ID NO: 281820 - DNA, 3810 bp, Artificial Sequence
  derived and/or modified sequence
agacatgtaaaaatagtacttctagtttagagactgcaaaaatatgaatgcaccatgccgccacattatctccattcctccagtgcccgcctgacactggccctgaatcagggctggagggggcaggcatttctcatttactaaagtgctggatgcagcccttgaggttcggcagaagcagaaagctgcgtcttgaaagcgccacaagcagcagctgctgagccatggctgaaggggaaatcaccaccttcacagccctgaccgagaagtttaatctgcctccagggaattacaagaagcccaaactcctctactgtagcaacgggggccacttcctgaggatccttccggatggcacagtggatgggacaagggacaggagcgaccagcacattcagctgcagctcagtgcggaaagcgtgggggaggtgtatataaagagtaccgagactggccagtacttggccatggacaccgacgggcttttatacggctcaacaccaaatgaggaatgtttgttcctggaaaggctggaggagaaccattacaacacctatatatccaagaagcatgcagagaagaattggtttgttggcctcaagaagaatgggagctgcaaacgcggtcctcggactcactatggccagaaagcaatcttgtttctccccctgccagtctcttctgattaaagagatctgttctgggtgttgaccactccagagaagtttcgaggggtcctcacctggttgacccaaaaatgttcccttgaccattggctgcgctaacccccagcccacagagcctgaatttgtaagcaacttgcttctaaatgcccagttcacttctttgcagagccttttacccctgcacagtttagaacagagggaccaaattgcttctaggagtcaactggctggccagtctgggtctgggtttggatctccaattgcctcttgcaggctgagtccctccatgcaaaagtggggctaaatgaagtgtgttaaggggtcggctaagtgggacattagtaactgcacactatttccctctactgagtaaaccctatctgtgattcccccaaacatctggcatggctcccttttgtccttcctgtgccctgcaaatattagcaaagaagcttcatgccaggttaggaaggcagcattccatgaccagaaacagggacaaagaaatccccccttcagaacagaggcatttaaaatggaaaagagagattggattttggtgggtaacttagaaggatggcatctccatgtagaataaatgaagaaagggaggcccagccgcaggaaggcagaataaatccttgggagtcattaccacgccttgaccttcccaaggttactcagcagcagagagccctgggtgacttcaggtggagagcactagaagtggtttcctgataacaagcaaggatatcagagctgggaaattcatgtggatctggggactgagtgtgggagtgcagagaaagaaagggaaactggctgaggggataccataaaaagaggatgatttcagaaggagaaggaaaaagaaagtaatgccacacattgtgcttggcccctggtaagcagaggctttggggtcctagcccagtgcttctccaacactgaagtgcttgcagatcatctggggacctggtttgaatggagattctgattcagtgggttgggggcagagtttctgcagttccatcaggtcccccccaggtgcaggtgctgacaatactgctgccttacccgccatacattaaggagcagggtcctggtcctaaagagttattcaaatgaaggtggttcgacgccccgaacctcacctgacctcaactaacccttaaaaatgcacacctcatgagtctacctgagcattcaggcagcactgacaatagttatgcctgtactaaggagcatgattttaagaggctttggcccaatgcctataaaatgcccatttcgaagatatacaaaaacatacttcaaaaatgttaaacccttaccaacagcttttcccaggagaccatttgtattaccattacttgtataaatacacttcctgcttaaacttgacccaggtggctagcaaattagaaacaccattcatctctaacatatgatactgatgccatgtaaaggcctttaataagtcattgaaatttactgtgagactgtatgttttaattgcatttaaaaatatatagcttgaaagcagttaaactgattagtattcaggcactgagaatgatagtaataggatacaatgtataagctactcacttatctgatacttatttacctataaaatgagatttttgttttccactgtgctattacaaattttcttttgaaagtaggaactcttaagcaatggtaattgtgaataaaaattgatgagagtgttagctcctgtttcatatgaaattgaagtaattgttaactaaaaacaattccttagtaactgaactgtcatatttagaatggaaggaaaatgacagtttgtgaaagttcaaagcaatagtgcaattgaagaattgacctaagtaagctgacattatggttaataatagtattttagatttgtgcagcaaaataatttcataacttttttgtttttgttacttggataagatcaatctgttttattttagtaaatctttgcaggcaagttagagaaaatgcagtgtggcttaacgtctctttagtatgaagatttggccagaaaaagatacccagagaggaaatctaagataattataatggtccatactttttattgtatgaatcaaactcaagcataacattggccaaggaaaattaaataccattgctaacttgtgaaatggaagtctgtgatttcggagatgcaaagcattgtagtaaaaacaccaatgtgacctcgaccatctcagcccagatatcattcatatatctgttcaatgactattaaggtgcctactgtgtgctaggcactgtactggatactggggaccttgtctgtctggtttgctgctgtatcttctcccagggcattatatttatgatgaaagatgctgtggattcaattctttcagtcaagaataaacacagactttgtaggttcctgctgaataaagcaaatcccagaaacccagattttggaagaatcagcaaccccagcataaaataaacccctatcaaaatgtcagaggacatggcaaggtaaacttagcattttcaactttagaaccgggtcagcttcagggggactgctttcaaatcagccaaagagcctgtcagatcttcttagaaggaagaggttggtagttccctgctctgttttgaacatgctctagtttattaacctggggacattcccattgctgtcttaagtaagtctcatagccagctcctgtcacgtgactctcatatggattcattttcgggccagctctgaacaaagcatcatgaacatatgtgcttttggtcgtttgcaatgtgatggtggtggaggtaggtattggtttccttggaaggcatgataagaaagattcacaatggccaacagtgtgtatgaacaaaaaactgattggagcatcagctagtactgaaggtccttgctttgtgtcagaggcaaaggaacccaaggcgccaagtcctcagccttgagtgtactgctgacaactaaactcacaggctgcaaagcagacctctgatgaagatgcctgttatttcacatcactgtctttttgtgtatcatagtctgcaccttacaaatattaataaatgttccaataataggtgaaaaaaaaaa

SEQ ID NO: 281821 - DNA, 3679 bp, Artificial Sequence
  derived and/or modified sequence
aaaaagagagagagaaaaaatactgttggcagcagcacaatgtttgggctaagacctggtcttgaaagcgccacaagcagcagctgctgagccatggctgaaggggaaatcaccaccttcacagccctgaccgagaagtttaatctgcctccagggaattacaagaagcccaaactcctctactgtagcaacgggggccacttcctgaggatccttccggatggcacagtggatgggacaagggacaggagcgaccagcacattcagctgcagctcagtgcggaaagcgtgggggaggtgtatataaagagtaccgagactggccagtacttggccatggacaccgacgggcttttatacggctcaacaccaaatgaggaatgtttgttcctggaaaggctggaggagaaccattacaacacctatatatccaagaagcatgcagagaagaattggtttgttggcctcaagaagaatgggagctgcaaacgcggtcctcggactcactatggccagaaagcaatcttgtttctccccctgccagtctcttctgattaaagagatctgttctgggtgttgaccactccagagaagtttcgaggggtcctcacctggttgacccaaaaatgttcccttgaccattggctgcgctaacccccagcccacagagcctgaatttgtaagcaacttgcttctaaatgcccagttcacttctttgcagagccttttacccctgcacagtttagaacagagggaccaaattgcttctaggagtcaactggctggccagtctgggtctgggtttggatctccaattgcctcttgcaggctgagtccctccatgcaaaagtggggctaaatgaagtgtgttaaggggtcggctaagtgggacattagtaactgcacactatttccctctactgagtaaaccctatctgtgattcccccaaacatctggcatggctcccttttgtccttcctgtgccctgcaaatattagcaaagaagcttcatgccaggttaggaaggcagcattccatgaccagaaacagggacaaagaaatccccccttcagaacagaggcatttaaaatggaaaagagagattggattttggtgggtaacttagaaggatggcatctccatgtagaataaatgaagaaagggaggcccagccgcaggaaggcagaataaatccttgggagtcattaccacgccttgaccttcccaaggttactcagcagcagagagccctgggtgacttcaggtggagagcactagaagtggtttcctgataacaagcaaggatatcagagctgggaaattcatgtggatctggggactgagtgtgggagtgcagagaaagaaagggaaactggctgaggggataccataaaaagaggatgatttcagaaggagaaggaaaaagaaagtaatgccacacattgtgcttggcccctggtaagcagaggctttggggtcctagcccagtgcttctccaacactgaagtgcttgcagatcatctggggacctggtttgaatggagattctgattcagtgggttgggggcagagtttctgcagttccatcaggtcccccccaggtgcaggtgctgacaatactgctgccttacccgccatacattaaggagcagggtcctggtcctaaagagttattcaaatgaaggtggttcgacgccccgaacctcacctgacctcaactaacccttaaaaatgcacacctcatgagtctacctgagcattcaggcagcactgacaatagttatgcctgtactaaggagcatgattttaagaggctttggcccaatgcctataaaatgcccatttcgaagatatacaaaaacatacttcaaaaatgttaaacccttaccaacagcttttcccaggagaccatttgtattaccattacttgtataaatacacttcctgcttaaacttgacccaggtggctagcaaattagaaacaccattcatctctaacatatgatactgatgccatgtaaaggcctttaataagtcattgaaatttactgtgagactgtatgttttaattgcatttaaaaatatatagcttgaaagcagttaaactgattagtattcaggcactgagaatgatagtaataggatacaatgtataagctactcacttatctgatacttatttacctataaaatgagatttttgttttccactgtgctattacaaattttcttttgaaagtaggaactcttaagcaatggtaattgtgaataaaaattgatgagagtgttagctcctgtttcatatgaaattgaagtaattgttaactaaaaacaattccttagtaactgaactgtcatatttagaatggaaggaaaatgacagtttgtgaaagttcaaagcaatagtgcaattgaagaattgacctaagtaagctgacattatggttaataatagtattttagatttgtgcagcaaaataatttcataacttttttgtttttgttacttggataagatcaatctgttttattttagtaaatctttgcaggcaagttagagaaaatgcagtgtggcttaacgtctctttagtatgaagatttggccagaaaaagatacccagagaggaaatctaagataattataatggtccatactttttattgtatgaatcaaactcaagcataacattggccaaggaaaattaaataccattgctaacttgtgaaatggaagtctgtgatttcggagatgcaaagcattgtagtaaaaacaccaatgtgacctcgaccatctcagcccagatatcattcatatatctgttcaatgactattaaggtgcctactgtgtgctaggcactgtactggatactggggaccttgtctgtctggtttgctgctgtatcttctcccagggcattatatttatgatgaaagatgctgtggattcaattctttcagtcaagaataaacacagactttgtaggttcctgctgaataaagcaaatcccagaaacccagattttggaagaatcagcaaccccagcataaaataaacccctatcaaaatgtcagaggacatggcaaggtaaacttagcattttcaactttagaaccgggtcagcttcagggggactgctttcaaatcagccaaagagcctgtcagatcttcttagaaggaagaggttggtagttccctgctctgttttgaacatgctctagtttattaacctggggacattcccattgctgtcttaagtaagtctcatagccagctcctgtcacgtgactctcatatggattcattttcgggccagctctgaacaaagcatcatgaacatatgtgcttttggtcgtttgcaatgtgatggtggtggaggtaggtattggtttccttggaaggcatgataagaaagattcacaatggccaacagtgtgtatgaacaaaaaactgattggagcatcagctagtactgaaggtccttgctttgtgtcagaggcaaaggaacccaaggcgccaagtcctcagccttgagtgtactgctgacaactaaactcacaggctgcaaagcagacctctgatgaagatgcctgttatttcacatcactgtctttttgtgtatcatagtctgcaccttacaaatattaataaatgttccaataataggtgaaaaaaaaaa

SEQ ID NO: 281822 - protein, 294 aa, Artificial Sequence
  derived and/or modified sequence
  misc_feature (1)..(1): Xaa can be any naturally occurring amino acid
XPKTASETETDICAEWEIKTITSALKTYLRMLPGPLMMYQFQRSFIKAAKLENQESRVSEIHSLVHRLPEKNRQMLQLLMNHLANVANNHKQNLMTVANLGVVFGPTLLRPQEETVAAIMDIKFQNIVIEILIENHEKIFNTVPDMPLTNAQLHLSRKKSSDSKPPSCSERPLTLFHTVQSTEKQEQRNSIINSSLESVSSNPNSILNSSSSLQPNMNSSDPDLAVVKPTRPNSLTPFRKAKALYACKAEHDSELSFTAGTVFDNVHPSQEPGWLEGTLNGKTGLIPENYVEFL

SEQ ID NO: 281823 - DNA, 885 bp, Artificial Sequence
  derived and/or modified sequence
tgaccgaagacagcatctgagacagagaccgacatctgcgctgaatgggaaatcaagactatcacaagcgctctcaagacctatctgcgcatgctgcctggacccttgatgatgtatcaatttcaaaggtctttcatcaaagcggctaagttggagaatcaagagtcaagagtcagtgagatccattctctggttcaccgcttgccagagaagaatcggcagatgttacaactgttgatgaatcacctggccaacgttgccaacaatcacaagcagaacctgatgacagtagccaacttgggagtcgtgttcgggccaactctgcttcggccgcaggaggaaacggtggccgctatcatggacatcaaatttcaaaatatcgtcatcgaaatcctgattgagaatcacgagaagatcttcaatacggtgcctgacatgcccctgaccaatgcgcaactacatctgtctcgcaaaaagtcgagcgatagcaagcctccttcctgctcagagcggccattgactctttttcacaccgtccagagcactgagaagcaggaacagcggaacagcataataaatagctcccttgaatccgtgagctcaaacccgaatagtattctgaatagctcttcttctttacagccaaacatgaactcatctgatcccgatctcgccgtggtgaagccaactagaccaaactccctgaccccttttcggaaagccaaggctctctatgcctgtaaggcagaacacgattccgaactgtcatttacggcaggcaccgtgttcgacaacgtgcacccctctcaggagccagggtggctggagggaacactgaacggaaagactgggttgatccccgagaattacgttgaatttctatag

SEQ ID NO: 281824 - DNA, 861 bp, Artificial Sequence
  derived and/or modified sequence
atggatccgaaaacagccagtgaaacagagactgacatttgcgctgagtgggaaatcaaaaccattacatccgcactgaaaacttatcttcggatgctgcccggtcccttgatgatgtatcagtttcagcgatctttcatcaaggccgcgaaactggagaatcaagagtccagggtgagcgaaatccactcacttgtccatcggctgcccgaaaaaaacagacagatgctgcagctgctgatgaaccacctggctaatgtggcaaacaaccacaagcaaaacttgatgacagtggctaatcttggagtggtgttcggccccactttgctccgaccacaggaggagaccgtcgctgctattatggatattaaatttcaaaatattgtaatcgaaatactgatcgagaatcacgaaaaaattttcaatactgtcccagacatgccacttacgaatgcccagctccatcttagtcgcaagaagtctagcgattctaagcccccatcctgctccgagcgaccactcacactattccataccgttcagtccacagaaaagcaggagcagcgcaatagcatcatcaatagcagcttagaaagtgtgagttctaacccgaattctatcctcaattctagctccagtctgcagccaaatatgaattcttctgatcccgatctggcagtcgtcaagcctacccgtcccaatagcttaccgcctaaccccagtcccacctcgcccctctcacctagctggcctatgtttagtgccccgtctagcccaatgcccacatcctccacttcctccgattcaagcccacgcatcacatggtcaagttccaacagaggccctcagcagaactgctag

SEQ ID NO: 281825 - DNA, 885 bp, Artificial Sequence
  derived and/or modified sequence
tgacccaagacagccagcgagacagaaacagacatctgtgccgagtgggagatcaagaccatcaccagcgccctgaagacctacctgaggatgctgcccggccccctgatgatgtaccagttccagaggagcttcatcaaggccgccaagctggagaaccaggagagccgggtgtctgagatccacagcctggtgcaccggctgcctgagaagaaccggcagatgctgcagctgctgatgaaccacctggccaacgtggccaacaaccacaagcagaacctgatgacagtggccaacctgggcgtggtgtttggccccaccctgctgcggccccaggaggagaccgtggccgccatcatggacatcaagttccagaacatcgtgattgagatcctgattgagaaccacgagaagatcttcaacacagtgcctgacatgcccctgaccaatgcccagctgcacctgagcaggaagaagagcagtgacagcaagccacccagctgcagcgagcggcccctgaccctcttccacacagtgcagagcacagagaagcaggagcagaggaacagcatcatcaacagcagcctggagagcgtgagcagcaaccccaacagcatcctgaacagcagcagcagcctgcagcccaacatgaacagcagtgaccctgacctggccgtggtgaagcccacccggcccaacagcctgacccccttcaggaaggccaaggccctgtatgcctgcaaggccgagcatgattctgagctgtccttcaccgctggcaccgtgtttgacaacgtgcaccccagccaggagcccggctggctggagggcaccctgaatggcaagacaggcctcatccctgagaactacgtggagttcctgtag

SEQ ID NO: 281826 - DNA, 861 bp, Artificial Sequence
  derived and/or modified sequence
atggaccccaagacagccagcgagacagaaacagacatctgtgccgagtgggagatcaagaccatcaccagcgccctgaagacctacctgaggatgctgcccggccccctgatgatgtaccagttccagaggagcttcatcaaggccgccaagctggagaaccaggagagccgggtgtctgagatccacagcctggtgcaccggctgcctgagaagaaccggcagatgctgcagctgctgatgaaccacctggccaacgtggccaacaaccacaagcagaacctgatgacagtggccaacctgggcgtggtgtttggccccaccctgctgcggccccaggaggagaccgtggccgccatcatggacatcaagttccagaacatcgtcatcgagatcctgattgaaaatcatgagaagatcttcaacacagtgcctgacatgcccctgaccaatgcccagctgcacctgagcaggaagaagagcagtgacagcaagccacccagctgcagcgagcggcccctgaccctcttccacacagtgcagagcacagagaagcaggagcagagaaattccatcatcaacagcagcctggagagcgtgagcagcaaccccaacagcatcctgaacagcagcagcagcctgcagcccaacatgaacagcagtgaccctgacctggccgtggtgaagcccacccggcccaacagcctgccccccaaccccagccccaccagccccctgagccccagctggcccatgttcagcgcccccagcagccccatgcccaccagcagcaccagcagtgacagcagcccccgcatcacctggagcagcagcaacagaggcccccagcagaactgctag

SEQ ID NO: 281827 - DNA, 885 bp, Artificial Sequence
  derived and/or modified sequence
tgacccaagaccgccagcgagaccgagaccgacatctgcgccgagtgggagataaagacaataactagcgcattaaaaacctatctacggatgctacccgggcctctgatgatgtaccagtttcagcggtcttttatcaaggccgcaaagttagagaatcaagagagcagggtgagcgagatccattccctagtacaccgccttcctgagaagaacagacaaatgctgcaattactcatgaaccacctggctaatgtagcaaacaatcacaaacagaatctcatgactgtggccaatctgggagtggtattcggacctactttgctgaggccccaggaggagacggtggctgctatcatggacattaaatttcagaacattgtgatcgaaattctgatcgagaaccatgagaagattttcaacacagtgcccgacatgcctcttactaatgctcagctccacctgtctagaaagaaatccagtgacagcaagccaccatcctgttctgaaaggccactcacactgttccataccgtacaatctacagagaaacaggaacaacgtaattcgatcatcaactccagcctggaatccgtcagttctaatcctaactctatcctcaacagtagcagtagcctccagcctaatatgaactctagcgaccccgatcttgccgtggtcaagccgactcggccaaactctctgacgcctttccggaaggctaaagcactgtatgcgtgcaaggcggagcacgattctgaactctcgttcacggctggtacggtatttgataatgtgcatccctctcaggaaccagggtggctggaaggaacacttaatggaaaaacgggcttgattccggagaactatgtagaatttttgtag

SEQ ID NO: 281828 - DNA, 861 bp, Artificial Sequence
  derived and/or modified sequence
atggaccccaagaccgccagcgagaccgagaccgacatctgcgccgaatgggagatcaagacaatcacttctgccctgaagacttatctgcgtatgctccctggacctttaatgatgtatcagtttcaacggtcttttatcaaagccgccaaactggaaaaccaggagagtagagtgagcgaaatccattcactggttcatagactgcctgagaagaatcggcaaatgcttcagcttcttatgaaccacctggccaatgtagcaaataaccacaaacaaaatttaatgactgtggctaacctcggggtggtctttggcccaaccctgctgcgaccgcaagaggagactgtggccgctattatggatattaaatttcagaatattgttatcgagattctcattgaaaatcatgagaagatcttcaacacggtgccagacatgccgctcacaaatgcccaactgcacctctctcgtaagaagagctctgactctaagcccccctcctgtagcgagagacccctgactttgttccacaccgtgcaatcgaccgagaagcaggaacaaaggaattccattattaacagttctctggagagcgtgagttcgaatcccaattccattctgaacagcagtagctctctccagcccaacatgaacagcagcgatcctgatctcgcagtagtcaagcccaccaggcctaactccctaccacccaatccttcacccacatctcctttgtcaccatcctggcctatgttttctgctccgagctcccctatgcccacctcctctacgtcttctgacagctcacccagaatcacctggtcgtctagcaacaggggtccccagcagaattgctag

SEQ ID NO: 281829 - DNA, 885 bp, Artificial Sequence
  derived and/or modified sequence
tagcccaagaccgctagcgagactgaaacggacatttgcgcagagtgggaaataaaaacaattacttcagccctcaaaacataccttaggatgttacccggacccctcatgatgtaccagttccagagatcgtttattaaggctgcgaagctcgaaaaccaggagtctagggtgtccgagattcacagcctagtccaccgccttccagaaaagaatagacaaatgctccagttgctcatgaaccacctggccaatgtcgcaaataatcataagcagaaccttatgactgtcgctaatctgggggtggttttcggcccaacactgctgcggcctcaggaggaaaccgttgcagcgatcatggatattaagttccagaatatcgtgattgagatcctcattgaaaatcacgagaagatcttcaacaccgtgccggacatgccactgactaatgcacagttgcatctttctcgtaaaaagtctagtgacagtaagcccccatcgtgctctgaaaggcctttgactctgttccatacagtccaatcgaccgagaagcaggagcagaggaacagcatcatcaacagttcccttgaaagcgtgagctcaaacccgaatagtatcctcaactcctcgtcaagcctccagcccaatatgaacagcagcgaccccgacctcgccgtggtaaaaccaacccgccctaattcccttacgccattcaggaaagccaaagcgctctatgcatgtaaggccgagcacgatagcgagctatcctttacggccggaaccgtattcgataacgtgcaccccagtcaagagcccggatggctcgagggcaccctaaatgggaaaaccggtctgattccagaaaattatgttgagtttctgtag

SEQ ID NO: 281830 - DNA, 861 bp, Artificial Sequence
  derived and/or modified sequence
atggaccctaaaactgcaagcgaaactgaaacggacatttgcgccgagtgggaaatcaaaactatcacatcggcccttaagacctatctgagaatgctacccggacctctgatgatgtatcagtttcagcgatccttcataaaggctgctaagttggagaaccaagaaagtcgcgtctctgagatacactcattggtgcatcggctccctgaaaagaatcggcagatgctccaactgttgatgaaccacctggccaatgtagccaacaatcacaaacagaatctgatgacagtagcaaacctcggtgtggtttttggcccaacactgttgcgtccgcaggaagagactgtggctgcaataatggacataaaatttcagaacattgttatagaaattttaatcgagaaccatgagaaaattttcaataccgttccagacatgccactaacaaacgctcaacttcatctgagccgaaaaaagagtagtgatagcaagccaccctcttgctctgagcggcctttaactttgttccataccgtgcagtccacagaaaaacaggaacagaggaattcgattataaatagctccctagaatcagtgtcctctaacccaaacagtattttaaattcaagcagttcactccagcctaacatgaactccagcgatcctgatctggccgtcgtaaaacctacccgccctaacagtcttcccccaaatcctagtccgacaagtcctctttcacctagttggccgatgttttctgccccttcgagccctatgcctaccagcagtactagttctgacagctccccaagaatcacctggtcgtcctcaaatagggggcctcagcagaactgctag

SEQ ID NO: 281831 - DNA, 1632 bp, Artificial Sequence
  derived and/or modified sequence
accccaagactgcttctgagacagaaacagatatctgtgctgaatgggagataaagaccatcactagtgctctgaagacctacctaagaatgcttccaggaccactcatgatgtaccagtttcaaagaagtttcatcaaagcagcaaaactggagaaccaggagtctcgggtctctgaaatccacagccttgttcatcggctcccagagaaaaatcggcagatgttacagctgctcatgaaccacttggcaaatgttgctaacaaccacaagcagaatttgatgacggtggcaaaccttggtgtggtgtttggacccactctgctgaggcctcaggaagaaacagtagcagccatcatggacatcaaatttcagaacattgtcattgagatcctaatagaaaaccacgaaaagatatttaacaccgtgcccgatatgcctctcaccaatgcccagctgcacctgtctcggaagaagagcagtgactccaagcccccgtcctgcagcgagaggcccctgacgctcttccacaccgttcagtcaacagagaaacaggaacaaaggaacagcatcatcaactccagtttggaatctgtctcatcaaatccaaacagcatccttaattccagcagcagcttacagcccaacatgaactccagtgacccagacctggctgtggtcaaacccacccggcccaactcactcacaccgttccggaaggcaaaagccttgtatgcctgcaaagctgaacatgactcagaactttcgttcacagcaggcacggtcttcgataacgttcacccatctcaggagcctggctggttggaggggactctgaacggaaagactggcctcatccctgagaattacgtggagttcctctaaccgtgggccccagcagaactgctgagctttacatggtatccatgacaactgctgattccagtgtcgaggccatttctctttgccactgagaaatgcagcgtgactgactctgttgctacctgtcaacatgaatgtttctgtgagctctggtgtcactcatctccatgatcatctcagccaacatgcatcagtactgcaagaaaagaagtcaatcagcagaggagagcatttgataactaagaggaagacttgcaaagccgttttctcatgagtaccctgaatagggggcactcattttgtttcaacggtccaaacgcccaaccttcagaaagaggaagtcagatagaaatagtccctgagagcacactgtgtagctaagcctgctggggctgggtgaagaaattggcgctgagatccaggctggatccattgcttttgtttacaataggcactctctctaccccacctctcagtacttgagacttaaagtgctacaggcagctggatctgtttgcatgcaggatgaagagggttaaaacactgtttatataagatccaatctctcaccatctctaaagcagccgttggcctgtcatcagtgagatacaatccagtcttctcatgcacgggaacacacacaccctgcgtttctccctcccaggctaggaacctctctgccaccaagggctgccatccatcgcctagtaaccacggcaacccaacctactctaaaaccaaaccaaaaaaa

SEQ ID NO: 281832 - DNA, 2976 bp, Artificial Sequence
  derived and/or modified sequence
attttgtgatgagacctttatagtttggcaggctcttggcaggatgaagatgaagctgttttctctccatctggccaggtctacaactcgaacaaagacagccagagtgaagggagtaagtacgatgcttgggtaaccttctacagccagggttgggagtaggctttgagaagttgctactccaggtgtgaaccaccaggcggtgctgtgggcgtgttgggttggctccagttcccgagtgcagtgggacatgcctccaccccaactttccgccagtgactccagagggacgctgcgcagttggacagcattggcttcagcataatcaggaaatgcatccatgctgtggaaaccagagggatcaacgagcaagggctgtatcgaattgtgggtgtcaactccagagtgcagaagttgctgagtgtcctgatggaccccaagactgcttctgagacagaaacagatatctgtgctgaatgggagataaagaccatcactagtgctctgaagacctacctaagaatgcttccaggaccactcatgatgtaccagtttcaaagaagtttcatcaaagcagcaaaactggagaaccaggagtctcgggtctctgaaatccacagccttgttcatcggctcccagagaaaaatcggcagatgttacagctgctcatgaaccacttggcaaatgttgctaacaaccacaagcagaatttgatgacggtggcaaaccttggtgtggtgtttggacccactctgctgaggcctcaggaagaaacagtagcagccatcatggacatcaaatttcagaacattgtcattgagatcctaatagaaaaccacgaaaagatatttaacaccgtgcccgatatgcctctcaccaatgcccagctgcacctgtctcggaagaagagcagtgactccaagcccccgtcctgcagcgagaggcccctgacgctcttccacaccgttcagtcaacagagaaacaggaacaaaggaacagcatcatcaactccagtttggaatctgtctcatcaaatccaaacagcatccttaattccagcagcagcttacagcccaacatgaactccagtgacccagacctggctgtggtcaaacccacccggcccaactcactccccccgaatccaagcccaacttcacccctctcgccatcttggcccatgttctcggcgccatccagccctatgcccacctcatccacgtccagcgactcatcccccagaattacgtggagttcctctaaccgtgggccccagcagaactgctgagctttacatggtatccatgacaactgctgattccagtgtcgaggccatttctctttgccactgagaaatgcagcgtgactgactctgttgctacctgtcaacatgaatgtttctgtgagctctggtgtcactcatctccatgatcatctcagccaacatgcatcagtactgcaagaaaagaagtcaatcagcagaggagagcatttgataactaagaggaagacttgcaaagccgttttctcatgagtaccctgaatagggggcactcattttgtttcaacggtccaaacgcccaaccttcagaaagaggaagtcagatagaaatagtccctgagagcacactgtgtagctaagcctgctggggctgggtgaagaaattggcgctgagatccaggctggatccattgcttttgtttacaataggcactctctctaccccacctctcagtacttgagacttaaagtgctacaggcagctggatctgtttgcatgcaggatgaagagggttaaaacactgtttatataagatccaatctctcaccatctctaaagcagccgttggcctgtcatcagtgagatacaatccagtcttctcatgcacgggaacacacacaccctgcgtttctccctcccaggctaggaacctctctgccaccaagggctgccatccatcgcctagtaaccacggcaacccaacctactctaaaaccaaaccaaaaaaataaaataacacatcctctttgcatgacacattttttttctcccctttttggtacactttttttgaatggttttctaacaacttgaagcacaggatcaaggaattagggtggtctacttgaggcagatgggatagtagctgggaactgttccctttctgattaatttcagcagcatcggaatatatttggagcacaccctagtaacctcttgagattaaattacatagtcttaatatttctgttcctccatgcaactgatgtttgttttttaaagggtaagatgctgcctcccaatgggtgatgccatctgactggtttccccatgtcctcccattcacccatctctgctcccacccttgcctgcctctaacccaccactggccagcccccttgccctactctgggctgctgaacactggtgctgtggtggttttcaaggttaattcctaggctaaccgtatggcctatagtttaaaagcacatctatgttcactgccactctgaaaaagggaattatttctcagtctttcaaggcttgagactaatataggccattgtgattcaggaagaaacccaaggttggagggtgggatgagtaccctctgaaaaagggaatttgctggtgaaaagaggctggatcttgtggaagactgtcttggatggggaagtactacctggagatttcaaattcacttggcctgcaaacaacagagttatccgtatcttccacatgtgaatgtcattgcaagggtgactctagacaaactacaaaccgatggaccgtcaagctccccaggagccccttggatggcagcgttgcttcagagtgtttcctgtttctggaattccttgttagggaactttaaagaagaaaagaaaaacttgaattgtgttgaattactgtatcttttacttttttttttttgaaaagataaacttgtaaatagagtgatttgaaatact

SEQ ID NO: 281833 - DNA, 885 bp, Artificial Sequence
  derived and/or modified sequence
tgacccaagaccgccagcgagaccgagaccgacatctgcgccgagtgggagatcaagaccatcaccagcgccctgaagacctacctgagaatgctgcccggccccctgatgatgtaccagttccagagaagcttcatcaaggccgccaagctggagaaccaggagagcagagtgagcgagatccacagcctggtgcacagactgcccgagaagaacagacagatgctgcagctgctgatgaaccacctggccaacgtggccaacaaccacaagcagaacctgatgaccgtggccaacctgggcgtggtgttcggccccaccctgctgagaccccaggaggagaccgtggccgccatcatggacatcaagttccagaacatcgtgatcgagatcctgatcgagaaccacgagaagatcttcaacaccgtgcccgacatgcccctgaccaacgcccagctgcacctgagcagaaagaagagcagcgacagcaagccccccagctgcagcgagagacccctgaccctgttccacaccgtgcagagcaccgagaagcaggagcagagaaacagcatcatcaacagcagcctggagagcgtgagcagcaaccccaacagcatcctgaacagcagcagcagcctgcagcccaacatgaacagcagcgaccccgacctggccgtggtgaagcccaccagacccaacagcctgacccccttcagaaaggccaaggccctgtacgcctgcaaggccgagcacgacagcgagctgagcttcaccgccggcaccgtgttcgacaacgtgcaccccagccaggagcccggctggctggagggcaccctgaacggcaagaccggcctgatccccgagaactacgtggagttcctgtag

SEQ ID NO: 281834 - DNA, 861 bp, Artificial Sequence
  derived and/or modified sequence
atggaccccaagaccgccagcgagaccgagaccgacatctgcgccgagtgggagatcaagaccatcaccagcgccctgaagacctacctgagaatgctgcccggccccctgatgatgtaccagttccagagaagcttcatcaaggccgccaagctggagaaccaggagagcagagtgagcgagatccacagcctggtgcacagactgcccgagaagaacagacagatgctgcagctgctgatgaaccacctggccaacgtggccaacaaccacaagcagaacctgatgaccgtggccaacctgggcgtggtgttcggccccaccctgctgagaccccaggaggagaccgtggccgccatcatggacatcaagttccagaacatcgtgatcgagatcctgatcgagaaccacgagaagatcttcaacaccgtgcccgacatgcccctgaccaacgcccagctgcacctgagcagaaagaagagcagcgacagcaagccccccagctgcagcgagagacccctgaccctgttccacaccgtgcagagcaccgagaagcaggagcagagaaacagcatcatcaacagcagcctggagagcgtgagcagcaaccccaacagcatcctgaacagcagcagcagcctgcagcccaacatgaacagcagcgaccccgacctggccgtggtgaagcccaccagacccaacagcctgccccccaaccccagccccaccagccccctgagccccagctggcccatgttcagcgcccccagcagccccatgcccaccagcagcaccagcagcgacagcagccccagaatcacctggagcagcagcaacagaggcccccagcagaactgctag

SEQ ID NO: 281835 - protein, 816 aa, Artificial Sequence
  derived and/or modified sequence
MATQVEPLLPGGATLLQAEEHGGLVRKKPPPAPEGKGEPGPNDVRGGEPDGSARRPRPPCAKPHKEGTGQQERESPRPLQLPGAEGPAISDGEEGGGEPGAGGGAAGAAGAGRRDFVEAPPPKVNPWTKNALPPVLTTVNGQSPPEHSAPAKVVRAAVPKQRKGSKVGDFGDAINWPTPGEIAHKSVQPQSHKPQPTRKLPPKKDMKEQEKGEGSDSKESPKTKSDESGEEKNGDEDCQRGGQKKKGNKHKWVPLQIDMKPEVPREKLASRPTRPPEPRHIPANRGEIKGSESATYVPVAPPTPAWQPEIKPEPAWHDQDETSSVKSDGAGGARASFRGRGRGRGRGRGRGRGGTRTHFDYQFGYRKFDGVEGPRTPKYMNNITYYFDNVSSTELYSVDQELLKDYIKRQIEYYFSVDNLERDFFLRRKMDADGFLPITLIASFHRVQALTTDISLIFAALKDSKVVEIVDEKVRRREEPEKWPLPPIVDYSQTDFSQLLNCPEFVPRQHYQKETESAPGSPRAVTPVPTKTEEVSNLKTLPKGLSASLPDLDSENWIEVKKRPRPSPARPKKSEESRFSHLTSLPQQLPSQQLMSKDQDEQEELDFLFDEEMEQMDGRKNTFTAWSDEESDYEIDDRDVNKILIVTQTPHYMRRHPGGDRTGNHTSRAKMSAELAKVINDGLFYYEQDLWAEKFEPEYSQIKQEVENFKKVNMISREQFDTLTPEPPVDPNQEVPPGPPRFQQVPTDALANKLFGAPEPSTIARSLPTTVPESPNYRNTRTPRTPRTPQLKDSSQTSRFYPVVKEGRTLDAKMPR

SEQ ID NO: 281836 - DNA, 2451 bp, Artificial Sequence
  derived and/or modified sequence
atggctacccaggtagaacccctcctccccggcggcgcaacactactccaggccgaggaacacggagggctggttcgaaagaaacccccgccagcccctgaggggaaaggagagcccgggccaaatgatgtgagagggggagagccggatggaagcgcgaggaggccgcgccctccctgtgctaagccccataaggaaggtaccggacaacaggagcgagaatctccccggcccctgcagttgcccggggctgaaggacccgccatctctgacggagaagagggcggtggggagccaggcgcaggggggggcgcggccggcgcagctggtgccgggaggcgcgacttcgtggaagccccaccccccaaagttaatccctggaccaaaaatgcactgccccctgtactaactaccgttaacggacagtccccccctgaacatagtgcccctgccaaagtggttcgggccgctgtccccaagcagcgaaaaggcagtaaggttggtgacttcggcgacgctattaactggcccactcccggcgaaattgcacacaagtccgtgcagccgcagtcacacaagcctcagcctacaaggaagcttccccctaagaaggacatgaaagaacaggaaaagggggaaggctcagatagtaaggagagccccaagaccaagagcgacgaatcaggcgaagagaaaaatggagatgaggactgccagcggggtggccaaaaaaaaaaagggaataaacacaaatgggtaccattgcaaatcgatatgaaacctgaagttccccgtgagaagctggcatcacggccaactagaccaccagagcccaggcacatcccagctaatcgcggcgaaataaaagggagtgagagcgccacctatgttccggtggcaccacccaccccagcttggcagccagagatcaaacccgagcccgcctggcatgatcaagatgaaacttcatctgtgaaatcggatggagctgggggcgctagggccagttttaggggccgggggaggggtcgagggaggggacggggtagaggaaggggaggtacacggacacactttgactaccagttcggctataggaagtttgatggcgtggaagggcccaggaccccaaaatacatgaacaatattacatattactttgataacgtgtcttctacagagctgtactcagtagaccaggaacttcttaaggactatattaaaagacagatcgagtattatttctctgtggacaacctcgagcgggatttttttctgcggagaaagatggacgcggatggttttctgcctatcaccctaatagctagctttcaccgggtccaggccctgacaacagacatcagccttatctttgcggccctcaaagatagcaaagtcgtggaaatcgtggacgagaaagtccggcgcagagaggagcccgagaaatggccattaccgcctattgtggactactcccaaaccgacttttcacaattgctcaattgtccagaattcgtccccaggcagcactaccagaaggagacggagtccgcccctgggagcccccgggcagtgacccctgttccaactaaaactgaggaagtcagtaacctgaaaaccctcccaaagggcctttccgctagcctcccagatctcgacagcgagaattggattgaagtgaaaaaacggccaaggccctctccagctcggccgaagaagagtgaagagagccgtttttcccacctcacttcactgccacagcagttgccctcacagcagctcatgagtaaagatcaagacgagcaggaagagctggacttcttgttcgacgaggagatggagcagatggatggcagaaagaatacttttacagcttggagtgatgaagagtctgactacgagattgatgacagagatgtcaacaaaatcctgatagttactcaaacgccgcattatatgcgtagacatccaggcggcgaccggactggcaatcatacctcgagggctaagatgagcgctgaattggccaaagttataaacgatggcctgttttactatgagcaagacttatgggccgagaaatttgagccagaatactcacaaatcaaacaggaagtggaaaacttcaaaaaggtgaatatgatctcgcgcgagcagttcgatacgctgactcccgaacctccagtagaccctaatcaggaagtgcctcctggccctcctaggtttcaacaggtgcctacagacgccctggcaaataaactgtttggggccccagagccatcaacaatcgcacgatccctgcctaccaccgtgccagagagcccaaactataggaatacccgaacacctcgtacgccacgcacaccacagcttaaagactctagtcaaaccagtagattttacccagtcgtgaaggaaggcaggacactggatgcaaaaatgccaaggtag

SEQ ID NO: 281837 - DNA, 2630 bp, Artificial Sequence
  derived and/or modified sequence
ggatttacggcggctgcatctaactgggagggggccgcacctcgcgtgaaccccgacccttctctgcagggactggggcccagcgccccggaggaaggcgtcgcgggcgctctgctagccaagttcgaggcgggggaggcagcctcgggcgcgcccggcttctccgggggggcgggcgcgcagatggccactcaggtggagccgctgctgcctgggggcgccacgctcttgcaggccgaagagcacggggggctggtgaggaagaagccgccgccggcgcccgagggcaagggcgagcccgggccaaacgacgtccgcgggggggagccggacggcagcgctcggagaccccggccgccctgcgccaagccgcacaaggagggcaccgggcagcaggagcgcgagagcccgcggccgctgcagctgcccggcgccgaaggcccggccatcagcgacggggaggagggcggcggcgagccaggcgctggcggaggagctgccggagccgcgggcgcggggcgccgggacttcgtggaagcccccccgcccaaggtgaacccgtggactaagaacgcattgccgccggtcctgaccaccgtgaacggacagtcccccccagaacactctgctccagccaaggtggtgagggcagctgttcctaaacagcgcaaaggcagcaaggttggtgactttggagatgcaatcaattggcccacacctggagagatagcccacaagagtgttcagccacagtcccacaagcctcagcctacccgtaaactgccacccaagaaggacatgaaggaacaggagaaaggagaagggagtgatagtaaggagagtccaaaaaccaaatcagatgaatcaggggaggaaaagaatggagatgaggattgccagcgaggcgggcagaagaagaaaggaaacaaacacaagtgggttccattacaaatagacatgaagcctgaagtgcccagagagaaactggcttcacgccccactcgcccaccggagcctagacacatacctgccaatcgcggagagatcaaagggtctgagtctgccacctacgtgcccgtggccccccccaccccagcctggcaaccagagatcaaaccggagcctgcctggcacgaccaggatgagacatcgagtgtgaagagtgatggggctggtggggcgcgggcttccttccgtggccgtggacgggggcgtggtcgcggccggggacgcggccggggtggcactcgaacccattttgactaccagtttggctaccgaaagtttgatggtgtggaggggcctcgtacgcccaagtacatgaacaacatcacctactactttgacaatgtcagcagcaccgagctttacagtgtggatcaggaactgctcaaagactacatcaagcgccagattgaatactacttcagcgtggacaatttagagcgagacttcttcctgcgaaggaaaatggatgctgatggtttcctacccatcacccttattgcttccttccaccgagtgcaggcccttaccactgacatttcactcatctttgcggccctaaaggacagcaaggtggtggagatcgttgatgagaaagttcgtaggagggaggaaccagaaaagtggcctcttcccccaatagtggattattcacagactgatttctcccagcttctcaactgccctgaatttgttccccgtcagcactaccaaaaggagacagagtcggcacctggctctcctcgtgcagtcaccccagtgccaaccaaaacagaggaggtcagcaacctaaagacactacccaagggcctgtctgccagcctgcctgacctggattctgagaactggattgaagtgaagaagaggcctcggccatccccagcacggcccaagaagtcagaggagtccagattttcccacctgacctctctgcctcagcagctgccttcccagcagctgatgtccaaggatcaggatgagcaagaggaactggattttctgtttgacgaggagatggagcagatggatgggcggaagaacaccttcactgcctggtctgatgaggaatctgactatgagattgatgacagggatgtcaacaagatcctcattgtcacccagacaccacattacatgcgccggcacccagggggggaccgcacaggcaaccacacctcgcgtgccaagatgagcgccgaactggccaaggtcattaatgatggcctcttctactatgagcaggacctgtgggctgaaaagtttgaacctgagtattcccagatcaagcaagaagtcgagaacttcaaaaaggtcaatatgatcagccgggagcagtttgacacactgacccctgagccccctgtggatcccaaccaggaagttcctcctgggccacctcggttccagcaagttcctacggatgccctggccaacaagttgtttggtgctcctgagccctccaccatcgcccgctctctaccaaccactgtcccagagtcaccaaactaccgcaacaccaggacccctcgcactccccggacaccacagctcaaagactcaagccagacatcacggttttacccagtggtgaaagaaggacggacactggatgccaagatgcctcg

SEQ ID NO: 281838 - DNA, 2451 bp, Artificial Sequence
  derived and/or modified sequence
atggccacccaggtggagcccctgctgcccggcggggccaccctgctgcaggccgaggagcacggcggcctggtgaggaagaagcccccaccagcccctgagggcaagggggagcccggccccaatgatgtgcggggcggggagccagatggcagcgcccggcggccccggcccccctgtgccaagccccacaaggagggcaccggccagcaggagcgggagagcccccggcccctgcagctgcccggggctgagggccctgccatcagtgatggagaggagggcggcggggagcctggagctgggggcggggccgccggggctgctggagctggaagaagagactttgtggaggcccccccacccaaggtgaacccctggaccaagaatgccctgccccctgtgctgaccaccgtgaatggccagagccccccagagcacagcgccccagccaaggtggtgcgggctgctgtgcccaagcagaggaagggcagcaaggtgggggactttggagatgccatcaactggcccaccccaggagagatcgcccacaagtctgtgcagccccagagccacaagccccagcccaccaggaagctgccccccaagaaggacatgaaggagcaggagaagggggagggcagtgacagcaaggagagccccaagaccaagagtgatgagagcggggaggagaagaatggagatgaggactgccagagaggaggccagaagaagaagggcaacaagcacaagtgggtgcccctgcagattgacatgaagccagaggtgccccgggagaagctggccagccggcccaccaggcctcctgagcccaggcacatcccagccaacagaggagagatcaagggcagcgagagcgccacctacgtgcctgtggccccacccaccccagcctggcagcctgagatcaagccagagcccgcctggcatgaccaggatgagaccagctctgtgaagagtgatggagctgggggcgcccgggccagcttccggggccggggccggggccggggccggggccggggccggggccggggcggcaccaggacccactttgactaccagtttggctacaggaagtttgatggagtggagggccccaggacccccaagtacatgaacaacatcacctactactttgacaacgtgagcagcacagagctgtacagcgtggaccaggagctgctgaaggactacatcaagaggcagatcgagtactacttctctgtggacaacctggagcgggacttcttcctgcggaggaagatggatgctgatggcttcctgcccatcaccctgattgccagcttccaccgggtgcaggccctgaccacagacatcagcctcatctttgctgccctgaaggacagcaaggtggtggagatcgtggatgagaaggtgagaagaagagaggagcctgagaagtggcccctgccccccatcgtggactacagccagacagacttcagccagctgctgaactgcccagagtttgtgccccggcagcactaccagaaggagacagaaagtgcccctggcagccccagggctgtgacccctgtgcccaccaagacagaggaggtgagcaacctgaagaccctgcccaagggcctgagcgccagcctgcctgacctggacagcgagaactggattgaggtgaagaagaggccccggcccagccctgcccggcccaagaagtctgaggagagccgcttcagccacctgaccagcctgccccagcagctgcccagccagcagctgatgagcaaggaccaggatgagcaggaggagctggacttcctgtttgatgaggagatggagcagatggatggcaggaagaacaccttcaccgcctggagcgatgaggagagtgactatgaaattgatgacagagatgtgaacaagatcctgattgtgacccagaccccccactacatgaggaggcaccctggaggagacagaacaggcaaccacaccagccgggccaagatgtctgctgagctggccaaggtgatcaatgatggcctcttctactatgagcaggacctgtgggccgagaagtttgagcctgagtacagccagatcaagcaggaggtggagaacttcaagaaggtgaacatgatcagccgggagcagtttgacaccctgaccccagagccccctgtggaccccaaccaggaggtgcccccaggccccccacgcttccagcaggtgcccacagatgccctggccaacaagctgtttggagcccctgagcccagcaccatcgcccggagcctgcccaccaccgtgcctgagagccccaactacagaaacaccaggacccccaggacccccaggaccccccagctgaaggacagcagccagaccagccgcttctaccctgtggtgaaggagggccgcaccctggatgccaagatgcccaggtag

SEQ ID NO: 281839 - DNA, 2451 bp, Artificial Sequence
  derived and/or modified sequence
atggccacccaggtggagcccctgctgcccggcggcgccaccctgttgcaagccgaagaacacggcggcttagtgaggaagaaacccccgcctgcccccgaaggaaagggggagccaggtcctaacgacgttagagggggtgagcccgacggctccgctagacgtcctagaccgccttgtgccaagccgcataaggaggggacaggacagcaggagcgggaatctcctcgcccactgcaactgccaggcgcggaaggacctgctatcagcgacggagaggagggcggaggggagccaggcgccggagggggggccgcaggagccgccggcgctggaaggagggactttgtggaagcccctccgcctaaagtgaacccttggacaaagaatgctctaccaccagtgctgaccaccgtgaacggccagtctcctcccgaacacagcgcacccgctaaggtggttagagccgctgtccccaagcagcgaaagggtagcaaggtgggcgatttcggagatgcaattaattggcctactccaggggagattgctcacaagtcagtccagcctcagtcacacaaaccccagccaacacgcaagctgccaccaaagaaggatatgaaggaacaagaaaaaggagagggaagcgattcgaaagagtcacctaagactaagtctgacgagagtggagaagaaaagaatggagacgaggactgccagcgcgggggccagaaaaaaaaagggaataagcataaatgggttcctttacagatcgacatgaaaccagaggtgccaagggaaaaattagcatctagacccactcggcccccagagccaagacacataccagcaaaccgcggagaaataaagggcagcgagagtgccacctatgtgcctgtcgcgcctccgacgccagcctggcaaccagaaatcaaacctgagcccgcttggcacgaccaggacgaaacctcaagcgtcaaatccgatggcgctggaggagcccgagcaagctttaggggacgcggacgcggacgcggcagaggaagaggacggggcagggggggcacacggacccacttcgactaccagtttggctataggaagtttgacggcgtcgaaggccctcggaccccaaagtacatgaataatattacatactatttcgataacgtatcaagtacagaactctatagcgttgatcaagagctgcttaaggattatattaaaagacagattgagtactacttctccgtcgacaacttagaacgagatttctttttacgcaggaagatggacgcggacgggtttcttccaataacactcatagcatcctttcaccgcgtgcaggcattaacaaccgacatctccttgattttcgcagcactgaaagactccaaagtggttgagatcgttgacgagaaggtccggcgacgcgaggagcccgaaaaatggcccttgccgccaatcgtagactattctcagacagatttctctcagttactgaattgccctgaatttgtgcccagacaacattatcaaaaggaaacagagtccgcccctggctctccaagggccgtaacgcctgtccctaccaagaccgaggaagtctccaatctaaaaacactccccaaaggactgagcgcgagcctcccggatctggatagtgaaaactggatcgaagtgaaaaagagacctaggccaagccctgcccggcctaagaaaagcgaggaatcaagattttcacacttaactagtctaccgcaacaactcccttcacagcagttgatgtccaaagaccaggacgagcaggaggagttggacttcttgttcgacgaggaaatggagcagatggacggacgcaagaatactttcaccgcctggtccgatgaggagagcgactacgagatcgatgacagggatgttaacaagatcttgattgtcacccagactccacattatatgcggcggcaccctggtggcgacaggactggcaatcatactagccgggccaagatgtccgctgagctggcaaaagttataaatgacggtctattctattacgaacaggatctgtgggccgaaaaattcgaacctgagtactcccaaattaagcaggaagtcgagaacttcaagaaagtgaacatgataagccgggaacaatttgatacgctgacgcccgaacctcccgtggacccgaaccaggaggtacctccaggccctcctagattccagcaggtccccactgatgccttagctaataaattgttcggggcccctgagccaagcactatcgccagatctttaccaaccaccgtccctgagagtccgaattacaggaatacccgcacaccccgcactcccaggactccacagctcaaggactccagccagacctcccgattctatcccgtggtgaaagaaggccgcactttggatgctaagatgccacgatag

SEQ ID NO: 281840 - DNA, 2451 bp, Artificial Sequence
  derived and/or modified sequence
atggccacacaggtcgagcctctcttgcctggcggagccaccctgctgcaggccgaggagcacggcggactcgtgcggaagaaaccaccccctgccccagaaggaaagggagagccaggtcccaatgacgtgaggggcggtgagcctgatggtagcgcacgacggccacgacccccttgtgccaaaccccacaaagaaggaaccggccaacaggaaagggaaagccccagacctctccagctgcccggagccgaaggccctgccatttccgacggggaggaggggggaggagagcctggagctggcggaggggctgccggtgctgcaggcgcaggacgcagggacttcgttgaggccccacccccaaaggtgaacccatggaccaagaatgctctcccacccgtgttaacaactgtaaatgggcagagccctcccgaacattctgccccagctaaagtggtgcgggcagccgtacctaagcagcgcaaaggaagtaaggtaggcgatttcggagacgcaattaactggccgacacctggagagattgcccataagagtgtgcaaccgcagagtcataagccacaacctaccagaaagcttcccccaaaaaaggatatgaaggaacaggagaagggcgagggctcagatagcaaggaatccccaaagactaagtccgacgaatctggagaggagaagaatggggatgaagattgtcagagaggaggccagaaaaagaagggcaacaaacataagtgggtgccgctgcagattgacatgaagccggaggtcccgagagagaagctggcctctaggcccacaaggccgcctgaacctaggcacatccctgccaacagaggggagataaagggcagtgaaagcgcaacctacgtgcctgtggcccctcctacccccgcatggcaacccgagatcaagccggagcccgcatggcacgatcaagatgaaacatccagcgtaaagtcagacggcgcagggggagccagagcttcgtttcggggtcggggacggggaagagggagagggagaggcagaggcagaggaggcactcgtacccactttgactatcagttcggttaccggaaatttgatggcgtagaaggaccccgtactcccaagtacatgaacaatataacttattattttgataatgtttcctctaccgaactatatagcgtcgatcaggaactgctcaaggattacatcaagcgtcagatcgaatactactttagcgtggataacctggagagagacttcttcttaagaagaaagatggacgctgacgggtttcttcccataactctgatcgcaagttttcatagagtgcaagcactgaccactgacatctctctaattttcgccgcactgaaagacagcaaggttgtcgaaatcgtagacgaaaaggtgcgacgtagagaggaacctgaaaaatggcccctcccaccaatcgtggattatagccagaccgattttagccagctgctgaactgcccagagttcgttccgcgacagcattaccagaaagagaccgagagtgccccagggtcacctcgagccgtgactcccgtacctacgaaaacagaagaagtgagcaacctgaagaccttacccaaggggttatcggcctctctccccgacctggattccgagaactggatagaagttaagaagcgtcccaggccatcccccgctagaccgaagaagtccgaagagtctcgattttcccacctcacaagcttacctcagcaactgccttcacagcagctaatgtcaaaggatcaggatgaacaagaggaactcgatttcctgttcgacgaagaaatggagcagatggatggacgcaaaaacactttcacagcatggtccgatgaagaaagtgattacgaaatcgatgaccgggatgtgaataagatcttgattgttacacagaccccccattatatgcgcagacatcctggaggcgaccgcactggtaatcacactagtagagcaaagatgagcgcagaactagccaaagtcatcaacgacggcctgttctattacgagcaggatctgtgggcggagaagtttgaaccagagtactcacagatcaagcaggaggtcgaaaactttaagaaagtgaacatgatctcccgagagcagtttgacacattgaccccagaaccccctgtggatcctaatcaggaagtcccaccaggaccacctcgatttcagcaggtgccaactgatgcactggcaaataaactgtttggcgcaccagaaccctccacaatcgcacgatccttgccaactactgtccctgagtcccccaattaccgaaatacgcgcacaccccgaaccccacgcacaccgcagcttaaagatagtagtcagacatctcgcttctatccagtggtgaaggaagggaggacacttgacgctaaaatgccacggtag

SEQ ID NO: 281841 - DNA, 2451 bp, Artificial Sequence
  derived and/or modified sequence
atggccacccaggtggagcccctgctgcccggcggcgccaccctgctgcaggccgaggagcacggcggcctggtgagaaagaagcccccccccgcccccgagggcaagggcgagcccggccccaacgacgtgagaggcggcgagcccgacggcagcgccagaagacccagacccccctgcgccaagccccacaaggagggcaccggccagcaggagagagagagccccagacccctgcagctgcccggcgccgagggccccgccatcagcgacggcgaggagggcggcggcgagcccggcgccggcggcggcgccgccggcgccgccggcgccggcagaagagacttcgtggaggcccccccccccaaggtgaacccctggaccaagaacgccctgccccccgtgctgaccaccgtgaacggccagagcccccccgagcacagcgcccccgccaaggtggtgagagccgccgtgcccaagcagagaaagggcagcaaggtgggcgacttcggcgacgccatcaactggcccacccccggcgagatcgcccacaagagcgtgcagccccagagccacaagccccagcccaccagaaagctgccccccaagaaggacatgaaggagcaggagaagggcgagggcagcgacagcaaggagagccccaagaccaagagcgacgagagcggcgaggagaagaacggcgacgaggactgccagagaggcggccagaagaagaagggcaacaagcacaagtgggtgcccctgcagatcgacatgaagcccgaggtgcccagagagaagctggccagcagacccaccagaccccccgagcccagacacatccccgccaacagaggcgagatcaagggcagcgagagcgccacctacgtgcccgtggccccccccacccccgcctggcagcccgagatcaagcccgagcccgcctggcacgaccaggacgagaccagcagcgtgaagagcgacggcgccggcggcgccagagccagcttcagaggcagaggcagaggcagaggcagaggcagaggcagaggcagaggcggcaccagaacccacttcgactaccagttcggctacagaaagttcgacggcgtggagggccccagaacccccaagtacatgaacaacatcacctactacttcgacaacgtgagcagcaccgagctgtacagcgtggaccaggagctgctgaaggactacatcaagagacagatcgagtactacttcagcgtggacaacctggagagagacttcttcctgagaagaaagatggacgccgacggcttcctgcccatcaccctgatcgccagcttccacagagtgcaggccctgaccaccgacatcagcctgatcttcgccgccctgaaggacagcaaggtggtggagatcgtggacgagaaggtgagaagaagagaggagcccgagaagtggcccctgccccccatcgtggactacagccagaccgacttcagccagctgctgaactgccccgagttcgtgcccagacagcactaccagaaggagaccgagagcgcccccggcagccccagagccgtgacccccgtgcccaccaagaccgaggaggtgagcaacctgaagaccctgcccaagggcctgagcgccagcctgcccgacctggacagcgagaactggatcgaggtgaagaagagacccagacccagccccgccagacccaagaagagcgaggagagcagattcagccacctgaccagcctgccccagcagctgcccagccagcagctgatgagcaaggaccaggacgagcaggaggagctggacttcctgttcgacgaggagatggagcagatggacggcagaaagaacaccttcaccgcctggagcgacgaggagagcgactacgagatcgacgacagagacgtgaacaagatcctgatcgtgacccagaccccccactacatgagaagacaccccggcggcgacagaaccggcaaccacaccagcagagccaagatgagcgccgagctggccaaggtgatcaacgacggcctgttctactacgagcaggacctgtgggccgagaagttcgagcccgagtacagccagatcaagcaggaggtggagaacttcaagaaggtgaacatgatcagcagagagcagttcgacaccctgacccccgagccccccgtggaccccaaccaggaggtgccccccggcccccccagattccagcaggtgcccaccgacgccctggccaacaagctgttcggcgcccccgagcccagcaccatcgccagaagcctgcccaccaccgtgcccgagagccccaactacagaaacaccagaacccccagaacccccagaaccccccagctgaaggacagcagccagaccagcagattctaccccgtggtgaaggagggcagaaccctggacgccaagatgcccagatag

SEQ ID NO: 281842 - protein, 667 aa, Artificial Sequence
  derived and/or modified sequence
MAKPAQGAKYRGSIHDFPGFDPNQDAEALYTAMKGFGSDKEAILDIITSRSNRQRQEVCQSYKSLYGKDLIADLKYELTGKFERLIVGLMRPPAYCDAKEIKDAISGIGTDEKCLIEILASRTNEQMHQLVAAYKDAYERDLEADIIGDTSGHFQKMLVVLLQGTREEDDVVSEDLVQQDVQDLYEAGELKWGTDEAQFIYILGNRSKQHLRLVFDEYLKTTGKPIEASIRGELSGDFEKLMLAVVKCIRSTPEYFAERLFKAMKGLGTRDNTLIRIMVSRSELDMLDIREIFRTKYEKSLYSMIKNDTSGEYKKTLLKLSGGDDDAAGQFFPEAAQVAYQMWELSAVARVELKGTVRPANDFNPDADAKALRKAMKGLGTDEDTIIDIITHRSNVQRQQIRQTFKSHFGRDLMTDLKSEISGDLARLILGLMMPPAHYDAKQLKKAMEGAGTDEKALIEILATRTNAEIRAINEAYKEDYHKSLEDALSSDTSGHFRRILISLATGHREEGGENLDQAREDAQEIADTPSGDKTSLETRFMTILCTRSYPHLRRVFQEFIKMTNYDVEHTIKKEMSGDVRDAFVAIVQSVKNKPLFFADKLYKSMKGAGTDEKTLTRIMVSRSEIDLLNIRREFIEKYDKSLHQAIEGDTSGDFLKALLALCGGED

SEQ ID NO: 281843 - DNA, 2004 bp, Artificial Sequence
  derived and/or modified sequence
atggctaagcctgctcagggggccaagtacagaggaagcattcacgactttcctgggttcgaccctaatcaggatgccgaagccctctacaccgcaatgaaagggttcgggtccgacaaggaggcaattttagacatcataacaagccgtagcaatcgccagaggcaagaagtttgtcagtcttataaatcgctgtatgggaaggatctaattgctgaccttaaatacgagctgaccggaaagtttgagaggctcatagttgggctcatgcgccccccagcctactgtgatgcgaaagaaattaaagatgccattagcggcattggcaccgatgaaaagtgtctgattgagatccttgcgtctaggaccaatgagcagatgcaccagttagttgccgcctacaaagatgcctacgagcgagatttagaggccgacataatcggcgacacatccggccactttcagaagatgcttgtcgttctcctccaaggaactcgcgaggaagacgacgtcgtctctgaggacctggtccagcaagatgtacaagatctgtatgaagctggcgaactcaaatggggtactgatgaagcccagttcatatacatcttgggaaatcggtcgaaacagcatcttcgattagtgttcgatgagtacctgaaaacaactgggaagccgatcgaggccagcatccggggggaactgtccggagacttcgagaaacttatgctggctgtggtcaagtgtattcggagcactcctgagtactttgctgaaaggctcttcaaagccatgaaaggtctgggtacccgcgacaacacacttatcaggatcatggtttctagatccgagctggatatgcttgacattagggagatcttccgaacaaaatatgagaagagtctttacagcatgattaagaacgatacctcaggtgaatacaaaaagactctcctcaaactctccgggggcgacgatgatgccgcaggccagtttttccctgaagccgcccaggtggcctatcaaatgtgggaactgagcgccgtggctcgggtggaactgaagggcacagtaaggccagccaatgacttcaaccccgatgctgatgctaaggctctgcgaaaggctatgaagggtttggggacagatgaagataccatcatcgatattatcactcaccgctctaatgttcagaggcagcagatccgccagaccttcaaatctcactttggacgcgatttgatgactgacttgaagtccgaaatctcaggcgatctagccaggttgatcctggggcttatgatgcctcccgcccactacgacgctaagcagctgaagaaagccatggaaggggccggaactgacgagaaggcactaattgagattctagccaccaggactaatgcagaaatccgcgccatcaatgaagcgtacaaggaggattaccacaagagtctggaggacgctcttagctccgatacatccggccatttccgccggatcttgattagtttggctaccgggcatcgagaggagggaggtgaaaacctcgatcaagcccgggaggacgcacaggagatagcagacactccatccggcgataaaacaagccttgaaacaaggtttatgacgattttatgtacccgctcgtatccccacctacggagagtttttcaagagttcattaagatgacaaactatgacgtcgaacatacaatcaaaaaggagatgtctggagacgttagggatgccttcgtggccatcgtacagagtgtcaaaaataagccactgttctttgccgacaagctgtacaagagcatgaagggggccgggaccgatgagaagactttaacaagaatcatggttagccgtagcgagatcgacctacttaatatccgccgtgagtttatagagaagtatgacaaaagcctgcatcaggctatcgagggtgacacatcaggggattttctcaaggccttactggctctatgtggcggtgaggactag

SEQ ID NO: 281844 - DNA, 333 bp, Artificial Sequence
  derived and/or modified sequence
atggcgaaacctgctcaaggtgcgaagtacagaggatctattcacgacttccctggatttgatcccaatcaagacgccgaagcattgtacaccgccatgaagggattcggctcggacaaagaagccattctagatatcattacgagccggtcaaatcgtcagcggcaggaggtctgtcagtcctataaatccctgtatggaaaagatctgatagctgaccttaagtacgagttaactggtaagtttgagcggctcattgtcggcctcatgaggccacctgcttactgtgatgccaaggaaattaaggatgcgatctcaggcatcggtacctag

SEQ ID NO: 281845 - DNA, 2004 bp, Artificial Sequence
  derived and/or modified sequence
atggccaagccagcccagggcgccaagtaccggggcagcatccatgacttccctggctttgaccccaaccaggatgctgaggccctgtacacagccatgaagggcttcggcagtgacaaggaggccatcctggacatcatcaccagccgcagcaaccggcagaggcaggaggtgtgccagagctacaagagcctgtatggcaaggacctgattgctgacctgaagtatgagctgaccgggaagtttgagcggctcatcgtgggcctgatgaggcccccagcctactgtgatgccaaggagatcaaggatgccatcagcggcatcggcacagatgagaagtgcctgattgagatcctggccagcaggaccaatgagcagatgcaccagctggtggccgcctacaaggatgcctatgaaagagacctggaggccgacatcattggagacaccagcggccacttccagaagatgctggtggtgctgctgcagggcacccgggaggaggatgatgtggtgtctgaggacctggtgcagcaggatgtgcaggacctgtatgaagctggggagctgaagtggggcacagatgaggcccagttcatctacatcctgggcaacagaagcaagcagcacctgcggctggtgtttgatgagtacctgaagaccaccgggaagcccatcgaggccagcatccggggggagctgagcggggactttgagaagctgatgctggccgtggtgaagtgcatccgcagcaccccagagtactttgctgagcggctcttcaaggccatgaagggcctgggcacccgggacaacaccctcatccgcatcatggtgagccgctctgagctggacatgctggacatccgggagatcttccgcaccaagtatgagaagagcctgtacagcatgatcaagaatgacaccagcggggagtacaagaagaccctgctgaagctgtctggaggagatgatgatgctgctggccagttcttccctgaggccgcccaggtggcctaccagatgtgggagctgtctgctgtggcccgggtggagctgaagggcaccgtgcggcctgccaatgacttcaacccagatgctgatgccaaggccctgaggaaggccatgaagggcctgggcacagatgaggacaccatcatcgacatcatcacccacaggagcaatgtgcagaggcagcagatccggcagaccttcaagagccacttcggccgggacctgatgacagacctgaagtctgagatcagcggggacctggcccggctcatcctgggcctgatgatgcccccagcccactatgatgccaagcagctgaagaaggccatggagggcgccggcacagatgagaaggccctgattgagatcctggccaccaggaccaatgctgagatccgggccatcaatgaggcctacaaggaggactaccacaagagcctggaggatgccctgagcagtgacaccagcggccacttccgccgcatcctgatcagcctggccaccggccaccgggaggagggcggggagaacctggaccaggccagagaagatgcccaggagattgctgacaccccatctggggacaagaccagcctggagacccgcttcatgaccatcctgtgcaccaggagctacccccacctgcggcgggtcttccaggagttcatcaagatgaccaactatgatgtggagcacaccatcaagaaggagatgtctggagatgtgagagatgcctttgtggccatcgtgcagagcgtgaagaacaagcccctcttctttgctgacaagctgtacaagtccatgaagggagctggaacagatgagaagaccctgacccgcatcatggtgagccgctcagaaattgacctgctgaacatccggcgggagttcatcgagaagtatgacaagagcctgcaccaggccattgaaggagacaccagcggggacttcctgaaggccctgctggccctgtgtggcggggaggactag

SEQ ID NO: 281846 - DNA, 333 bp, Artificial Sequence
  derived and/or modified sequence
atggccaagccagcccagggcgccaagtaccggggcagcatccatgacttccctggctttgaccccaaccaggatgctgaggccctgtacacagccatgaagggcttcggcagtgacaaggaggccatcctggacatcatcaccagccgcagcaaccggcagaggcaggaggtgtgccagagctacaagagcctgtatggcaaggacctgattgctgacctgaagtatgagctgaccgggaagtttgagcggctcatcgtgggcctgatgaggcccccagcctactgtgatgccaaggagatcaaggatgccatcagcggcatcggcacctag

SEQ ID NO: 281847 - DNA, 2004 bp, Artificial Sequence
  derived and/or modified sequence
atggccaagcccgcccagggcgccaagtaccggggcagcatccacgattttcccgggttcgaccctaaccaggatgctgaggctctgtatacagctatgaaaggattcggctcagacaaggaagctatactcgatatcataacatcgagaagtaatcgtcagcggcaggaggtttgccagtcttataaaagtctgtacgggaaggacttaatagctgatctcaaatacgaacttactggcaagttcgagcggctgattgttgggctgatgagacctccagcctattgcgacgcaaaagaaataaaggacgcaatatctggtatcggcaccgatgagaaatgcctgattgagattcttgctagtcgcactaacgaacaaatgcaccagctggtcgccgcctataaggatgcttatgagagggatctagaggccgacatcatcggtgacacctccggccacttccagaaaatgctggtagtgctcctgcagggaacacgtgaagaagacgacgtggttagcgaggatctggtccagcaggacgtccaggatctgtatgaagccggcgaactgaaatggggtaccgatgaggctcagtttatttatatcctgggcaacaggtcgaagcagcacctgaggttggtgttcgacgagtatctcaagactaccggcaaaccaattgaggccagcataaggggagagctctcaggcgactttgaaaaattgatgcttgctgttgtgaaatgtattcggtcaacccctgaatactttgcggaacgcctatttaaggctatgaaaggtctcgggacacgcgacaacacactaatcaggatcatggtatctcggtcagaactcgacatgctggatattcgcgagatttttcgaaccaaatacgagaaatctctctactctatgatcaaaaatgatacatccggtgagtataagaagacactacttaagctgagcgggggcgacgatgatgctgccgggcagttctttccagaggccgcacaagtcgcatatcaaatgtgggagctgagcgcagtggcccgagtggaactgaaggggactgtacgccctgcaaacgatttcaacccagacgctgacgcaaaggccctccgaaaggcaatgaaggggctcggtaccgatgaagacaccatcatcgacatcataactcatagaagcaatgtgcaacggcagcagatccgtcaaacgtttaagtctcacttcggccgtgatctgatgactgatctgaaatccgagatcagcggagatctggctaggctaatcttgggcctcatgatgcctcccgctcattacgatgccaagcagcttaaaaaggcaatggaaggagcgggaaccgacgagaaggcgctcatcgaaatactggccacgcgcaccaatgctgagatccgcgcgattaatgaggcctacaaggaggattatcacaagtctctggaggacgcactctcaagcgacacttctggccacttccgccgcatattgatttctctggcgacaggccatcgggaggaaggtggagaaaatttggaccaggcccgcgaggatgctcaggaaatagccgatacacccagtggggacaagactagcctggagacccgattcatgacgatcctctgcacccgatcttacccacacctcaggcgcgtattccaagaatttattaaaatgacgaattacgatgtggaacatacgattaagaaggaaatgtcaggagacgtgagggatgcctttgtggctatcgtgcagagtgtgaagaacaagcctctgtttttcgcagacaaattgtataaaagcatgaaaggcgcaggcaccgatgagaaaaccctcactcgtatcatggtctctcggagtgagatcgatttgcttaatatcaggagagaatttatcgagaaatatgataagtccctccatcaagccatcgaaggtgatacaagcggagatttcttgaaagccctgctagccctatgtggaggagaggattag

SEQ ID NO: 281848 - DNA, 333 bp, Artificial Sequence
  derived and/or modified sequence
atggccaagcccgcccagggcgccaagtaccggggcagcatccacgacttcccgggttttgatcccaaccaagatgccgaagctttatacacggctatgaagggcttcggctctgataaagaagccatcctcgatataatcacctccagaagcaaccggcagagacaggaggtgtgtcagtcatacaagtcgttgtacggaaaggatctaatagcagacctcaagtatgaactgactgggaagtttgagcgtttgatcgtaggcctgatgcgtcctccagcctactgtgacgcaaaggagatcaaagatgctatatccggtattggcacatag

SEQ ID NO: 281849 - DNA, 2441 bp, Artificial Sequence
  derived and/or modified sequence
gatccagcgagcgctgcgtcctcgagtccctgcgcccgtgcgtccgtctgcgacccgaggcctccgctgcgcgtggattctgctgcgaaccggagaccatggccaaaccagcacagggtgccaagtaccggggctccatccatgacttcccaggctttgaccccaaccaggatgccgaggctctgtacactgccatgaagggctttggcagtgacaaggaggccatactggacataatcacctcacggagcaacaggcagaggcaggaggtctgccagagctacaagtccctctacggcaaggacctcattgctgatttaaagtatgaattgacgggcaagtttgaacggttgattgtgggcctgatgaggccacctgcctattgtgatgccaaagaaattaaagatgccatctcgggcattggcactgatgagaagtgcctcattgagatcttggcttcccggaccaatgagcagatgcaccagctggtggcagcatacaaagatgcctacgagcgggacctggaggctgacatcatcggcgacacctctggccacttccagaagatgcttgtggtcctgctccagggaaccagggaggaggatgacgtagtgagcgaggacctggtacaacaggatgtccaggacctatacgaggcaggggaactgaaatggggaacagatgaagcccagttcatttacatcttgggaaatcgcagcaagcagcatcttcggttggtgttcgatgagtatctgaagaccacagggaagccgattgaagccagcatccgaggggagctgtctggggactttgagaagctaatgctggccgtagtgaagtgtatccggagcaccccggaatattttgctgaaaggctcttcaaggctatgaagggcctggggactcgggacaacaccctgatccgcatcatggtctcccgtagtgagttggacatgctcgacattcgggagatcttccggaccaagtatgagaagtccctctacagcatgatcaagaatgacacctctggcgagtacaagaagactctgctgaagctgtctgggggagatgatgatgctgctggccagttcttcccggaggcagcgcaggtggcctatcagatgtgggaacttagtgcagtggcccgagtagagctgaagggaactgtgcgcccagccaatgacttcaaccctgacgcagatgccaaagcgctgcggaaagccatgaagggactcgggactgacgaagacacaatcatcgatatcatcacgcaccgcagcaatgtccagcggcagcagatccggcagaccttcaagtctcactttggccgggacttaatgactgacctgaagtctgagatctctggagacctggcaaggctgattctggggctcatgatgccaccggcccattacgatgccaagcagttgaagaaggccatggagggagccggcacagatgaaaaggctcttattgaaatcctggccactcggaccaatgctgaaatccgggccatcaatgaggcctataaggaggactatcacaagtccctggaggatgctctgagctcagacacatctggccacttcaggaggatcctcatttctctggccacggggcatcgtgaggagggaggagaaaacctggaccaggcacgggaagatgcccaggaaatagcagacacacctagtggagacaaaacttccttggagacacgtttcatgacgatcctgtgtacccggagctatccgcacctccggagagtcttccaggagttcatcaagatgaccaactatgacgtggagcacaccatcaagaaggagatgtctggggatgtcagggatgcatttgtggccattgttcaaagtgtcaagaacaagcctctcttctttgccgacaaactttacaaatccatgaagggtgctggcacagatgagaagactctgaccaggatcatggtatcccgcagtgagattgacctgctcaacatccggagggaattcattgagaaatatgacaagtctctccaccaagccattgagggtgacacctccggagacttcctgaaggccttgctggctctctgtggtggtgaggactagggccacagctttggcgggcacttctgccaagaaatggttatcagcaccagccgccatggccaagcctgattgttccagctccagagactaaggaaggggcaggggtggggggaggggttgggttgggctcttatcttcagtggagcttaggaaacgctcccactcccacgggccatcgagggcccagcacggctgagcggctgaaaaaccgtagccatagatcctgtccacctccactcccctctgaccctcaggctttcccagcttcctccccttgctacagcctctgccctggtttgggctatgtcagatccaaaaacatcctgaacctctgtctgt

SEQ ID NO: 281850 - DNA, 923 bp, Artificial Sequence
  derived and/or modified sequence
ggacttgttatgatcgagggctgctaggcagagatgttggctgcttcctgggccctggcaagtcactttctctttctgagatgcctttaccccgtctagaaaatgagggacttggagtcatggattattaagggcccttgtgggattcagaaacactagatgtaaaatattcagccaatttgagcagtatggtctaggttgctctgggagggatcagaagccatcttaaagccagggtaaatggtgtgtttatgattagctcaggagcttcccagaaccctcagaggcggggctgtggaatcagcagggggactggccctcagaactgcagtctgaacatctagttctggaaggagcttgctttttacatatgaactgtgcactcacacaaggcacacagaaactgctctcagagctgagaatattttcccaaacagtaagaggcccctccttgaagccatctctccttggaaaggggagctcctccagatgggcctgggctgcagccagcagctgaaattgccagcaacaagcccagaggaaagtgcttcaaggctggagatgcagtggattctgctgcgaaccggagaccatggccaaaccagcacagggtgccaagtaccggggctccatccatgacttcccaggctttgaccccaaccaggatgccgaggctctgtacactgccatgaagggctttggcagtgacaaggaggccatactggacataatcacctcacggagcaacaggcagaggcaggaggtctgccagagctacaagtccctctacggcaaggacctcattgctgatttaaagtatgaattgacgggcaagtttgaacggttgattgtgggcctgatgaggccacctgcctattgtgatgccaaagaaattaaagatgccatctcgggcattggcactg

SEQ ID NO: 281851 - DNA, 2004 bp, Artificial Sequence
  derived and/or modified sequence
atggccaagccagcgcagggagccaagtacaggggaagtatacacgacttccccggattcgacccgaaccaggacgccgaagcgctgtatacagctatgaagggtttcggctctgacaaggaagctatcctggatatcatcaccagcaggtcgaaccgccagagacaagaggtgtgtcagtcctacaagagtctctatggaaaggatctgatcgccgatctcaagtacgagcttacgggaaagttcgagcgtctgatagtgggattgatgcgcccacctgcttactgcgacgcaaaggagattaaggatgccatcagcggtataggaactgatgagaaatgtttgatagagattctcgccagtcgaaccaacgagcagatgcaccagcttgtggctgcctacaaggacgcatatgaacgggacctcgaagcagacattattggcgacacctcaggtcatttccagaaaatgcttgtggtactcctgcagggcacccgggaggaggatgacgttgtctctgaggaccttgtgcagcaggatgtgcaggacctgtatgaggccggagagcttaagtggggcacagacgaggcccagttcatttacatattgggaaacaggtcaaaacaacacttacgccttgtgtttgatgaatatttgaaaaccaccggaaagcccattgaggctagtattcggggagagctcagcggggatttcgagaagctgatgctggccgtcgtgaaatgtatccggtccacacccgaatattttgcagaaagacttttcaaggccatgaagggcctgggtacaagagacaacacactcatcagaatcatggtcagcaggagtgaactcgacatgttggacattcgggaaatattccggaccaagtacgagaaatcactgtatagtatgatcaaaaatgatacgagcggcgaatacaaaaaaacgttactcaagctctccgggggtgatgacgacgctgctggtcaattcttcccagaagcagcgcaagtcgcgtatcaaatgtgggaactttcagcagtagcgcgagtcgagcttaagggaacagtacgacctgccaatgacttcaacccagatgcggacgcgaaggccctgcgtaaggctatgaaaggcctcggcacagatgaagacactatcatcgatataatcacacacagatccaacgtgcaacgccagcaaatacggcagactttcaaatcgcactttggcagagaccttatgactgacttgaagtctgaaatctctggggatctcgcccgtctaatccttggcctgatgatgccgcctgcccactatgatgcaaaacagctgaagaaagccatggagggagccggtaccgatgagaaagctctcattgaaattttagcgacaagaaccaacgcagagatccgcgctattaacgaggcttacaaggaggattaccacaaaagtctcgaagatgcacttagcagcgatacatcgggtcatttccgaagaattctgatcagtctcgcaactgggcaccgtgaggagggcggagagaatcttgaccaagccagggaggatgcacaggagattgccgacacccccagtggggacaaaacatctcttgagactcgttttatgactatcctgtgcactcgctcttacccccatctcagacgtgtttttcaagaatttattaagatgaccaattacgacgtcgagcacactattaaaaaggagatgtccggtgacgttagagacgcatttgtggctattgtacagtccgttaaaaacaagccactctttttcgctgataagctgtacaaaagtatgaaaggcgcaggtactgacgagaaaactcttacaagaatcatggtttctaggagcgagattgatttactgaacatccgcagagaattcatcgagaaatatgataagagtctacaccaggccattgagggtgatacctcaggggactttcttaaagctctactggcactctgcggaggagaagattag

SEQ ID NO: 281852 - DNA, 333 bp, Artificial Sequence
  derived and/or modified sequence
atggccaaaccagcccaaggcgcaaagtaccggggttccattcacgactttcctgggtttgatccgaaccaggacgcagaagcgttgtataccgccatgaagggcttcggttcagacaaagaggctattctggatatcatcacaagccgaagcaatcgacagagacaagaagtatgtcaatcttacaagtccctttatggcaaagatctgatcgccgatctcaaatatgagctgactgggaaatttgagcggctgattgtcgggctgatgcgccctcctgcatattgtgacgccaaagaaataaaggatgctatctctggaatcggcacttag

SEQ ID NO: 281853 - DNA, 2004 bp, Artificial Sequence
  derived and/or modified sequence
atggccaagcccgcccagggcgccaagtacagaggcagcatccacgacttccccggcttcgaccccaaccaggacgccgaggccctgtacaccgccatgaagggcttcggcagcgacaaggaggccatcctggacatcatcaccagcagaagcaacagacagagacaggaggtgtgccagagctacaagagcctgtacggcaaggacctgatcgccgacctgaagtacgagctgaccggcaagttcgagagactgatcgtgggcctgatgagaccccccgcctactgcgacgccaaggagatcaaggacgccatcagcggcatcggcaccgacgagaagtgcctgatcgagatcctggccagcagaaccaacgagcagatgcaccagctggtggccgcctacaaggacgcctacgagagagacctggaggccgacatcatcggcgacaccagcggccacttccagaagatgctggtggtgctgctgcagggcaccagagaggaggacgacgtggtgagcgaggacctggtgcagcaggacgtgcaggacctgtacgaggccggcgagctgaagtggggcaccgacgaggcccagttcatctacatcctgggcaacagaagcaagcagcacctgagactggtgttcgacgagtacctgaagaccaccggcaagcccatcgaggccagcatcagaggcgagctgagcggcgacttcgagaagctgatgctggccgtggtgaagtgcatcagaagcacccccgagtacttcgccgagagactgttcaaggccatgaagggcctgggcaccagagacaacaccctgatcagaatcatggtgagcagaagcgagctggacatgctggacatcagagagatcttcagaaccaagtacgagaagagcctgtacagcatgatcaagaacgacaccagcggcgagtacaagaagaccctgctgaagctgagcggcggcgacgacgacgccgccggccagttcttccccgaggccgcccaggtggcctaccagatgtgggagctgagcgccgtggccagagtggagctgaagggcaccgtgagacccgccaacgacttcaaccccgacgccgacgccaaggccctgagaaaggccatgaagggcctgggcaccgacgaggacaccatcatcgacatcatcacccacagaagcaacgtgcagagacagcagatcagacagaccttcaagagccacttcggcagagacctgatgaccgacctgaagagcgagatcagcggcgacctggccagactgatcctgggcctgatgatgccccccgcccactacgacgccaagcagctgaagaaggccatggagggcgccggcaccgacgagaaggccctgatcgagatcctggccaccagaaccaacgccgagatcagagccatcaacgaggcctacaaggaggactaccacaagagcctggaggacgccctgagcagcgacaccagcggccacttcagaagaatcctgatcagcctggccaccggccacagagaggagggcggcgagaacctggaccaggccagagaggacgcccaggagatcgccgacacccccagcggcgacaagaccagcctggagaccagattcatgaccatcctgtgcaccagaagctacccccacctgagaagagtgttccaggagttcatcaagatgaccaactacgacgtggagcacaccatcaagaaggagatgagcggcgacgtgagagacgccttcgtggccatcgtgcagagcgtgaagaacaagcccctgttcttcgccgacaagctgtacaagagcatgaagggcgccggcaccgacgagaagaccctgaccagaatcatggtgagcagaagcgagatcgacctgctgaacatcagaagagagttcatcgagaagtacgacaagagcctgcaccaggccatcgagggcgacaccagcggcgacttcctgaaggccctgctggccctgtgcggcggcgaggactag

SEQ ID NO: 281854 - DNA, 333 bp, Artificial Sequence
  derived and/or modified sequence
atggccaagcccgcccagggcgccaagtacagaggcagcatccacgacttccccggcttcgaccccaaccaggacgccgaggccctgtacaccgccatgaagggcttcggcagcgacaaggaggccatcctggacatcatcaccagcagaagcaacagacagagacaggaggtgtgccagagctacaagagcctgtacggcaaggacctgatcgccgacctgaagtacgagctgaccggcaagttcgagagactgatcgtgggcctgatgagaccccccgcctactgcgacgccaaggagatcaaggacgccatcagcggcatcggcacctag

SEQ ID NO: 281855 - protein, 159 aa, Artificial Sequence
  derived and/or modified sequence
MPALACLRRLCRHVSPQAVLFLLFIFCLFSVFISAYYLYGWKRGLEPSADAPEPDCGDPPPVAPSRLLPLKPVQAATPSRTDPLVLVFVESLYSQLGQEVVAILESSRFKYRTEIAPGKGDMPTLTDKGRGRFALIIYENILKYVNLDAWNRELLDKYC

SEQ ID NO: 281856 - DNA, 72 bp, Artificial Sequence
  derived and/or modified sequence
atgccagcgctggcatgtctcaggcgcttgtgtcgccacgtctccccccaggcagttttgttcctgctgtag

SEQ ID NO: 281857 - DNA, 72 bp, Artificial Sequence
  derived and/or modified sequence
atgcctgccctggcctgcctgcggcggctgtgcagacatgtgagcccccaggccgtgctcttcctgctgtag

SEQ ID NO: 281858 - DNA, 72 bp, Artificial Sequence
  derived and/or modified sequence
atgcccgccctggcctgcctgcggcggctgtgccggcacgtgagccctcaggccgttctgtttcttctgtag

SEQ ID NO: 281859 - DNA, 72 bp, Artificial Sequence
  derived and/or modified sequence
atgcctgctcttgcctgccttcgcaggttgtgtcggcacgtatctccgcaagcagtgctgtttctcctctag

SEQ ID NO: 281860 - DNA, 72 bp, Artificial Sequence
  derived and/or modified sequence
atgcccgccctggcctgcctgagaagactgtgcagacacgtgagcccccaggccgtgctgttcctgctgtag

SEQ ID NO: 281861 - protein, 68 aa, Artificial Sequence
  derived and/or modified sequence
MPALACLRRLCRHVSPQAVLFLLFIFCLFSVFISAYYLYGWKRGLEPSADAPEPDCGDPPPVAPSRLL

SEQ ID NO: 281862 - protein, 23 aa, Artificial Sequence
  derived and/or modified sequence
MPALACLRRLCRHVSPQAVLFLL

SEQ ID NO: 281863 - DNA, 480 bp, Artificial Sequence
  derived and/or modified sequence
atgccggccctcgcatgtcttcgacggctgtgtcggcacgtcagcccccaggccgtgctgtttttgctgttcattttctgcctgttttccgtgtttattagcgcttattatctttacgggtggaagcggggcttagaaccttccgccgacgctcccgaacccgactgtggtgatccccccccagtggccccttcaaggcttctgccactgaaaccagtgcaggcagcaactccttcccggaccgatcctctggtgctggtcttcgtggagagcctgtactcccaactggggcaggaagtagtggcaatccttgaatcttctcgctttaaatataggacagaaatagctcccggcaaaggggatatgcccacactaacagataagggcaggggaagattcgcactaatcatatacgagaatatcctgaagtacgttaatctggatgcctggaatcgggagctcctcgacaaatactgctag

SEQ ID NO: 281864 - DNA, 207 bp, Artificial Sequence
  derived and/or modified sequence
atgcccgctctggcttgtctgcgacggctgtgccgccacgtgtcacctcaggctgtgctattcttgctcttcattttttgcctgtttagtgtttttatttccgcatactatctttatggctggaagagaggtctggagccctcagccgacgcccccgagcctgattgcggtgaccctccgcccgtagctccaagcaggctgctatag

SEQ ID NO: 281865 - DNA, 480 bp, Artificial Sequence
  derived and/or modified sequence
atgcctgccctggcctgcctgcggcggctgtgcagacatgtgagcccccaggccgtgctcttcctgctcttcatcttctgcctcttcagcgtcttcatcagcgcctactacctgtatggctggaagaggggcctggagcccagcgcagatgcccctgagccagactgtggggaccccccacctgtggcccccagccggctgctgcccctgaagcctgtgcaggccgccacccccagcaggacagaccccctggtgctggtgtttgtggagagcctgtacagccagctgggccaggaggtggtggccatcctggagagcagccgcttcaagtacagaacagaaattgcccctggaaaaggagacatgcccaccctgacagacaagggccggggccgctttgccctgatcatctatgagaacatcctgaagtatgtgaacctggatgcctggaaccgggagctgctggacaagtactgctag

SEQ ID NO: 281866 - DNA, 207 bp, Artificial Sequence
  derived and/or modified sequence
atgcctgccctggcctgcctgcggcggctgtgcagacatgtgagcccccaggccgtgctcttcctgctcttcatcttctgcctcttcagcgtcttcatcagcgcctactacctgtatggctggaagaggggcctggagcccagcgcagatgcccctgagccagactgtggggaccccccacctgtggcccccagccggctgctgtag

SEQ ID NO: 281867 - DNA, 769 bp, Artificial Sequence
  derived and/or modified sequence
gtgatcgtgacctgtccattcccaccagtgcaggggtccatgagcccccaaaggtgcagtgagttgtaggcatttctgtgttttctttttctgaagaaagagtttgttggtttcatcagatcatcagaaggctgggtgtccctgtggagtgctgacggggccgtgtgcactgcgggcttgagaaatggtggcagcgtggtgcaaatagaaagtagcctggtggcagtgtagcatcctgggtcagggtgtggtcttggagacgggctgttggcttctgagctggcacctccacttaggagctgtgtgacattggccttagccccgtgggccccacggagtgagcggcatgcagcacccccgggcctgtccagtgtcctctggcctgctgccctgcacccccagaaggccctgacgccctggggcacttctgctctgcacaggaccacgcgggggtttgccatggtgacataaaggggcgcggaggaaggaaggagcgtgaccagcctgtggactgcgcccctggctgggaggaaggactgggggcccagatcctccactcccagtgccccacaagggcgtcgcttcctaagtctctgtgaatttgttggtcagtggacgattctcgtgtctcctcctgtgtggggccttggggtagccagggcaggccgggcctccggtggccaaggtctcggaggccaggatgcctgccctggcatgcctccggaggctgtgtcggcacgtgtccccgcaggctgtccttttcctgctg

SEQ ID NO: 281868 - DNA, 576 bp, Artificial Sequence
  derived and/or modified sequence
gttaaccctggcccgggccggagcccggaggcgcacgcacggcccgggggacccaggcgtcccgctcctcgccgggagcgccccttcccccgagccaggatgcctgccctggcatgcctccggaggctgtgtcggcacgtgtccccgcaggctgtccttttcctgctgttcatcttctgcctgttcagcgttttcatctcggcctactacctatatggctggaagcgaggcctggagccctcggcggatgcccccgagcctgactgcggggacccgccgcctgtggcccccagtcgcctgctgccactcaagcctgtgcaggcagccaccccttcccgcacagacccgttggtgctggtctttgtggagagcctctactcgcaactgggccaggaggtggtggccatcctggagtccagccgcttcaaataccgcacagagattgcgccgggcaagggtgacatgcccacgctcactgacaagggccgtggccgcttcgccctcatcatctatgagaacatcctcaagtatgtcaacctggacgcctggaaccgggagctgctggacaagtactgt

SEQ ID NO: 281869 - DNA, 777 bp, Artificial Sequence
  derived and/or modified sequence
gggagaatccgggtggaagtcgagaaatccagccccgatagcagcgctcggtcccgccccggcccccgccccggggcgctcaccgcacgcccgccggccgccccggcctccggagctcttctctggccggcacccacgcggcatcacgggatcgaaccccgctcccagcggccgcgattcggggagccttagccccgtgggccccacggagtgagcggcatgcagcacccccgggcctgtccagtgtcctctggcctgctgccctgcacccccagaaggccctgacgccctggggcacttctgctctgcacaggaccacgcgggggtttgccatggtgacataaaggggcgcggaggaaggaaggagcgtgaccagcctgtggactgcgcccctggctgggaggaaggactgggggcccagatcctccactcccagtgccccacaagggcgtcgcttcctaagtctctgtgaatttgttggtcagtggacgattctcgtgtctcctcctgtgtggggccttggggtagccagggcaggccgggcctccggtggccaaggtctcggaggccaggatgcctgccctggcatgcctccggaggctgtgtcggcacgtgtccccgcaggctgtccttttcctgctgttcatcttctgcctgttcagcgttttcatctcggcctactacctatatggctggaagcgaggcctggagccctcggcggatgcccccgagcctgactgcggggacccgccgcctgtggcccccagtcgcctgctg

SEQ ID NO: 281870 - DNA, 480 bp, Artificial Sequence
  derived and/or modified sequence
atgcccgccctggcctgcctgcggcggctgtgccggcacgtgagccctcaagcggttctttttctgctcttcatattttgtctcttttccgtgtttatcagtgcatactacctgtacgggtggaagaggggtctagaaccatcagctgacgcgccggaacctgactgtggggatccccctccggtcgctccatcccgccttctgccgcttaagcccgtgcaagcagcaacaccctcaaggactgacccacttgtgctggtgtttgttgagtccctctatagccaacttggacaggaagtcgtggctatcctcgagagttccaggtttaagtacagaactgagattgcccccggtaagggcgatatgccaacactcacggataaagggaggggtcggttcgcgttaattatctacgaaaacatcttgaagtatgtgaacttagatgcttggaatagggagctcctggacaagtattgctag

SEQ ID NO: 281871 - DNA, 207 bp, Artificial Sequence
  derived and/or modified sequence
atgcccgccctggcctgcctgcggcggctgtgccggcacgtgagccctcaggctgtcttgttcttactgttcatcttttgcctattcagtgtgttcatttcagcctactatctgtacggctggaaacgcggactggagcctagcgccgacgccccagaaccagattgcggtgatcctccacctgtggctccttcaagactgctctag

SEQ ID NO: 281872 - DNA, 480 bp, Artificial Sequence
  derived and/or modified sequence
atgcctgctctggcttgtctgcgtcgactttgtagacatgtgtcgccccaggcagttctgtttctgctcttcattttttgcttattctccgtctttattagcgcttactacctctacggttggaagcgaggcctggagccttccgctgatgctcccgaacctgactgcggggatcctccaccagtcgctccgagccgactgctgcctctcaagcctgtgcaagcagccaccccatctaggacagatcctctggttctcgtgtttgtcgagtccctgtatagccagctcggccaggaagtggtcgccatccttgaatcctctagattcaagtacaggaccgaaatagccccaggcaaaggcgacatgccgacgctgaccgacaagggtcgcggtaggtttgcgttgatcatctatgagaatatactgaaatatgtcaatctggatgcttggaacagagagctcctggacaagtactgttag

SEQ ID NO: 281873 - DNA, 207 bp, Artificial Sequence
  derived and/or modified sequence
atgccggctcttgcctgtttaaggaggctctgtaggcacgtgagtccacaagccgtcctgttcctgctgttcatcttttgcttgttctctgtgttcatcagcgcctactacctttacggttggaaacgcggactggagccaagtgcggacgccccagaacccgactgtggcgatccccctcctgtcgcaccgtcgaggctgctttag

SEQ ID NO: 281874 - DNA, 480 bp, Artificial Sequence
  derived and/or modified sequence
atgcccgccctggcctgcctgagaagactgtgcagacacgtgagcccccaggccgtgctgttcctgctgttcatcttctgcctgttcagcgtgttcatcagcgcctactacctgtacggctggaagagaggcctggagcccagcgccgacgcccccgagcccgactgcggcgaccccccccccgtggcccccagcagactgctgcccctgaagcccgtgcaggccgccacccccagcagaaccgaccccctggtgctggtgttcgtggagagcctgtacagccagctgggccaggaggtggtggccatcctggagagcagcagattcaagtacagaaccgagatcgcccccggcaagggcgacatgcccaccctgaccgacaagggcagaggcagattcgccctgatcatctacgagaacatcctgaagtacgtgaacctggacgcctggaacagagagctgctggacaagtactgctag

SEQ ID NO: 281875 - DNA, 207 bp, Artificial Sequence
  derived and/or modified sequence
atgcccgccctggcctgcctgagaagactgtgcagacacgtgagcccccaggccgtgctgttcctgctgttcatcttctgcctgttcagcgtgttcatcagcgcctactacctgtacggctggaagagaggcctggagcccagcgccgacgcccccgagcccgactgcggcgaccccccccccgtggcccccagcagactgctgtag

SEQ ID NO: 281876 - protein, 383 aa, Artificial Sequence
  derived and/or modified sequence
MDRTCEERPAEDGSDEEDPDSMEAPTRIRDTPEDIVLEAPASGLAFHPARDLLAAGDVDGDVFVFSYSCQEGETKELWSSGHHLKACRAVAFSEDGQKLITVSKDKAIHVLDVEQGQLERRVSKAHGAPINSLLLVDENVLATGDDTGGICLWDQRKEGPLMDMRQHEEYIADMALDPAKKLLLTASGDGCLGIFNIKRRRFELLSEPQSGDLTSVTLMKWGKKVACGSSEGTIYLFNWNGFGATSDRFALRAESIDCMVPVTESLLCTGSTDGVIRAVNILPNRVVGSVGQHTGEPVEELALSHCGRFLASSGHDQRLKFWDMAQLRAVVVDDYRRRKKKGGPLRALSSKTWSTDDFFAGLREEGEDSMAQEEKEETGDDSD

SEQ ID NO: 281877 - DNA, 1152 bp, Artificial Sequence
  derived and/or modified sequence
atggacagaacctgcgaggagagacccgccgaggacggcagcgacgaggaggaccccgacagcatggaggcccccaccagaatcagagacacccccgaggacatcgtgctggaggcccccgccagcggcctggccttccaccccgccagagacctgctggccgccggcgacgtggacggcgacgtgttcgtgttcagctacagctgccaggagggcgagaccaaggagctgtggagcagcggccaccacctgaaggcctgcagagccgtggccttcagcgaggacggccagaagctgatcaccgtgagcaaggacaaggccatccacgtgctggacgtggagcagggccagctggagagaagagtgagcaaggcccacggcgcccccatcaacagcctgctgctggtggacgagaacgtgctggccaccggcgacgacaccggcggcatctgcctgtgggaccagagaaaggagggccccctgatggacatgagacagcacgaggagtacatcgccgacatggccctggaccccgccaagaagctgctgctgaccgccagcggcgacggctgcctgggcatcttcaacatcaagagaagaagattcgagctgctgagcgagccccagagcggcgacctgaccagcgtgaccctgatgaagtggggcaagaaggtggcctgcggcagcagcgagggcaccatctacctgttcaactggaacggcttcggcgccaccagcgacagattcgccctgagagccgagagcatcgactgcatggtgcccgtgaccgagagcctgctgtgcaccggcagcaccgacggcgtgatcagagccgtgaacatcctgcccaacagagtggtgggcagcgtgggccagcacaccggcgagcccgtggaggagctggccctgagccactgcggcagattcctggccagcagcggccacgaccagagactgaagttctgggacatggcccagctgagagccgtggtggtggacgactacagaagaagaaagaagaagggcggccccctgagagccctgagcagcaagacctggagcaccgacgacttcttcgccggcctgagagaggagggcgaggacagcatggcccaggaggagaaggaggagaccggcgacgacagcgactag

SEQ ID NO: 281878 - DNA, 4080 bp, Artificial Sequence
  derived and/or modified sequence
aaacggggtcacagcaggacaaggaagtagccgatctcccagatgcggtctcttcgctccgctccacccgcaccagcagcggcccacccacctctcctgtaagaggaagaacgtcccggagacacttccggccccgccccccgaggcggaagcggagtgccaggctactcctcccgcagtgtgggtggttccgaggctgactaccctgcggcggcgcggctcgcagtccttctcagcatggaccgcacttgtgaggagaggcccgctgaggatgggagcgacgaggaggacccagactccatggaagccccaacccggatccgggacactccggaagacatcgtgctggaagctccggctagtgggctggcgttccatccggcccgtgacctactggctgcaggggacgtggacggggacgtgttcgtcttttcctactcttgccaagagggagaaaccaaggagctctggtcatcaggtcaccatctcaaggcctgccgagctgtggccttctctgaagatgggcagaagctcattactgtctccaaggacaaagccatccatgttctagatgtggagcagggccaactggaaagacgtgtttccaaggctcatggtgcccccatcaatagtcttctgctggtggatgagaatgttctggccactggggatgacacaggtggtatctgtctctgggaccagcggaaggagggccccttaatggatatgaggcaacatgaagagtacatcgcagacatggctctggatccagccaaaaagctgctgctgacagccagcggggatggctgccttggcatcttcaacattaagaggcgtcggtttgagctgctctcagaacctcagtctggggacctgacctctgtcactctcatgaaatgggggaagaaggtagcctgtggctccagtgaaggtaccatctacctcttcaattggaatggctttggggccacaagtgaccgctttgccctgagagctgaatctatcgactgcatggttccagtcaccgagagtctgctgtgtactggctccactgatggagtcatcagggctgtgaacatcctaccgaaccgagtggtgggcagtgtgggccagcacactggggagcctgtggaggagctggccctctcccactgtggccgcttcctggccagtagtggccatgaccagcgcctcaagttttgggacatggcccagctgcgagctgtggtggtggatgactaccgtcggcgcaaaaaaaagggaggaccactgcgggctctgagcagcaagacttggagcaccgatgacttcttcgcaggactgagggaagagggagaagactccatggctcaggaagaaaaggaggagactggggatgacagtgactgaaggaatgaattgaatcttgagacgggtcctcaccaggcaagagtcttgcttattgggctgcatccccagagaggatatgaattattttttgaaaagacagggttttgccatcgtccaggctggagtgcgctggcttgatcttggctcactgcagcctcaatgtccccaggctcagattgtccttccaccttagcctctggagcagctgggactacaggtgtgcactaccacaccaggccaatttttgttttttttttttggtagaaacgggtctgttttgcccaggctggtcttcaactcctggactcaaatgatccacctgcctctgcttcccaaagtgctgggattacaggcacgagccaccacacctggccaaaaaaatttatattttttgagacaaggtctcactctgtcacccaggctggagtacagtgggttgatcatggctcactgcatccttgacttcctgggctcaagtgatccacctcagcctgcctggtagctgagacttaacaggcatctgccaccatgcttgactaatttttgtgatttttttttggtagagaccaggggtttcactatgttgaccaagctggtcttggaactcctgggctcaagtgatcctcctgccttggcctcccaaaatgctgggattacaggcatgagccactgtgcctggctggatatgaaattttttttttttttttttttgagacagggtttcgctcttgttgccagggctggagtgcaatggcgtgatcttggctcactgcaacctccgcctcccgggttcaagcaattctcctgcctcagcctcccaagtagctgggattacaggtgtctgccaccatgccaggctaatttttgtattttcagtagagacggggtttctccatgctggccaggctggtctcgaactcctgacctcaggtgatccacccgcctcagcctcccaaagtgctgggattacaggcaaaagccaacacacccggcctggatatgaatttataataccctacagtgcaacacaagaagatgcactcaaagcactgatgtgaggaagtacttgccccgtagcagctattcactctaccagtgtaaacaaactctaagctagggcaagacagcacagacacaagtatatactaaccaggggtttaatataaatacaaccagcatagaaagacccaaaactatacagaaaccaaaaccagaatgccatgtggtggaggcaaagggcagaatttctgacccctttggctcagctgcccttccccacaaataaaaaccaacaaagaggacaaatcaggacaataaagaagattcatgctaagctgtggcagaggggggaaggtatgatcgggtgggggtgggacaaggaacggccatggaagatcactgggtcaggttggaccctgggctgggagcgggagggcaaggcccctcaccacaacttaacccaaacctaagctgcccccaggtgccataggtccctgtcccagcagggaggctgatgggcctgggcccatgcccctccccacctttgggggtcagaaagtggccacccaggcctgctgggatggggcctgacacaggctctgcatgcccattcagggtgcctgtggagaaagaatggagtcactgtttaaccatggtacctgcctcagccccagcagaccacaggaggttggccccagactcactgagtgcctgcagcagccgtacagacacagcatccttggccacctcatgcccatcccggccatctagggtcagcacaacccagatgaggccgctgaagggcaccggatgcccaggaatcaccacctggtaccagaagcggtgccagccagcaggtcctatgcccaaacacttggtgaggaacacagggctgcccagcttcattcgttggcacagcaactgcagggtagcccgagccccttggaaccctaacttgtcccttgccaaagccaactggctgccctctggctgtggggaccgcaagaagggacccacaagctgctggcgaagtcgctgcttcaggtctggcttgagccactccacagccacctgctctccacagaggtgtgactgccctgtaggaaaaatgcaaagacaagggcaggtctaaaccctgggcccaagcctccaggtggtgagccctttggagctacacagtcctgttatttgtagccttcccatttcctggtagtgtgaccatgggtaagaaaagacaatgaagccttcagcctccattatttgcaaagggagtataacacactgctaccttacaagtttccttggagaagtactggttaattgcaggctttgtctgcctcataaccatcataatggctaatctttactgggaaaacttgctgtaagtcagtcagtgtgctaagtaccgtacacccattatgttacttaattctcataacagtctgaggaaacagattctatagtagtaaaaagctcagttggattcccttgagcaaatcaatttctctaacagtttcctcatagcttgagggtcctgtgcctattttgcggtgtgggggtgggggaaggttgagaattaagtcaggaggtaatgctcgggaagtgtcacaaatttaggtaagcggtggtggtagcaccattggaagttttaaaaatctgagatcaaatagtaaaaggttgcaaattctggca

SEQ ID NO: 281879 - DNA, 1152 bp, Artificial Sequence
  derived and/or modified sequence
atggaccgcacatgcgaggagagaccggctgaagatggcagtgacgaagaagaccccgactccatggaggcaccgaccagaatccgggacacccctgaggacatcgtgctcgaggctcccgcttccgggctggcattccaccccgcaagagatctcttggcggcgggagatgtggatggcgacgtcttcgtgttttcttactcttgccaagagggagagaccaaagaactctggtcctcaggacatcacttgaaagcctgtagggcggtagccttctccgaggacggccagaaattgatcactgtgtctaaggacaaagccatccatgtgttagacgtagagcaggggcagttggagagacgagtatcaaaggcccacggcgccccaatcaattcccttctgttggttgacgagaacgttcttgccacaggggacgatacaggcggcatttgtctgtgggatcagcgaaaagagggacccctgatggatatgcgccaacatgaggagtacattgccgacatggcactggaccctgccaaaaagcttttgttaacggcaagtggggatggctgtctggggatattcaacatcaaaagaagaagattcgagctattgagtgaaccccaatccggcgacctgacatcagtgacactgatgaagtgggggaagaaagtagcgtgcggatccagtgagggaactatatacctcttcaactggaatggctttggagctacaagtgacaggtttgcattgcgcgcagagtccatcgattgcatggtccctgtgactgaatccttactctgtactggctccaccgatggagtcataagagccgtgaatattctgcctaaccgggtggtgggttcagtaggacagcacactggcgaacctgtcgaggaactcgcactgtctcattgcggtcgctttttagccagttcagggcatgaccaacgtctcaagttttgggatatggcccagctcagggcggtagtcgtggacgactacagaagacggaaaaagaaaggtgggcccctcagggctctgtccagcaaaacctggagcacagacgacttcttcgctgggctgcgggaagagggggaggactcaatggcacaggaggagaaagaagagacaggggacgatagcgattag

SEQ ID NO: 281880 - DNA, 1152 bp, Artificial Sequence
  derived and/or modified sequence
atggacaggacctgtgaggagaggcctgcagaagatggcagtgatgaagaagatcctgacagcatggaggcccccacccgcatccgggacaccccagaagatattgtgctggaggccccagccagcggcctggccttccacccagcccgggacctgctggccgctggagatgtggatggagatgtgtttgtgttctcctacagctgccaggagggggagaccaaggagctgtggagcagcggccaccacctgaaggcctgcagagctgtggccttctctgaagatggccagaagctgatcaccgtgtccaaggacaaggccatccacgtgctggatgtggagcagggccagctggagcggcgggtgtccaaggcccacggggcccccatcaacagcctgctgctggtggatgaaaatgtgctggccactggagatgacacaggaggcatctgcctgtgggaccagaggaaggagggccccctgatggacatgaggcagcacgaggagtacatcgctgacatggccctggaccctgccaagaagctgctgctgacagccagcggagatggctgcctgggcatcttcaacatcaagagaagaagatttgagctgctgtctgagccccagagcggggacctgacctctgtgaccctgatgaagtggggcaagaaggtggcctgtggcagcagcgagggcaccatctacctgttcaactggaatggatttggagccaccagtgacagatttgccctgcgggcagagagcattgactgcatggtgcctgtgacagagagcctgctgtgcaccggcagcacagatggagtcatccgggctgtgaacatcctgcccaacagagtggtgggctctgtgggccagcacactggagagcctgtggaggagctggccctgagccactgcggccgcttcctggccagcagcggccatgaccagaggctgaagttctgggacatggcccagctgcgggctgtggtggtggatgactacagaagaaggaagaagaagggcggccccctgcgggccctgagcagcaagacctggagcacagatgacttctttgctggcctgcgggaggagggagaagattccatggcccaggaggagaaggaggagactggagatgacagcgactag

SEQ ID NO: 281881 - DNA, 1152 bp, Artificial Sequence
  derived and/or modified sequence
atggaccggacctgcgaggagcggcccgccgaggacggcagcgacgaagaagacccagactccatggaagcccctacccgcatccgggatactccagaagacatcgtgttggaggctcccgcaagcggactcgccttccacccagccagagacttgctcgcagcgggggatgtcgacggagacgtgttcgttttctcgtactcctgccaggaaggtgaaactaaagagctgtggtccagcggccaccatctaaaggcttgcagggccgtagctttttcagaggatggacagaagctgattactgtgtcaaaagataaggccatccatgtgctggacgtggagcagggtcagctagagagacgagtgagtaaggctcacggggctcctatcaattctctcctgttggtcgacgagaatgtactcgccaccggggatgatactggaggaatctgtctgtgggaccagcgaaaagaaggacctctgatggacatgcgccagcacgaggaatatattgctgacatggccctggatcccgctaaaaaattgctcctgaccgcctcgggagacggttgtttggggattttcaatatcaaacgcagacggtttgagcttctgagcgagcctcagagcggagatctgactagcgtgacgttaatgaaatggggaaagaaggtcgcttgcggcagcagcgaagggactatctatctgtttaactggaatggctttggggccacatccgaccgtttcgccctcagggcagagtccattgactgtatggttccagttaccgagagtctcctttgcacaggctcaactgacggagtgattcgcgcagtgaatatcctccctaatagagtggtggggtccgtgggccagcacaccggtgagccagtcgaggagctggctctgtctcattgcgggaggttcctcgcaagctccggccacgatcaacgcctgaaattttgggacatggcccagcttagagccgtggtcgtggatgactacagacgcagaaagaaaaaaggcggccctcttcgagcactgtcctcaaagacttggtctacagacgatttttttgccggcctgagagaggagggagaggactctatggctcaggaggagaaggaagagacgggtgacgattccgattag

SEQ ID NO: 281882 - DNA, 1152 bp, Artificial Sequence
  derived and/or modified sequence
atggacagaacttgtgaagagaggcctgctgaagacgggtccgacgaggaagacccagactccatggaggcgcctactaggattagggacacccccgaggacattgtgctggaggctcccgcatcggggttagctttccatccagcacgcgatctgttggccgcaggcgacgtcgatggggacgtctttgtcttctcttactcgtgccaggaaggcgagacgaaggaactgtggagctcaggccaccacctcaaggcctgccgagccgtggcattttccgaggacggccagaagttaattaccgtctcaaaggataaagccatccatgtgttggatgtggaacaggggcagctcgagagacgcgtcagcaaagcacacggagcgccaattaactcactgctcctcgtggacgaaaatgttctggctacaggggatgacactggtggaatctgcttgtgggaccaaaggaaggaagggccactgatggatatgcggcagcacgaggaatacatagccgatatggctctggaccctgccaagaagctcctgttaacggctagcggggacggatgtttggggattttcaatatcaagcgacggagatttgagcttttatccgaacctcagtccggagacctgactagtgtgacactgatgaaatggggcaaaaaagtggcctgtggtagctctgagggcactatctatctgtttaactggaacggttttggcgctactagcgacaggttcgccctccgagccgaatctattgactgtatggtccccgtcaccgagtctctcctgtgcactggatccactgacggtgtgatcagggccgtgaatatcctaccgaaccgtgtcgtggggagcgtggggcagcacacaggtgagcccgtcgaagagctggctctgtcacactgtggaaggttcctcgcatccagcgggcatgaccagagactgaagttctgggacatggctcaattgagagccgtggtagtggatgattaccgcaggcgcaagaagaaggggggaccactcagggcccttagcagtaagacatggtccaccgatgacttcttcgcaggactgagggaagaaggggaggattccatggcgcaggaggagaaggaggagacgggagacgactcggactag

SEQ ID NO: 281883 - protein, 428 aa, Artificial Sequence
  derived and/or modified sequence
MALSGNCSRYYPREQGSAVPNSFPEVVELNVGGQVYFTRHSTLISIPHSLLWKMFSPKRDTANDLAKDSKGRFFIDRDGFLFRYILDYLRDRQVVLPDHFPEKGRLKREAEYFQLPDLVKLLTPDEIKQSPDEFCHSDFEDASQGSDTRICPPSSLLPADRKWGFITVGYRGSCTLGREGQADAKFRRVPRILVCGRISLAKEVFGETLNESRDPDRAPERYTSRFYLKFKHLERAFDMLSECGFHMVACNSSVTASFINQYTDDKIWSSYTEYVFYREPSRWSPSHCDCCCKNGKGDKEGESGTSCNDLSTSSCDSQSEASSPQETVICGPVTRQTNIQTLDRPIKKGPVQLIQQSEMRRKSDLLRTLTSGSRESNMSSKKKAVKEKLSIEEELEKCIQDFLKIKIPDRFPERKHPWQSELLRKYHL

SEQ ID NO: 281884 - DNA, 1287 bp, Artificial Sequence
  derived and/or modified sequence
atggccttatcggggaactgttcacgttactacccacgggagcagggctctgccgttccaaatagtttccccgaagtggtagaactgaatgttggcggccaggtctacttcactagacacagcacattaatctcaatccctcattcactcctgtggaaaatgttctccccgaagagagacaccgctaatgatttagccaaagactcaaaaggtaggttttttatagatcgtgatggcttccttttccgctatatcctcgattatttacgagaccgacaggtcgtgctgccggatcattttcccgagaaaggtcgcttgaagcgagaggctgagtacttccagcttccagacctggtcaagctgctgactcctgatgagataaaacagtcccccgatgagttttgccatagcgacttcgaggacgcatctcagggatcagataccaggatctgccctccatcttcactgttgccagccgatcggaaatggggattcattaccgtgggatacaggggctcttgcaccctagggagggagggacaggccgacgcaaaattcagacgcgtaccgcggatcctggtatgtggccgaatttctctggctaaagaagtgtttggcgagacactcaacgaatctagagacccagaccgcgctcccgagaggtatacctctcggttctacctgaagtttaaacaccttgaaagagcctttgatatgctgtccgagtgcggctttcatatggtggcatgcaacagtagtgtcactgcttcatttataaatcaatacactgacgataagatctggtcgtcttatacagaatacgttttctaccgggagcctagcaggtggtccccttctcactgcgactgctgttgtaaaaacggtaaaggggacaaagagggggaatcaggcaccagctgcaatgacctctccacttcttcatgtgactcccagtctgaggcctccagcccccaagagacagtgatttgcggacccgttaccaggcagactaacatccagacgctggatcgcccgatcaagaaaggcccggttcagttgattcaacagagtgagatgagacgaaagtcggacctcctgcgaacactgaccagcgggagccgggagtctaacatgagcagtaaaaagaaagccgtcaaggaaaaacttagcattgaagaggaactggagaaatgcattcaggactttctgaagatcaagattcctgatcgattccccgagaggaaacatccctggcaatcagagctgctccgaaaatatcatctgtag

SEQ ID NO: 281885 - DNA, 1287 bp, Artificial Sequence
  derived and/or modified sequence
atggcactcagtggaaactgctcaagatattatcccagagaacaggggtcagcagtgcccaacagcttcccggaggtagtcgagctaaacgttggagggcaagtctacttcactcgacactcgacccttatttccattcctcacagcttgctttggaagatgttttcgcccaagcgggatacagccaatgatttagccaaagacagtaagggccggttcttcattgatagagatggctttctgttccggtatatcctggattatctgcgcgaccgccaagtcgtactgcctgatcacttccccgagaaagggcgccttaagcgggaggctgagtattttcagctcccggatctggtaaagctcctgacgcccgacgaaattaaacagagcccggacgaattttgtcacagcgacttcgaagacgcctcccagggctctgatacaaggatctgtccaccctcttctcttctgcctgcagaccgtaagtgggggttcatcactgtgggctacaggggctcttgcaccctggggcgcgagggccaagctgatgcaaaattcagaagagttccacgcatcctggtctgcgggcgcatatcgttggccaaggaggtattcggagaaactctgaacgagtcccgtgaccctgaccgtgcccctgagagatatacaagcaggttttacttaaaattcaaacaccttgaacgcgcctttgatatgctatcagaatgcggcttccacatggtggcgtgtaattctagcgtgaccgcttcattcatcaaccaatacactgatgataagatctggtcaagctacactgaatatgtattctaccgtgaaccctcccggtggagcccatctcattgtgattgttgctgcaagaacggcaaaggcgacaaagagggcgaatctgggacctcatgcaatgatctgtccacgagctcctgcgatagtcagtctgaggcttccagtccccaggagacagtgatctgcggccccgtcacccgtcagaccaatattcagaccttggaccggccaattaagaagggccctgtacagcttattcagcagtccgagatgcgaaggaagtcagatctgttgcgtaccctcacatcaggctccagggagtcgaacatgagctccaaaaagaaagcagtgaaagagaaactgtctattgaggaagaacttgagaagtgtatacaggacttccttaagattaaaatacccgacagattccccgaacgcaaacacccatggcagagcgagctgcttcgcaagtaccatctgtag

SEQ ID NO: 281886 - DNA, 1287 bp, Artificial Sequence
  derived and/or modified sequence
atggccctgagcggcaactgcagccgctactacccccgggagcagggcagcgctgtgcccaacagcttccctgaggtggtggagctgaatgtgggcggccaggtgtacttcaccaggcacagcaccctcatcagcatcccccacagcctgctgtggaagatgttcagccccaagagggacacagccaatgacctggccaaggacagcaagggccgcttcttcatcgacagagatggcttcctgttccgctacatcctggactacctgcgggaccggcaggtggtgctgcctgaccacttccctgagaagggccgcctgaagcgggaggccgagtacttccagctgcctgacctggtgaagctgctgaccccagatgagatcaagcagagcccagatgagttctgccacagcgactttgaagatgccagccagggcagtgacacccgcatctgcccccccagcagcctgctgcctgctgacaggaagtggggcttcatcaccgtgggctaccggggcagctgcaccctgggccgggagggccaggctgatgccaagttcagaagagtgccccgcatcctggtgtgtggccgcatcagcctggccaaggaggtgtttggagagaccctgaatgaaagccgggaccctgaccgggcccctgagcgctacaccagccgcttctacctgaagttcaagcacctggagcgggcctttgacatgctgtctgaatgtggcttccacatggtggcctgcaacagctctgtgacagccagcttcatcaaccagtacacagatgacaagatctggagcagctacacagaatatgtgttctaccgggagcccagccgctggagccccagccactgtgactgctgctgcaagaatggcaagggggacaaggagggggagagcggcaccagctgcaatgacctgagcaccagcagctgtgacagccagagcgaggccagcagcccccaggagaccgtcatctgtggccctgtgacccggcagaccaacatccagaccctggaccggcccatcaagaagggccctgtgcagctgatccagcagagcgagatgaggaggaagagtgacctgctgcggaccctgaccagcggcagccgggagagcaacatgagcagcaagaagaaggctgtgaaggagaagctgagcattgaggaggagctggagaagtgcatccaggacttcctgaagatcaagatcccagaccgcttccctgagaggaagcacccctggcagagcgagctgctgaggaagtaccacctgtag

SEQ ID NO: 281887 - DNA, 1287 bp, Artificial Sequence
  derived and/or modified sequence
atggccctgagcggcaactgcagccggtactacccccgggagcagggatctgcggtgcccaatagcttccctgaggtagtggaactcaatgtgggtgggcaggtttacttcactcgccattctaccctgatctctattcctcactccctcctgtggaaaatgttctctcccaagagggacactgcgaatgatctggcaaaggacagcaaaggcagattctttatagacagggacggctttttatttcgttacattctggattatctgcgggataggcaggttgtcctccctgaccactttcctgaaaaaggacgtctaaaacgcgaggcggagtatttccagctcccagaccttgtgaagttgctcacccccgacgagatcaagcaatccccagacgaattttgtcactccgactttgaggatgcctctcaggggagtgacacccgcatctgccctccgtccagtctgcttccagctgaccgtaaatggggatttattacggtggggtatagaggctcttgcacactcggccgggagggacaagcggacgcaaaatttaggcgtgtgcctcgcatactcgtctgtgggcggatttcactggcaaaggaggtgttcggagagaccctgaatgaaagtcgcgatccagacagggcacccgaacgatacacgagtaggttttatctcaaatttaagcatcttgagagagcattcgacatgttgagcgaatgtggctttcatatggtcgcatgcaactcctcagtgacagccagctttatcaaccaatacactgatgacaagatctggagttcatacaccgagtacgtcttttacagagagcctagcagatggtctcctagccattgtgactgctgttgcaaaaacggcaagggggataaggagggcgagagtggcacgagctgtaacgacttgtccaccagttcttgcgatagtcagagcgaggctagctcgcctcaggagacagtgatttgtggaccggtgacaagacagaccaacatccaaaccctggatcggcccatcaaaaaaggtcccgtccaactgatacagcagtctgagatgagaaggaagagcgacttgttgcggaccctgacgtccggaagccgagagtctaatatgtcatcaaagaaaaaggccgtgaaagaaaagctgtcaattgaggaggagttagagaaatgcattcaagactttttgaaaatcaagatcccagataggttcccggaaaggaagcacccttggcagagcgaactgctacggaagtaccacctgtag

SEQ ID NO: 281888 - DNA, 1287 bp, Artificial Sequence
  derived and/or modified sequence
atggccctgagcggcaactgcagccggtactacccccgggagcagggatcggctgttcctaactcattccccgaggtcgttgaactgaacgtgggaggccaggtgtattttacaaggcatagcacactgatttccatccctcattctctactgtggaagatgtttagccccaaacgggacactgccaacgatctggccaaagactcaaagggccgcttctttattgatcgcgacggatttctgtttaggtacatcctggattacctcagggaccgacaggtagtgctgcccgatcactttccggaaaaaggcaggctgaaacgcgaggcagaatattttcagttgccggacctggtcaagttattgacccctgacgaaattaagcagtcccctgacgagttttgtcactcagatttcgaggacgcgagccaggggagcgatacaaggatttgtccaccaagtagcctgctccccgccgatcgaaagtgggggttcatcaccgtaggatatagaggtagttgcaccctgggtcgagagggtcaggcagacgccaaattccgcagagttcccagaattcttgtatgtggtcggatctccttggccaaggaggtctttggggagacgttaaacgagtcacgggacccagaccgggcccctgaacgctacactagtcggttctatctgaagtttaaacacctggagagggcctttgacatgctctcagaatgtggatttcatatggtagcctgtaattcttctgtgactgcatcattcattaatcagtatactgacgataaaatttggagcagttacactgagtacgtgttttacagggagccctccaggtggtcaccttcccactgcgactgctgctgcaagaacggaaagggggacaaggagggcgagagcggaacctcttgtaacgatctgtctaccagctcttgtgatagtcagtctgaggcttcaagtccgcaggagaccgttatatgcggcccggtgacaaggcagaccaacatacagacgttggaccgccccatcaagaaggggccggttcagctgattcagcagagcgagatgcgtaggaaatccgatttactgagaactctgaccagcgggtcccgcgaaagtaacatgtcatctaagaagaaagccgtgaaagaaaagctgtctatcgaggaggagctggaaaagtgcatccaagattttttgaagattaagatacccgatcggttccccgaacggaaacacccatggcaatccgaactgctgaggaaataccatctgtag

SEQ ID NO: 281889 - DNA, 5645 bp, Artificial Sequence
  derived and/or modified sequence
ccgaggaggacgtgactcggagctgcctccgctttctccaagccatattcctttaagatgatgtaatagtcatttccctggatggtttcttgcctgcactgctgaaacaacagcatccgaactgcactgggaactgtggaaccacccagctccgccgccagagaagccggagccccgggccccccgccggcatctctgcgctgcgttggcctctggctcgcaccggctcccacctggctgggaacatgggagtccgtttgcccttgccggcaggtggggtggctacctgggaccctagcagggcacatctctccatctttctgcttctgggctttctgaaaagcttctaagtcctggtacctcttgcaactctcttctaaggatcctttccaaagatttctttttccatttttcttttcccctggggaagctttggttgaatattttctctgctttacttcttcaacccaacctcctctcatcagggcttaactttttttgcgacttgttttaacttaagatacggaatgaacacatatgtacctacatacatacataaatacaaataggcatttatataaatgcatatatataatagttattttccaagagcacacctctctggcacttttcattgatacctcggtcgtttacctgtttgggatttgacaagatccagactcagtttggctgtggattttgattgctttacaaatggttattattatttttttcacaagaactgggtctccagcactcactaagacggacatctgagtaactggggaattggcctgccttgcatgtgagcttgatggaagattggatatagacgagttgattatattttatgaagtagcagctcactaccatccaccatccagggtttaaactactttttcagcatcacttcacctgtggactcttatacattttgatttcttgggggaaaaatactgggataagaggaggtcattttttaataagttagcatccttttccctttcttacaagttgatccaaaggataaggctgtgactccattggattgcacctttaaatcaaaatagcagcagcagaagaaagggacaatggctctgagtggaaactgtagtcgttattatcctcgagaacaagggtccgcagttcccaactccttccctgaggtggtagagctgaatgtcgggggtcaagtttattttactcgccattccacattgataagcatccctcattccctcctgtggaaaatgttttccccaaagagagacacggctaatgatctagccaaggactccaagggaaggtttttcattgacagagatggattcttgttccgttatattctggactatctcagggacaggcaggtggtcctgcctgatcactttccagaaaaaggaagactgaaaagggaagctgaatacttccagctcccagacttggtcaaactcctgacccccgatgaaatcaagcaaagcccagatgaattctgccacagtgactttgaagatgcctcccaaggaagcgacacaagaatctgccccccttcctccctgctccctgccgaccgcaagtggggtttcattactgtgggttacagaggatcctgcaccttgggcagagagggacaggcagatgccaagtttcggagagttccccggattttggtttgtggaaggatttccttggcaaaagaagtctttggagaaactttgaatgaaagcagagaccctgatcgagccccagaaagatacacctccagattttatctcaaattcaagcacctggaaagggcttttgatatgttgtcagagtgtggattccacatggtggcctgtaactcatcggtgacagcatctttcatcaaccaatatacagatgacaagatctggtcaagctacactgaatatgtcttctaccgtgagccttccagatggtcaccctcacactgcgattgctgctgcaagaatggcaaaggtgacaaagaaggggagagcggcacgtcttgcaatgacctctccacatctagctgcgacagccagtctgaggccagctctccccaggagacggtcatctgtggtcccgtgacacgccagaccaacatccagactctggaccgtcccatcaagaagggccctgtccagctgatccaacagtcagagatgcggcggaaaagcgacttactccggactctgacttcaggctccagggaatcgaacatgagcagcaaaaaaaaagctgttaaagaaaagctctcaattgaggaggagctggagaaatgtatccaggatttcctaaaaatcaaaattccagatcggtttcctgagagaaaacatccttggcaatctgaacttttaaggaagtatcatctataagggagggctgggggcgggaaaagaaaaaaaaaagtcattttgaaattaacctcctaaaaggaattcatattttaaaggaaaaaaatacaactaatgatgcacatttcttagaacacaatagtccattgatatactactgcctactttacctagttcaccttaacatgtaaatccacagggtagatttctttctagatgtggaagtacaagaaaatcttttttagttatttgtttgtttacttcgtcccatgtgctaactatcttatatataatgagagccagctacgtaaaagtagctgagaggccttgggagtcatttatcccaaactgggttttttctctcatccttctacctccctcctttgaatgagggtatggtagaaaaagatctggcccaatggcataagtttggaatttttaattttggtttttccttttgtttatggggttggggggaatggcagatttatatgacttttcactcaaatctatatgtgccagtttatattgactccgtatgcatgagtatttgtgcaacacaagcacaactaagtatgtatatacacatgacgcacacgatgccagggcctagacctcccaagggctgtgctcctgctcccagcagccctctcttagaatatttcagatggatgagcttctgactctttcttaaaattcttttgggaagatttcccagcctttcttcacaacactttctaacatcaaatgactctcatcatcaacaaattgtattccttattgtgaaattaataccctcaggctccattttactgctttgctctttgtctgcattaagagaggatgaggagagctggtcaaacattccttgtgttaaaaaaatcaaacattcatatccacaaaattttctgctaaatgactccacactcagccttctctaccctgaactgaattatcacccttttctccatgttttcagagttcttactgcccacagtttaatggtgtggcctttccacataatccacattaagttctgtgttcctgtgttgttgtggaactaaggacaacacacagtacttgaataagggtccggccttttgtttgttttagagaaagttgtattccacacacaacctaataatttcttataaaaattttaaactacaaagctacatttttacttgcttgtagccgtttttgtttgcctttgggattcgggctttggctgtgcccatgctaggatttagctgtgtcatttttatgatgtctgtaacaacccaacaaggtaactgaagctccagagttaaggtttcagatttctaaatgaaactatctttttcaattacatcctgacttgtatagacacagccaaaaagaaactgttaatagccatccgtccatgtaactctgtattttactaaggtaccaatagctctttcatagacttgtgctacaagaaggttaaaagaccagttttattttcagcattcctcatgcatttcagtggtaaccaaaaaataatttgtcaattaatagttgtgtgccaagcactcctaatttgttttattgcgtgtgtgtgcatgtgtgtatgtgtatcacaggtaataaaggcaattggatgatatctgtaggaggaaaacaatgactaatttcttccttttgaaatctttcattgatgcacatttattatgtaagatgttctgtcttgatttctgttcttagtgatgattagtatatgaatatctttctgaatttttgtaattctcgccttcacactaggatgacagactcagctaatgtttccttgtcctgaaggtttgaatggagttgaaagttttacataagtgaaaaagaaagtttatcttgggagttgagttgtcaagagaattataatttatgaatttaagtggtattcttttctgtattaatatattagcagatatttggtcttaactacaacatagctttgtttgtaaacttaccagtatgtcttgattcttttcaatgtttcttgatagcacatggcaataccatcatcctaataacagaagatcttgcaaagaatcacagagcttaatgggtcaagaagttgaatttggggaaaatatcctgaaactcactttggtcaaatgattattgtgttgtcactggaagtactgtcaaagactttgggggtctaactaaaatggccaaagttccaacttccttaaatttcagacctgactgtaatggcctcaagatagagagatacccttataagagtaaagaattaagatgatagtcaacccaatatttctactacattctttaaacaggaaattaaacactgcaaaaggagtgttcgtggcagtgttcctctgacccctgacctgtcatgagttttctctgctctgacattccttatacatccagtgaacaaagctggaatagaaaacctgtttaaaaccatcacaacagcaatatttttattctgggccacctctcgactggcactcatcccatggtaaaatattcaagtaactaagacaacagcatggcatttatttgtgtgagtgtttatatagaaatgaacatagacctggccagtaaaaggctctgaggaggcttaaagtacctagtttgagtggagttatcaagtgaggtccaggtagcctgcaacactggaaatgagttctgggtaagtgagttataagagtacatgctctagtaactctggtagtcactgtgactcgggcatgtttccctgaagttaaaatagtttttagaactttttgtttaattctgaagaaaacaatatatatggtttacttctcgaacattggttatgacaagggccataaattgctaatataaagaagttagtagtattgagtggatacaatgaatggggaatcacatgtgtagagccccaacttagattgccttctgggaaatcccgcgatactaaaatccagtgagctttgggagatcattccctaaaggtatgtgggttgtctgaagtcagaaacatatttacaaagtccttctacccactatcaaaaatgaactgatctgcattcagcaggaaaaggggaagacaggaatgtaaaactactagatcatatggtattgtgattttctttcccctgctaggaaaaaattgcactgaaatgctgacaaaaaataatgaaatgaagtggcttccaaaatatgcactgatgttatcctttgtatttataggcacagttatcttactgaaaatgcatgcatggtgaattaaaataaaagggggaacaatgcacaaat

SEQ ID NO: 281890 - DNA, 2313 bp, Artificial Sequence
  derived and/or modified sequence
agcaattgctgcttactcgtaggtaggaggaggagtttctcagacctaggtgatggaggaagactgggaggcgctaaaatgagacagacggagtcccctctcctgtccacaaactacaatgcctacaatgcctcggtgtcagcatttactgtgattcaagcactgtgctaaagtgtttttcatatgtcatgaaaagttgtgccagaaaattatggtttgaacatgggcagttttctcctaccgtcagctatatccacaagcatcacatgaagtggagatctggcagctctgtgtatttcagtcaagttccacaatgaaacctgacaataatggtaaaaaccaatacggacatctgagtaactggggaattggcctgccttgcatgtgagcttgatggaagattggatatagacgagttgattatattttatgaagtagcagctcactaccatccaccatccagggtttaaactactttttcagcatcacttcacctgtggactcttatacattttgatttcttgggggaaaaatactgggataagaggaggtcattttttaataagttagcatccttttccctttcttacaagttgatccaaaggataaggctgtgactccattggattgcacctttaaatcaaaatagcagcagcagaagaaagggacaatggctctgagtggaaactgtagtcgttattatcctcgagaacaagggtccgcagttcccaactccttccctgaggtggtagagctgaatgtcgggggtcaagtttattttactcgccattccacattgataagcatccctcattccctcctgtggaaaatgttttccccaaagagagacacggctaatgatctagccaaggactccaagggaaggtttttcattgacagagatggattcttgttccgttatattctggactatctcagggacaggcaggtggtcctgcctgatcactttccagaaaaaggaagactgaaaagggaagctgaatacttccagctcccagacttggtcaaactcctgacccccgatgaaatcaagcaaagcccagatgaattctgccacagtgactttgaagatgcctcccaaggaagcgacacaagaatctgccccccttcctccctgctccctgccgaccgcaagtggggtttcattactgtgggttacagaggatcctgcaccttgggcagagagggacaggcagatgccaagtttcggagagttccccggattttggtttgtggaaggatttccttggcaaaagaagtctttggagaaactttgaatgaaagcagagaccctgatcgagccccagaaagatacacctccagattttatctcaaattcaagcacctggaaagggcttttgatatgttgtcagagtgtggattccacatggtggcctgtaactcatcggtgacagcatctttcatcaaccaatatacagatgacaagatctggtcaagctacactgaatatgtcttctaccgtgagccttccagatggtcaccctcacactgcgattgctgctgcaagaatggcaaaggtgacaaagaaggggagagcggcacgtcttgcaatgacctctccacatctagctgcgacagccagtctgaggccagctctccccaggagacggtcatctgtggtcccgtgacacgccagaccaacatccagactctggaccgtcccatcaagaagggccctgtccagctgatccaacagtcagagatgcggcggaaaagcgacttactccggactctgacttcaggctccagggaatcgaacatgagcagcaaaaaaaaagctgttaaagaaaagctctcaattgaggaggagctggagaaatgtatccaggatttcctaaaaatcaaaattccagatcggtttcctgagagaaaacatccttggcaatctgaacttttaaggaagtatcatctataagggagggctgggggcgggaaaagaaaaaaaaaagtcattttgaaattaacctcctaaaaggaattcatattttaaaggaaaaaaatacaactaatgatgcacatttcttagaacacaatagtccattgatatactactgcctactttacctagttcaccttaacatgtaaatccacagggtagatttctttctagatgtggaagtacaagaaaatcttttttagttatttgtttgtttacttcgtcccatgtgctaactatcttatatataatgagagccagctacgtaaaagtagctgagaggccttgggagtcatttatcccaaactgggttttttctctcatccttctacctc

SEQ ID NO: 281891 - DNA, 1287 bp, Artificial Sequence
  derived and/or modified sequence
atggcactcagtggaaactgcagccgatactacccccgagagcaagggagcgcggtcccaaacagctttccagaggtcgtagaattgaacgtggggggtcaggtctacttcacccggcactcaacacttatttctattccgcactccttgctctggaagatgtttagccccaagcgagacaccgccaatgatttggccaaagatagcaaaggtagattcttcatagatcgagatggttttcttttcagatatatcttggactacctgcgcgacaggcaagtggtgctccccgaccatttcccagagaaaggaaggctgaagcgagaagctgaatacttccaactgccagacctggtcaaactgcttacacccgacgaaataaagcaaagtcccgatgagttctgccattcagatttcgaggatgccagccagggaagtgatacgagaatttgtccgccaagttctctgttacctgctgaccgcaagtggggctttatcactgttggctacagaggtagttgcacactgggaagggaaggacaggctgacgccaagttcagacgggtgcctcggatcctagtctgtggacggatttctctggctaaagaagtattcggcgaaacacttaatgagtccagagatcctgatcgggcacccgagaggtacacaagtaggttttacctaaaattcaaacaccttgagagagctttcgatatgctctctgagtgtgggtttcacatggtggcgtgcaactctagtgtgaccgccagttttataaatcagtacactgacgataagatctggagttcttatacagagtacgtgttctatagagagcccagccgctggtcacctagccattgtgactgctgctgcaaaaatggcaagggggataaagagggagaaagcggaaccagctgtaatgatctatcaaccagttcttgcgactcccaatcagaggcaagttccccccaggagaccgtcatttgtggaccagtcacgaggcagacaaatatccagacattggaccgaccaatcaagaaaggcccagtgcaattgatacaacagtcagaaatgagacgcaagtccgacttgctgaggaccttgaccagcggttcccgggagtctaacatgtcatcaaagaagaaagccgtcaaggaaaagctctctattgaggaggagttggaaaagtgcattcaggactttctaaagattaaaatcccagacagatttcccgagaggaaacacccttggcagagtgagctcctgagaaaatatcacctctag

SEQ ID NO: 281892 - DNA, 1287 bp, Artificial Sequence
  derived and/or modified sequence
atggccctctccggaaactgcagccgttactaccccagggagcagggttcagctgttcccaacagcttccccgaggtcgtggaattgaatgtaggcggacaggtttacttcacacgtcacagtactttgatatcaattcctcacagtcttctctggaaaatgttttcccctaaacgggacacggcaaatgacttagctaaggattctaaaggcaggtttttcattgacagagacgggtttctgttccgttatatcttggattaccttagggaccgacaggtggtcctccctgaccactttcctgagaaggggaggctaaaaagagaagccgagtactttcagctcccagatctggtgaagctgcttactcccgacgaaatcaaacagtccccagacgagttttgtcactccgacttcgaagatgcatcgcaggggagcgacacccggatttgcccgcctagtagcttgctgcctgccgatcgaaagtggggatttatcaccgtggggtacaggggctcatgcaccctgggaagagagggccaagccgatgcgaaatttcgtagggtgccccgaatcctggtgtgcgggaggatttccctcgccaaagaagtgtttggagaaacacttaatgagagccgagaccctgaccgagcccctgaaaggtacacatcccgcttttatttaaagttcaagcacctcgagcgagccttcgacatgctttctgagtgcgggtttcacatggttgcgtgtaacagctccgtgaccgcttcgttcattaaccagtatacagacgacaaaatttggtctagttatactgaatatgtgttctaccgcgaacccagtcgatggtccccttctcactgtgattgttgctgtaagaacgggaaaggagataaggaaggcgaatctggcacttcttgcaacgatctatcaacttcctcttgtgactcacagtctgaagcgtcctctccccaagaaacagtgatttgcggccctgtaactcgccagactaatatccagactctcgatcgccctattaagaaaggacctgtccaactcatccagcagagtgaaatgagaaggaagagtgatctgttgcgaactttaacaagcggctcccgagagagcaatatgagctcaaaaaaaaaggctgtcaaggaaaaattgtccatcgaggaggaactggaaaagtgcattcaagatttcctgaaaattaagatccccgaccgctttcccgaacggaagcatccctggcagtctgaacttttgcgcaagtatcacttgtag

SEQ ID NO: 281893 - DNA, 1287 bp, Artificial Sequence
  derived and/or modified sequence
atggccctgagcggcaactgcagcagatactaccccagagagcagggcagcgccgtgcccaacagcttccccgaggtggtggagctgaacgtgggcggccaggtgtacttcaccagacacagcaccctgatcagcatcccccacagcctgctgtggaagatgttcagccccaagagagacaccgccaacgacctggccaaggacagcaagggcagattcttcatcgacagagacggcttcctgttcagatacatcctggactacctgagagacagacaggtggtgctgcccgaccacttccccgagaagggcagactgaagagagaggccgagtacttccagctgcccgacctggtgaagctgctgacccccgacgagatcaagcagagccccgacgagttctgccacagcgacttcgaggacgccagccagggcagcgacaccagaatctgcccccccagcagcctgctgcccgccgacagaaagtggggcttcatcaccgtgggctacagaggcagctgcaccctgggcagagagggccaggccgacgccaagttcagaagagtgcccagaatcctggtgtgcggcagaatcagcctggccaaggaggtgttcggcgagaccctgaacgagagcagagaccccgacagagcccccgagagatacaccagcagattctacctgaagttcaagcacctggagagagccttcgacatgctgagcgagtgcggcttccacatggtggcctgcaacagcagcgtgaccgccagcttcatcaaccagtacaccgacgacaagatctggagcagctacaccgagtacgtgttctacagagagcccagcagatggagccccagccactgcgactgctgctgcaagaacggcaagggcgacaaggagggcgagagcggcaccagctgcaacgacctgagcaccagcagctgcgacagccagagcgaggccagcagcccccaggagaccgtgatctgcggccccgtgaccagacagaccaacatccagaccctggacagacccatcaagaagggccccgtgcagctgatccagcagagcgagatgagaagaaagagcgacctgctgagaaccctgaccagcggcagcagagagagcaacatgagcagcaagaagaaggccgtgaaggagaagctgagcatcgaggaggagctggagaagtgcatccaggacttcctgaagatcaagatccccgacagattccccgagagaaagcacccctggcagagcgagctgctgagaaagtaccacctgtag

SEQ ID NO: 281894 - protein, 473 aa, Artificial Sequence
  derived and/or modified sequence
MAAPQDLDIAVWLATVHLEQYADTFRRHGLATAGAARGLGHEELKQLGISATGHRKRILRLLQTGTEEGSLDPKSDSAMEPSPSPAPQAQPPKPVPKPRTVFGGLSGPATTQRPGLSPALGGPGVSRSPEPSPRPPPLPTSSSEQSSALNTVEMMPNSIYFGLDSRGRAQAAQDKAPDSSQISAPTPALRPTTGTVHIMDPGCLYYGVQPVGTPGAPDRRESRGVCQGRAEHRLSRQDLEAREDAGYASLELPGDSTLLSPTLETEETSDDLISPYASFSFTADRLTPLLSGWLDKLSPQGNYVFQRRFVQFNGRSLMYFGSDKDPFPKGVIPLTAIEMTRSSKDNKFQVITGQRVFVFRTESEAQRDMWCSTLQSCLKEQRLLGHPRPPQPPRPLRTGMLELRGHKAKVFAALSPGELALYKSEQAFSLGIGICFIELQGCSVRETKSRSFDLLTPHRCFSFTAESGGARQS

SEQ ID NO: 281895 - protein, 1193 aa, Artificial Sequence
  derived and/or modified sequence
MTRSSKDNKFQVITGQRVFVFRTESEAQRDMWCSTLQSCLKEQRLLGHPRPPQPPRPLRTGMLELRGHKAKVFAALSPGELALYKSEQAFSLGIGICFIELQGCSVRETKSRSFDLLTPHRCFSFTAESGGARQSWAAALQEAVTETLSDYEVAEKIWSNRANRQCADCGSSRPDWAAVNLGVVICKQCAGQHRALGSGISKVQSLKLDTSVWSNEIVQLFIVLGNDRANRFWAGTLPPGEGLHPDATPGPRGEFISRKYRLGLFRKPHPQYPDHSQLLQALCAAVARPNLLKNMTQLLCVEAFEGEEPWFPPAPDGSCPGLLPSDPSPGVYNEVVVRATYSGFLYCSPVSNKAGPSPPRRGRDAPPRLWCVLGAALEMFASENSPEPLSLIQPQDIVCLGVSPPPTDPGDRFPFSFELILAGGRIQHFGTDGADSLEAWTSAVGKWFSPLSCHQLLGPGLLRLGRLWLRSPSHTAPAPGLWLSGFGLLRGDHLFLCSAPGPGPPAPEDMVHLRRLQEISVVSAADTPDKKEHLVLVETGRTLYLQGEGRLDFTAWNAAIGGAAGGGGTGLQEQQMSRGDIPIIVDACISFVTQHGLRLEGVYRKGGARARSLRLLAEFRRDARSVKLRPGEHFVEDVTDTLKRFFRELDDPVTSARLLPRWREAAELPQKNQRLEKYKDVIGCLPRVNRRTLATLIGHLYRVQKCAALNQMCTRNLALLFAPSVFQTDGRGEHEVRVLQELIDGYISVFDIDSDQVAQIDLEVSLITTWKDVQLSQAGDLIMEVYIEQQLPDNCVTLKVSPTLTAEELTNQVLEMRGTAAGMDLWVTFEIREHGELERPLHPKEKVLEQALQWCQLPEPCSASLLLKKVPLAQAGCLFTGIRRESPRVGLLRCREEPPRLLGSRFQERFFLLRGRCLLLLKEKKSSKPEREWPLEGAKVYLGIRKKLKPPTPWGFTLILEKMHLYLSCTDEDEMWDWTTSILKAQHDDQQPVVLRRHSSSDLARQKFGTMPLLPIRGDDSGATLLSANQTLPMKSSQGSVEEQEELEEPVYEEPVYEEVGAFPELIQDTSTSFSTTREWTVKPENPLTSQKSLDQPFLSKSSTLGQEERPPEPPPGPPSKSSPQARGSLEEQLLQELSSLILRKGETTAGLGSPSQPSSPQSPSPTGLPTQTPGFPTQPPCTSSPPSSQPLT

SEQ ID NO: 281896 - DNA, 3582 bp, Artificial Sequence
  derived and/or modified sequence
atgaccagaagcagcaaggacaacaagttccaggtgatcaccggccagagagtgttcgtgttcagaaccgagagcgaggcccagagagacatgtggtgcagcaccctgcagagctgcctgaaggagcagagactgctgggccaccccagacccccccagccccccagacccctgagaaccggcatgctggagctgagaggccacaaggccaaggtgttcgccgccctgagccccggcgagctggccctgtacaagagcgagcaggccttcagcctgggcatcggcatctgcttcatcgagctgcagggctgcagcgtgagagagaccaagagcagaagcttcgacctgctgaccccccacagatgcttcagcttcaccgccgagagcggcggcgccagacagagctgggccgccgccctgcaggaggccgtgaccgagaccctgagcgactacgaggtggccgagaagatctggagcaacagagccaacagacagtgcgccgactgcggcagcagcagacccgactgggccgccgtgaacctgggcgtggtgatctgcaagcagtgcgccggccagcacagagccctgggcagcggcatcagcaaggtgcagagcctgaagctggacaccagcgtgtggagcaacgagatcgtgcagctgttcatcgtgctgggcaacgacagagccaacagattctgggccggcaccctgccccccggcgagggcctgcaccccgacgccacccccggccccagaggcgagttcatcagcagaaagtacagactgggcctgttcagaaagccccacccccagtaccccgaccacagccagctgctgcaggccctgtgcgccgccgtggccagacccaacctgctgaagaacatgacccagctgctgtgcgtggaggccttcgagggcgaggagccctggttcccccccgcccccgacggcagctgccccggcctgctgcccagcgaccccagccccggcgtgtacaacgaggtggtggtgagagccacctacagcggcttcctgtactgcagccccgtgagcaacaaggccggccccagcccccccagaagaggcagagacgccccccccagactgtggtgcgtgctgggcgccgccctggagatgttcgccagcgagaacagccccgagcccctgagcctgatccagccccaggacatcgtgtgcctgggcgtgagccccccccccaccgaccccggcgacagattccccttcagcttcgagctgatcctggccggcggcagaatccagcacttcggcaccgacggcgccgacagcctggaggcctggaccagcgccgtgggcaagtggttcagccccctgagctgccaccagctgctgggccccggcctgctgagactgggcagactgtggctgagaagccccagccacaccgcccccgcccccggcctgtggctgagcggcttcggcctgctgagaggcgaccacctgttcctgtgcagcgcccccggccccggcccccccgcccccgaggacatggtgcacctgagaagactgcaggagatcagcgtggtgagcgccgccgacacccccgacaagaaggagcacctggtgctggtggagaccggcagaaccctgtacctgcagggcgagggcagactggacttcaccgcctggaacgccgccatcggcggcgccgccggcggcggcggcaccggcctgcaggagcagcagatgagcagaggcgacatccccatcatcgtggacgcctgcatcagcttcgtgacccagcacggcctgagactggagggcgtgtacagaaagggcggcgccagagccagaagcctgagactgctggccgagttcagaagagacgccagaagcgtgaagctgagacccggcgagcacttcgtggaggacgtgaccgacaccctgaagagattcttcagagagctggacgaccccgtgaccagcgccagactgctgcccagatggagagaggccgccgagctgccccagaagaaccagagactggagaagtacaaggacgtgatcggctgcctgcccagagtgaacagaagaaccctggccaccctgatcggccacctgtacagagtgcagaagtgcgccgccctgaaccagatgtgcaccagaaacctggccctgctgttcgcccccagcgtgttccagaccgacggcagaggcgagcacgaggtgagagtgctgcaggagctgatcgacggctacatcagcgtgttcgacatcgacagcgaccaggtggcccagatcgacctggaggtgagcctgatcaccacctggaaggacgtgcagctgagccaggccggcgacctgatcatggaggtgtacatcgagcagcagctgcccgacaactgcgtgaccctgaaggtgagccccaccctgaccgccgaggagctgaccaaccaggtgctggagatgagaggcaccgccgccggcatggacctgtgggtgaccttcgagatcagagagcacggcgagctggagagacccctgcaccccaaggagaaggtgctggagcaggccctgcagtggtgccagctgcccgagccctgcagcgccagcctgctgctgaagaaggtgcccctggcccaggccggctgcctgttcaccggcatcagaagagagagccccagagtgggcctgctgagatgcagagaggagccccccagactgctgggcagcagattccaggagagattcttcctgctgagaggcagatgcctgctgctgctgaaggagaagaagagcagcaagcccgagagagagtggcccctggagggcgccaaggtgtacctgggcatcagaaagaagctgaagccccccaccccctggggcttcaccctgatcctggagaagatgcacctgtacctgagctgcaccgacgaggacgagatgtgggactggaccaccagcatcctgaaggcccagcacgacgaccagcagcccgtggtgctgagaagacacagcagcagcgacctggccagacagaagttcggcaccatgcccctgctgcccatcagaggcgacgacagcggcgccaccctgctgagcgccaaccagaccctgcccatgaagagcagccagggcagcgtggaggagcaggaggagctggaggagcccgtgtacgaggagcccgtgtacgaggaggtgggcgccttccccgagctgatccaggacaccagcaccagcttcagcaccaccagagagtggaccgtgaagcccgagaaccccctgaccagccagaagagcctggaccagcccttcctgagcaagagcagcaccctgggccaggaggagagaccccccgagcccccccccggcccccccagcaagagcagcccccaggccagaggcagcctggaggagcagctgctgcaggagctgagcagcctgatcctgagaaagggcgagaccaccgccggcctgggcagccccagccagcccagcagcccccagagccccagccccaccggcctgcccacccagacccccggcttccccacccagcccccctgcaccagcagcccccccagcagccagcccctgacctag

SEQ ID NO: 281897 - DNA, 3582 bp, Artificial Sequence
  derived and/or modified sequence
atgactagatctagcaaagacaataaatttcaggttatcactgggcaaagagtgtttgtattcagaacagaatcagaagcccaaagagatatgtggtgttccaccttgcagagctgtctgaaggagcaacggctgcttgggcatccccgcccccctcagcccccccggcctttacgtactggtatgctagaactgcgtggccacaaggcgaaggtctttgcagcccttagccccggagagctggctctttataaatctgagcaagcttttagtcttggcatcgggatttgcttcatagaactccaggggtgctcggtgcgcgaaactaagagcaggtcttttgatcttctgacaccccacaggtgttttagtttcacggccgaatccggaggtgcaagacagtcttgggcagcagccctgcaggaggccgtgaccgaaacacttagcgattacgaagtggctgagaagatctggtctaatcgcgcaaataggcaatgtgccgactgtggttcgtcccgccctgactgggctgccgttaacctcggcgtggtcatatgtaaacaatgcgctgggcagcaccgagcccttggcagcggcatctcaaaggtccagtcccttaaactggatacatccgtgtggagcaacgaaatagtccagctcttcatcgtgttggggaacgacagggccaacaggttttgggctggtactctgcccccgggcgaaggtctccatcccgatgcaacacctggtccacgtggcgaattcattagccggaaatacaggctcggcctcttccgtaaaccgcacccacagtaccccgatcattcccagctgctccaagctctttgcgcagccgtggctaggcctaatttactcaaaaacatgactcagctgctgtgcgttgaggccttcgagggcgaagagccgtggttccctccagctccagacggatcgtgcccaggattgctgccttcagatccaagcccgggagtctacaatgaggtcgtcgttagggccacatattccggctttctgtactgtagcccagtgtccaataaggccgggccctcccctcctaggagagggagggacgctccccctcgtctctggtgtgtgctgggagcggccctggagatgttcgcctccgaaaattctcctgaaccgctaagcctcatccaacctcaggatattgtgtgcctcggagtgtccccaccaccaaccgaccctggcgacagattcccctttagttttgaattgattctggcgggcggtcggatacagcacttcgggactgacggcgctgacagcctcgaggcatggacctcagcagtcggcaagtggttttccccactgagttgccatcagctgttgggaccaggcctactccgtcttggacgcctctggctaagatcccccagtcacacggcccctgccccaggactctggctgtcaggattcggcctgctgagaggggaccacttatttctctgctcagcccccgggccaggaccacctgcacccgaagacatggttcacctcagaagacttcaggaaatttccgtggtaagtgcggcggatacccccgataagaaagagcacttggtgctggtcgagaccgggaggaccctctacctgcaaggagaggggagactcgattttaccgcatggaatgccgctattggaggagctgctggtgggggaggcacaggcctgcaggagcaacaaatgtcacgcggcgacatccccattatcgttgacgcgtgtatcagttttgtcactcagcacggactgcggttggaaggcgtgtaccggaaggggggcgcccgggcgcgctctttacgcctcctcgccgagtttagacgagatgccagatcggttaagctacggccaggtgagcactttgtggaggatgtgaccgacactctgaagaggttctttcgtgaactcgacgacccagtaacgagcgcccgcctgctcccgagatggcgcgaggccgccgagctcccccaaaagaatcagcggcttgagaaatacaaagatgtgatcgggtgcttacctagagtgaatcgacggaccttggccacgctgatcggccatctgtatagagtgcagaaatgtgcggcactgaaccagatgtgtacgcggaacctagcacttttattcgcccccagcgtgtttcagaccgatgggcgcggggaacatgaggttcgtgtgctgcaggaactcatcgacggctatatttccgtctttgacattgattcagaccaggtggctcagattgacttggaggttagtctcataactacttggaaagacgttcaattgtcccaggccggtgacttgataatggaagtatatatcgagcaacagttgccagataattgtgtgactttgaaggtgtccccaaccctcactgcagaggagctcactaaccaggtcctggagatgagaggtaccgcagccgggatggacttgtgggtgactttcgaaattagagaacacggagaactcgagaggccacttcatcccaaagagaaggtgctagaacaggcccttcagtggtgccagctcccggaaccatgtagcgccagcctcctcctgaaaaaagtacctttggctcaagcaggctgtcttttcaccggtatcaggcgagagagcccccgggtaggactcctgcggtgcagagaagaaccccccagactcctgggtagtcgcttccaagagaggttttttctcctgagagggcggtgtctgttgctactgaaggagaagaaatccagcaaaccggagcgggagtggcccctggaaggtgctaaggtgtacctcgggatccggaaaaaattaaagcctccaaccccctggggatttaccctgatcttggagaagatgcatctgtacttgtcctgcacagacgaagatgagatgtgggattggaccactagcattctgaaagcccagcatgatgaccagcagcctgtagtattgaggcgtcattcctcctccgaccttgcccggcagaaatttggaaccatgccactcctgcctatccgaggagacgatagtggcgcaacactcttgtctgcaaaccagacgctcccaatgaaatcatctcagggttctgttgaggaacaagaagaactcgaagaaccagtgtatgaggagcctgtttacgaggaggtaggagcctttcccgaactgatccaggacacatctacatctttttccactacacgggaatggacagtaaaacctgaaaatcctcttaccagccagaagtccctggatcagcctttcttatccaagtcaagtacactgggacaggaagagcggcccccagagccaccaccaggacccccgagtaagagcagtccccaagcacgaggctcgctggaggaacaactgctacaggaactctcaagtctgatcttgcgcaagggggaaacaactgctggactgggatccccatcacagccttcctccccacagagccctagcccgactggcctgcctacgcagactcctggatttcccacacagccgccctgtacatcctcaccaccttcttctcagcccctgacttag

SEQ ID NO: 281898 - DNA, 3582 bp, Artificial Sequence
  derived and/or modified sequence
atgaccaggagcagcaaggacaacaagttccaggtgatcaccggccagagggtgtttgtgttcagaacagaaagtgaggcccagagggacatgtggtgcagcaccctgcagagctgcctgaaggagcagaggctgctgggccaccccaggcctccccagcccccccggcccctgaggacaggcatgctggagctgcggggccacaaggccaaggtgtttgctgccctgagccctggagagctggccctgtacaagtctgagcaggccttcagcctgggcatcggcatctgcttcatcgagctgcagggctgcagcgtgcgggagaccaagagccgcagctttgacctgctgaccccccaccgctgcttctccttcaccgctgagagcggcggggcccggcagagctgggccgccgccctgcaggaggccgtgacagagaccctgagtgactatgaggtggccgagaagatctggagcaacagagccaaccggcagtgtgccgactgtggcagcagcaggccagactgggccgctgtgaacctgggcgtggtgatctgcaagcagtgtgccggccagcaccgggccctgggcagcggcatcagcaaggtgcagagcctgaagctggacacctctgtgtggagcaatgaaattgtgcagctgttcatcgtgctgggcaatgaccgggccaaccgcttctgggccggcaccctgcccccaggagagggcctgcacccagatgccaccccaggccccagaggagagttcatcagcaggaagtaccgcctgggcctcttcaggaagccccacccccagtacccagaccacagccagctgctgcaggccctgtgtgccgctgtggcccggcccaacctgctgaagaacatgacccagctgctgtgtgtggaggcctttgaaggagaggagccctggttccccccagccccagatggcagctgccccggcctgctgcccagcgaccccagccctggggtgtacaatgaggtggtggtgcgggccacctacagcggcttcctgtactgcagccctgtgagcaacaaggccggccccagccccccccggcggggcagagatgccccaccccggctgtggtgtgtgctgggcgccgccctggagatgtttgccagcgagaacagccctgagcccctgagcctcatccagccccaggacatcgtgtgcctgggcgtgagccccccacccacagatcctggggaccgcttccccttctcctttgagctgatcctggccggcggccgcatccagcactttggaacagatggagctgacagcctggaggcctggaccagcgctgtgggcaagtggttcagccccctgagctgccaccagctgctgggccctggcctgctgcggctgggccgcctgtggctgcggagccccagccacacagccccagcccctggcctgtggctgagcggcttcggcctgctgcggggggaccacctgttcctgtgcagcgcccctggccctggccccccagcccctgaggacatggtgcacctgcggcggctgcaggagatctctgtggtgtctgctgctgacaccccagacaagaaggagcacctggtgctggtggagactggaagaaccctgtacctgcagggcgagggccgcctggacttcaccgcctggaatgctgccatcggcggggccgccggcggcggcggcaccggcctgcaggagcagcagatgagcagaggagacatccccatcatcgtggatgcctgcatcagctttgtgacccagcacggcctgcggctggagggcgtgtacagaaaaggaggagcccgggcccggagcctgcggctgctggccgagttcagaagagatgcccggtctgtgaagctgcggcctggagagcactttgtggaggatgtgacagacaccctgaagcgcttcttccgggagctggatgatcctgtgaccagcgcccggctgctgccccgctggagggaggccgctgagctgccccagaagaaccagaggctggagaagtacaaggatgtgattggctgcctgccccgggtgaacagaaggaccctggccaccctgattggccacctgtacagagtgcagaagtgtgccgccctgaaccagatgtgcaccaggaacctggccctgctgtttgcccccagcgtcttccagacagatggccgcggggagcacgaggtgcgggtgctgcaggagctgattgatggctacatctctgtgtttgacatcgacagcgaccaggtggcccagattgacctggaggtgtccctcatcaccacctggaaggatgtgcagctgagccaggccggggacctgatcatggaggtgtacatcgagcagcagctgcctgacaactgtgtgaccctgaaggtgagccccaccctgacagctgaggagctgaccaaccaggtgctggagatgaggggcacagctgctggcatggacctgtgggtgacctttgagatccgggagcacggggagctggagcggcccctgcaccccaaggagaaggtgctggagcaggccctgcagtggtgccagctgcctgagccctgcagcgccagcctgctgctgaagaaggtgcccctggcccaggccggctgcctcttcaccggcatcagaagagagagcccccgggtgggcctgctgcgctgccgggaggagcccccccggctgctgggcagccgcttccaggagcgcttcttcctgctgcggggccgctgcctgctgctgctgaaggagaagaagagcagcaagccagagcgggagtggcccctggagggcgccaaggtgtacctgggcatcaggaagaagctgaagccacccaccccctggggcttcaccctcatcctggagaagatgcacctgtacctgagctgcacagatgaagatgagatgtgggactggaccaccagcatcctgaaggcccagcatgatgaccagcagcctgtggtgctgcggcggcacagcagcagtgacctggcccggcagaagtttggcaccatgcccctgctgcccatcagaggagatgattctggggccaccctgctgagcgccaaccagaccctgcccatgaagagcagccagggctctgtggaggagcaggaggagctggaggagcctgtgtatgaggagcctgtgtatgaggaggtgggcgccttccctgagctgatccaggacaccagcaccagcttcagcaccacccgggagtggacagtgaagccagagaaccccctgaccagccagaagagcctggaccagcccttcctgagcaagagcagcaccctgggccaggaggagaggcctcctgagcccccacctggcccccccagcaagagcagcccccaggcccggggcagcctggaggagcagctgctgcaggagctgagcagcctcatcctgaggaaaggagagaccacagctggcctgggcagccccagccagcccagcagcccccagagccccagccccaccggcctgcccacccagaccccaggcttccccacccagcccccctgcaccagcagcccccccagcagccagcccctgacctag

SEQ ID NO: 281899 - DNA, 3582 bp, Artificial Sequence
  derived and/or modified sequence
atgacccggagcagcaaggacaacaagttccaggtgatcaccggccagagagtgtttgttttccgcacggagtccgaagctcagagagacatgtggtgttctacgctgcaaagctgcctcaaggaacaacgtttgttgggccaccctcgtccccctcaacctccacggcccctgcggaccggaatgcttgaactcaggggccacaaggctaaagtctttgccgcgctcagcccgggtgagctcgccctttacaagtccgagcaagcattcagtctcgggattggtatctgtttcatcgaactgcaaggctgcagtgtgagggagactaagagcaggtctttcgacctcctcacccctcatagatgcttctcctttacagctgagagtggaggtgcccgccagagttgggccgcggccctgcaagaggccgtcacggaaaccctgtctgactacgaggttgctgaaaaaatctggagcaaccgcgccaatcggcagtgcgctgactgtggcagctccagacccgattgggcggctgtgaacctgggagtggtgatctgcaaacagtgcgctggacaacatcgggcattgggcagtggcatcagtaaagtccagagcctgaaactggatacatctgtgtggagtaacgagattgtacagctgttcatcgtgctcggcaacgatagggccaatcgattttgggccggcacgctgccgcccggagagggtttacaccctgatgcaactccaggtccacgtggtgagttcatatctaggaaatatcgcctgggtctgttcagaaaaccccacccccaatatccagatcatagtcagttgcttcaagcactgtgtgccgccgtggcgcggcccaacctgcttaagaacatgacacagctactgtgtgtggaagcttttgaaggcgaggaaccttggttccctccggcacctgatggctcctgtccaggactccttccatccgacccatcaccaggagtgtacaatgaagtggtcgtgcgcgccacctattccgggttcctgtactgctcccctgtgtctaacaaggccggcccgagtcctccgcggagaggaagagacgctccccctagactgtggtgtgtactaggcgccgcactggaaatgttcgcgtctgagaattcccctgagcccctcagtttgatacagccccaggatatagtgtgtttaggagtttctcccccccccaccgatcctggcgatagatttcccttctcgtttgagttgatccttgctgggggtcgcatacagcactttggaactgatggcgccgacagtctggaagcctggacaagtgccgtggggaaatggttctccccgctttcatgtcaccagcttctcggacctggactgctgcggctcggacgactgtggctgcggagtccgagtcataccgccccggctccagggttgtggctgtccggatttgggctgctccgaggggaccacttgttcctttgcagcgctccgggcccaggacctccagctccggaggacatggtgcacctgcggaggctgcaggaaatttcggtggtgagcgccgcagatactcccgacaaaaaagagcacctggtgctggtcgagacaggacgcaccctttacctgcagggggaggggcgccttgacttcaccgcctggaacgccgccatcggaggtgccgcgggcgggggaggcaccgggttacaggagcagcagatgagcagaggggacatccctattatcgtcgacgcctgtatctcttttgtcacacaacatggccttaggctcgagggcgtttatcggaaggggggggccagggctcgcagccttaggcttctggccgagtttagacgcgatgccaggagcgttaaacttcggcccggtgagcatttcgtggaagacgttactgatactctcaaaaggttttttagggagctggatgaccctgttacctcagcccgtctcctgccgaggtggagggaggccgccgaactgccgcaaaagaatcagcggctggagaaatacaaggacgtaattggctgcctgccccgagttaacagacggaccttagcaacacttattggtcacctgtacagggtacagaagtgtgctgccctgaatcagatgtgcactcgaaacctggccctgctcttcgcaccatcagtatttcagactgatggacgcggtgagcacgaggtgcgggtgttgcaggaactgatcgatggctacatctcagtattcgacattgacagtgatcaggtggcccagattgatctggaggtgagcttgattactacctggaaagacgtgcagctctcccaagccggagacctgattatggaagtgtacatcgaacagcagctgcctgacaattgtgtcaccctcaaggtttcaccaaccctgaccgctgaggaattaaccaatcaggtccttgagatgaggggaaccgctgcgggaatggatctctgggtcaccttcgagattcgagaacacggggagctcgagcggcctctgcaccccaaagagaaagtgctcgaacaggcactacagtggtgtcagctgcctgagccgtgttctgcgtccctcttgctcaagaaggtgcccctcgcccaagccgggtgtctctttacggggatccgccgcgagtccccccgggtgggactccttcggtgcagagaggagccccctaggttgctgggatccagatttcaggagcggttttttctcctgaggggcaggtgtcttttattattgaaagaaaagaaatcctcaaagcccgagcgcgaatggcccttggagggagccaaagtgtacctggggattcgaaagaaactgaaaccccccacgccatggggctttaccttaatattggaaaagatgcatttatatctgtcatgcacggacgaagacgagatgtgggactggactacatccattttaaaggcccagcatgatgaccagcagccagtagttctccgcagacactccagtagcgacttagctcggcagaagttcggtactatgcctctacttcctattcggggcgatgacagcggcgcaacactgttgagtgctaaccagaccttacccatgaagtccagccagggctccgtggaagaacaggaagaattggaggaaccagtttatgaggagccagtttacgaggaggtgggcgcatttccagagttgatacaggacacatccacttctttctccaccactagagaatggactgtgaagcctgaaaaccccctgacctcccaaaaatcactggaccagccctttctgtccaaaagcagcaccctggggcaagaagagcggccgcccgaacccccacctggcccaccaagcaagtccagtccgcaggctcggggaagcctcgaggagcagctgttacaggagctgagttcccttatccttaggaagggagaaacgaccgctggcctgggctccccctcgcagccctctagtcctcaatcaccgtcccctaccggtctccctacccagacgccaggctttcccacccaacccccatgcaccagttcccctccatcatcacagccacttacctag

SEQ ID NO: 281900 - DNA, 3810 bp, Artificial Sequence
  derived and/or modified sequence
atgggtcattgagctctctctctccaggaccccttccctaagggtgtgatacctttgactgccattgagatgacccgcagcagcaaggacaacaagttccaggtcatcaccggccagagggtgttcgtgttccgcacagagagcgaggctcagcgggacatgtggtgctccacgctgcagtcctgtctgaaggagcagcgcctcctgggccacccccggcccccccaaccaccccgacccctccgcacgggcatgctggagctgcgtggacacaaggccaaggtgtttgctgccttgagccctggagagctggcactgtacaagagtgagcaggccttctctctgggcatcgggatctgcttcatcgaactgcagggctgcagcgtccgggagaccaagagtcgaagctttgacctgctcacaccccatcgctgcttcagcttcacagccgagtctgggggtgctcggcagagctgggcggccgctctgcaggaagcagtaaccgagaccctgtctgactacgaggtggctgagaagatctggtctaatcgggccaaccggcagtgtgcggactgtgggtcctcccgcccagattgggctgctgtcaatttgggggtggtcatctgcaagcagtgtgcaggtcagcaccgggccctgggttctgggatctccaaggtgcagagcctgaagctggacacgagtgtctggagtaatgagatagtacagttattcattgtcctgggaaatgatcgtgccaaccgcttctgggcagggaccctacccccaggtgagggactacatccagatgcgacccctggcccccggggagagttcatctcccgaaagtaccgtctgggtctcttccggaagccccaccctcagtacccagatcatagccagcttctccaggcactgtgtgcagctgtggcaagacccaacctgctgaagaacatgacccagctcctctgtgttgaggcctttgaaggcgaggagccctggttccccccagcccctgatggcagctgccctggcctcttgccctcagacccctcccctggtgtgtacaatgaggtggtggtgcgtgctacttacagcggcttcctgtactgcagtcccgtcagcaacaaagctggaccctcaccccctcgcaggggccgggatgctcccccgcgcctttggtgtgtgctgggagcagctctggaaatgtttgcatcggaaaacagccctgaacccctcagcctcatacagccccaggatattgtatgtctgggtgtgagccccccacccactgacccaggtgacaggttccccttttcctttgagctcatcctcgctggggggaggatccagcattttggcacagatggagctgacagtctggaggcctggactagtgctgtgggcaagtggttctccccgctgagctgccaccagctgctgggccccgggctgctgcggctgggccgcctatggctgcggtccccctcccatacagccccggcccctggtctctggctgtcagggtttggcctccttcgtggtgaccacctcttcctgtgctcagcgccgggcccaggccccccagcccctgaggacatggtgcatctgcggcggctacaggagatcagtgtggtttctgcagctgacaccccagataagaaagagcatttggtcctggtggagacaggaaggaccctgtatctgcaaggagagggccggctggacttcacggcatggaacgcagccattgggggcgcggctggtgggggcggcacagggctgcaggagcagcagatgagccggggtgacatccccatcatcgtggatgcctgcatcagttttgttacccagcatgggctccggctggaaggtgtataccggaaagggggcgctcgtgcccgcagcctgagactcctggctgagttccgtcgggatgcccggtcggtgaagctccgaccaggggagcactttgtggaggatgtcactgacacactcaaacgcttctttcgtgagctcgatgaccctgtgacctctgcacggttgctgcctcgctggagggaggctgctgagctgccccagaagaatcagcgcctggagaaatataaagatgtgattggctgcctgccgcgggtcaaccgccgcacactggccaccctcattgggcatctctatcgggtgcagaaatgtgcggctctaaaccagatgtgcacgcggaacttggctctgctgtttgcacccagcgtgttccagacggatgggcgaggggagcacgaggtgcgagtgctgcaagagctcattgatggctacatctctgtctttgatatcgattctgaccaggtagctcagattgacttggaggtcagtcttatcaccacctggaaggacgtgcagctgtctcaggctggagacctcatcatggaagtttatatagagcagcagctcccagacaactgtgtcaccctgaaggtgtccccaaccctgactgctgaggagctgactaaccaggtactggagatgcgggggacagcagctgggatggacttgtgggtgacttttgagattcgcgagcatggggagctggagcggccactgcatcccaaggaaaaggtcttagagcaggctttacaatggtgccagctcccagagccctgctcagcttccctgctcttgaaaaaagtccccctggcccaagctggctgcctcttcacaggtatccgacgtgagagcccacgggtggggctgttgcggtgtcgtgaggagccacctcgcttgctgggaagccgcttccaggagaggttctttctgctgcgtggccgctgcctgctgctgctcaaggagaagaaaagctctaaaccagaacgggagtggcctttggaaggtgccaaggtctacctgggaatccgcaagaagttaaagcccccaacaccgtggggcttcacattgatactagagaagatgcacctctacttgtcctgcactgacgaggatgaaatgtgggattggaccaccagcatccttaaagcccagcacgatgaccagcagccagtggtcttacgacgccattcctcctctgaccttgcccgtcagaagtttggcactatgcctttgctgcctatccgtggggatgacagtggagccaccctcctctctgccaatcagaccctgccaatgaagtcatcccaggggtctgtggaggagcaagaggagctggaggagcctgtgtacgaggagccagtgtatgaggaagtaggggccttccctgagttgatccaggacacttctacctccttctccaccacacgggagtggacagtgaagccagagaaccccctcaccagccagaagtcattggatcaaccctttctctccaagtcaagcacccttggccaggaggagaggccacctgagccccctccaggccccccttcaaagagcagtccccaggcacgggggtccctagaggaacagctgctccaggagctcagcagcctcatcctgaggaaaggagagaccactgcaggcctgggaagtccttcccagccatccagcccccaatcccccagccccactggccttccaacacagacacctggcttccccacccaacccccatgcacttccagtccaccctccagccagcccctcacatgaccctaggaccagcagtctgagagggtaggtaccagaagacccagaaactcttatcgtggcactgttgcagcttcctctgccctggctggaaagactccagaatccagtgtggtgctgtggaaggagcactggactaaaggcttcagtggctgcgtgtcc

SEQ ID NO: 281901 - DNA, 3582 bp, Artificial Sequence
  derived and/or modified sequence
atgacaagaagtagcaaggacaataaatttcaagtgatcactggtcagagggtcttcgtgtttaggacagaaagcgaggcgcaacgcgacatgtggtgtagcacgttgcagtcctgtctgaaggagcaaaggcttcttggccatcccaggccccctcagcccccacgtcctctgcgaacaggcatgctggagctgcggggtcacaaggctaaagtcttcgcagcactcagcccaggcgagctggccctgtacaagtctgaacaggcgttttctctcggcatcggaatatgttttatcgagctacagggatgcagtgtgagagagaccaaatcccggtccttcgacttacttacacctcaccgttgttttagttttaccgccgaaagtgggggagctaggcagtcctgggctgctgcgctgcaggaggccgttacagaaacccttagtgactatgaggtggcggaaaagatatggtcaaacagagccaaccggcagtgcgccgactgcggtagtagtaggcccgactgggccgcagtgaatctcggagtcgtaatctgtaaacagtgcgcaggtcagcaccgggctcttggcagcggtatcagcaaggtgcaatccctaaagcttgatacaagcgtgtggtctaacgagattgtgcaactttttattgtactcggcaatgatagagctaatagattttgggctgggactctcccccctggcgaaggcctgcacccagatgccacacctgggccacggggtgaattcattagcaggaagtacagactgggcctgttccggaaaccacacccgcagtatccggaccattcacagctgttgcaagctctgtgtgctgccgttgcccgacctaatttgctaaaaaatatgacgcagttgttatgtgtggaagcctttgagggggaagaaccatggttcccgccagctccagatggttcttgtcccggactactgccaagcgatccttcccccggtgtctacaacgaggttgttgtgagagcaacctattcgggcttcttgtattgctcccccgtctctaacaaggccggaccctctccaccgaggcggggacgcgatgccccaccccgtttatggtgcgtacttggcgctgctctcgagatgtttgcctctgagaacagcccagaacctcttagtttgatacaaccgcaagacattgtttgtttaggtgtctctcccccacccactgacccgggtgatagattccccttcagcttcgaattaatactggccggtgggcgtatccagcactttgggaccgacggcgctgattctctggaggcttggacaagtgccgtagggaagtggttctctcccctgagctgccaccaactccttgggccaggactcctgcgcctgggccgactctggctgcgtagcccgtcacatactgctcctgccccagggctgtggctgtcaggatttgggctgctgaggggagaccacttgtttctctgcagtgcaccaggacctggacccccagccccagaggacatggtgcacttaaggcggctgcaggagatttccgtggtttcggccgcagacactccggacaaaaaagaacaccttgtcctagttgagacgggaagaaccctgtacctccagggcgaaggcagattagattttaccgcgtggaatgctgccattggtggcgcagccggaggagggggaacagggcttcaagagcagcagatgagtcggggagatatcccgatcatcgtggatgcctgcatcagctttgtgactcagcatggacttcgcttagagggtgtttataggaaagggggagctcgcgctcgttccctccggctgctggccgagtttagacgggatgctagaagtgtgaagcttcggcctggagagcacttcgtagaggatgtgactgacacactgaaacgcttttttcgcgaattagacgaccctgtcacatccgcccgtctgctgcccagatggcgggaggcagcagagctcccgcagaagaaccaacgcctggaaaagtataaagacgtgatagggtgtctgcctagagtcaatagacggacactagctaccctgatcggtcatctgtatcgtgtgcagaagtgcgcagccctcaatcagatgtgtactcgaaatctagcactcctcttcgcaccttcagtgttccaaacggatggccgaggcgaacacgaagtccgagtactgcaggagctgatagacggatacatcagcgtcttcgacatcgacagcgaccaggtcgcacagattgatctcgaagtctcgcttatcactacatggaaagacgttcagctgagtcaggctggggatctgattatggaagtgtacatcgagcagcagctgcctgacaattgtgtcaccctcaaggtatcacccacgctcaccgcagaggagctgacaaaccaggtcctcgagatgcgaggaactgccgcaggcatggatctctgggtgactttcgagatccgggaacacggcgagctggaacgtccgctgcacccaaaagaaaaggtactggagcaggcactgcagtggtgtcagcttccagaaccatgctcggcgtcattgttgcttaagaaagttcccctggcccaggcgggttgcttgttcaccggtatccgtcgggagagcccgagagtgggccttctacggtgtcgagaagagccacctcgactcttgggcagccgttttcaggagcggtttttcctcctccggggacgctgcctgcttctactgaaggagaaaaagagcagtaagccggagcgggaatggcccctggaaggggctaaggtgtacctaggcattaggaagaaactcaagccaccgactccctgggggtttacgttaattctggagaaaatgcatctgtacctgtcttgtaccgatgaggatgaaatgtgggattggacaaccagtatactcaaggcacagcacgatgatcagcaaccagttgtgctgaggcgccattcctcatcggaccttgcacggcagaaatttgggaccatgcctctcctgcccatccgtggagatgatagcggggctaccctactgtctgcaaaccagactctgccaatgaagtcgtcacaggggtctgtggaggagcaggaagagttggaagagcctgtgtacgaagagcctgtttatgaagaagtgggagctttcccagagctgattcaggacacaagcacttcattctccactacccgagaatggaccgtgaaacccgaaaaccctttgacctcacagaagtcattggaccagccctttctcagcaaatcatctacgctgggccaggaggaacgccctcccgaacccccacccggaccccctagcaagagttctccccaggccagagggtcgctggaggagcaactattgcaagagttatcctcccttatcctgcggaagggggagaccacagccggtctcggctccccttcccagccatcttctccgcagagccccagccccacagggcttcctacacaaacaccgggttttccaacccagccaccatgcactagttcacctccttcaagtcagccattgacatag

SEQ ID NO: 281902 - DNA, 1422 bp, Artificial Sequence
  derived and/or modified sequence
atggccgccccccaggacctggacatcgccgtgtggctggccaccgtgcacctggagcagtacgccgacaccttcagaagacacggcctggccaccgccggcgccgccagaggcctgggccacgaggagctgaagcagctgggcatcagcgccaccggccacagaaagagaatcctgagactgctgcagaccggcaccgaggagggcagcctggaccccaagagcgacagcgccatggagcccagccccagccccgccccccaggcccagccccccaagcccgtgcccaagcccagaaccgtgttcggcggcctgagcggccccgccaccacccagagacccggcctgagccccgccctgggcggccccggcgtgagcagaagccccgagcccagccccagacccccccccctgcccaccagcagcagcgagcagagcagcgccctgaacaccgtggagatgatgcccaacagcatctacttcggcctggacagcagaggcagagcccaggccgcccaggacaaggcccccgacagcagccagatcagcgcccccacccccgccctgagacccaccaccggcaccgtgcacatcatggaccccggctgcctgtactacggcgtgcagcccgtgggcacccccggcgcccccgacagaagagagagcagaggcgtgtgccagggcagagccgagcacagactgagcagacaggacctggaggccagagaggacgccggctacgccagcctggagctgcccggcgacagcaccctgctgagccccaccctggagaccgaggagaccagcgacgacctgatcagcccctacgccagcttcagcttcaccgccgacagactgacccccctgctgagcggctggctggacaagctgagcccccagggcaactacgtgttccagagaagattcgtgcagttcaacggcagaagcctgatgtacttcggcagcgacaaggaccccttccccaagggcgtgatccccctgaccgccatcgagatgaccagaagcagcaaggacaacaagttccaggtgatcaccggccagagagtgttcgtgttcagaaccgagagcgaggcccagagagacatgtggtgcagcaccctgcagagctgcctgaaggagcagagactgctgggccaccccagacccccccagccccccagacccctgagaaccggcatgctggagctgagaggccacaaggccaaggtgttcgccgccctgagccccggcgagctggccctgtacaagagcgagcaggccttcagcctgggcatcggcatctgcttcatcgagctgcagggctgcagcgtgagagagaccaagagcagaagcttcgacctgctgaccccccacagatgcttcagcttcaccgccgagagcggcggcgccagacagagctag

SEQ ID NO: 281903 - DNA, 1422 bp, Artificial Sequence
  derived and/or modified sequence
atggcagctccacaggatttagacatagccgtctggctggcaacagttcacttggagcaatacgccgatacgtttagaaggcatggcttagcaactgcgggcgcggcccggggattggggcacgaagaactcaaacagctggggatatccgcgacaggacatagaaaaagaatcctcagactcctgcagactggaacagaagagggatctctagacccaaaaagcgattcagctatggagccatctcccagcccggcacctcaagcacagcctcctaagcctgtgcctaaacctaggactgtttttggaggactaagtgggccagccacaactcagcgcccagggttgagcccggctctcgggggaccaggcgtcagccggtcccctgagcctagccctaggccccccccccttcctacgtcaagtagcgagcagagcagcgccctgaacacggtggaaatgatgccaaactcaatttattttggtttggactctagagggcgcgcgcaggcggcccaagacaaggctccagactcttctcagatatctgcccccactcccgcactgaggcctacaacaggcactgtccacattatggatcccggctgcctatattatggagtccagcccgtgggaacacccggtgctccagatcgccgggagtccaggggggtgtgccaggggagagcagagcatcggctcagccgtcaagacttagaagcacgagaagacgccggctatgccagcctcgagctgccaggagattcaaccctattatcacccactctcgaaactgaggagaccagcgatgatctaatttccccttatgcctctttttcatttaccgccgataggcttactccgctcctctcaggctggctggacaagctatctccgcagggtaactacgtcttccagaggaggtttgtccagttcaatgggcgaagtctcatgtatttcgggtctgacaaggacccctttccaaaaggagtcattcctttgacagccatcgaaatgacccgatcctcaaaggacaacaagttccaagtcattactgggcagcgtgttttcgtgttcaggaccgaatcagaagcccagagggatatgtggtgtagtacattgcagagctgcctgaaggagcaaaggctgcttggtcaccctcgcccaccccaacctcccaggcctcttcgcacggggatgctcgagcttcgcggacacaaggctaaggtgtttgcagcactcagtcctggggagctggcactttacaagtccgaacaggccttttccctggggattggtatctgcttcattgagttgcaagggtgctccgtgagagagactaagtcccgctcttttgatctattaacccctcataggtgtttttcgtttactgctgagagcggtggtgcacgacagagctag

SEQ ID NO: 281904 - DNA, 1422 bp, Artificial Sequence
  derived and/or modified sequence
atggccgccccccaggacctggacattgctgtgtggctggccaccgtgcacctggagcagtatgctgacaccttccgccgccacggcctggccacagctggagctgcccggggcctgggccacgaggagctgaagcagctgggcatcagcgccaccggccacaggaagaggatcctgcggctgctgcagacaggaacagaggagggcagcctggaccccaagagtgacagcgccatggagcccagccccagccctgccccccaggcccagccccccaagcctgtgcccaagcccaggacagtgtttggaggcctgagcggccctgccaccacccagaggcctggcctgagccctgccctgggcggccctggggtgagccgcagccctgagcccagcccccggcccccacccctgcccaccagcagcagcgagcagagcagcgccctgaacacagtggagatgatgcccaacagcatctacttcggcctggacagccggggccgggcccaggccgcccaggacaaggccccagacagcagccagatcagcgcccccaccccagccctgcggcccaccactggaacagtgcacatcatggaccccggctgcctgtactacggcgtgcagcctgtgggcacccctggggccccagacagaagagagagccggggcgtgtgccagggccgggcagagcaccggctgagccggcaggacctggaggccagagaagatgctggctacgccagcctggagctgcccggggacagcaccctgctgagccccaccctggagacagaggagaccagtgatgacctgatcagcccctatgccagcttctccttcaccgctgaccggctgacccccctgctgagcggctggctggacaagctgagcccccagggcaactacgtgttccagaggagatttgtgcagttcaacggccgcagcctgatgtacttcggcagtgacaaggaccccttccccaagggcgtcatccccctgacagccatcgagatgaccaggagcagcaaggacaacaagttccaggtgatcaccggccagagggtgtttgtgttcagaacagaaagtgaggcccagagggacatgtggtgcagcaccctgcagagctgcctgaaggagcagaggctgctgggccaccccaggcctccccagcccccccggcccctgaggacaggcatgctggagctgcggggccacaaggccaaggtgtttgctgccctgagccctggagagctggccctgtacaagtctgagcaggccttcagcctgggcatcggcatctgcttcatcgagctgcagggctgcagcgtgcgggagaccaagagccgcagctttgacctgctgaccccccaccgctgcttctccttcaccgctgagagcggcggggcccggcagagctag

SEQ ID NO: 281905 - DNA, 1422 bp, Artificial Sequence
  derived and/or modified sequence
atggccgccccccaggacctggacatcgccgtgtggctggccaccgttcatctcgagcagtatgctgacacattccggcgacacgggctcgctaccgcaggagccgcccggggcctgggacacgaggagctcaagcagcttgggatctccgctacaggccatcgtaagcgaattttgcgcttactgcagacggggacagaagaagggtccctggatccaaagagtgattccgcaatggagccctccccatcacccgctccccaggcacagccaccgaagccagtacctaagccccgcaccgtgtttggtgggttgagtggcccggccacaacccagagaccaggcctgtctcccgctttgggcggcccgggagtgtctcgcagccccgagccatccccacgcccaccacccctgcccacttcctcttcagagcagtcttctgcgttaaatacagtggagatgatgcccaacagcatctatttcgggcttgacagcagagggcgcgcccaggctgcccaggataaagcgcctgactcaagtcaaatttccgcgcctaccccggccctaaggcccaccactggcacagtccatattatggacccggggtgcctgtattacggcgtgcagccggttgggacaccgggtgcaccagatagacgcgagtcccgcggagtgtgtcaaggtcgagcagagcaccgcctttcccgccaggatcttgaggctcgagaggatgccggatacgccagcctggagctgccaggcgactctaccctgctgtcaccaacccttgagaccgaggagacttccgatgacctgatctccccctacgcgagtttttccttcacagcagatcggctgacacccctactgagtggctggctcgataagctgagcccgcagggcaactatgtattccaacggcgtttcgtgcagtttaatgggcgaagcctcatgtacttcggatccgataaggacccttttccaaagggggtaataccacttactgccattgagatgacgaggtcttccaaagacaacaagtttcaggtgattacaggccagagggtcttcgtgtttcggacagaatccgaagcccagcgggacatgtggtgctctacattacagtcctgtctgaaggagcagcgtctgctgggtcacccgcggcctcctcagccgccaagaccactgcggacaggcatgttggagcttcggggtcacaaagccaaggtcttcgcagctctctctccaggagaactggccctctacaagagcgaacaagcgttcagcctcggcataggaatctgtttcattgagctccagggctgtagcgtgagggagaccaaatcccggtctttcgacctgcttacaccccacagatgtttcagcttcactgccgaatctgggggcgcccgccagagctag

SEQ ID NO: 281906 - DNA, 1765 bp, Artificial Sequence
  derived and/or modified sequence
gtgcagtcaggcaggagcagagctttgacccagacccagggtgggcaggaactgaggggccaactctagcactgacttactgtgaacctggggcaagccccttcccctctctgggcctcagtttccttaacttcaaatgaagtcccttccctaagtagagagccattgctgttgttctgggatggctctgcttccagatcgcaggcctttcagcatctttctttggaggaagattggaggctggtgctcactgtccaggcctcagactctggggcagagagggggattctcagcctgagccctcccttcaccctgcccctccccccagcaatggcctgagcccccatggctgcccctcaggacctggacatcgctgtgtggctggccacggtgcacctggagcagtatgcagacacgttccgacggcatggcctggctacagcaggtgcagcccggggcctgggccacgaggagttgaagcagttgggcatcagcgccacagggcaccggaaacgcattctacgcctgctacagacaggcaccgaagagggctccctggatcccaaatcagatagtgccatggaaccatcccccagcccagccccgcaagcccagccccctaagcccgtgccgaagcccaggaccgtgtttggtggactcagtggccctgccaccactcagagacctgggctgagcccagccctcgggggaccaggagtgtccaggagcccagagcccagcccaaggcctcctcctctccccacttcctcctctgagcagtcttcagccctaaatactgtggagatgatgcctaattccatctacttcggcctggactcaagaggcagggcacaggcagctcaggacaaggccccagacagctcccaaatctctgcccccacccctgccctcaggcccacaacaggcacagtgcacatcatggatcctggttgcctgtactatggtgtccaacctgtggggactccaggagcccccgacagaagagagagcagaggtgtttgtcagggcagggctgaacacaggctcagcagacaggatctggaggcacgggaggatgctggctatgccagccttgagctacctggagactccaccctcttatcgcccaccctggaaacagaggagaccagtgatgacctcatttcaccctatgccagcttctccttcacggcagaccgcctcacgcccctgctcagtggctggctagacaagctctcccctcagggaaactatgtcttccagagacgctttgtgcagttcaatgggaggagtctgatgtactttggcagtgacaaggaccccttccctaagggtgtgatacctttgactgccattgagatgacccgcagcagcaaggacaacaagttccaggtcatcaccggccagagggtgttcgtgttccgcacagagagcgaggctcagcgggacatgtggtgctccacgctgcagtcctgtctgaaggagcagcgcctcctgggccacccccggcccccccaaccaccccgacccctccgcacgggcatgctggagctgcgtggacacaaggccaaggtgtttgctgccttgagccctggagagctggcactgtacaagagtgagcaggccttctctctgggcatcgggatctgcttcatcgaactgcagggctgcagcgtccgggagaccaagagtcgaagctttgacctgctcacaccccatcgctgcttcagcttcacagccgagtctgggggtgctcggcagagct

SEQ ID NO: 281907 - DNA, 1422 bp, Artificial Sequence
  derived and/or modified sequence
atggctgccccacaagatctcgacattgccgtgtggttagccaccgttcacttagaacagtacgctgatactttccgtaggcatggactggccacagcaggagctgcaagaggactcggccacgaagagctgaagcagctgggcatcagtgcaacaggacatcgcaaaaggatcctgaggctgctgcagaccggcaccgaggagggttcacttgacccgaagtcagattccgctatggagccatcgccgtcacccgcaccacaggctcaacccccaaagccagtccccaaaccaagaaccgtattcggtggcctctcagggcctgcaacgacacagaggccaggtttgagcccggcactcggtgggccaggagtgagcaggtcacccgagccctccccgaggcctcccccactccccacttcctcctccgaacagtcaagcgccctgaatacagtagagatgatgcccaacagcatctattttggcctcgactccaggggccgagctcaggctgcccaggataaagcacctgacagcagtcagattagtgctccaacccccgctctgcgacctactacgggtacggtccatataatggatcctggatgcctttactatggggtgcaaccggtcggaaccccaggagcccctgaccgcagggaatctcggggtgtgtgccaggggagggccgagcacagactgtctcgacaggatttggaagccagagaggatgcaggatacgcatcgttggaactgccgggtgacagcacactgctgtctcctacattagaaaccgaggaaacctccgacgatcttatctctccttatgcttctttcagcttcactgctgaccggctgacgcctctgctgtcaggatggctcgacaagctgtctccccagggaaattacgtgtttcagcgacgctttgtgcagtttaacgggaggtctctgatgtacttcggaagcgataaggaccccttccctaaaggcgttattccactgacggcgatcgaaatgacccggtctagtaaggacaacaaattccaagtgattacaggacagcgggtcttcgtctttcggactgagtccgaagcccagagggacatgtggtgctctacactgcagtcctgtttaaaggaacagcgcctcctggggcaccctcgtccaccacagcctccgcgacccctccggacaggaatgcttgagttacgtggccacaaggctaaagtcttcgccgcactttcccccggagagctggctttatacaagagcgagcaggcattctcacttggcattggcatctgttttatcgagttgcagggctgctcagttagagagaccaagagccgatctttcgacctccttactccccacagatgcttttcctttacagccgagagtggcggagcccgtcagtcttag

SEQ ID NO: 281908 - protein, 1525 aa, Artificial Sequence
  derived and/or modified sequence
MAEARKRRELLPLIYHHLLRAGYVRAAREVKEQSGQKCFLAQPVTLLDIYTHWQQTSELGRKRKAEEDAALQAKKTRVSDPISTSESSEEEEEAEAETAKATPRLASTNSSVLGADLPSSMKEKAKAETEKAGKTGNSMPHPATGKTVANLLSGKSPRKSAEPSANTTLVSETEEEGSVPAFGAAAKPGMVSAGQADSSSEDTSSSSDETDVEGKPSVKPAQVKASSVSTKESPARKAAPAPGKVGDVTPQVKGGALPPAKRAKKPEEESESSEEGSESEEEAPAGTRSQVKASEKILQVRAASAPAKGTPGKGATPAPPGKAGAVASQTKAGKPEEDSESSSEESSDSEEETPAAKALLQAKASGKTSQVGAASAPAKESPRKGAAPAPPGKTGPAVAKAQAGKREEDSQSSSEESDSEEEAPAQAKPSGKAPQVRAASAPAKESPRKGAAPAPPRKTGPAAAQVQVGKQEEDSRSSSEESDSDREALAAMNAAQVKPLGKSPQVKPASTMGMGPLGKGAGPVPPGKVGPATPSAQVGKWEEDSESSSEESSDSSDGEVPTAVAPAQEKSLGNILQAKPTSSPAKGPPQKAGPVAVQVKAEKPMDNSESSEESSDSADSEEAPAAMTAAQAKPALKIPQTKACPKKTNTTASAKVAPVRVGTQAPRKAGTATSPAGSSPAVAGGTQRPAEDSSSSEESDSEEEKTGLAVTVGQAKSVGKGLQVKAASVPVKGSLGQGTAPVLPGKTGPTVTQVKAEKQEDSESSEEESDSEEAAASPAQVKTSVKKTQAKANPAAARAPSAKGTISAPGKVVTAAAQAKQRSPSKVKPPVRNPQNSTVLARGPASVPSVGKAVATAAQAQTGPEEDSGSSEEESDSEEEAETLAQVKPSGKTHQIRAALAPAKESPRKGAAPTPPGKTGPSAAQAGKQDDSGSSSEESDSDGEAPAAVTSAQKDSNSKPARSKTLAPAPPERNTEGSSESSEEELPLTQVIKPPLIFVDPNRSPAGPAATPAQAQAASTPRKARASESTARSSSSESEDEDVIPATQCLTPGIRTNVVTMPTAHPRIAPKASMAGASSSKESSRISDGKKQEGPATQVSKKNPASLPLTQAALKVLAQKASEAQPPVARTQPSSGVDSAVGTLPATSPQSTSVQAKGTNKLRKPKLPEVQQATKAPESSDDSEDSSDSSSGSEEDGEGPQGAKSAHTLGPTPSRTETLVEETAAESSEDDVVAPSQSLLSGYMTPGLTPANSQASKATPKLDSSPSVSSTLAAKDDPDGKQEAKPQQAAGMLSPKTGGKEAASGTTPQKSRKPKKGAGNPQASTLALQSNITQCLLGQPWPLNEAQVQASVVKVLTELLEQERKKVVDTTKESSRKGWESRKRKLSGDQPAARTPRSKKKKKLGAGEGGEASVSPEKTSTTSKGKAKRDKASGDVKEKKGKGSLGSQGAKDEPEEELQKGMGTVEGGDQSNPKSKKEKKKSDKRKKDKEKKEKKKKAKKASTKDSESPSQKKKKKKKKTAEQTV

SEQ ID NO: 281909 - DNA, 4578 bp, Artificial Sequence
  derived and/or modified sequence
atggccgaggccagaaagagaagagagctgctgcccctgatctaccaccacctgctgagagccggctacgtgagagccgccagagaggtgaaggagcagagcggccagaagtgcttcctggcccagcccgtgaccctgctggacatctacacccactggcagcagaccagcgagctgggcagaaagagaaaggccgaggaggacgccgccctgcaggccaagaagaccagagtgagcgaccccatcagcaccagcgagagcagcgaggaggaggaggaggccgaggccgagaccgccaaggccacccccagactggccagcaccaacagcagcgtgctgggcgccgacctgcccagcagcatgaaggagaaggccaaggccgagaccgagaaggccggcaagaccggcaacagcatgccccaccccgccaccggcaagaccgtggccaacctgctgagcggcaagagccccagaaagagcgccgagcccagcgccaacaccaccctggtgagcgagaccgaggaggagggcagcgtgcccgccttcggcgccgccgccaagcccggcatggtgagcgccggccaggccgacagcagcagcgaggacaccagcagcagcagcgacgagaccgacgtggagggcaagcccagcgtgaagcccgcccaggtgaaggccagcagcgtgagcaccaaggagagccccgccagaaaggccgcccccgcccccggcaaggtgggcgacgtgaccccccaggtgaagggcggcgccctgccccccgccaagagagccaagaagcccgaggaggagagcgagagcagcgaggagggcagcgagagcgaggaggaggcccccgccggcaccagaagccaggtgaaggccagcgagaagatcctgcaggtgagagccgccagcgcccccgccaagggcacccccggcaagggcgccacccccgccccccccggcaaggccggcgccgtggccagccagaccaaggccggcaagcccgaggaggacagcgagagcagcagcgaggagagcagcgacagcgaggaggagacccccgccgccaaggccctgctgcaggccaaggccagcggcaagaccagccaggtgggcgccgccagcgcccccgccaaggagagccccagaaagggcgccgcccccgccccccccggcaagaccggccccgccgtggccaaggcccaggccggcaagagagaggaggacagccagagcagcagcgaggagagcgacagcgaggaggaggcccccgcccaggccaagcccagcggcaaggccccccaggtgagagccgccagcgcccccgccaaggagagccccagaaagggcgccgcccccgccccccccagaaagaccggccccgccgccgcccaggtgcaggtgggcaagcaggaggaggacagcagaagcagcagcgaggagagcgacagcgacagagaggccctggccgccatgaacgccgcccaggtgaagcccctgggcaagagcccccaggtgaagcccgccagcaccatgggcatgggccccctgggcaagggcgccggccccgtgccccccggcaaggtgggccccgccacccccagcgcccaggtgggcaagtgggaggaggacagcgagagcagcagcgaggagagcagcgacagcagcgacggcgaggtgcccaccgccgtggcccccgcccaggagaagagcctgggcaacatcctgcaggccaagcccaccagcagccccgccaagggccccccccagaaggccggccccgtggccgtgcaggtgaaggccgagaagcccatggacaacagcgagagcagcgaggagagcagcgacagcgccgacagcgaggaggcccccgccgccatgaccgccgcccaggccaagcccgccctgaagatcccccagaccaaggcctgccccaagaagaccaacaccaccgccagcgccaaggtggcccccgtgagagtgggcacccaggcccccagaaaggccggcaccgccaccagccccgccggcagcagccccgccgtggccggcggcacccagagacccgccgaggacagcagcagcagcgaggagagcgacagcgaggaggagaagaccggcctggccgtgaccgtgggccaggccaagagcgtgggcaagggcctgcaggtgaaggccgccagcgtgcccgtgaagggcagcctgggccagggcaccgcccccgtgctgcccggcaagaccggccccaccgtgacccaggtgaaggccgagaagcaggaggacagcgagagcagcgaggaggagagcgacagcgaggaggccgccgccagccccgcccaggtgaagaccagcgtgaagaagacccaggccaaggccaaccccgccgccgccagagcccccagcgccaagggcaccatcagcgcccccggcaaggtggtgaccgccgccgcccaggccaagcagagaagccccagcaaggtgaagccccccgtgagaaacccccagaacagcaccgtgctggccagaggccccgccagcgtgcccagcgtgggcaaggccgtggccaccgccgcccaggcccagaccggccccgaggaggacagcggcagcagcgaggaggagagcgacagcgaggaggaggccgagaccctggcccaggtgaagcccagcggcaagacccaccagatcagagccgccctggcccccgccaaggagagccccagaaagggcgccgcccccaccccccccggcaagaccggccccagcgccgcccaggccggcaagcaggacgacagcggcagcagcagcgaggagagcgacagcgacggcgaggcccccgccgccgtgaccagcgcccagaaggacagcaacagcaagcccgccagaagcaagaccctggcccccgccccccccgagagaaacaccgagggcagcagcgagagcagcgaggaggagctgcccctgacccaggtgatcaagccccccctgatcttcgtggaccccaacagaagccccgccggccccgccgccacccccgcccaggcccaggccgccagcacccccagaaaggccagagccagcgagagcaccgccagaagcagcagcagcgagagcgaggacgaggacgtgatccccgccacccagtgcctgacccccggcatcagaaccaacgtggtgaccatgcccaccgcccaccccagaatcgcccccaaggccagcatggccggcgccagcagcagcaaggagagcagcagaatcagcgacggcaagaagcaggagggccccgccacccaggtgagcaagaagaaccccgccagcctgcccctgacccaggccgccctgaaggtgctggcccagaaggccagcgaggcccagccccccgtggccagaacccagcccagcagcggcgtggacagcgccgtgggcaccctgcccgccaccagcccccagagcaccagcgtgcaggccaagggcaccaacaagctgagaaagcccaagctgcccgaggtgcagcaggccaccaaggcccccgagagcagcgacgacagcgaggacagcagcgacagcagcagcggcagcgaggaggacggcgagggcccccagggcgccaagagcgcccacaccctgggccccacccccagcagaaccgagaccctggtggaggagaccgccgccgagagcagcgaggacgacgtggtggcccccagccagagcctgctgagcggctacatgacccccggcctgacccccgccaacagccaggccagcaaggccacccccaagctggacagcagccccagcgtgagcagcaccctggccgccaaggacgaccccgacggcaagcaggaggccaagccccagcaggccgccggcatgctgagccccaagaccggcggcaaggaggccgccagcggcaccaccccccagaagagcagaaagcccaagaagggcgccggcaacccccaggccagcaccctggccctgcagagcaacatcacccagtgcctgctgggccagccctggcccctgaacgaggcccaggtgcaggccagcgtggtgaaggtgctgaccgagctgctggagcaggagagaaagaaggtggtggacaccaccaaggagagcagcagaaagggctgggagagcagaaagagaaagctgagcggcgaccagcccgccgccagaacccccagaagcaagaagaagaagaagctgggcgccggcgagggcggcgaggccagcgtgagccccgagaagaccagcaccaccagcaagggcaaggccaagagagacaaggccagcggcgacgtgaaggagaagaagggcaagggcagcctgggcagccagggcgccaaggacgagcccgaggaggagctgcagaagggcatgggcaccgtggagggcggcgaccagagcaaccccaagagcaagaaggagaagaagaagagcgacaagagaaagaaggacaaggagaagaaggagaagaagaagaaggccaagaaggccagcaccaaggacagcgagagccccagccagaagaagaagaagaagaagaagaagaccgccgagcagaccgtgtag

SEQ ID NO: 281910 - DNA, 4578 bp, Artificial Sequence
  derived and/or modified sequence
atggcagaggctcgcaagcgcagggaactactgcctctgatctatcatcatctgctgcgtgctggatacgtgcgagctgcaagagaagtaaaggagcagagcgggcagaaatgcttcttagcacagccggtcacccttctggacatctatactcattggcagcaaacctctgaactcggacggaaaagaaaagccgaggaggatgccgctttacaggctaagaagactcgcgtatccgatcctatttccacctccgaatcatcagaggaagaggaggaggccgaggctgagaccgcgaaagcgacaccaaggctggctagcactaactcgtctgtcctcggggctgatttgccttcgtccatgaaggaaaaggccaaggcggaaactgagaaggccggtaagacaggtaattctatgccccatcccgccactggcaaaacggtggccaacctgctgagtgggaagagccctagaaagtccgcagaaccgagcgcaaatactacactcgtcagcgagacggaggaggagggtagcgtgccagccttcggggcagcggcgaagcccggtatggttagcgctggacaggctgattccagctccgaagacacatccagttcatctgatgagaccgacgtggaaggaaagccgtctgtgaagcctgcgcaggtaaaggcttcatccgtatctaccaaagaaagccccgcccggaaagcagctccagctccaggtaaagtcggagacgtgacgccccaggtgaagggaggggctttacccccagctaagagggcaaaaaagccagaagaggaaagcgagtcctctgaggaaggatccgagtcagaagaggaggcgccagcaggaaccaggagccaagtcaaggcttccgaaaagatactccaggtgcgtgccgcctcggccccagcgaagggaactccaggcaaaggagccacaccagccccccctggtaaggcaggtgctgtcgcatctcagactaaggccggtaagccggaagaagatagtgagtcatcatccgaagaaagttcagacagtgaagaggaaacccccgcggcaaaagcccttctgcaggccaaagcaagcggcaagaccagccaggttggagcagcatccgcgcctgctaaagaatctccccgcaagggcgccgcacctgctcccccaggtaagacaggaccagcagtggccaaggcccaagccggcaagcgcgaagaagattctcagtcctcttcagaagaaagtgactccgaggaagaggcccctgcacaggctaaaccatcaggcaaagcaccccaagtaagggctgctagtgcacccgccaaggaatcacccagaaaaggtgcggcccctgctcccccaagaaaaactgggccagctgccgcacaagtacaggtcggcaagcaagaagaagacagcaggagttcatccgaggagtccgacagcgaccgtgaggctctggctgccatgaatgccgcccaggtcaagcccttgggcaagtccccacaggtgaagcccgccagcaccatggggatgggcccgcttgggaagggggccgggcccgtgccccccgggaaggtgggtcctgccactccaagtgctcaggttggaaaatgggaggaggatagcgagtctagctcggaagagtcaagcgacagttccgacggagaggtgcccaccgcagttgctcccgcccaagaaaaatctctggggaacattctccaggctaagcctacatcgagccctgctaaaggtccaccccagaaagctggtccagtggcagttcaggtgaaggcagagaagcctatggataattctgagtcaagcgaggagtcttccgactccgctgacagtgaggaggctccagcggctatgaccgctgcccaggccaaacccgcattaaaaatcccacaaacaaaggcctgccctaagaagacaaacaccactgcatccgccaaagtcgctcccgtccgagtcgggacacaggctcccaggaaagctggaaccgctacctcacctgctggttccagtccggcggttgctggtggtacccagagacccgccgaggatagttccagctccgaggaatctgacagcgaggaagagaagaccggactggcagttacagtgggccaggcaaaaagcgtaggcaagggtcttcaagtcaaagccgccagcgtgcccgtgaaggggtccctagggcagggaactgctccagttctgcctgggaaaacaggtcccactgtcacacaagtgaaagccgaaaaacaggaagactcagaaagctctgaggaggaatccgattcggaggaggccgcagcctcaccggctcaggttaaaactagtgttaaaaagacacaggctaaggccaaccccgctgcagcaagggctccttcagctaaagggacaatttccgccccgggtaaggtggtcacagcagctgcccaagctaaacagcgatcaccctcgaaagttaaaccccctgtgaggaatccgcagaacagcactgtccttgcgagagggcctgcctctgtgccatctgtgggtaaggctgtggctactgcggcccaagctcagaccggccctgaggaagacagtggcagctcagaagaggagagtgacagtgaggaggaggccgagaccctagctcaggtcaagccctccggaaaaacacatcagatcagagcagcgttggcccctgccaaagagagcccccggaagggagcagctcctacgcccccaggaaaaaccggtccaagcgccgctcaagccggaaaacaagatgactccggctcaagctcagaagagagcgatagcgacggggaagctcctgcagcagtcacaagcgcacagaaagatagtaacagtaaaccagctaggagcaaaactcttgcaccagcacctcccgaaagaaatacggaaggttcctccgaatcttcagaggaggaactgcccctgacccaggtaataaagccacccctcattttcgtcgatcctaatcgcagtcctgcaggccccgcggcaactcccgcccaggctcaggcagcaagcaccccaaggaaagctcgggccagcgaaagcacagctaggagctcctcctctgaatccgaggatgaagacgtaatacctgctacacagtgcctcaccccaggcatccgaacaaacgttgtcacaatgcctaccgcacatcccagaatagcgcctaaggcttcaatggctggcgcatcaagtagtaaagaaagcagtcgcatttccgacggcaaaaaacaggaagggccggcaacacaggtcagcaagaaaaaccccgccagtctgccactgactcaggctgcattaaaagtcctcgcccagaaagcctcagaggcacagcctcccgttgcacggactcagcccagtagtggtgtagactctgctgttggaactctgccagccaccagcccacagtctacaagcgtgcaagccaagggcacaaacaagctccgaaaaccaaagctacccgaagtgcagcaggccaccaaagcacctgaaagcagtgatgatagtgaggactcttcggactctagcagtggctcagaagaagatggcgagggaccacagggcgcgaagtctgcgcatacgctcggtccgactccatctagaactgagacgctggtggaagaaactgcagccgaaagtagtgaagatgacgtggtggctccctcccagagtttgctcagcggctacatgacgcccgggctgactcctgccaattcccaggcgagcaaggccaccccaaagttagactcctccccttcggtttcctcaacccttgccgctaaagacgatcctgatggcaagcaagaggccaagccacaacaggctgccgggatgttgtcccccaagaccggcggcaaagaggccgcctctggcaccaccccccagaaaagtcgcaaaccaaaaaaaggcgccgggaacccgcaggcatccacactcgcacttcaatctaacattactcaatgtctgttaggacagccatggccgttaaacgaagcccaggtgcaggcctcagttgtcaaggtgctcaccgagctgttggagcaggaacggaagaaggtagtggacactaccaaagagtcttctcggaaagggtgggaaagcagaaagcgtaaactcagcggagaccagccggctgccagaacaccaaggtcaaaaaagaagaaaaaattgggagccggagagggcggcgaggcctcagtgagccctgagaagaccagtactacgtccaaggggaaagcaaagcgcgataaggccagtggcgacgtgaaagaaaagaaaggaaaggggagtctcggtagccagggtgctaaagatgagcctgaagaggagttacagaaaggaatgggtacggttgagggaggggatcagtccaatccaaaaagtaaaaaggaaaaaaagaagtcggataagcgaaaaaaggacaaggaaaaaaaggagaagaaaaaaaaagcgaagaaagcctcaactaaggatagcgagagcccttctcagaaaaagaagaaaaaaaagaagaagaccgctgagcaaaccgtgtag

SEQ ID NO: 281911 - DNA, 4578 bp, Artificial Sequence
  derived and/or modified sequence
atggccgaggccaggaagagaagagagctgctgcccctcatctaccaccacctgctgcgggccggctacgtgcgggccgcccgggaggtgaaggagcagagcggccagaagtgcttcctggcccagcctgtgaccctgctggacatctacacccactggcagcagaccagcgagctgggcaggaagaggaaggccgaggaggatgctgccctgcaggccaagaagaccagggtgtctgaccccatcagcaccagcgagagcagcgaggaggaggaggaggccgaggccgagacagccaaggccaccccccggctggccagcaccaacagctctgtgctgggcgctgacctgcccagctccatgaaggagaaggccaaggccgagacagagaaggccggcaagacaggcaacagcatgccccacccagccaccgggaagacagtggccaacctgctgagcggcaagagccccaggaagtctgctgagcccagcgccaacaccaccctggtgtctgaaacagaggaggagggctctgtgcctgccttcggggctgctgccaagccaggcatggtgtctgctggccaggccgacagcagcagcgaggacaccagcagcagcagtgatgaaacagatgtggagggcaagcccagcgtgaagccagcccaggtgaaggccagctctgtgtccaccaaggagagccctgccaggaaggccgccccagcccctgggaaggtgggagatgtgaccccccaggtgaagggcggggccctgcccccagccaagagggccaagaagccagaggaggagagcgagagcagcgaggagggcagcgagagcgaggaggaggccccagctggcaccaggagccaggtgaaggccagcgagaagatcctgcaggtgcgggccgccagcgccccagccaagggcaccccaggaaaaggagccaccccagcccctcctgggaaggccggggctgtggccagccagaccaaggccggcaagccagaagaagattctgagagcagcagcgaggagagcagtgacagcgaggaggagaccccagctgccaaggccctgctgcaggccaaggccagcggcaagaccagccaggtgggcgccgccagcgccccagccaaggagagccccaggaagggggccgccccagcccctcctgggaagacaggccctgctgtggccaaggcccaggccggcaagcgggaggaggacagccagagcagcagcgaggagagtgacagcgaggaggaggccccagcccaggccaagcccagcggcaaggccccccaggtgcgggccgccagcgccccagccaaggagagccccaggaaaggagctgccccagccccacccaggaagacaggccctgctgctgcccaggtgcaggtgggcaagcaggaggaggacagccgcagcagcagcgaggagagtgacagcgaccgggaggccctggccgccatgaatgctgcccaggtgaagcccctgggcaagagcccccaggtgaagccagccagcaccatgggcatgggccccctgggcaaaggagctggccctgtgcccccaggcaaggtgggccctgccaccccatctgcccaggtgggcaagtgggaggaggacagcgagagcagcagcgaggagagcagtgacagcagtgatggagaggtgcccacagctgtggccccagcccaggagaagagcctgggcaacatcctgcaggccaagcccaccagcagccctgccaagggccccccccagaaggccggccctgtggccgtgcaggtgaaggccgagaagcccatggacaacagcgagagcagcgaggagagcagtgacagcgctgacagcgaggaggccccagctgccatgacagctgcccaggccaagccagccctgaagatcccccagaccaaggcctgccccaagaagaccaacaccacagccagcgccaaggtggcccctgtgcgggtgggcacccaggcccccaggaaggccggcacagccaccagccctgctggcagcagccctgctgtggccggcggcacccagaggcctgctgaggacagcagcagcagcgaggagagtgacagcgaggaggagaagacaggcctggccgtgacagtgggccaggccaagtctgtgggcaagggcctgcaggtgaaggccgcctctgtgcctgtgaagggcagcctgggccagggcacagcccctgtgctgcccgggaagacaggccccaccgtgacccaggtgaaggccgagaagcaggaggacagcgagagcagcgaggaggagagtgacagcgaggaggccgccgccagccctgcccaggtgaagacctctgtgaagaagacccaggccaaggccaacccagctgctgcccgggcccccagcgccaagggcaccatcagcgcccctgggaaggtggtgacagctgctgcccaggccaagcagaggagccccagcaaggtgaagccccctgtgaggaacccccagaacagcacagtgctggcccggggccctgcctctgtgcccagcgtgggcaaggctgtggccacagctgcccaggcccagacaggccctgaggaggacagcggcagcagcgaggaggagagtgacagcgaggaggaggccgagaccctggcccaggtgaagcccagcggcaagacccaccagatccgggccgccctggccccagccaaggagagccccaggaaaggagctgcccccaccccacctgggaagacaggccccagcgctgcccaggccggcaagcaggatgacagcggcagcagcagcgaggagagtgacagtgatggagaggccccagctgctgtgaccagcgcccagaaggacagcaacagcaagccagcccggagcaagaccctggccccagcccctcctgagaggaacacagagggcagcagcgagagcagcgaggaggagctgcccctgacccaggtgatcaagccacccctcatctttgtggaccccaacagaagccctgctggccctgctgccaccccagcccaggcccaggccgccagcacccccaggaaggcccgggccagcgagagcacagcccggagcagcagcagcgagagtgaagatgaagatgtgatcccagccacccagtgcctgaccccaggcatccgcaccaacgtggtgaccatgcccacagcccacccccgcatcgcccccaaggcctccatggccggggccagcagcagcaaggagagcagccgcatcagtgatggcaagaagcaggagggccctgccacccaggtgtccaagaagaacccagccagcctgcccctgacccaggccgccctgaaggtgctggcccagaaggccagcgaggcccagccccctgtggcccggacccagcccagcagtggagtggacagcgctgtgggcaccctgcctgccaccagcccccagagcacctctgtgcaggccaagggcaccaacaagctgaggaagcccaagctgcctgaggtgcagcaggccaccaaggcccctgagagcagtgatgattctgaggacagcagtgacagcagcagcggctctgaagaagatggagagggcccccagggcgccaagagcgcccacaccctgggccccacccccagcaggacagagaccctggtggaggagacagctgctgagagcagtgaagatgatgtggtggcccccagccagagcctgctgagcggctacatgaccccaggcctgaccccagccaacagccaggccagcaaggccacccccaagctggacagcagccccagcgtgagcagcaccctggccgccaaggatgatcctgatggcaagcaggaggccaagccccagcaggccgccggcatgctgagccccaagacaggaggcaaggaggccgccagcggcaccaccccccagaagagcaggaagcccaagaagggggccggcaacccccaggccagcaccctggccctgcagagcaacatcacccagtgcctgctgggccagccctggcccctgaatgaggcccaggtgcaggcctctgtggtgaaggtgctgacagagctgctggagcaggagaggaagaaggtggtggacaccaccaaggagagcagcaggaagggctgggagagcaggaagaggaagctgagcggggaccagcctgctgcccggacccccaggagcaagaagaagaagaagctgggcgctggggagggcggggaggcctctgtgtccccagagaagaccagcaccaccagcaagggcaaggccaagagggacaaggccagcggagatgtgaaggagaagaagggcaagggcagcctgggcagccagggcgccaaggatgagcctgaggaggagctgcagaagggcatgggcaccgtggagggcggggaccagagcaaccccaagagcaagaaggagaagaagaagagtgacaagaggaagaaggacaaggagaagaaggagaagaagaagaaggccaagaaggccagcaccaaggacagcgagagccccagccagaagaagaagaagaagaagaagaagacagctgagcagacagtgtag

SEQ ID NO: 281912 - DNA, 4578 bp, Artificial Sequence
  derived and/or modified sequence
atggccgaggcccggaagcggcgggagctgctgcccctgatctaccatcacctgcttcgcgccggttatgtgcgggcagcccgagaggtgaaagagcagagcgggcaaaagtgtttcttagcccagccagtgactctgctcgatatctatacccactggcaacaaacaagcgagttgggccgcaaacgcaaagccgaggaagacgccgccctgcaggccaagaaaacaagggtgtccgatcctattagtacatctgaatccagtgaagaggaggaagaggcggaggccgaaacagccaaggccaccccccgtttagcatcaacaaattcatctgttctgggcgccgacctgccatccagcatgaaagaaaaggcaaaggcagagacagaaaaggccggaaaaacaggcaatagcatgccacaccctgccactggcaagactgtcgccaacctgctctcaggcaaaagccctagaaaaagtgctgagccgtccgctaatacaacgctggtgagcgaaaccgaggaggaaggatctgtgccagcctttggggccgccgccaagccaggcatggtctctgctggtcaagccgattcctcaagtgaggacacgagcagttccagtgacgaaactgacgtggaaggcaagccctccgtgaagcctgcgcaggtgaaggcctctagtgtatctacgaaggagagcccagccagaaaggctgcacctgctccggggaaagtgggggatgtgacaccccaggtgaaaggtggtgccttgccgcccgcaaagagggcgaaaaaaccagaggaggagtctgaatctagtgaagagggctcggagtccgaagaagaagcccccgccgggactagatcacaggtgaaggcctcggaaaagattttacaggtccgggccgcaagtgctcccgctaaaggcaccccagggaaaggggctacccccgcccctccagggaaagcgggggccgtggcttcacagacaaaggcgggtaagcctgaagaggattccgagtcctcctctgaggagagctcagactctgaagaagagacgcccgctgccaaggcgttgctgcaggccaaagcaagtgggaaaaccagccaggttggggccgccagtgcacccgccaaggagagccccaggaaaggcgcagcaccggcgccacctggcaaaactggacccgcagtagccaaggcgcaggccggcaagagagaagaggactcacagtcctccagcgaggaaagtgattcagaagaagaggcaccagcgcaggcaaaaccttctggcaaggctccgcaggttagggccgcttccgcccccgcaaaggagagcccccgcaagggggctgcccctgctccacctcggaagaccgggcctgccgcggcgcaggtccaagttggcaagcaggaagaggattctcggtcaagttctgaggaaagtgacagtgatagagaggctttagctgccatgaacgcggcacaggtgaagccgcttgggaagagtccccaagtgaaaccagcgtcaaccatgggcatgggtcctctgggaaaaggcgctgggcccgtgcctcccggcaaggtcgggccagcaacaccatctgcccaggtgggtaagtgggaggaggactctgagtcttcctctgaggagtcttcagactcatcagatggagaagttccgaccgcagtggcaccagctcaagaaaagtctctgggaaacattctccaggctaagcccacgagctctcccgcaaaaggccctccccagaaagccgggcccgtcgcagtccaggtaaaggccgagaaaccaatggataactccgaatcaagcgaagaatccagcgacagtgcagatagtgaggaagccccagccgctatgactgcagctcaggccaagcctgccctcaagatccctcaaacaaaagcctgtcctaagaaaaccaacactactgcctcagccaaagtcgctccagtacgcgtggggacacaggcgcccaggaaagccggcaccgccacgtccccagctgggtcttcgcccgctgtcgcaggagggacgcagcggccagcggaagacagctcttcatccgaagaaagcgactcagaagaggaaaagactggcctggccgtgactgtgggacaagcaaagtctgtcggtaaaggactgcaagtgaaggcagcaagcgtccctgtgaaggggagcttaggacaggggaccgcaccagtgctgcccggcaagaccggacccactgtaacgcaggttaaggccgaaaaacaggaagactccgaatcctccgaagaagaatctgacagtgaagaagcggcggccagcccagcccaagttaagacatccgtgaagaagacccaggcaaaggctaacccagcggccgcccgtgccccttccgccaaggggaccatatccgcgcctggaaaagtggttaccgctgctgcacaggccaagcagcggtccccttcgaaagtgaaaccacccgtgcgaaacccccaaaactctaccgttctggcccggggccccgcttccgtcccctcagtggggaaagcagtggccacagcagcccaggcacaaaccgggccagaggaggatagtggtagctcagaggaagagagcgactctgaagaagaggccgaaacattggctcaggtcaaaccctcaggaaaaacccaccagattcgggcagcgctggctccagcgaaggagtcaccaaggaaaggcgctgcccctaccccccccgggaaaaccggaccaagtgctgctcaggccggcaagcaggatgactccggcagcagcagcgaggagagcgacagcgacggagaggccccggccgcggtcaccagcgcccaaaaagattccaattcaaagccagcacggagtaagaccctagcgcctgcgccccctgaaaggaacacagaaggctcctctgagagcagcgaggaggagttacctttgacccaagtgatcaagccacctcttatatttgtggatccgaaccgctcccccgcgggccccgcagccacacctgctcaagcccaggcggcttccacgcctcgcaaggctagggcctctgaaagtacggcacgttccagttcctccgagagcgaggacgaggatgtgattcccgcaactcagtgcctgacccctgggattaggaccaacgtcgtgactatgcccacagcccatccccggatagcacctaaagcgagcatggccggagcctcttcaagcaaggagtcgagccggatttccgacggtaaaaagcaggaaggaccggcgacacaggtgagcaaaaagaatccagcatctcttccgcttacacaagccgctctgaaagttcttgcccagaaggcctccgaggcccagcccccggttgcgagaacccaacctagttcaggagtggactctgccgtgggaacccttcctgctacgtctcctcaatcaacctctgtacaggccaagggcaccaacaagctgcgaaagccaaagttgcctgaggtccaacaggcaacaaaggcacccgaatccagtgatgatagcgaggatagctcggacagcagcagcgggtctgaggaagacggcgaggggccgcagggtgcaaagagtgcccacactctcgggccaacaccatctcgtaccgagaccttggtggaggagaccgctgcagaatcttcagaagatgacgttgttgccccctctcagtcccttctgtcaggatacatgacccctggacttaccccagccaactctcaggcgagcaaggccacacctaagctggacagctctccctccgtgtccagtactctcgcagccaaagatgacccagacggcaagcaggaggctaagccacagcaggccgccggaatgctgagccccaaaactggcggtaaggaggccgcctctggcacaactcctcaaaagagccggaagccaaaaaagggagcaggcaatccccaagccagcactttagctcttcagagcaatattactcaatgcttactgggacagccatggcctctgaacgaagcccaggtgcaggctagtgtggtgaaagttctgacagagctactagaacaggagagaaaaaaggttgtggacaccactaaagaaagcagccgtaaggggtgggagtccaggaaacgaaagcttagtggcgaccagcccgcagctaggacccctaggagcaaaaaaaaaaagaaactaggagcaggagaagggggggaagcctcagtgagcccggaaaaaacttctacaacctccaagggcaaggctaaaagggataaagcttccggcgatgtgaaggaaaaaaaaggtaaaggctccctagggagccaaggagctaaagatgagccggaagaggagctccagaaagggatgggaacagtcgagggaggggatcaaagcaatcccaagagcaaaaaagaaaagaagaaatccgacaagcgcaagaaggacaaagagaaaaaagagaagaaaaaaaaggccaagaaggcctccaccaaagactcagaatccccaagccagaagaagaagaagaagaagaagaaaacagcagagcagacagtgtag

SEQ ID NO: 281913 - DNA, 4578 bp, Artificial Sequence
  derived and/or modified sequence
atggcagaagctagaaagcgcagggagctgttgccgctgatctaccaccacctgctgcgtgcagggtacgttagagctgccagagaagtcaaggaacagagcggacaaaaatgtttcctggctcaacccgtgacccttctggatatatacacccattggcagcagacaagcgagcttggacgcaagcgaaaggccgaggaggacgctgccctgcaggctaaaaagaccagagtgagtgacccaatctcaactagcgaaagtagtgaagaggaagaggaggcagaagctgaaaccgcgaaagcaactccacgactagcgagcacaaactcgtccgtgctaggcgcagacctgccttcttcaatgaaggagaaagctaaagcagagacggaaaaggccggtaaaaccggaaactctatgccccaccccgcaaccggcaaaaccgtggccaacttactgagcgggaagagcccaaggaaaagcgccgagcccagcgcaaacacaaccctcgttagtgagaccgaggaagagggatctgtgcctgcctttggcgcagccgctaaacccggaatggtgtcagcgggacaggccgactcgtctagcgaagataccagcagctcttctgatgagaccgacgtggagggtaagccctctgtgaaacctgcacaggtgaaagcctcctccgtctctaccaaggagagcccagccagaaaagcagctcccgcaccaggaaaagtcggcgatgtcacaccccaggtgaagggtggtgctcttccccctgcaaaaagggcgaaaaagcctgaagaggagagtgagtcgtctgaggagggatcagagagtgaagaagaggcgccagcgggtacacgaagccaggttaaagcatcggaaaaaatcctgcaggtgcgcgctgcctccgcccctgcaaaggggacccccggaaaaggggctacgcccgctccccctggcaaggccggagcagtggcatctcagaccaaggctggaaagccagaagaagactctgagtcaagcagtgaggagtcctcagactctgaggaagagacccctgccgctaaggcgctgcttcaagctaaagcttcaggaaagacttcccaggtgggggctgcttccgcccctgccaaagagagtccacgaaagggcgctgcacctgcacctccaggtaagacaggacctgccgtggcaaaggctcaggccggaaaacgtgaagaggactctcagtcgtcaagtgaagaaagtgatagtgaagaagaggcacctgcccaggcgaagcccagtggcaaggctccacaagtccgcgcagcctccgccccagccaaggagagtccacgcaaaggtgctgctccagcaccgccacggaaaacgggacccgcagcagctcaggtgcaggtgggaaagcaggaagaagactcaaggtccagttctgaagagagcgactcagatcgcgaagcgctcgcagccatgaatgctgctcaggtgaagcctctcggaaaatctccccaagtcaagcctgcctccactatgggcatgggaccattggggaagggggcaggtccagtccctccgggaaaagtcgggccagccacccccagcgcccaggtaggcaagtgggaggaagatagtgagtcgtcctcagaggagtcttccgacagtagcgacggggaagtgcctactgccgttgcacccgctcaggagaagagtttgggcaatatcctgcaagccaaacccacgagtagccccgctaaaggccctcctcagaaggcaggtcccgtggcagtccaggtgaaagctgagaaacccatggataattctgagtcttctgaagagtcatcagatagtgctgattccgaagaagcaccagccgcaatgactgcagcgcaggctaagccggctctgaaaatacctcagacaaaggcctgccctaagaaaactaatactacagcatccgcgaaagtcgcgccagtgcgtgtcggaacccaggccccacggaaggccggtacagcaacctcccccgcaggctcatcacctgctgtagctggtggaacacaacgacctgcggaggattccagcagtagcgaagaatccgattctgaggaggaaaaaacggggctggccgttaccgtggggcaagcgaagtccgtgggcaaggggctgcaggtgaaagccgctagcgtccccgtgaagggaagtctggggcagggcaccgcccctgtcctgccaggaaagacaggacctaccgtcacacaagtaaaagcggagaaacaggaagacagcgaatcaagtgaagaagagagcgactccgaagaagccgctgcgagtcccgcacaggtcaagacgagcgttaagaagacgcaagccaaggcaaaccccgcagcagcgagagctccgagcgcaaaaggcactatatccgcgccaggaaaggtggtcaccgctgctgcgcaggcaaaacagagatcccctagtaaagtcaaacctccagtgcgaaatccacaaaacagtaccgtgctggcgaggggtccagcaagcgtgccaagcgtgggaaaggctgtggccaccgctgctcaagctcagaccggcccagaggaggattcaggctcctccgaggaagagtctgattctgaggaagaagccgaaacattagcacaggtgaagccctcaggcaaaacacaccagatccgtgcagccctcgcgcctgctaaagaatcaccccgtaaaggcgctgcccctactccccctggaaagacaggcccttcagcagcacaggcaggtaagcaggatgattcgggaagttcttccgaggagagtgattcagacggtgaggcccctgcagccgttacaagcgcacaaaaagatagcaacagcaagccggctagatcaaaaacactagcaccagcccctccggaacggaatactgaggggtccagtgaaagctccgaggaggaactcccactaacacaggtcatcaaacctccgctcattttcgtggaccctaatagatctcccgctggacccgcagccaccccagcccaggcccaggcggcatccactccacgtaaggcgcgtgccagcgagagtactgctagatcctcaagcagcgagtcggaggatgaggacgtcatcccagctacacaatgccttaccccagggatccgtaccaatgtcgtgaccatgcccacagcccatccgaggatcgcccctaaagcaagcatggctggagcaagtagcagcaaggagtccagtagaatctctgacggtaaaaagcaagaagggccagctacccaagtttctaaaaaaaatcctgcttctttacctttaactcaggctgctctgaaagttctggcgcagaaggcttccgaggcccaacccccagtggcccgaacacagccctcaagtggggtggattctgcagtgggaaccctgccggcaacctccccccagagcacttcagtccaggcaaagggtacaaacaagttaaggaaaccaaaattgccagaggtgcagcaggccactaaggcacccgagagttcagacgacagcgaagactctagcgactcatcatcaggaagcgaggaagacggggaaggtcctcaaggagcaaagagcgcacatacactggggcctactccttctcgcactgaaaccctagttgaagagacagctgctgagagctcagaggatgacgtggttgccccttctcagagcctcctgagcggatacatgaccccagggctcacgcccgctaactcccaggcttctaaagccacgccaaaactcgacagcagcccgtcagtgtccagcacactggctgccaaggacgatccggacggaaagcaggaggcaaagcctcaacaggccgctggtatgctgtcccccaaaaccggtgggaaagaggctgcttccgggacgaccccacagaaaagccgtaaacctaaaaagggagccggaaatcctcaggcttctactttggcccttcagtctaacataacacaatgtcttctggggcagccctggccattgaatgaggctcaggtccaggcttccgtggtcaaggtcctgacagaactgctggagcaggagagaaaaaaggtagtggacacaacaaaagagagctcgcgcaagggttgggagagtaggaaaagaaaactttccggtgaccagccagcagccaggacaccaaggtctaagaaaaaaaagaagttgggtgctggcgaggggggagaagcttccgtctcaccggagaagactagcaccacttccaaaggcaaggccaagagagacaaagcctccggcgatgttaaagagaagaagggaaaaggcagtttgggcagccaaggcgcaaaggacgagcccgaggaggagctgcagaaaggcatgggtactgtggaaggcggagaccagagtaatccgaagtctaagaaggagaagaaaaagagcgacaagcgaaaaaaagataaagagaaaaaggaaaagaaaaaaaaggccaagaaagccagtaccaaggattctgagtcaccctcacagaaaaagaagaagaagaagaaaaagactgctgaacagaccgtgtag

SEQ ID NO: 281914 - DNA, 5206 bp, Artificial Sequence
  derived and/or modified sequence
gaaagaggagccggaagtgtggcgcgcgaggtctaagggcgcgagggaagtggcgggcggggactaaggcggggcgtgcaggtagccggccggccgggggtcgcgggtatggccgaggccaggaagcggcgggagctacttcccctgatctaccaccatctgctgcgggctggctatgtgcgtgcggcgcgggaagtgaaggagcagagcggccagaagtgtttcctggctcagcccgtaacccttctggacatctatacacactggcaacaaacctcagagcttggtcggaagcggaaggcagaggaagatgcggcactgcaagctaagaaaacccgtgtgtcagaccccatcagcacctcggagagctcggaagaggaggaagaagcagaagccgaaaccgccaaagccaccccaagactagcatctaccaactcctcagtcctgggggcggacttgccatcaagcatgaaagaaaaagccaaggcagagacagagaaagctggcaagactgggaattccatgccacaccctgccactgggaagacggtggccaaccttctttctgggaagtctcccaggaagtcagcagagccctcagcaaatactacgttggtctcagaaactgaggaggagggcagcgtcccggcctttggagctgctgccaagcctgggatggtgtcagcgggccaggccgacagctccagcgaggacacctccagctccagtgatgagacagacgtggaggggaaaccctcagtaaaaccagcccaggtcaaagcctcatcagtttctactaaggagtctccagcaagaaaggcggccccagcccctgggaaggtgggggatgtgacaccccaggtcaaaggaggggccctgcccccagccaagagggccaagaagccagaagaggagtcagagagtagtgaggagggatctgaaagtgaggaggaggcccctgcagggacacgaagccaggtaaaggcctctgaaaaaattctccaggtcagagctgcctcagcccctgccaaggggacccctgggaaaggggctaccccagcaccccctgggaaggcaggggctgtagcctcccagaccaaggcagggaagccagaggaggactcagagagcagcagcgaggagtcatctgacagtgaggaggagacgccagctgccaaggccctgcttcaggcgaaggcctcaggaaaaacctctcaggtcggagctgcctcagcccctgccaaggagtcccccaggaaaggagctgccccagcgccccctgggaagacagggcctgcagttgccaaggcccaggcggggaagcgggaggaggactcgcagagcagcagcgaggaatcggacagtgaggaggaggcgcctgctcaggcgaagccttcagggaaggccccccaggtcagagccgcctcggcccctgccaaggagtcccccaggaaaggggctgccccagcacctcctaggaaaacagggcctgcagccgcccaggtccaggtggggaagcaggaggaggactcaagaagcagcagcgaggagtcagacagtgacagagaggcactggcagccatgaatgcagctcaggtgaagcccttggggaaaagcccccaggtgaaacctgcctctaccatgggcatggggcccttggggaaaggcgccggcccagtgccacccgggaaggtggggcctgcaaccccctcagcccaggtggggaagtgggaggaggactcagagagcagtagtgaggagtcatcagacagcagtgatggagaggtgcccacagctgtggccccggctcaggaaaagtccttggggaacatcctccaggccaaacccacctccagtcctgccaaggggccccctcagaaggcagggcctgtagccgtccaggtcaaggctgaaaagcccatggacaactcggagagcagcgaggagtcatcggacagtgcggacagtgaggaggcaccagcagccatgactgcagctcaggcaaaaccagctctgaaaattcctcagaccaaggcctgcccaaagaaaaccaataccactgcatctgccaaggtcgcccctgtgcgagtgggcacccaagccccccggaaagcaggaactgcgacttctccagcaggctcatccccagctgtggctgggggcacccagagaccagcagaggattcttcaagcagtgaggaatcagatagtgaggaagagaagacaggtcttgcagtaaccgtgggacaggcaaagtctgtggggaaaggcctccaggtgaaagcagcctcagtgcctgtcaaggggtccttggggcaagggactgctccagtactccctgggaagacggggcctacagtcacccaggtgaaagctgaaaagcaggaagactctgagagcagtgaggaggaatcagacagtgaggaagcagctgcatctccagcacaggtgaaaacctcagtaaagaaaacccaggccaaagccaacccagctgccgccagagcaccttcagcaaaagggacaatttcagcccctggaaaagttgtcactgcagctgctcaagccaagcagaggtctccatccaaggtgaagccaccagtgagaaacccccagaacagtaccgtcttggcgaggggcccagcatctgtgccatctgtggggaaggccgtggctacagcagctcaggcccagacagggccagaggaggactcagggagcagtgaggaggagtcagacagtgaggaggaggcggagacgctggctcaggtgaagccttcagggaagacccaccagatcagagctgccttggctcctgccaaggagtcccccaggaaaggggctgccccaacacctcctgggaagacagggccttcggctgcccaggcagggaagcaggatgactcagggagcagcagcgaggaatcagacagtgatggggaggcaccggcagctgtgacctctgcccagaaggacagtaactccaaacctgccagaagcaagaccctggccccagcacccccagagaggaacacggaggggtcctcggagagcagtgaggaagagctgccactgacccaggtgattaaaccccctctgatttttgtcgaccctaatcgtagtccagctggcccagctgctacacccgcacaagcccaggctgcaagcaccccgaggaaggcccgagcctcggagagcacagccaggagctcctcctccgagagcgaggatgaggacgtgatccccgctacacagtgcttgactcctggcatcagaaccaatgtggtgaccatgcccactgcccacccaagaatagcccccaaagccagcatggctggggccagcagcagcaaggagtccagtcggatatcagatggcaagaaacaggagggaccagccactcaggtgtcaaagaagaacccagcttccctcccactgacccaggctgccctgaaggtcctcgcccagaaagccagtgaggctcagcctcctgttgccaggacccagccttcaagtggggttgacagtgctgtgggaacactccctgcaacaagtccccagagcacctccgtccaggccaaagggaccaacaagctcagaaaacctaagcttcctgaggtccagcaggccaccaaagcccctgagagctcagatgacagtgaggacagcagcgacagttcttcagggagtgaggaagatggtgaagggccccagggggccaagtcagcccacacgctgggtcccaccccctccaggacagagaccctggtggaggagaccgcagcagagtccagcgaggatgatgtggtggcgccatcccagtctctcctctcaggttatatgacccctggactaaccccagccaattcccaggcctcaaaagccactcccaagctagactccagcccctcagtttcctctactctggccgccaaagatgacccagatggcaagcaggaggcaaagccccaacaggcagcaggcatgttgtcccctaaaacaggtggaaaagaggctgcttcaggcaccacacctcagaagtcccggaagcccaagaaaggggctgggaacccccaagcctcaaccctggcgctgcaaagcaacatcacccagtgcctcctgggccaaccctggcccctgaatgaggcccaggtgcaggcctcagtggtgaaggtcctgactgagctgctggaacaggaaagaaagaaggtggtggacaccaccaaggagagcagcaggaagggctgggagagccgcaagcggaagctatcgggagaccagccagctgccaggacccccaggagcaagaagaagaagaagctgggggccggggaaggtggggaggcctctgtttccccagaaaagacctccacgacttccaaggggaaagcaaagagagacaaagcaagtggtgatgtcaaggagaagaaagggaaggggtctcttggctcccaaggggccaaggacgagccagaagaggagcttcagaaggggatggggacggttgaaggtggagatcaaagcaacccaaagagcaagaaggagaagaagaaatccgacaagagaaaaaaagacaaagaaaaaaaagaaaagaagaagaaagcaaaaaaggcctcaaccaaagattctgagtcaccgtcccagaagaaaaagaagaaaaagaagaagacagcagagcagactgtatgacgagcaccagcaccaggcacagggatttcctagccgagcagtggccatccccatgcctctgacctccaccgacctctgcccaccatgggttggaactaaactgttaccttccctcgctccacagaagaagacagccagcttcaggggtccctgtgctggccaagccagtgagcctgcggggaggctggtccaaggagaaagtggaccagctcccatgacctcaccccactcccccaacacaggacgcttcatatagatgtgtacagtatatgtatttttttaagtgacctcctctccttccacagaccccacatgcccaaaggcctcgggacttcccaccaccttgctccacagatccagctaggcctgacctgtgcctcatcccgtgccgctcggtctctggctgatcccgaggctttgtcttcctctcgtcagttcttttggttgtgttttttgttttttttttaataactcaaaaaaaaaataaaagacttggaggaagggtgcaagctcccagtgc

SEQ ID NO: 281915 - protein, 1489 aa, Artificial Sequence
  derived and/or modified sequence
MAEARKRRELLPLIYHHLLRAGYVRAAREVKEQSGQKCFLAQPVTLLDIYTHWQQTSELGRKRKAEEDAALQAKKTRVSDPISTSESSEEEEEAEAETAKATPRLASTNSSVLGADLPSSMKEKAKAETEKAGKTGNSMPHPATGKTVANLLSGKSPRKSAEPSANTTLVSETEEEGSVPAFGAAAKPGMVSAGQADSSSEDTSSSSDETDVEGKPSVKPAQVKASSVSTKESPARKAAPAPGKVGDVTPQVKGGALPPAKRAKKPEEESESSEEGSESEEEAPAGTRSQVKASEKILQVRAASAPAKGTPGKGATPAPPGKAGAVASQTKAGKPEEDSESSSEESSDSEEETPAAKALLQAKASGKTSQVGAASAPAKESPRKGAAPAPPGKTGPAVAKAQAGKREEDSQSSSEESDSEEEAPAQAKPSGKAPQVRAASAPAKESPRKGAAPAPPRKTGPAAAQVQVGKQEEDSRSSSEESDSDREALAAMNAAQVKPLGKSPQVKPASTMGMGPLGKGAGPVPPGKVGPATPSAQVGKWEEDSESSSEESSDSSDGEVPTAVAPAQEKSLGNILQAKPTSSPAKGPPQKAGPVAVQVKAEKPMDNSESSEESSDSADSEEAPAAMTAAQAKPALKIPQTKACPKKTNTTASAKVAPVRVGTQAPRKAGTATSPAGSSPAVAGGTQRPAEDSSSSEESDSEEEKTGLAVTVGQAKSVGKGLQVKAASVPVKGSLGQGTAPVLPGKTGPTVTQVKAEKQEDSESSEEESDSEEAAASPAQVKTSVKKTQAKANPAAARAPSAKGTISAPGKVVTAAAQAKQRSPSKVKPPVRNPQNSTVLARGPASVPSVGKAVATAAQAQTGPEEDSGSSEEESDSEEEAETLAQVKPSGKTHQIRAALAPAKESPRKGAAPTPPGKTGPSAAQAGKQDDSGSSSEESDSDGEAPAAVTSAQVIKPPLIFVDPNRSPAGPAATPAQAQAASTPRKARASESTARSSSSESEDEDVIPATQCLTPGIRTNVVTMPTAHPRIAPKASMAGASSSKESSRISDGKKQEGPATQVSKKNPASLPLTQAALKVLAQKASEAQPPVARTQPSSGVDSAVGTLPATSPQSTSVQAKGTNKLRKPKLPEVQQATKAPESSDDSEDSSDSSSGSEEDGEGPQGAKSAHTLVGPTPSRTETLVEETAAESSEDDVVAPSQSLLSGYMTPGLTPANSQASKATPKLDSSPSVSSTLAAKDDPDGKQEAKPQQAAGMLSPKTGGKEAASGTTPQKSRKPKKGAGNPQASTLALQSNITQCLLGQPWPLNEAQVQASVVKVLTELLEQERKKVVDTTKESSRKGWESRKRKLSGDQPAARTPRSKKKKKLGAGEGGEASVSPEKTSTTSKGKAKRDKASGDVKEKKGKGSLGSQGAKDEPEEELQKGMGTVEGGDQSNPKSKKEKKKSDKRKKDKEKKEKKKKAKKASTKDSESPSQKKKKKKKKTAEQTV

SEQ ID NO: 281916 - DNA, 4470 bp, Artificial Sequence
  derived and/or modified sequence
atggccgaggccagaaagagaagagagctgctgcccctgatctaccaccacctgctgagagccggctacgtgagagccgccagagaggtgaaggagcagagcggccagaagtgcttcctggcccagcccgtgaccctgctggacatctacacccactggcagcagaccagcgagctgggcagaaagagaaaggccgaggaggacgccgccctgcaggccaagaagaccagagtgagcgaccccatcagcaccagcgagagcagcgaggaggaggaggaggccgaggccgagaccgccaaggccacccccagactggccagcaccaacagcagcgtgctgggcgccgacctgcccagcagcatgaaggagaaggccaaggccgagaccgagaaggccggcaagaccggcaacagcatgccccaccccgccaccggcaagaccgtggccaacctgctgagcggcaagagccccagaaagagcgccgagcccagcgccaacaccaccctggtgagcgagaccgaggaggagggcagcgtgcccgccttcggcgccgccgccaagcccggcatggtgagcgccggccaggccgacagcagcagcgaggacaccagcagcagcagcgacgagaccgacgtggagggcaagcccagcgtgaagcccgcccaggtgaaggccagcagcgtgagcaccaaggagagccccgccagaaaggccgcccccgcccccggcaaggtgggcgacgtgaccccccaggtgaagggcggcgccctgccccccgccaagagagccaagaagcccgaggaggagagcgagagcagcgaggagggcagcgagagcgaggaggaggcccccgccggcaccagaagccaggtgaaggccagcgagaagatcctgcaggtgagagccgccagcgcccccgccaagggcacccccggcaagggcgccacccccgccccccccggcaaggccggcgccgtggccagccagaccaaggccggcaagcccgaggaggacagcgagagcagcagcgaggagagcagcgacagcgaggaggagacccccgccgccaaggccctgctgcaggccaaggccagcggcaagaccagccaggtgggcgccgccagcgcccccgccaaggagagccccagaaagggcgccgcccccgccccccccggcaagaccggccccgccgtggccaaggcccaggccggcaagagagaggaggacagccagagcagcagcgaggagagcgacagcgaggaggaggcccccgcccaggccaagcccagcggcaaggccccccaggtgagagccgccagcgcccccgccaaggagagccccagaaagggcgccgcccccgccccccccagaaagaccggccccgccgccgcccaggtgcaggtgggcaagcaggaggaggacagcagaagcagcagcgaggagagcgacagcgacagagaggccctggccgccatgaacgccgcccaggtgaagcccctgggcaagagcccccaggtgaagcccgccagcaccatgggcatgggccccctgggcaagggcgccggccccgtgccccccggcaaggtgggccccgccacccccagcgcccaggtgggcaagtgggaggaggacagcgagagcagcagcgaggagagcagcgacagcagcgacggcgaggtgcccaccgccgtggcccccgcccaggagaagagcctgggcaacatcctgcaggccaagcccaccagcagccccgccaagggccccccccagaaggccggccccgtggccgtgcaggtgaaggccgagaagcccatggacaacagcgagagcagcgaggagagcagcgacagcgccgacagcgaggaggcccccgccgccatgaccgccgcccaggccaagcccgccctgaagatcccccagaccaaggcctgccccaagaagaccaacaccaccgccagcgccaaggtggcccccgtgagagtgggcacccaggcccccagaaaggccggcaccgccaccagccccgccggcagcagccccgccgtggccggcggcacccagagacccgccgaggacagcagcagcagcgaggagagcgacagcgaggaggagaagaccggcctggccgtgaccgtgggccaggccaagagcgtgggcaagggcctgcaggtgaaggccgccagcgtgcccgtgaagggcagcctgggccagggcaccgcccccgtgctgcccggcaagaccggccccaccgtgacccaggtgaaggccgagaagcaggaggacagcgagagcagcgaggaggagagcgacagcgaggaggccgccgccagccccgcccaggtgaagaccagcgtgaagaagacccaggccaaggccaaccccgccgccgccagagcccccagcgccaagggcaccatcagcgcccccggcaaggtggtgaccgccgccgcccaggccaagcagagaagccccagcaaggtgaagccccccgtgagaaacccccagaacagcaccgtgctggccagaggccccgccagcgtgcccagcgtgggcaaggccgtggccaccgccgcccaggcccagaccggccccgaggaggacagcggcagcagcgaggaggagagcgacagcgaggaggaggccgagaccctggcccaggtgaagcccagcggcaagacccaccagatcagagccgccctggcccccgccaaggagagccccagaaagggcgccgcccccaccccccccggcaagaccggccccagcgccgcccaggccggcaagcaggacgacagcggcagcagcagcgaggagagcgacagcgacggcgaggcccccgccgccgtgaccagcgcccaggtgatcaagccccccctgatcttcgtggaccccaacagaagccccgccggccccgccgccacccccgcccaggcccaggccgccagcacccccagaaaggccagagccagcgagagcaccgccagaagcagcagcagcgagagcgaggacgaggacgtgatccccgccacccagtgcctgacccccggcatcagaaccaacgtggtgaccatgcccaccgcccaccccagaatcgcccccaaggccagcatggccggcgccagcagcagcaaggagagcagcagaatcagcgacggcaagaagcaggagggccccgccacccaggtgagcaagaagaaccccgccagcctgcccctgacccaggccgccctgaaggtgctggcccagaaggccagcgaggcccagccccccgtggccagaacccagcccagcagcggcgtggacagcgccgtgggcaccctgcccgccaccagcccccagagcaccagcgtgcaggccaagggcaccaacaagctgagaaagcccaagctgcccgaggtgcagcaggccaccaaggcccccgagagcagcgacgacagcgaggacagcagcgacagcagcagcggcagcgaggaggacggcgagggcccccagggcgccaagagcgcccacaccctggtgggccccacccccagcagaaccgagaccctggtggaggagaccgccgccgagagcagcgaggacgacgtggtggcccccagccagagcctgctgagcggctacatgacccccggcctgacccccgccaacagccaggccagcaaggccacccccaagctggacagcagccccagcgtgagcagcaccctggccgccaaggacgaccccgacggcaagcaggaggccaagccccagcaggccgccggcatgctgagccccaagaccggcggcaaggaggccgccagcggcaccaccccccagaagagcagaaagcccaagaagggcgccggcaacccccaggccagcaccctggccctgcagagcaacatcacccagtgcctgctgggccagccctggcccctgaacgaggcccaggtgcaggccagcgtggtgaaggtgctgaccgagctgctggagcaggagagaaagaaggtggtggacaccaccaaggagagcagcagaaagggctgggagagcagaaagagaaagctgagcggcgaccagcccgccgccagaacccccagaagcaagaagaagaagaagctgggcgccggcgagggcggcgaggccagcgtgagccccgagaagaccagcaccaccagcaagggcaaggccaagagagacaaggccagcggcgacgtgaaggagaagaagggcaagggcagcctgggcagccagggcgccaaggacgagcccgaggaggagctgcagaagggcatgggcaccgtggagggcggcgaccagagcaaccccaagagcaagaaggagaagaagaagagcgacaagagaaagaaggacaaggagaagaaggagaagaagaagaaggccaagaaggccagcaccaaggacagcgagagccccagccagaagaagaagaagaagaagaagaagaccgccgagcagaccgtgtag

SEQ ID NO: 281917 - DNA, 4470 bp, Artificial Sequence
  derived and/or modified sequence
atggcagaggccaggaaacggcgcgaactgctccccctcatttatcaccacctgctgcgcgctggctacgtgcgggccgccagggaagtgaaggaacagtcaggccagaaatgttttctggcccagcccgtcaccctcctcgatatatacactcactggcagcaaacaagcgagctgggccggaagaggaaagctgaagaagatgccgccctgcaggctaagaagacccgagtcagtgatcctatttccaccagtgagagcagcgaagaggaggaggaagccgaagctgagactgcaaaggccactcctcggctcgcctctaccaactcctcagtgctaggcgctgacttgccttctagtatgaaagaaaaggcgaaggcggagacagaaaaagcaggaaagaccgggaattctatgccccacccggcaactggaaagaccgtggccaatctactgtctggcaaatctcctcgaaagtctgcagaaccttccgctaacacaactctagtatccgaaactgaagaggaagggtccgtgcctgcgtttggcgccgccgccaaacccggcatggtctccgccgggcaagcagactcctcaagcgaagataccagttcctcctccgatgaaaccgacgtggaaggaaagcctagtgtgaaaccagcccaagtgaaagccagttctgtttcaaccaaggagtccccagccaggaaggcggctcccgcacccggcaaagtgggtgatgtgactcctcaggtaaaggggggggcattacccccggcaaaacgggccaagaagcctgaggaagagtcagagtcctctgaggaggggtctgagtccgaggaagaggcgcccgcaggtacccgcagccaagtcaaggcttctgagaaaattttgcaggtgagggccgcttccgcgcccgccaaagggacaccaggcaaaggtgccaccccggctccgccaggcaaggctggtgcagtagccagtcagaccaaggccggtaaaccagaggaggactcagaatcctcatccgaggaaagctccgactcagaagaggaaaccccagcagccaaggcacttctgcaagccaaagcctccggtaaaacatcccaggtgggcgccgcatcggccccagcaaaagaatcaccaaggaagggggcggcacctgcccctccaggcaaaacaggacctgccgtggctaaggcccaggctggtaaaagggaagaagatagccaatcctcaagcgaggagagcgacagcgaggaggaagccccagcccaggcaaagcctagcgggaaagcacctcaggttcgcgctgcaagcgcacctgctaaggaatcaccaagaaagggggccgcccctgctccacctcggaagactggtccagctgctgcccaggtgcaggtgggaaaacaagaggaagacagtagaagctcctctgaagagtcagactcagatagagaggctctggccgcgatgaacgccgctcaagtgaaaccacttgggaagtcaccccaagtcaagcctgccagtaccatggggatggggcccctgggcaagggtgcgggccctgtcccaccgggtaaggttggccccgctactccctctgctcaggtggggaagtgggaggaagatagcgagtccagtagtgaagagagttccgacagtagcgatggcgaggtgcctaccgcagtagcaccagcacaagaaaagagcttggggaacatccttcaggcgaagccaacaagctcccccgccaagggccctcctcagaaggctggtcctgtggccgtacaagtaaaggctgaaaaacctatggacaactccgagtcaagtgaggaaagctccgattccgctgactcggaggaggcccctgccgccatgacagccgcacaagctaaacccgcattgaagataccacaaaccaaggcctgcccgaagaagacaaatacaactgcatctgctaaagtggcccctgtacgcgttggaacccaggctccacgcaaagcagggacggctacttctcccgccggtagttcacccgccgtggccggcggcacacagcgccccgccgaagacagttcatcttccgaggaatcagattcggaagaggaaaagaccgggcttgctgtaacagtgggccaggcgaagagcgtgggcaagggtctccaggtgaaggctgcttcagtacccgtgaaaggcagccttggacagggcacggcacctgtactgcctggtaagaccggaccgaccgtgacccaggtgaaggctgagaagcaggaggactctgagagttcagaagaggagagtgactccgaggaagcggccgcttccccagcccaggtgaaaacctccgtgaaaaagacacaggcaaaggctaatcccgccgcagcgcgggccccaagcgctaagggcacaatttctgccccaggtaaagtggtgactgctgcagcccaggcgaaacaacggtctccttcaaaggtcaaacctcctgttcgcaacccacagaatagtacagtgcttgcccggggtccagcctccgtaccctccgttgggaaggctgtggccaccgccgcacaagcccagactgggcctgaggaagactctgggtcatcagaggaggagagcgatagtgaagaggaagctgaaacattggcgcaggtaaagcctagtgggaaaacacaccagattagagctgccttggcacccgctaaggagagtcctcgcaaaggcgcagctcctacccctcccgggaaaacgggcccctcggctgcccaggcaggcaagcaagacgacagtgggagttcttcagaagaatctgacagcgacggcgaagcccctgctgcggtcacatcagcccaagtgatcaagcctcccctgatattcgtggacccaaatcgtagcccagcaggccccgccgcaactccagcccaggcccaggcagctagcacgccgcgcaaagcgagggcctcggagtctactgctcgcagttcaagcagtgagagtgaggatgaggacgtgattcctgctactcaatgtttaacaccagggatacgaaccaatgtggtcacgatgcctactgctcaccccaggatcgctcctaaggctagcatggcgggcgcttcaagttctaaagagagctctaggatctccgacggcaagaaacaggaggggcctgcgacgcaggtctctaaaaaaaatccagccagcctgcctttgacccaagccgctttgaaggtgctcgctcaaaaggccagcgaggctcaacctccagtggcaaggacacagccatccagcggtgtggattctgccgtgggaaccttgcccgccaccagcccccaatctacgagcgtgcaggccaagggaactaataaactacggaagccaaagttgcctgaggtccaacaagctactaaggcacctgagtcctccgatgacagtgaggattccagcgactcctcctctggatctgaggaagacggcgaaggtccacagggagccaaaagcgctcacacactcgtgggcccaaccccatcccgaacagaaacccttgtcgaagagaccgccgctgagtcctcagaagacgacgtggttgcccctagccagtccttgctttccggctacatgacccctggcctgactcccgccaattctcaggcatctaaggccacacccaaactggacagttccccatccgtgtcatccaccctcgccgcgaaggatgaccctgacggaaaacaggaggctaaaccccaacaggctgctggcatgctgtccccaaagacaggcgggaaggaagccgccagtggtactactcctcaaaagtcaaggaaacccaagaaaggagcgggaaaccctcaggcttccactctcgcgctccagagtaacataacccagtgtttgctggggcagccctggccactgaacgaggctcaagttcaggcctctgtggttaaggtgttgaccgagttgctcgaacaagagcgcaagaaggtcgttgataccaccaaggagagctcaaggaaaggatgggagtcccgcaagcgcaaattatccggggatcagcccgccgcacgtacaccccgcagcaaaaaaaagaagaagctaggagccggcgaaggcggcgaagctagtgtgtctcccgagaaaaccagtaccactagcaagggaaaagccaagcgggataaggcgagcggagacgtgaaggaaaaaaagggcaaaggctcactgggatcccaaggcgcgaaagacgagcctgaagaggagctgcagaaaggaatgggcaccgtggaaggcggtgaccagtccaatcctaaatccaaaaaggagaagaagaagtcggataaaagaaagaaggataaagagaagaaagaaaagaagaagaaggcgaagaaggcgagtactaaggactccgagagtccttcacaaaaaaagaagaagaagaagaagaaaactgccgagcagactgtttag

SEQ ID NO: 281918 - DNA, 4470 bp, Artificial Sequence
  derived and/or modified sequence
atggccgaggccaggaagagaagagagctgctgcccctcatctaccaccacctgctgcgggccggctacgtgcgggccgcccgggaggtgaaggagcagagcggccagaagtgcttcctggcccagcctgtgaccctgctggacatctacacccactggcagcagaccagcgagctgggcaggaagaggaaggccgaggaggatgctgccctgcaggccaagaagaccagggtgtctgaccccatcagcaccagcgagagcagcgaggaggaggaggaggccgaggccgagacagccaaggccaccccccggctggccagcaccaacagctctgtgctgggcgctgacctgcccagctccatgaaggagaaggccaaggccgagacagagaaggccggcaagacaggcaacagcatgccccacccagccaccgggaagacagtggccaacctgctgagcggcaagagccccaggaagtctgctgagcccagcgccaacaccaccctggtgtctgaaacagaggaggagggctctgtgcctgccttcggggctgctgccaagccaggcatggtgtctgctggccaggccgacagcagcagcgaggacaccagcagcagcagtgatgaaacagatgtggagggcaagcccagcgtgaagccagcccaggtgaaggccagctctgtgtccaccaaggagagccctgccaggaaggccgccccagcccctgggaaggtgggagatgtgaccccccaggtgaagggcggggccctgcccccagccaagagggccaagaagccagaggaggagagcgagagcagcgaggagggcagcgagagcgaggaggaggccccagctggcaccaggagccaggtgaaggccagcgagaagatcctgcaggtgcgggccgccagcgccccagccaagggcaccccaggaaaaggagccaccccagcccctcctgggaaggccggggctgtggccagccagaccaaggccggcaagccagaagaagattctgagagcagcagcgaggagagcagtgacagcgaggaggagaccccagctgccaaggccctgctgcaggccaaggccagcggcaagaccagccaggtgggcgccgccagcgccccagccaaggagagccccaggaagggggccgccccagcccctcctgggaagacaggccctgctgtggccaaggcccaggccggcaagcgggaggaggacagccagagcagcagcgaggagagtgacagcgaggaggaggccccagcccaggccaagcccagcggcaaggccccccaggtgcgggccgccagcgccccagccaaggagagccccaggaaaggagctgccccagccccacccaggaagacaggccctgctgctgcccaggtgcaggtgggcaagcaggaggaggacagccgcagcagcagcgaggagagtgacagcgaccgggaggccctggccgccatgaatgctgcccaggtgaagcccctgggcaagagcccccaggtgaagccagccagcaccatgggcatgggccccctgggcaaaggagctggccctgtgcccccaggcaaggtgggccctgccaccccatctgcccaggtgggcaagtgggaggaggacagcgagagcagcagcgaggagagcagtgacagcagtgatggagaggtgcccacagctgtggccccagcccaggagaagagcctgggcaacatcctgcaggccaagcccaccagcagccctgccaagggccccccccagaaggccggccctgtggccgtgcaggtgaaggccgagaagcccatggacaacagcgagagcagcgaggagagcagtgacagcgctgacagcgaggaggccccagctgccatgacagctgcccaggccaagccagccctgaagatcccccagaccaaggcctgccccaagaagaccaacaccacagccagcgccaaggtggcccctgtgcgggtgggcacccaggcccccaggaaggccggcacagccaccagccctgctggcagcagccctgctgtggccggcggcacccagaggcctgctgaggacagcagcagcagcgaggagagtgacagcgaggaggagaagacaggcctggccgtgacagtgggccaggccaagtctgtgggcaagggcctgcaggtgaaggccgcctctgtgcctgtgaagggcagcctgggccagggcacagcccctgtgctgcccgggaagacaggccccaccgtgacccaggtgaaggccgagaagcaggaggacagcgagagcagcgaggaggagagtgacagcgaggaggccgccgccagccctgcccaggtgaagacctctgtgaagaagacccaggccaaggccaacccagctgctgcccgggcccccagcgccaagggcaccatcagcgcccctgggaaggtggtgacagctgctgcccaggccaagcagaggagccccagcaaggtgaagccccctgtgaggaacccccagaacagcacagtgctggcccggggccctgcctctgtgcccagcgtgggcaaggctgtggccacagctgcccaggcccagacaggccctgaggaggacagcggcagcagcgaggaggagagtgacagcgaggaggaggccgagaccctggcccaggtgaagcccagcggcaagacccaccagatccgggccgccctggccccagccaaggagagccccaggaaaggagctgcccccaccccacctgggaagacaggccccagcgctgcccaggccggcaagcaggatgacagcggcagcagcagcgaggagagtgacagtgatggagaggccccagctgctgtgaccagcgcccaggtgatcaagcccccactcatctttgtggaccccaacagaagccctgctggccctgctgccaccccagcccaggcccaggccgccagcacccccaggaaggcccgggccagcgagagcacagcccggagcagcagcagcgagagtgaagatgaagatgtgatcccagccacccagtgcctgaccccaggcatccgcaccaacgtggtgaccatgcccacagcccaccccagaattgcccccaaggcctccatggccggggccagcagcagcaaggagagcagccgcatcagtgatggcaagaagcaggagggccctgccacccaggtgtccaagaagaacccagccagcctgcccctgacccaggccgccctgaaggtgctggcccagaaggccagcgaggcccagccccctgtggcccggacccagcccagcagcggcgtggacagcgctgtgggcaccctgcctgccaccagcccccagagcacctctgtgcaggccaagggcaccaacaagctgaggaagcccaagctgcctgaggtgcagcaggccaccaaggcccctgagagcagtgatgacagcgaggacagcagtgacagcagcagcggcagcgaggaggatggagagggcccccagggcgccaagagcgcccacaccctggtgggccccacccccagcaggacagagaccctggtggaggagacagctgctgagagcagtgaagatgatgtggtggcccccagccagagcctgctgagcggctacatgaccccaggcctgaccccagccaacagccaggccagcaaggccacccccaagctggacagcagccccagcgtgagcagcaccctggccgccaaggatgatcctgatggcaagcaggaggccaagccccagcaggccgccggcatgctgagccccaagacaggaggcaaggaggccgccagcggcaccaccccccagaagagcaggaagcccaagaagggggccggcaacccccaggccagcaccctggccctgcagagcaacatcacccagtgcctgctgggccagccctggcccctgaatgaggcccaggtgcaggcctctgtggtgaaggtgctgacagagctgctggagcaggagaggaagaaggtggtggacaccaccaaggagagcagcaggaagggctgggagagcaggaagaggaagctgagcggggaccagcctgctgcccggacccccaggagcaagaagaagaagaagctgggcgctggggagggcggggaggcctctgtgtccccagagaagaccagcaccaccagcaagggcaaggccaagagggacaaggccagcggagatgtgaaggagaagaagggcaagggcagcctgggcagccagggcgccaaggatgagcctgaggaggagctgcagaagggcatgggcaccgtggagggcggggaccagagcaaccccaagagcaagaaggagaagaagaagagtgacaagaggaagaaggacaaggagaagaaggagaagaagaagaaggccaagaaggccagcaccaaggacagcgagagccccagccagaagaagaagaagaagaagaagaagacagctgagcagacagtgtag

SEQ ID NO: 281919 - DNA, 4470 bp, Artificial Sequence
  derived and/or modified sequence
atggccgaggcccggaagcggcgggagctgctgcccctgatctaccaccacctgttgcgagccgggtacgttagagccgccagagaggtaaaggaacagtctggacagaagtgctttctcgcccaaccagttacactcctcgacatctatactcactggcaacaaacaagcgagctgggccgcaagcgcaaagcggaggaggatgctgcgctccaggctaagaagaccagggtgtccgatcctatcagtacatctgaatcaagcgaagaggaggaggaagccgaggccgaaacagccaaagctaccccgcgcctcgcgtctaccaactcatcagttctgggtgccgacctgccgtcgagcatgaaggagaaagcaaaggctgagaccgaaaaggccggcaagaccggaaactccatgccccacccagccactgggaagacggtcgccaatttactgtctggaaaatcaccacgcaaaagtgctgagccaagtgcgaacaccactctggtgtctgagacagaggaggaaggctccgtgcctgcatttggcgccgcagctaagccagggatggtgtcggccgggcaggctgattcatccagtgaagacacaagctcaagcagcgatgagaccgacgtagagggcaaacctagtgtgaaaccagcccaagtgaaggcttcttcggtttcaactaaggagtcccccgcacgtaaagccgcccctgcccccggaaaggttggtgacgtcactccccaggtcaagggtggggccctgcctccagccaagcgagccaaaaaaccagaggaagagagtgaatcctctgaagagggaagcgaatccgaggaagaggcacctgccggaactcggagccaggtgaaagcatccgaaaagattctacaagtcagagctgccagcgctcccgcaaagggtacgccaggcaaaggtgctacccccgccccacccggcaaagctggagcggtggcctctcaaaccaaagcaggtaagccagaagaggactcggagtccagttctgaagagtcctctgattccgaggaagagacccctgctgctaaagcacttctgcaagctaaggcaagcggtaaaactagccaggtgggggcagcctcagctccagctaaagaatccccaaggaagggggctgctcctgctccccccggaaagactggacctgccgtggcgaaggcacaggccggaaagagggaggaagattcacagtcctcttccgaggaaagtgactctgaggaggaagccccagcccaggccaagccctccggtaaagcccctcaagtgagggcggcctcagcgcccgcaaaggagtcacctagaaagggtgcagcacctgcccctcctcgtaagacagggccagccgccgcacaggttcaggtggggaaacaggaagaagattctcggtcctcatcagaggaaagcgattctgacagagaagctcttgccgccatgaacgctgcacaggtgaagccccttggaaaatccccacaagtgaagcctgcctccacaatgggcatgggcccattgggcaagggcgctggacccgtgcctcccggtaaggtaggcccagccacaccttccgcgcaggttgggaaatgggaggaggactccgagtcatccagcgaggagagctccgacagcagtgacggcgaggtgccaactgctgtcgcccctgcgcaggagaaaagtctggggaatatcttgcaggcaaaacccacgagctctcccgccaaagggccacctcagaaagccgggccagtggctgtccaggtaaaagcagagaagccaatggataattccgagtccagcgaggaaagcagtgatagtgctgacagtgaggaggcgcccgccgcgatgactgcggcccaggccaagccggccctcaagattcctcagacaaaagcctgtccaaagaaaacaaataccacggccagtgctaaagtcgcgcccgtccgggtgggtacccaggcaccaaggaaggctggcactgccaccagtcccgccggctcttctccagccgtggcaggaggcactcaaaggcctgcagaggactccagcagctccgaggagtcagacagcgaggaggagaagaccggcctggctgtgacagtaggtcaggcaaaatccgtgggcaagggattgcaggtgaaagcagcctcagtgcctgtcaagggtagtctcggacagggcactgctccggtactacctggaaagacaggccccactgtcacacaggtcaaggcggagaagcaagaagacagtgagtcctctgaggaggaatcagatagcgaggaggccgctgcaagccctgcccaagttaagacttctgtcaagaaaactcaggctaaggcaaatcccgctgctgctcgcgccccttcagccaaaggaacaattagcgctccaggtaaagtggttaccgcagccgcccaggcaaagcagcgttctccatcaaaagtgaaaccccctgtgcgcaatccacagaactcaaccgtgttggcccgcggcccggccagcgtcccctctgtcggcaaggctgttgccaccgccgcgcaggcccagacgggcccagaggaggattccgggagttcagaggaagaaagcgattccgaggaggaggcagaaactctggcgcaggttaaacctagcggcaaaacccaccagattagggctgctcttgcccccgctaaagagtcccctagaaaaggtgccgctcccacaccgcccggcaagacgggccccagcgccgcccaagcaggcaagcaggacgactcgggctcctcctccgaagagagtgactccgatggtgaggctcctgccgccgtgacttctgcccaggtgatcaagcccccactgatatttgtcgatcccaataggagcccagcggggcctgcagctactcctgcacaggcacaggcagcgagcaccccacggaaggcacgcgcatcagagagcaccgccagatcaagcagtagcgagtccgaagatgaagatgtcattccagctactcagtgtctcacccccggcattcgaaccaatgtggtgaccatgcccaccgcccatcctagaatcgcgcctaaagctagcatggccggtgcatcatcaagcaaggaaagctcccgaattagcgacggcaaaaaacaggagggtcccgccacacaagtttctaagaagaatccagcgtcccttcccctgacacaggcagcactgaaagtgctagctcaaaaggcctcagaggctcagcctccagtggctcgtactcagccaagcagtggagtggattctgcagtgggcacactgcctgccacaagcccacaaagcacttccgtccaggcaaaaggtaccaataaattgaggaaacccaaactgcctgaggtccaacaagcaacaaaggcccctgagtcttccgacgattcagaagatagctcagactctagctcgggcagcgaagaagacggggaggggccacagggggcaaaatctgctcacactctcgtcggccctaccccaagccggaccgaaacactcgtagaggagactgcagccgagagctccgaagacgacgtcgttgcaccgagccagtcactgttgagtggatacatgacccctggactcacccccgctaacagccaggcctctaaggcaacgccaaagcttgattcctcaccctctgtatcaagcactctggccgctaaggatgacccggacgggaagcaagaggctaagccccagcaggccgctggtatgctgtccccgaagaccggtggcaaagaagcagcttcaggtaccacgcctcagaagagccggaaacccaagaaaggcgccggcaacccccaggcgagcaccttggccttacagtccaatatcacacaatgtttgcttggacagccttggccactcaatgaagcacaagttcaggccagtgtggttaaggtgctgaccgaactgctggagcaggagcggaaaaaggtggtagatacaaccaaggaatcttcacgcaaagggtgggaaagccgaaagcgtaagctttctggagaccagcccgctgctcggacacctcgttcgaagaaaaagaagaaactgggagcaggcgaagggggtgaggctagcgtgtcaccggagaagacctcaacgacaagcaagggcaaggccaagagagacaaagcctctggggacgtaaaggagaagaaaggcaaaggctccctgggctcccagggagcgaaggatgagccagaggaggaactgcaaaagggaatgggcacagtggagggtggggaccagtccaacccaaagtccaaaaaggaaaaaaagaagtcagataaaaggaagaaggataaggagaaaaaggaaaagaaaaagaaagccaagaaagcatcgactaaagactccgagtcaccatcccaaaagaaaaagaagaagaaaaaaaagacagccgaacagaccgtatag

SEQ ID NO: 281920 - DNA, 4470 bp, Artificial Sequence
  derived and/or modified sequence
atggcagaggcgaggaaacggagagagctgctgcctctaatttaccaccaccttctccgcgctggctacgtacgtgccgcaagagaggttaaggagcagtctggacagaaatgcttccttgcgcaacccgtgactctgctggatatttatactcactggcagcaaacttctgaattgggcagaaagagaaaagcagaagaggacgcagccctccaggcaaagaagactcgcgtatcagacccaatctccacatcagaatcaagcgaagaggaggaagaggctgaagcagagacagcaaaggccacccctcgcctggcctctacgaattcttcagtgcttggagcagacctgccttcctccatgaaggaaaaggccaaagccgagactgagaaagctggcaaaacgggaaacagcatgccacaccccgctaccgggaagacagttgccaatctgctgagcggaaagagcccccgaaaatctgcagaaccatcggccaacaccacactagtgagcgaaacggaagaggagggatccgtcccagctttcggcgctgctgccaaaccagggatggtttccgccggacaagctgattcttccagtgaagacacaagctcctcctccgacgaaactgacgtcgaaggtaagcctagcgttaaaccggctcaggtcaaggcttcctctgtcagtaccaaagagagtcccgcacgcaaagccgctccggcaccagggaaggtcggtgacgtcacccctcaggttaagggcggagcccttccccctgcaaagcgcgctaaaaaacccgaggaagaaagcgagagttccgaggaaggaagcgaaagtgaggaggaggcacccgctggtacacggtcacaggtgaaggctagcgaaaaaatccttcaagtgcgagcggctagtgcccctgctaaagggacacctggcaaaggcgcaactcctgccccaccaggcaaagccggtgctgtcgccagccagactaaagctgggaagcccgaagaagactccgaaagctcttcggaagaaagcagtgatagcgaggaagagacccccgctgcaaaagccctgttgcaggctaaggccagcggaaagactagccaggtgggggctgccagcgccccagctaaagaatccccacggaaaggggctgcacccgcacccccagggaaaaccggcccagctgtggcgaaggcccaggccggtaaacgggaggaggacagtcagtcatcctccgaagagtccgactcagaagaagaagcccctgcccaggcgaagccaagtggcaaggcccctcaagtgagagctgcatccgcccctgccaaagaatccccgagaaagggcgctgcccctgcacctcccagaaaaacgggtcccgcagccgcacaggtccaggtggggaagcaggaagaagactccaggagcagctccgaggaaagcgatagtgatcgggaagcactagctgcaatgaacgctgctcaggtgaaacctctgggcaagtcaccccaggtcaaacctgcttctactatgggtatgggtccactgggtaaaggtgcaggacccgtacccccagggaaagtcggacctgcaaccccctccgcccaggtgggcaaatgggaggaggactcagagtcatcgtcggaggagtcctccgattcttcggacggagaggtgcctacggccgtagccccagcgcaggaaaagtcattgggcaacatcctgcaagcgaagcctacctcatcccctgccaagggccctccccaaaaagctggccctgtcgctgtgcaagtgaaggctgaaaaacccatggacaattcagaatcttctgaagagtcctccgatagtgcagattcggaagaagccccagccgcaatgactgctgcgcaggcgaaacctgctctcaaaataccccaaaccaaggcttgccccaaaaagacgaatacaactgcctccgctaaggtggcccctgtgcgggtcggaacccaggctccccgaaaggctggcaccgccaccagtcctgctggttcttctcctgcagtcgctggaggcacacaacggcctgcggaagatagctcaagcagcgaagagagtgactccgaagaggagaaaacagggcttgctgtcaccgtggggcaagccaagagtgtcggaaagggcctccaagtcaaggcagcttccgtccccgttaagggcagtcttgggcaggggacagcgcctgttctgccaggaaagactggcccaaccgtaacacaggtaaaggccgagaagcaagaggattccgagagctctgaagaggaatcagattccgaggaggctgccgcatctcctgctcaggtcaaaacttccgtgaagaagacacaggcaaaagcaaatcctgctgccgcacgagcgccttccgcaaagggcactatttcagcccctggcaaggtggttacagctgccgcacaggccaagcagaggtctccatccaaggtgaaaccccctgtgaggaaccctcaaaattcaacagtgctcgcaagaggtcccgcttctgttcctagcgtgggaaaagccgtagccactgccgcacaggcccagaccggaccagaggaggacagtggcagctcagaggaggagtccgactccgaggaagaagcagagacgctggcccaggtgaagcctagcggcaagacacatcagattcgcgcagccctggctccagctaaagagtccccgaggaagggggcagctcctacgccccctggaaagactggcccaagtgccgctcaggcaggaaaacaggatgattctgggtccagctccgaagaatccgactctgatggggaagcccctgccgctgtaacaagcgcccaagtgattaaaccacctttgatttttgtggatcccaatagatcccctgctggaccggctgccacccctgctcaggcgcaagcagcatccacgcctaggaaggccagagcctcagagtcaacagctagaagctctagcagtgagtctgaagacgaagacgtgatcccggcaacccagtgcctgactcccggtatcaggacaaatgtggttaccatgccaaccgcccaccctagaatcgcacctaaggcatcaatggccggtgccagtagttccaaggaatctagcaggatcagtgacggcaagaagcaggaagggcctgcgacccaggtctcgaaaaagaacccggcttctctccctcttacccaggctgctctgaaagtgctggcgcagaaggcttccgaagcccaaccgcctgttgcaaggacccagccatcttccggagttgacagcgcggtcggcacactgcccgcaacatctccccaaagcaccagcgtgcaggcaaagggaaccaataagcttcgcaagccgaagttaccggaggtgcagcaggctacaaaggctccagagtcatccgacgactccgaagatagttctgatagcagctccggcagcgaagaggacggggaaggccctcagggtgctaagtcggcccacaccttggtggggccaactccttcacggaccgagactctggtggaggaaactgctgccgagtcctccgaagatgatgtcgttgccccatctcaaagcttgctttctggctacatgactcccggtctcacaccggctaattctcaggccagtaaggctacacccaagctggacagtagcccctccgtgtcatccacattagccgctaaggacgacccagatggaaaacaggaggctaaaccccagcaggcggcaggtatgctaagtcccaaaacaggtgggaaggaagctgcttcaggcactactcctcagaagtcacgcaaaccaaagaagggcgctggcaatccacaggcttccacgttggcactccaaagtaatattacacaatgcttactgggccaaccctggcctctcaatgaggcccaagttcaggctagcgtggtgaaagtgctcaccgagttactggagcaggagcgcaagaaagtggtcgacacaaccaaggagtcctctcggaagggttgggaatcccggaagcggaaactgtcgggtgatcaacccgctgctcggactccgcgatcaaaaaaaaagaagaaactgggcgctggtgaaggtggagaagcttcggtgagcccggagaaaactagcacaaccagcaaggggaaagctaaaagagataaggctagtggggacgtgaaagagaagaaaggcaaaggcagtctgggcagtcaaggagctaaggacgaacctgaggaggaactgcagaagggtatgggcacagtggagggtggagaccagtcaaaccctaagagcaaaaaggagaagaagaagagcgataagaggaagaaagacaaagagaaaaaagagaaaaaaaagaaagcgaagaaagcatcaactaaggactccgaaagtcctagccagaagaagaaaaaaaaaaaaaagaaaactgctgagcaaaccgtgtag

SEQ ID NO: 281921 - DNA, 5098 bp, Artificial Sequence
  derived and/or modified sequence
gaaagaggagccggaagtgtggcgcgcgaggtctaagggcgcgagggaagtggcgggcggggactaaggcggggcgtgcaggtagccggccggccgggggtcgcgggtatggccgaggccaggaagcggcgggagctacttcccctgatctaccaccatctgctgcgggctggctatgtgcgtgcggcgcgggaagtgaaggagcagagcggccagaagtgtttcctggctcagcccgtaacccttctggacatctatacacactggcaacaaacctcagagcttggtcggaagcggaaggcagaggaagatgcggcactgcaagctaagaaaacccgtgtgtcagaccccatcagcacctcggagagctcggaagaggaggaagaagcagaagccgaaaccgccaaagccaccccaagactagcatctaccaactcctcagtcctgggggcggacttgccatcaagcatgaaagaaaaagccaaggcagagacagagaaagctggcaagactgggaattccatgccacaccctgccactgggaagacggtggccaaccttctttctgggaagtctcccaggaagtcagcagagccctcagcaaatactacgttggtctcagaaactgaggaggagggcagcgtcccggcctttggagctgctgccaagcctgggatggtgtcagcgggccaggccgacagctccagcgaggacacctccagctccagtgatgagacagacgtggaggggaaaccctcagtaaaaccagcccaggtcaaagcctcatcagtttctactaaggagtctccagcaagaaaggcggccccagcccctgggaaggtgggggatgtgacaccccaggtcaaaggaggggccctgcccccagccaagagggccaagaagccagaagaggagtcagagagtagtgaggagggatctgaaagtgaggaggaggcccctgcagggacacgaagccaggtaaaggcctctgaaaaaattctccaggtcagagctgcctcagcccctgccaaggggacccctgggaaaggggctaccccagcaccccctgggaaggcaggggctgtagcctcccagaccaaggcagggaagccagaggaggactcagagagcagcagcgaggagtcatctgacagtgaggaggagacgccagctgccaaggccctgcttcaggcgaaggcctcaggaaaaacctctcaggtcggagctgcctcagcccctgccaaggagtcccccaggaaaggagctgccccagcgccccctgggaagacagggcctgcagttgccaaggcccaggcggggaagcgggaggaggactcgcagagcagcagcgaggaatcggacagtgaggaggaggcgcctgctcaggcgaagccttcagggaaggccccccaggtcagagccgcctcggcccctgccaaggagtcccccaggaaaggggctgccccagcacctcctaggaaaacagggcctgcagccgcccaggtccaggtggggaagcaggaggaggactcaagaagcagcagcgaggagtcagacagtgacagagaggcactggcagccatgaatgcagctcaggtgaagcccttggggaaaagcccccaggtgaaacctgcctctaccatgggcatggggcccttggggaaaggcgccggcccagtgccacccgggaaggtggggcctgcaaccccctcagcccaggtggggaagtgggaggaggactcagagagcagtagtgaggagtcatcagacagcagtgatggagaggtgcccacagctgtggccccggctcaggaaaagtccttggggaacatcctccaggccaaacccacctccagtcctgccaaggggccccctcagaaggcagggcctgtagccgtccaggtcaaggctgaaaagcccatggacaactcggagagcagcgaggagtcatcggacagtgcggacagtgaggaggcaccagcagccatgactgcagctcaggcaaaaccagctctgaaaattcctcagaccaaggcctgcccaaagaaaaccaataccactgcatctgccaaggtcgcccctgtgcgagtgggcacccaagccccccggaaagcaggaactgcgacttctccagcaggctcatccccagctgtggctgggggcacccagagaccagcagaggattcttcaagcagtgaggaatcagatagtgaggaagagaagacaggtcttgcagtaaccgtgggacaggcaaagtctgtggggaaaggcctccaggtgaaagcagcctcagtgcctgtcaaggggtccttggggcaagggactgctccagtactccctgggaagacggggcctacagtcacccaggtgaaagctgaaaagcaggaagactctgagagcagtgaggaggaatcagacagtgaggaagcagctgcatctccagcacaggtgaaaacctcagtaaagaaaacccaggccaaagccaacccagctgccgccagagcaccttcagcaaaagggacaatttcagcccctggaaaagttgtcactgcagctgctcaagccaagcagaggtctccatccaaggtgaagccaccagtgagaaacccccagaacagtaccgtcttggcgaggggcccagcatctgtgccatctgtggggaaggccgtggctacagcagctcaggcccagacagggccagaggaggactcagggagcagtgaggaggagtcagacagtgaggaggaggcggagacgctggctcaggtgaagccttcagggaagacccaccagatcagagctgccttggctcctgccaaggagtcccccaggaaaggggctgccccaacacctcctgggaagacagggccttcggctgcccaggcagggaagcaggatgactcagggagcagcagcgaggaatcagacagtgatggggaggcaccggcagctgtgacctctgcccaggtgattaaaccccctctgatttttgtcgaccctaatcgtagtccagctggcccagctgctacacccgcacaagcccaggctgcaagcaccccgaggaaggcccgagcctcggagagcacagccaggagctcctcctccgagagcgaggatgaggacgtgatccccgctacacagtgcttgactcctggcatcagaaccaatgtggtgaccatgcccactgcccacccaagaatagcccccaaagccagcatggctggggccagcagcagcaaggagtccagtcggatatcagatggcaagaaacaggagggaccagccactcaggtgtcaaagaagaacccagcttccctcccactgacccaggctgccctgaaggtcctcgcccagaaagccagtgaggctcagcctcctgttgccaggacccagccttcaagtggggttgacagtgctgtgggaacactccctgcaacaagtccccagagcacctccgtccaggccaaagggaccaacaagctcagaaaacctaagcttcctgaggtccagcaggccaccaaagcccctgagagctcagatgacagtgaggacagcagcgacagttcttcagggagtgaggaagatggtgaagggccccagggggccaagtcagcccacacgctggtaggtcccaccccctccaggacagagaccctggtggaggagaccgcagcagagtccagcgaggatgatgtggtggcgccatcccagtctctcctctcaggttatatgacccctggactaaccccagccaattcccaggcctcaaaagccactcccaagctagactccagcccctcagtttcctctactctggccgccaaagatgacccagatggcaagcaggaggcaaagccccaacaggcagcaggcatgttgtcccctaaaacaggtggaaaagaggctgcttcaggcaccacacctcagaagtcccggaagcccaagaaaggggctgggaacccccaagcctcaaccctggcgctgcaaagcaacatcacccagtgcctcctgggccaaccctggcccctgaatgaggcccaggtgcaggcctcagtggtgaaggtcctgactgagctgctggaacaggaaagaaagaaggtggtggacaccaccaaggagagcagcaggaagggctgggagagccgcaagcggaagctatcgggagaccagccagctgccaggacccccaggagcaagaagaagaagaagctgggggccggggaaggtggggaggcctctgtttccccagaaaagacctccacgacttccaaggggaaagcaaagagagacaaagcaagtggtgatgtcaaggagaagaaagggaaggggtctcttggctcccaaggggccaaggacgagccagaagaggagcttcagaaggggatggggacggttgaaggtggagatcaaagcaacccaaagagcaagaaggagaagaagaaatccgacaagagaaaaaaagacaaagaaaaaaaagaaaagaagaagaaagcaaaaaaggcctcaaccaaagattctgagtcaccgtcccagaagaaaaagaagaaaaagaagaagacagcagagcagactgtatgacgagcaccagcaccaggcacagggatttcctagccgagcagtggccatccccatgcctctgacctccaccgacctctgcccaccatgggttggaactaaactgttaccttccctcgctccacagaagaagacagccagcttcaggggtccctgtgctggccaagccagtgagcctgcggggaggctggtccaaggagaaagtggaccagctcccatgacctcaccccactcccccaacacaggacgcttcatatagatgtgtacagtatatgtatttttttaagtgacctcctctccttccacagaccccacatgcccaaaggcctcgggacttcccaccaccttgctccacagatccagctaggcctgacctgtgcctcatcccgtgccgctcggtctctggctgatcccgaggctttgtcttcctctcgtcagttcttttggttgtgttttttgttttttttttaataactcaaaaaaaaaataaaagacttggaggaagggtgcaagctcccagtgc

SEQ ID NO: 281922 - protein, 1188 aa, Artificial Sequence
  derived and/or modified sequence
MGPRKKSVKTCIMNNEIPEEMTADETKDYMNQLSHEVLCHIFRYLPLQDIMCMECLSRKLKEAVTLYLRVVRVVDLCAGRWWEYMPSGFTDASFLTLLKKMPDVEQLYGLHPRYLERRRVRGHEAFSIPGVLEALQACPNLVGVETSHLELVESIWTYMPHVHILGKFRNRNGAFPIPPENKLKIPIGAKIQTLHLVGVNVPEIPCIPMLRHLYMKWVRLTKPQPFKDFLCISLRTFVMRNCAGPTNSLKYVPLVTGLASARNLEHLEMVRVPFLGGLIQHVVEDSWRSGGFRNLHTIVLGACKNALEVDLGYLIITAARRLHEVRIQPSLTKDGVFSALKMAELEFPQFETLHLGYVDEFLLQSRMANADLVKYGLADVVENPGIITDIGMKAVNEVFSCIKYLAIYNCPHLHNPYNWISDHSRWTRLVDINLVRCHALKLDSFGQFIELLPSLEFISLDQMFREPPKGCARVGLSAGTGIGVSSALVSNQNSNNDDNNAQNNNANIHDNNHHHPDDSDEENDFRQDLQPGEQQFAADALNEMEDIVQEDGEVVAESGNNTPAHSQAIIPVDVDEEQAGPSGLQRVVKPTSITVHDSESDDEEDSLELQEVWIPKNGTRRYSEREEKTGESVQSRELSVSGKGKTPLRKRYNSHQMGQSKQFPLEESSCEKGCQVTSEQIKADMKAARDIPEKKKNKDVYPSCSSTTASTVGNSSSHNTASQSPDFVRTVNSGGSSEPSPTEVDVSRQCACSPGGSEDSEAMEEGDAESSVCPRCCCHRPQESQRRTSRCSDEERPSTSRACVVNGPDGTRSAFSFRTLPQGGSSGPAHDERTNGSGSGATGEDRRGSSQPESCDVQSNEDYPRRPLTRARSRLSHVLLVSESEVAKTKPRHAMKRKRTADKSTSTSDPVIEDDHVQVLVLKSKNLVGVTMTNCGITDLVLKDCPKMMFIHATRCRVLKHLKVENAPIVNRFDYAQCKKLNMDQVLDQILRMPPERNRIIYLRPMQQVDTLTLEQKLFSGPYPYHICIIHEFSNPPNVRNKVRIRSWMDTIANINQELIKYEFFPEATRSEEDLKKYPKYPWGREIYTLEGVVDGAPYSMISDFPWLRSLRAAEPNSFARYDFEDDEESTIYAPRRKGQLSADICMETIGEEISEMRQMKKGVFQRVVAIFIHYCDVNGEPVEDDYI

SEQ ID NO: 281923 - DNA, 4424 bp, Artificial Sequence
  derived and/or modified sequence
atgcgagcggcggcggaagcggaagtgcctcagcggtaggggccggggaagtgtctgtagcgtccctccctctcaaccacaataacaggcggagggtcggcgtaggtactttgaactcaagtaaacaaaagggaagattttctcgttgatactggagactgcacaacaatggggccacgaaagaaaagtgtgaaaacatgtatcatgaataatgaaattccagaagaaatgacagcagatgaaacaaaggactatatgaatcaactttcacatgaagtactttgccatatttttaggtacctccctctgcaggatatcatgtgtatggaatgtctttcccggaagctaaaggaagcagtgaccctatatctgcgagttgtgagagttgtagatctctgtgcagggcggtggtgggaatacatgccaagtggctttacagatgccagttttctaacactattaaagaagatgccagatgttgaacagctatatggccttcaccctcgataccttgagaggcgaagagtaaggggccatgaggcttttagcattccaggagtcctagaagctttgcaggcatgcccaaacttagtgggtgtggaaacttctcatttggagttggtagaatccatttggacatatatgccccatgttcatattttggggaaatttcgtaatcgtaatggagcttttccaattcctcctgaaaataaactgaaaattcctataggagccaaaattcaaactttacatttagttggggtgaatgttcctgaaattccttgtatcccaatgctaaggcacctttatatgaagtgggtaagactcactaaaccacagccatttaaagacttcctttgtatcagcttaagaactttcgtcatgaggaactgtgcaggacccacaaattccttgaaatatgtccctttagtaacaggcttagcctctgcccgaaacttggaacacttagaaatggttcgagttcctttccttggaggtcttatccaacatgttgttgaagacagttggagatcaggtggttttagaaatttgcacactattgttctgggagcttgcaaaaatgctcttgaagtagatcttggttacctcatcattactgctgcccgtaggttacatgaagttcggatccagccttccctaaccaaagatggtgtcttttctgccctaaagatggcagagttggagtttccccagtttgaaacccttcatctaggatatgtagatgagtttttgctacagagcagaatggctaatgcggatctggtgaagtatggtttggctgatgtggtagaaaatcctggtatcatcactgatatagggatgaaagcagtcaatgaagttttttcctgtatcaaatatctggcaatttacaattgccctcatctacacaacccatacaattggatctcagaccactcaagatggactcgattggttgatatcaacctagtacggtgccatgctttgaagctggactcttttggccagtttattgaattattacccagcctagagtttatttcactggatcagatgtttcgtgaaccacccaagggttgtgctcgagttggtctgagtgcaggcacaggaattggtgtttcatcagctcttgttagcaaccagaactccaacaatgacgataataatgcccagaataacaatgccaacatccacgacaacaatcaccatcatccagatgactcagacgaggagaatgactttcggcaagatctgcagccaggagagcagcagtttgcagctgacgcattaaatgagatggaagacatcgtccaagaagatggagaggtggtggccgagagtggaaataatactccagctcacagccaggcaattattcctgtggatgttgatgaggaacaagcaggacccagtggtcttcagcgtgtagtaaaaccaacctcaattactgttcatgattcagagagtgatgatgaagaagatagtctagaactccaagaagtctggattcctaagaacggtactcggcgttactctgaacgtgaagaaaaaactggagagtcagtgcagtccagagaattgtcagtaagtggaaaaggcaagactccacttcgaaagaggtacaactcccatcagatgggccagtcgaagcagtttcccctcgaggaaagcagctgtgagaaaggctgtcaggtcaccagtgagcagatcaaagccgatatgaaagcagctagggatattcctgaaaagaaaaaaaacaaggatgtttatcccagctgcagcagcaccaccgccagcacagtgggaaactccagctcacacaacactgcttctcaaagccccgactttgtaaggacggtgaacagcggcggctcttccgagcctagccctacagaagtggatgtgtccaggcagtgtgcctgctcccccggtgggtcagaggactctgaggccatggaggagggagatgcagagagttctgtctgccccagatgctgctgtcacaggccccaggaatcccaaaggagaactagcaggtgttctgatgaggaacgtccttcaaccagccgagcctgtgttgtgaatggcccggatggtacgagatccgccttttcctttaggactctgccacaaggggggtcttcaggcccagcacatgatgagaggactaatgggagtggctctggggctacaggtgaggacaggagggggagctcccagcctgagagttgtgacgtgcagtctaatgaagactaccctcggaggcccctaaccagggccaggagcagactgtcccatgtactgctggtatctgagtcagaagtagccaaaacaaagccacgtcacgccatgaaacggaagcggacagcagataaatccactagtacaagtgatcctgtgatcgaggatgaccatgtgcaggttcttgtattaaaatccaagaatcttgttggagtcactatgaccaattgtggaatcacagatctagtgctaaaagactgtccaaagatgatgttcatccatgctaccaggtgcagggtactaaaacatttaaaggtagaaaatgcaccaattgtaaaccgatttgactatgcacagtgcaagaaactgaacatggatcaggtactagaccagatactaagaatgccacccgagagaaaccgcatcatatacctacgcccaatgcagcaggtggacactctaactttggagcagaagctatttagtggtccctacccctatcacatctgtattatccatgaattcagtaaccctcccaatgtccggaataaggtgcgcattcgcagctggatggacactatagcaaacatcaatcaagagctcattaaatatgaattcttccctgaagccactcgaagtgaagaagacttaaagaaataccccaagtacccctgggggagagaaatctatactttagaaggtgttgtggatggagctccatattccatgatttctgacttcccttggctgaggtcattacgagctgcagagcccaacagcttcgctcgatacgactttgaagacgatgaagaaagcactatctatgctcctagaaggaaaggacagctgtctgcagacatctgtatggaaacaataggagaggaaatttcagagatgcgtcagatgaagaagggtgtatttcagcgagtagtggcaatttttatccactattgtgatgtcaatggagagccagttgaagatgactacatttaattggtccctcctcctttccagctattttgtcagaaagcaagtagggccatccagctgccagagtgctccacagggacttgaggcatgcagttgggaggtcctggctcggtttgctatatagggaatatataaggaacatcgaaattgtatacaaagatttgtacataaaaaatatacaaagacgcttcctaaagtaccaactttatatcatatgtttatacaatttaatttaaaaattcattttaaggaagacagataatttgaaagacttttgtttttcttgacttaattcatgaagtatcattttttgactgagtctccatttacttcattcttaatgattattgtcatccctttaaatctgtgcctttttcttcttgagcgaagctgtttgagtaaacctgttgaagagtgtttgtgtcttttgtgcttttttgttgttattaaaacaccaactaaaccttatagtcaagacaaggctctatgtttctgtacaaagctgtagttctttcttagtattatagttgccatgtttcttaaaatcaagtaaaaagacttatgagcttaaaaaaaagtgagtttgagagggaaatggaaaagtttccagagtatttctagtaatttatttccacattgaattgtgtatatgctttatcttgaatataaaataaaagtttattaaaaacttt

SEQ ID NO: 281924 - DNA, 3567 bp, Artificial Sequence
  derived and/or modified sequence
atgggcccaagaaaaaagtctgtgaagacttgcattatgaacaacgagatacctgaggagatgacagctgacgagacgaaagattatatgaatcaattgtcccacgaggtcctgtgtcatatctttcgatatctgcccctgcaggacatcatgtgcatggagtgcttgtctcgcaagcttaaggaggcggtgacactctacctcagggttgtgcgggttgtagatctctgcgctggccggtggtgggaatacatgccctccggctttacagacgccagcttcttgacactgctcaagaagatgcccgacgtcgaacagctgtatggattgcacccacgctatttagagaggcgaagagtgagaggccatgaagcattcagtataccaggcgtactagaagctctacaggcctgtccaaacctcgtgggtgtcgagacaagccatcttgagcttgttgagtccatatggacttacatgccacacgtgcatatcctgggcaagtttcgcaatcggaacggtgcctttccaatacccccagagaacaagctgaaaatccctattggcgcaaagatccagactctgcatctcgtgggtgttaatgtgccagagataccatgcatcccgatgttgcgacatctgtacatgaaatgggtgagactaactaaacctcaacccttcaaggacttcctctgtatttctctgcgcacgttcgtaatgcgaaactgtgcaggaccaaccaactcacttaagtatgtgccacttgtgactggtttggcttctgcaaggaatctagagcatctcgagatggtacgggtgccattccttggcggactgattcagcacgtggtggaggatagctggcgcagtggcggcttcagaaacctgcataccatcgtgctgggagcttgtaaaaacgccttagaagttgacctcgggtacctcattatcaccgcagctcgaagactccatgaggtgagaattcagccgagcttgaccaaagacggtgtgttctccgcccttaagatggccgagttggaattccctcagttcgaaaccctacacctaggatacgtcgacgagttcctcttacagagcaggatggcaaatgccgatttagtgaagtatgggctcgccgacgttgtggagaatcccggcattatcaccgatattggtatgaaggctgtgaacgaagttttctcatgtattaaatatctggccatttacaattgcccacatctacacaatccctacaattggatcagtgatcacagccgatggactagactggttgacattaatttggtgcgatgtcacgcgctgaagttagactcttttggtcagttcattgagcttctcccgtctctggagtttattagccttgaccaaatgtttcgagagccccctaaggggtgtgccagagtcggccttagtgccggcaccggcatcggcgtgtcatccgccttggtctcaaatcagaactcaaacaacgatgacaataacgcacagaataacaatgctaatatacatgataacaatcaccatcaccctgacgattcagacgaggagaatgactttaggcaggatctgcagccaggagagcagcaatttgctgccgatgccctaaatgagatggaagatattgtccaggaggacggagaggtggtggccgagtctggcaataacacccccgcacattcacaagccataattcctgtggacgtggacgaagagcaggctggcccctctgggctccagcgggtcgtgaagcccacgtccattactgttcacgatagcgagagcgacgatgaggaggattctctagaactccaggaggtgtggattccaaaaaacggaacacggaggtactctgagagggaagaaaagaccggagaaagcgttcagagccgggagttgagcgtgtctggaaaaggtaaaacccccctgaggaaaaggtacaactctcaccagatgggccagagcaaacagtttccactggaggaaagctcgtgcgagaaaggctgtcaggtcacatccgaacagatcaaggcagatatgaaagctgcgcgggatattcctgaaaaaaagaaaaacaaggatgtttacccaagctgcagctcaactactgcatctaccgttggcaattcctctagccacaatactgctagtcagagcccagacttcgtgcgtactgtgaatagcggtggaagctccgagccatccccgacagaggtggacgtgtcccggcagtgcgcttgttccccgggaggaagcgaggactccgaagctatggaggaaggcgacgccgaatcctccgtgtgccctagatgctgttgccatagaccccaggagagccagaggagaacctctagatgtagtgacgaggaacggccgagcacttcccgcgcatgcgttgtgaacgggcctgatggcacaagaagcgccttctcttttcgaaccctgccacagggcggatcgagtggacctgcccatgacgaacgcacaaacggatccggttctggcgcaacaggtgaagaccgacgaggaagtagccagcccgaatcatgcgatgtgcagtccaatgaagattaccctcggagacctctgacccgcgccagatccaggctctcccatgttttacttgtttccgagtctgaagttgccaagactaaacctaggcacgcaatgaaacggaagcgtacagccgataaatccacgagtacgtccgatccagtgattgaggacgatcacgtgcaagtgcttgtcctgaagtccaaaaatctagtcggagtcaccatgactaactgtggcataaccgatctcgtgttaaaagattgtcctaaaatgatgttcatacacgccactaggtgccgtgtcctcaaacacttaaaagtggaaaacgcacctatagtgaatcggtttgactatgctcagtgtaaaaagttgaacatggatcaagtgctggaccagattctgcgtatgcctcctgagagaaatcgaatcatatacctgcggccgatgcagcaggttgacacactgacactggaacaaaagctcttctctgggccttatccctaccatatctgcatcatccatgaattctccaatcctcctaacgtgagaaataaggtcaggatccgctcatggatggatacaattgctaatattaatcaggagctgattaaatatgagttttttcccgaagccacgcggtccgaagaggatttaaaaaaataccctaaatacccctggggacgtgagatctacactctggaaggagtggttgacggcgccccgtactctatgatctcagatttcccgtggctgagaagcttgcgggccgctgagccgaatagctttgcgaggtacgacttcgaggacgatgaggagagcaccatttatgctcctaggcgcaaaggccagttgtctgccgatatctgtatggagactatcggggaagaaattagtgaaatgagacagatgaagaaaggggtgtttcaaagggtggtggctattttcatacactattgcgatgtgaatggggaacctgtggaggatgattacatctag

SEQ ID NO: 281925 - DNA, 3567 bp, Artificial Sequence
  derived and/or modified sequence
atgggccccaggaagaagtctgtgaagacctgcatcatgaacaatgagatccctgaggagatgacagcagatgagaccaaggactacatgaaccagctgagccatgaggtgctgtgccacatcttccgctacctgcccctgcaggacatcatgtgcatggagtgcctgagcaggaagctgaaggaggccgtgaccctgtacctgcgggtggtgcgggtggtggacctgtgtgccggccgctggtgggagtacatgcccagcggcttcacagatgccagcttcctgaccctgctgaagaagatgccagatgtggagcagctgtatggcctgcacccccgctacctggagcggcggcgggtgcggggccacgaggccttcagcatccctggggtgctggaggccctgcaggcctgccccaacctggtgggcgtggagaccagccacctggagctggtggagagcatctggacctacatgcctcatgtgcacatcctgggcaagttcaggaacagaaatggagccttccccatccccccagagaacaagctgaagatccccatcggggccaagatccagaccctgcacctggtgggcgtgaatgtgcctgagatcccctgcatccccatgctgcggcacctgtacatgaagtgggtgcggctgaccaagccccagcccttcaaggacttcctgtgcatcagcctgcggacctttgtgatgaggaactgtgccggccccaccaacagcctgaagtatgtgcccctggtgacaggcctggccagcgccaggaacctggagcacctggagatggtgcgggtgcccttcctgggcggcctcatccagcacgtggtggaggacagctggaggtctgggggcttcaggaacctgcacaccatcgtgctgggcgcctgcaagaatgccctggaggtggacctgggctacctgatcatcacagctgcccggcggctgcacgaggtgcgcatccagcccagcctgaccaaggatggagtcttcagcgccctgaagatggccgagctggagttcccccagtttgagaccctgcacctgggctacgtggatgagttcctgctgcagagcaggatggccaatgctgacctggtgaagtatggcctggctgatgtggtggagaaccctggcatcatcacagacatcggcatgaaggctgtgaatgaggtgttcagctgcatcaagtacctggccatctacaactgcccccacctgcacaacccctacaactggatcagtgaccacagccgctggacccggctggtggacatcaacctggtgcgctgccacgccctgaagctggacagctttggccagttcatcgagctgctgcccagcctggagttcatcagcctggaccagatgttccgggagccccccaagggctgtgcccgggtgggcctgtctgctggcaccggcatcggcgtgagcagcgccctggtgagcaaccagaacagcaacaatgatgacaacaatgcccagaacaacaatgccaacatccatgacaacaaccaccaccacccagatgacagtgatgaggagaatgacttccggcaggacctgcagcctggagagcagcagtttgctgctgatgccctgaatgagatggaggacatcgtgcaggaggatggagaggtggtggccgagagcggcaacaacaccccagcccacagccaggccatcatccctgtggatgtggatgaggagcaggccggccccagcggcctgcagagggtggtgaagcccaccagcatcaccgtgcatgacagcgagagtgatgatgaggaggacagcctggagctgcaggaggtgtggatccccaagaatggcacccggcgctacagcgagcgggaggagaagacaggagagagcgtgcagagccgggagctgtctgtgtctgggaagggcaagacccccctgaggaagcgctacaacagccaccagatgggccagagcaagcagttccccctggaggagagcagctgtgagaagggctgccaggtgaccagcgagcagatcaaggctgacatgaaggccgcccgggacatccctgagaagaagaagaacaaggatgtgtaccccagctgcagcagcaccacagccagcacagtgggcaacagcagcagccacaacacagccagccagagcccagactttgtgaggacagtgaacagcggcggcagcagcgagcccagccccacagaggtggatgtgtcccggcagtgtgcctgcagccctgggggcagcgaggacagcgaggccatggaggagggagatgctgagagctctgtgtgcccccgctgctgctgccaccggccccaggagagccagaggaggaccagccgctgcagtgatgaggagcggcccagcaccagccgggcctgtgtggtgaatggaccagatggcaccaggtctgccttctccttccgcaccctgccccagggcggcagcagcggccctgcccatgatgagaggaccaatggaagtggcagcggggccaccggggaggaccggcggggcagcagccagcctgagagctgtgatgtgcagagcaatgaagactacccccggcggcccctgacccgggcccggagccggctgagccacgtgctgctggtgtctgagagcgaggtggccaagaccaagcccaggcatgccatgaagaggaagaggacagctgacaagagcaccagcaccagtgaccctgtgattgaagatgaccacgtgcaggtgctggtgctgaagagcaagaacctggtgggcgtgaccatgaccaactgtggcatcacagacctggtgctgaaggactgccccaagatgatgttcatccacgccacccgctgccgggtgctgaagcacctgaaggtggagaatgcccccatcgtgaacagatttgattatgcccagtgcaagaagctgaacatggaccaggtgctggaccagatcctgaggatgcctcctgagaggaaccgcatcatctacctgcggcccatgcagcaggtggacaccctgaccctggagcagaagctgttcagcggcccctacccctaccacatctgcatcatccacgagttcagcaacccccccaacgtgaggaacaaggtgcgcatccgctcctggatggacaccatcgccaacatcaaccaggagctgatcaagtatgagttcttccctgaggccaccaggtctgaggaggacctgaagaagtaccccaagtacccctggggccgggagatctacaccctggagggcgtggtggatggagccccctacagcatgatcagtgacttcccctggctgcggagcctgcgggctgctgagcccaacagctttgcccgctatgactttgaagatgatgaggagagcaccatctatgcccccaggaggaagggccagctgtctgctgacatctgcatggagaccatcggggaggagatcagcgagatgaggcagatgaagaagggcgtcttccagagggtggtggccatcttcatccactactgtgatgtgaatggagagcctgtggaggatgactacatctag

SEQ ID NO: 281926 - DNA, 3567 bp, Artificial Sequence
  derived and/or modified sequence
atgggcccccggaagaagagcgtgaagacctgcatcatgaacaacgagattcctgaagaaatgaccgcggatgaaacaaaggattacatgaatcagctgtctcatgaggtgctatgccatatttttcgctacctccctctgcaagacatcatgtgcatggagtgcctgtcaaggaagctgaaggaggctgtgaccctctatctgcgtgtcgtgagggttgtggatctctgtgcagggcgttggtgggagtatatgccttctggctttactgatgcctcctttcttaccctgttaaaaaaaatgcccgacgtggagcaactatacggcctccatccccggtaccttgagcgccgacgggtccgggggcacgaggccttctccatccccggagtgcttgaggcactccaggcatgcccgaaccttgtgggcgttgagacctcacacttagagttggttgagagcatatggacctacatgcctcatgtccatatcctggggaagtttaggaacaggaatggggctttccccatccccccagagaacaagctgaaaatacctataggcgcaaagatccagactcttcatttagtgggagtgaacgttccagaaataccctgtatcccaatgttgagacatctctatatgaaatgggtcagactgacgaagcctcaaccttttaaagatttcctttgcatctctctgaggactttcgtgatgcgaaactgtgcgggcccaacaaactctttgaaatacgtcccactcgtgactggcttagctagtgccagaaacttagaacacctcgaaatggtgcgtgtaccatttctgggcggtcttattcagcacgtggtggaggattcttggcgtagcggcggcttcaggaatcttcatacaatcgttctgggagcctgcaaaaacgctctagaggtcgatcttggttacttgatcattaccgccgcccgtcgcttacatgaagtgcggatccagccaagcctcaccaaagacggcgtgttttctgcattgaagatggccgagcttgaatttccacagtttgagaccttgcatctgggttacgtggacgagttcttgttgcagagtcgaatggctaatgccgacctggtgaagtacggactcgccgatgtggtggagaatccaggaatcataacagacatcgggatgaaagcagttaatgaagtgttcagctgcataaagtacctggctatttataattgcccccacctccacaacccgtacaactggattagtgatcacagtaggtggactcggttggttgatataaatttggttaggtgtcatgccttgaaacttgatagctttggccagttcatcgagcttctaccctcgctggagttcatctccctggaccagatgtttcgcgaacctcccaaggggtgtgcgagagtggggctctctgcgggaaccggtattggagtcagctccgcattggtgtctaatcagaatagcaacaatgacgacaataacgcgcagaacaataatgccaacattcacgacaataaccaccatcaccccgacgatagtgacgaagagaacgatttccggcaggatctacagccaggagaacagcaatttgcagcagacgccctgaacgagatggaggatattgtccaagaggatggggaggtggtggcggagtcagggaacaatactccagcacatagccaggccataatccctgttgatgtggacgaagaacaggccggtccctctggcctgcagcgggtggtgaagccgacatccattaccgtgcacgacagcgaaagtgatgacgaggaggacagtctggaactgcaggaagtgtggattccaaaaaatggaaccaggagatacagcgagcgggaggagaagacgggtgaatccgtccagagtcgggagcttagcgtttcaggcaagggaaaaacaccccttcggaaacgctataacagtcatcagatggggcagagtaaacaatttcctttggaagaatcaagctgtgagaaggggtgtcaggttacttctgaacaaattaaggccgatatgaaagcagcccgcgacattcccgaaaagaagaagaacaaggacgtatatccctcctgctcatccactacagccagcaccgtcggcaattcctcttcacataacacagcctctcaatccccagattttgttcggacagtgaatagtggtggtagcagcgagccaagccccacagaggtggatgtctctcgtcaatgtgcgtgctctccagggggatccgaggattctgaggccatggaagaaggagacgctgagtccagcgtgtgtccgcgctgctgttgccatagaccgcaagagtcacaacgtcgaacctcgcggtgttcagacgaagagaggccatcaacttcgagggcatgtgtagtaaacgggccagacgggaccagatccgccttcagttttcgaacgcttccacagggcggcagtagcgggccagcgcacgatgagaggaccaatggaagcggttccggtgctaccggcgaggatcgccgcggctcttcacagcctgagagttgcgacgttcagagtaatgaggattatccgcggagaccactgacccgggcaaggtctagactgtctcacgtactgctggtgagtgagagcgaagtagctaaaacaaagccccgacatgcaatgaagaggaagaggaccgcagataaaagtacaagcacatctgatccggtgatcgaggatgatcatgtccaagttcttgtattgaagtcaaaaaatttggttggggtcaccatgactaattgtgggatcactgacctggtcctcaaggactgccccaagatgatgtttattcacgctacaaggtgtcgagtacttaaacacctgaaagtagaaaacgctcccattgtgaatagattcgactatgcccagtgcaaaaagcttaacatggaccaggtgttggatcaaattctgcgcatgcctcctgagaggaatcggataatctacctgcggcctatgcagcaggtggatactctgaccctggaacagaaactcttttctggcccctatccataccacatctgcatcatacatgagtttagtaacccacccaatgtcagaaacaaagtcagaataaggtcctggatggacaccatcgccaatattaaccaggagctgatcaagtatgagttctttcccgaggcaacccgttcagaagaggacctgaagaagtacccaaagtatccgtggggtagggaaatttacaccctggaaggagtcgttgacggcgccccatactcgatgatctcagactttccttggctgagaagcctcagagcagccgagcctaatagctttgctcggtacgattttgaagacgacgaggaatcaaccatttacgcccctaggagaaagggccagctatcagcagatatctgtatggaaactattggagaagagatatccgagatgcgccagatgaaaaaaggcgtgttccagcgcgtagtggccatattcatccactattgtgatgtcaatggtgaacccgtggaagacgactacatctag

SEQ ID NO: 281927 - DNA, 3567 bp, Artificial Sequence
  derived and/or modified sequence
atgggccctagaaaaaagtcggttaagacatgtatcatgaacaacgaaatccccgaggagatgacggccgacgagaccaaggattacatgaatcagctgtcccacgaggtcctgtgccatatctttcggtatctccccctccaggacatcatgtgcatggagtgcttgtcgcgcaagctgaaagaagctgtgacgctttatctgagggtcgtgcgggtggtggacctgtgcgcgggacggtggtgggagtacatgccgtccggcttcaccgatgcctcttttctcaccctgcttaagaaaatgcccgatgtcgaacagctgtatggtttacatcctcgctatctcgagcgaagacgagttcgcggtcatgaagccttctcgatcccaggtgtcctggaggccctccaggcgtgccctaatctcgtcggtgtggagacctcccatcttgagctcgtggagtccatttggacatacatgcctcatgtccatatacttggaaagttcaggaaccggaatggtgcttttcccatacctccagagaataagcttaaaattcctattggggctaagatccaaacactccacctggtcggcgtgaacgtccctgaaattccttgtattccaatgctgaggcatctgtatatgaagtgggttcgactgaccaagccgcagcctttcaaggacttcctgtgtataagcctgagaacctttgtgatgcgcaactgtgcaggtcctacaaattcgctaaaatacgtgcctctggtaacaggtctggcttcagcgagaaacctagaacatctcgaaatggtgagagtgccatttctgggagggctgattcaacatgttgtggaagacagttggcgttccgggggattccggaacctgcacacaattgtcctgggcgcatgcaagaatgctctggaggtggacctggggtatctgatcatcaccgccgctagaagacttcatgaggtgagaatccagcccagtctgacaaaggacggggtgttcagtgccttaaaaatggccgagctcgagtttccacagtttgagaccctgcacctgggctatgtcgatgaattccttctgcagtctcgcatggctaacgccgacctcgtaaagtacggccttgcagacgtcgttgagaatccaggtataattaccgacataggtatgaaggcagtcaacgaggtgttctcatgtattaagtatttggctatttacaattgtccacatctgcacaatccgtacaactggatatccgatcattcaagatggaccaggttggtcgacatcaacctggtcagatgtcacgctcttaagcttgattctttcggacagtttattgagttgctgccatccctagaattcataagtctggaccagatgttcagagagcccccaaagggctgcgcacgcgtaggactatcagctggaacaggaattggagtgagtagcgctctggtcagcaaccagaactctaataacgacgataacaacgcccagaataacaacgccaatattcatgataacaaccaccaccatcccgacgattcagacgaggagaacgatttcaggcaagatcttcagcctggcgagcaacaattcgcggcagatgcccttaatgaaatggaagatattgtgcaagaggacggagaggtagttgccgagtcaggaaataacacccccgcacacagccaggctatcataccggtcgatgtggatgaagagcaggccggaccatctggcttgcaacgggtcgtcaagccaacgtcaattacagtacacgattcagagagcgatgacgaggaggacagcctggaactgcaggaagtctggatacctaagaacggaacacgccgatatagcgagagagaagagaaaaccggggagagtgtacagtctcgagagctgtctgtgtccggaaaaggtaaaaccccactcagaaaacgctacaactcacatcaaatgggccagtcgaagcagttccctctggaggaatcttcatgcgaaaagggctgtcaggtcacatcagagcagatcaaagctgacatgaaggctgcccgagacatccccgaaaagaaaaaaaataaagacgtgtacccttcttgcagttctaccaccgcaagcactgtgggcaacagctccagtcataacactgcctcccaaagtcccgatttcgtacgcactgtgaatagcggcggatcatccgagccctcaccaactgaggtggacgtttctagacagtgtgcttgtagccccggaggctccgaggacagtgaggccatggaagagggcgatgccgaatcttcagtttgtcctaggtgttgttgtcacagacctcaagagagccagagacgaactagccgctgctccgatgaggaaagaccgagtacatcccgtgcctgtgtcgtgaatggaccagatgggaccagatccgcctttagctttcgcacacttccacaaggaggttcatcaggccctgcacatgatgagaggacgaatggttccgggtcaggcgctaccggggaggatcgtcggggttcatcacagccagagtcatgtgatgtacagtcaaacgaagactaccctagacgccctttaaccagagctcgttctagactctcacacgtgctgttggtgtctgagtcggaagtcgccaagaccaaaccgagacacgccatgaaacgcaaaaggacggccgacaaatccacctccacatccgaccctgttattgaagacgaccacgtccaagtgctcgtcctgaagtcaaagaatctcgtgggagttacgatgaccaattgcgggataaccgacttggtcctcaaggattgtcctaaaatgatgttcattcacgccacaaggtgcagggtactaaaacacctgaaagtggaaaacgcacctattgtgaatcggtttgactatgcccagtgtaagaaacttaacatggatcaggttctcgaccaaatattacgtatgccacccgagcgcaatcgcataatctatctccgcccaatgcagcaagtggacaccctcacactcgaacagaaactgtttagcgggccttatccgtaccatatctgtatcattcacgaatttagcaatcccccaaacgtgcggaacaaggtcaggatccgttcctggatggataccatcgcgaacatcaaccaggaactgatcaaatacgaattcttccctgaggccacccggtccgaggaagatctgaagaagtacccaaaatacccgtgggggcgtgaaatctataccctggagggggtggtcgatggggctccgtattccatgatttcggacttcccctggctccgatcactccgtgcagctgaaccgaactcatttgctcgctatgatttcgaagacgacgaagagtctacaatatacgccccacgtagaaagggccagctttcggccgacatttgcatggagacaatcggagaagagatctcagaaatgagacagatgaaaaagggggtgttccagcgagtcgttgctattttcattcactactgcgacgttaacggagaaccagtggaggatgactacatttag

SEQ ID NO: 281928 - DNA, 3567 bp, Artificial Sequence
  derived and/or modified sequence
atgggccccagaaagaagagcgtgaagacctgcatcatgaacaacgagatccccgaggagatgaccgccgacgagaccaaggactacatgaaccagctgagccacgaggtgctgtgccacatcttcagatacctgcccctgcaggacatcatgtgcatggagtgcctgagcagaaagctgaaggaggccgtgaccctgtacctgagagtggtgagagtggtggacctgtgcgccggcagatggtgggagtacatgcccagcggcttcaccgacgccagcttcctgaccctgctgaagaagatgcccgacgtggagcagctgtacggcctgcaccccagatacctggagagaagaagagtgagaggccacgaggccttcagcatccccggcgtgctggaggccctgcaggcctgccccaacctggtgggcgtggagaccagccacctggagctggtggagagcatctggacctacatgccccacgtgcacatcctgggcaagttcagaaacagaaacggcgccttccccatcccccccgagaacaagctgaagatccccatcggcgccaagatccagaccctgcacctggtgggcgtgaacgtgcccgagatcccctgcatccccatgctgagacacctgtacatgaagtgggtgagactgaccaagccccagcccttcaaggacttcctgtgcatcagcctgagaaccttcgtgatgagaaactgcgccggccccaccaacagcctgaagtacgtgcccctggtgaccggcctggccagcgccagaaacctggagcacctggagatggtgagagtgcccttcctgggcggcctgatccagcacgtggtggaggacagctggagaagcggcggcttcagaaacctgcacaccatcgtgctgggcgcctgcaagaacgccctggaggtggacctgggctacctgatcatcaccgccgccagaagactgcacgaggtgagaatccagcccagcctgaccaaggacggcgtgttcagcgccctgaagatggccgagctggagttcccccagttcgagaccctgcacctgggctacgtggacgagttcctgctgcagagcagaatggccaacgccgacctggtgaagtacggcctggccgacgtggtggagaaccccggcatcatcaccgacatcggcatgaaggccgtgaacgaggtgttcagctgcatcaagtacctggccatctacaactgcccccacctgcacaacccctacaactggatcagcgaccacagcagatggaccagactggtggacatcaacctggtgagatgccacgccctgaagctggacagcttcggccagttcatcgagctgctgcccagcctggagttcatcagcctggaccagatgttcagagagccccccaagggctgcgccagagtgggcctgagcgccggcaccggcatcggcgtgagcagcgccctggtgagcaaccagaacagcaacaacgacgacaacaacgcccagaacaacaacgccaacatccacgacaacaaccaccaccaccccgacgacagcgacgaggagaacgacttcagacaggacctgcagcccggcgagcagcagttcgccgccgacgccctgaacgagatggaggacatcgtgcaggaggacggcgaggtggtggccgagagcggcaacaacacccccgcccacagccaggccatcatccccgtggacgtggacgaggagcaggccggccccagcggcctgcagagagtggtgaagcccaccagcatcaccgtgcacgacagcgagagcgacgacgaggaggacagcctggagctgcaggaggtgtggatccccaagaacggcaccagaagatacagcgagagagaggagaagaccggcgagagcgtgcagagcagagagctgagcgtgagcggcaagggcaagacccccctgagaaagagatacaacagccaccagatgggccagagcaagcagttccccctggaggagagcagctgcgagaagggctgccaggtgaccagcgagcagatcaaggccgacatgaaggccgccagagacatccccgagaagaagaagaacaaggacgtgtaccccagctgcagcagcaccaccgccagcaccgtgggcaacagcagcagccacaacaccgccagccagagccccgacttcgtgagaaccgtgaacagcggcggcagcagcgagcccagccccaccgaggtggacgtgagcagacagtgcgcctgcagccccggcggcagcgaggacagcgaggccatggaggagggcgacgccgagagcagcgtgtgccccagatgctgctgccacagaccccaggagagccagagaagaaccagcagatgcagcgacgaggagagacccagcaccagcagagcctgcgtggtgaacggccccgacggcaccagaagcgccttcagcttcagaaccctgccccagggcggcagcagcggccccgcccacgacgagagaaccaacggcagcggcagcggcgccaccggcgaggacagaagaggcagcagccagcccgagagctgcgacgtgcagagcaacgaggactaccccagaagacccctgaccagagccagaagcagactgagccacgtgctgctggtgagcgagagcgaggtggccaagaccaagcccagacacgccatgaagagaaagagaaccgccgacaagagcaccagcaccagcgaccccgtgatcgaggacgaccacgtgcaggtgctggtgctgaagagcaagaacctggtgggcgtgaccatgaccaactgcggcatcaccgacctggtgctgaaggactgccccaagatgatgttcatccacgccaccagatgcagagtgctgaagcacctgaaggtggagaacgcccccatcgtgaacagattcgactacgcccagtgcaagaagctgaacatggaccaggtgctggaccagatcctgagaatgccccccgagagaaacagaatcatctacctgagacccatgcagcaggtggacaccctgaccctggagcagaagctgttcagcggcccctacccctaccacatctgcatcatccacgagttcagcaacccccccaacgtgagaaacaaggtgagaatcagaagctggatggacaccatcgccaacatcaaccaggagctgatcaagtacgagttcttccccgaggccaccagaagcgaggaggacctgaagaagtaccccaagtacccctggggcagagagatctacaccctggagggcgtggtggacggcgccccctacagcatgatcagcgacttcccctggctgagaagcctgagagccgccgagcccaacagcttcgccagatacgacttcgaggacgacgaggagagcaccatctacgcccccagaagaaagggccagctgagcgccgacatctgcatggagaccatcggcgaggagatcagcgagatgagacagatgaagaagggcgtgttccagagagtggtggccatcttcatccactactgcgacgtgaacggcgagcccgtggaggacgactacatctag

SEQ ID NO: 281929 - protein, 959 aa, Artificial Sequence
  derived and/or modified sequence
MEMKLPGQEGFEASSAPRNIPSGELDSNPDPGTGPSPDGPSDTESKELGVPKDPLLFIQLNELLGWPQALEWRETGRWVLFEEKLEVAAGRWSAPHVPTLALPSLQKLRSLLAEGLVLLDCPAQSLLELVEQVTRVESLSPELRGQLQALLLQRPQHYNQTTGTRPCWGSTHPRKASDNEEAPLREQCQNPLRQKLPPGAEAGTVLAGELGFLAQPLGAFVRLRNPVVLGSLTEVSLPSRFFCLLLGPCMLGKGYHEMGRAAAVLLSDPQFQWSVRRASNLHDLLAALDAFLEEVTVLPPGRWDPTARIPPPKCLPSQHKRLPSQQREIRGPAVPRLTSAEDRHRHGPHAHSPELQRTGRLFGGLIQDVRRKVPWYPSDFLDALHLQCFSAVLYIYLATVTNAITFGGLLGDATDGAQGVLESFLGTAVAGAAFCLMAGQPLTILSSTGPVLVFERLLFSFSRDYSLDYLPFRLWVGIWVATFCLVLVATEASVLVRYFTRFTEEGFCALISLIFIYDAVGKMLNLTHTYPIQKPGSSAYGCLCQYPGPGGNESQWIRTRPKDRDDIVSMDLGLINASLLPPPECTRQGGHPRGPGCHTVPDIAFFSLLLFLTSFFFAMALKCVKTSRFFPSVVRKGLSDFSSVLAILLGCGLDAFLGLATPKLMVPREFKPTLPGRGWLVSPFGANPWWWSVAAALPALLLSILIFMDQQITAVILNRMEYRLQKGAGFHLDLFCVAVLMLLTSALGLPWYVSATVISLAHMDSLRRESRACAPGERPNFLGIREQRLTGLVVFILTGASIFLAPVLKFIPMPVLYGIFLYMGVAALSSIQFTNRVKLLLMPAKHQPDLLLLRHVPLTRVHLFTAIQLACLGLLWIIKSTPAAIIFPLMLLGLVGVRKALERVFSPQELLWLDELMPEEERSIPEKGLEPEHSFSGSDSEDSELMYQPKAPEINISVN

SEQ ID NO: 281930 - DNA, 2880 bp, Artificial Sequence
  derived and/or modified sequence
atggagatgaagctgcccggccaggagggcttcgaggccagcagcgcccccagaaacatccccagcggcgagctggacagcaaccccgaccccggcaccggccccagccccgacggccccagcgacaccgagagcaaggagctgggcgtgcccaaggaccccctgctgttcatccagctgaacgagctgctgggctggccccaggccctggagtggagagagaccggcagatgggtgctgttcgaggagaagctggaggtggccgccggcagatggagcgccccccacgtgcccaccctggccctgcccagcctgcagaagctgagaagcctgctggccgagggcctggtgctgctggactgccccgcccagagcctgctggagctggtggagcaggtgaccagagtggagagcctgagccccgagctgagaggccagctgcaggccctgctgctgcagagaccccagcactacaaccagaccaccggcaccagaccctgctggggcagcacccaccccagaaaggccagcgacaacgaggaggcccccctgagagagcagtgccagaaccccctgagacagaagctgccccccggcgccgaggccggcaccgtgctggccggcgagctgggcttcctggcccagcccctgggcgccttcgtgagactgagaaaccccgtggtgctgggcagcctgaccgaggtgagcctgcccagcagattcttctgcctgctgctgggcccctgcatgctgggcaagggctaccacgagatgggcagagccgccgccgtgctgctgagcgacccccagttccagtggagcgtgagaagagccagcaacctgcacgacctgctggccgccctggacgccttcctggaggaggtgaccgtgctgccccccggcagatgggaccccaccgccagaatccccccccccaagtgcctgcccagccagcacaagagactgcccagccagcagagagagatcagaggccccgccgtgcccagactgaccagcgccgaggacagacacagacacggcccccacgcccacagccccgagctgcagagaaccggcagactgttcggcggcctgatccaggacgtgagaagaaaggtgccctggtaccccagcgacttcctggacgccctgcacctgcagtgcttcagcgccgtgctgtacatctacctggccaccgtgaccaacgccatcaccttcggcggcctgctgggcgacgccaccgacggcgcccagggcgtgctggagagcttcctgggcaccgccgtggccggcgccgccttctgcctgatggccggccagcccctgaccatcctgagcagcaccggccccgtgctggtgttcgagagactgctgttcagcttcagcagagactacagcctggactacctgcccttcagactgtgggtgggcatctgggtggccaccttctgcctggtgctggtggccaccgaggccagcgtgctggtgagatacttcaccagattcaccgaggagggcttctgcgccctgatcagcctgatcttcatctacgacgccgtgggcaagatgctgaacctgacccacacctaccccatccagaagcccggcagcagcgcctacggctgcctgtgccagtaccccggccccggcggcaacgagagccagtggatcagaaccagacccaaggacagagacgacatcgtgagcatggacctgggcctgatcaacgccagcctgctgcccccccccgagtgcaccagacagggcggccaccccagaggccccggctgccacaccgtgcccgacatcgccttcttcagcctgctgctgttcctgaccagcttcttcttcgccatggccctgaagtgcgtgaagaccagcagattcttccccagcgtggtgagaaagggcctgagcgacttcagcagcgtgctggccatcctgctgggctgcggcctggacgccttcctgggcctggccacccccaagctgatggtgcccagagagttcaagcccaccctgcccggcagaggctggctggtgagccccttcggcgccaacccctggtggtggagcgtggccgccgccctgcccgccctgctgctgagcatcctgatcttcatggaccagcagatcaccgccgtgatcctgaacagaatggagtacagactgcagaagggcgccggcttccacctggacctgttctgcgtggccgtgctgatgctgctgaccagcgccctgggcctgccctggtacgtgagcgccaccgtgatcagcctggcccacatggacagcctgagaagagagagcagagcctgcgcccccggcgagagacccaacttcctgggcatcagagagcagagactgaccggcctggtggtgttcatcctgaccggcgccagcatcttcctggcccccgtgctgaagttcatccccatgcccgtgctgtacggcatcttcctgtacatgggcgtggccgccctgagcagcatccagttcaccaacagagtgaagctgctgctgatgcccgccaagcaccagcccgacctgctgctgctgagacacgtgcccctgaccagagtgcacctgttcaccgccatccagctggcctgcctgggcctgctgtggatcatcaagagcacccccgccgccatcatcttccccctgatgctgctgggcctggtgggcgtgagaaaggccctggagagagtgttcagcccccaggagctgctgtggctggacgagctgatgcccgaggaggagagaagcatccccgagaagggcctggagcccgagcacagcttcagcggcagcgacagcgaggacagcgagctgatgtaccagcccaaggcccccgagatcaacatcagcgtgaactag

SEQ ID NO: 281931 - DNA, 2880 bp, Artificial Sequence
  derived and/or modified sequence
atggaaatgaaactgcctggtcaggaagggttcgaggcaagtagtgctccaagaaatatccccagcggtgagctggatagtaatccagatccagggacaggaccttccccagacggaccctccgatacagaatctaaagagctgggcgtacctaaggatccactgctgttcattcagctcaacgagctgctgggctggccacaggctcttgaatggcgggagacgggccgctgggtactgttcgaggagaagcttgaagttgccgcaggccgctggtcagctccacatgtccctacgctcgccttgccatctctgcagaaattgaggagcctgctggctgagggtctagtgcttctcgactgccccgcacagtcactgcttgagctcgtcgagcaggtgactagggtggagtctctcagccctgagctgcgtggccagttacaggccctcttactgcagcggccgcaacattataaccagaccacaggtactcggccatgctgggggtcaacccaccctcggaaagccagcgacaatgaagaagctccgctccgggagcaatgccagaacccactgaggcagaaactgccaccaggagcagaagctggcaccgtgctggccggggagcttggctttctggcgcagcctctgggggccttcgttaggctcagaaaccccgtggtgcttggaagcttgactgaggtcagcctgccctcacggtttttttgtctgctcctgggcccctgcatgctgggaaaaggttatcatgaaatgggcagagccgctgcggtactgctgtctgatccccaattccaatggagcgtgaggcgcgcctctaatcttcatgatcttctcgcagcgctggacgcttttcttgaagaagttacagtcctgccaccaggccggtgggatcctaccgcaaggattcctcctcccaaatgtctcccttcccaacacaagcgactgccaagccaacagcgagagattaggggccctgcagtgccacgactgacgtccgccgaggataggcaccgccacggacctcacgcacatagccctgaactccagaggacaggacgcctgttcggcggccttatacaggacgtgaggagaaaggtgccatggtacccaagcgacttcctagacgcactgcatttgcagtgcttcagtgctgtcctgtatatctacctggccacggtgaccaacgctattacatttgggggtctgctgggagacgccactgacggggctcaaggtgttttggagtcttttttgggaacggctgttgctggggctgcattttgtctgatggccggtcagcccttgacaatcctatcctcaaccggcccagtcttggtcttcgagagactcctgttcagcttttcccgcgactattccctggattacctcccgttccgcctgtgggtagggatatgggtggcgactttctgcctggtactggtggccaccgaagcttctgtgctggtgcggtatttcactcggttcactgaggaagggttctgcgcgctcatctcactcatctttatttacgacgcagttggtaaaatgttgaatttgactcatacttatccaatacagaaaccaggttccagcgcgtacggctgcctctgtcaatacccaggaccagggggtaacgaaagtcaatggatcaggacccgtcctaaggatcgggatgacattgtgagcatggaccttggcctcattaatgctagcctgctcccacctcccgaatgcacacgtcagggtggtcatcctcggggacccggatgtcacactgtgcctgacatcgccttctttagcctgctcctgtttttgaccagcttcttttttgcgatggccctgaagtgcgtgaaaacttctcgtttttttccaagcgtggtgcggaagggactgtctgacttttccagtgtcctggctatactcctggggtgtgggcttgacgctttcttaggcctcgccacccccaaattgatggttcctcgggaattcaagccgacacttcctggccgcggttggctagtaagcccgttcggcgcgaacccttggtggtggtcagttgccgccgctctgcctgcactcctgttaagtatactgattttcatggatcagcaaattacagcggtgatcctgaatagaatggaatatcggctgcagaaaggagccgggtttcacctggatctgttttgcgttgccgtgctgatgctgctcacatcagcccttggcctgccatggtatgtatctgccacagtcatctctcttgctcacatggacagtctcaggcgtgaaagtagagcctgcgcacccggcgagaggcccaattttctcggcattcgggagcaaaggcttaccggactggtcgtgttcatcctcacgggagcgtcaatattcctggcaccagtcctgaagttcatacccatgccagtcttatacggaattttcctgtacatgggtgtggcagccctttcctcaatccagtttacgaacagagttaagctccttctcatgcctgccaaacaccagccggatctcctgctgctccgccatgtgcctttaacccgagtgcatctctttactgccatccagctggcctgtctcggactcctttggatcatcaagtccacccccgctgctatcattttccccttaatgctcttagggctggtgggcgtgcgcaaagctcttgaacgtgtgttcagcccacaggaactgctctggctcgacgagctgatgccagaagaagaacgttccatccctgaaaagggcctggagcctgagcattccttttctggttccgactccgaggacagtgaacttatgtaccagccaaaggctcccgagattaacatttctgtgaactag

SEQ ID NO: 281932 - DNA, 2880 bp, Artificial Sequence
  derived and/or modified sequence
atggagatgaagctgcccggccaggagggctttgaggccagcagcgcccccaggaacatccccagcggggagctggacagcaacccagaccccggcaccggccccagcccagatggccccagcgacacagagagcaaggagctgggcgtgcccaaggaccccctgctcttcatccagctgaatgagctgctgggctggccccaggccctggagtggagggagaccggccgctgggtgctgtttgaggagaagctggaggtggccgccggccgctggagcgccccccacgtgcccaccctggccctgcccagcctgcagaagctgcggagcctgctggccgagggcctggtgctgctggactgcccagcccagagcctgctggagctggtggagcaggtgaccagggtggagagcctgagccctgagctgcggggccagctgcaggccctgctgctgcagaggccccagcactacaaccagaccaccggcacccggccctgctggggcagcacccaccccaggaaggccagtgacaatgaggaggcccccctgcgggagcagtgccagaaccccctgcggcagaagctgcccccaggagctgaggccggcaccgtgctggccggggagctgggcttcctggcccagcccctgggcgcctttgtgcggctgaggaaccctgtggtgctgggcagcctgacagaggtgtccctgcccagccgcttcttctgcctgctgctgggcccctgcatgctgggcaagggctaccacgagatgggccgggctgctgctgtgctgctgagtgacccccagttccagtggagcgtgcggcgggccagcaacctgcatgacctgctggccgccctggatgccttcctggaggaggtgacagtgctgcccccaggccgctgggaccccacagcccgcatccccccacccaagtgcctgcccagccagcacaagaggctgcccagccagcagcgggagatccggggccctgctgtgccccggctgaccagcgcagaagatagacaccgccacggcccccacgcccacagccctgagctgcagaggacaggccgcctgtttggaggcctcatccaggatgtgcggaggaaggtgccctggtaccccagcgacttcctggatgccctgcacctgcagtgcttctctgctgtgctgtacatctacctggccaccgtgaccaatgccatcaccttcggcggcctgctgggagatgccacagatggagcccagggcgtgctggagagcttcctgggcacagctgtggccggggccgccttctgcctgatggccggccagcccctgaccatcctgagcagcacaggccctgtgctggtgtttgagcggctgctcttctccttcagccgggactacagcctggactacctgcccttccggctgtgggtgggcatctgggtggccaccttctgcctggtgctggtggccacagaggcctctgtgctggtgcgctacttcacccgcttcacagaggagggcttctgtgccctgatcagcctcatcttcatctatgatgctgtgggcaagatgctgaacctgacccacacctaccccatccagaagccaggcagcagcgcctacggctgcctgtgccagtacccaggccctggaggaaatgaaagccagtggatccgcacccggcccaaggacagagatgacatcgtgtccatggacctgggcctcatcaatgccagcctgctgcccccacctgagtgcacccggcagggcggccacccccggggccctggctgccacacagtgcctgacatcgccttcttcagcctgctgctcttcctgaccagcttcttctttgccatggccctgaagtgtgtgaagaccagccgcttcttccccagcgtggtgaggaagggcctgagtgacttcagctctgtgctggccatcctgctgggctgcggcctggatgccttcctgggcctggccacccccaagctgatggtgccccgggagttcaagcccaccctgcccggccggggctggctggtgagcccctttggagccaacccctggtggtggagcgtggccgccgccctgcctgccctgctgctgagcatcctgatcttcatggaccagcagatcacagctgtgatcctgaacaggatggagtaccgcctgcagaagggggccggcttccacctggacctcttctgtgtggccgtgctgatgctgctgaccagcgccctgggcctgccctggtacgtgtctgccaccgtcatcagcctggcccacatggacagcctgcggcgggagagccgggcctgtgcccctggagagcggcccaacttcctgggcatccgggagcagaggctgaccggcctggtggtgttcatcctgaccggggccagcatcttcctggcccctgtgctgaagttcatccccatgcctgtgctgtatggcatcttcctgtacatgggcgtggccgccctgagcagcatccagttcaccaacagagtgaagctgctgctgatgcctgccaagcaccagcctgacctgctgctgctgcggcacgtgcccctgaccagggtgcacctgttcaccgccatccagctggcctgcctgggcctgctgtggatcatcaagagcaccccagctgccatcatcttccccctgatgctgctgggcctggtgggcgtgaggaaggccctggagagggtcttcagcccccaggagctgctgtggctggatgagctgatgcctgaggaggagaggagcatccctgagaagggcctggagcctgagcacagcttcagcggcagtgacagtgaagattctgagctgatgtaccagcccaaggcccctgagatcaacatctctgtgaactag

SEQ ID NO: 281933 - DNA, 2880 bp, Artificial Sequence
  derived and/or modified sequence
atggagatgaagctgcccggccaggagggcttcgaggccagcagcgcaccgaggaacatcccctcaggagagttagattccaacccagaccctggcaccgggccttcacccgatggcccaagcgatacagagtctaaggagcttggggtgcccaaggatcctctgctttttatccaactgaacgagcttctcggctggccccaggctttggaatggagagagaccggtaggtgggttctttttgaagagaaactggaggttgcagcaggtcgctggtctgcgccacacgtgcccaccctggccctacccagcctccaaaaactgcggagcttactggccgaagggcttgtactgttggattgccccgcacagtcattacttgagctagttgaacaggtgaccagagtggaaagccttagcccagagctgcgggggcaactgcaggccctgctcctccaacgaccacagcactacaaccagacaacagggacccggccgtgctggggatctactcaccccaggaaggcctccgacaacgaagaagcaccactgcgtgagcaatgccagaaccccctgcggcagaaactcccccctggagcggaagctgggaccgtgctagccggcgaattgggctttctcgcacagccccttggagccttcgtcaggctgaggaatccagtcgtgctaggtagtctaacagaagtgagtctgccctctagattcttttgccttctgttagggccctgcatgctgggcaaaggttaccatgagatgggccgtgctgcagccgtcctcctaagcgatccacagttccagtggtccgtgcgtcgggcgtctaatctccatgacttgctagcagcccttgacgcctttttggaggaagtcacggtccttccccccggtagatgggaccccaccgcccgtatcccccctccaaagtgtctgccatcccaacataagcgcttaccttcccagcagcgggagataaggggcccagctgtccctcgattgacctccgcagaagaccggcaccgccacggcccacacgcacattctcccgaactccagcgcactggcaggctgtttggagggttgattcaagatgttcggaggaaggttccttggtacccatccgactttctggacgctttgcatcttcagtgtttctccgccgtcctttatatttatctggctaccgtgactaacgctatcactttcggcggactcctcggagatgccactgacggcgcccagggcgtgctggagtcttttttggggactgctgtagcaggcgctgctttctgtctaatggcaggccagcccctgacaatcctgtcaagcacaggacccgttctcgtcttcgagcggctgctcttttccttttctagagattattccttggactatttaccttttcggctgtgggtcgggatatgggtggcaacgttctgcttggtattggtggcgaccgaggcatcggttctcgtaaggtatttcactcgcttcactgaggagggtttttgcgccctgataagcctcatttttatctacgacgccgtgggcaaaatgctgaacctgacgcatacgtatcccatacaaaaacctggctcgtcagcatacgggtgtctatgccagtaccccggcccaggcggaaacgagagtcagtggattcgaactcgacccaaggatagagatgatattgtgtctatggaccttggactgattaatgcgagcctgctcccccctcctgagtgtacccgccagggcggccacccccggggccctggctgccacaccgtgccagacattgctttcttctctctgctcttattcctaacaagtttcttttttgcaatggctttgaaatgtgtcaagacgtccaggttttttccttccgtcgtgaggaagggcctgtcagactttagcagcgtgttagccatactgctcggctgcggcctcgacgcctttctcgggctcgccacaccgaaattaatggttcctcgagagttcaagcccaccctgccaggcaggggctggctagtgtcccccttcggcgcgaacccatggtggtggtctgtggcagcagctctacctgcattgttactgtctattctgattttcatggaccagcagattaccgccgtgatcctgaacaggatggaatacaggttacagaagggggctggtttccacttggatctgttttgcgtggcagtgctcatgctgcttacttcagcattagggctgccgtggtatgtaagtgctaccgttatttccctggcccacatggattccctgaggcgggaaagtagggcctgcgctcctggcgagaggcccaattttctgggaatcagggagcagcgactcacaggcctggtcgtgtttatcttgacaggcgctagcatatttctggcaccagtgttaaaatttatcccaatgcctgtactctacggaatcttcttgtacatgggtgtggccgcgctgtcctctattcagttcacaaacagagtcaagttgctgctgatgcccgccaagcatcagcccgatctcttactcctgaggcacgttccacttacgcgggtccatctgttcaccgctatccagcttgcctgccttggactgctgtggattatcaaaagtacaccagctgcaattatcttccctctcatgcttttagggctggtgggcgtcagaaaagccctggaacgggtgttttcacctcaggaactcctgtggctcgacgagctgatgcccgaagaggaaagaagcatccccgaaaaaggcctagagccagaacattcttttagcggatccgactcggaggactccgaattaatgtatcagcctaaagcaccagagattaacatcagtgttaattag

SEQ ID NO: 281934 - DNA, 2880 bp, Artificial Sequence
  derived and/or modified sequence
atggagatgaaactgcctggtcaagagggctttgaggcctcttccgcccctagaaatattccaagtggcgaactggatagcaatccagaccccggtaccggaccttccccggacggcccttctgatacggagagcaaagaacttggagtgcccaaagatccacttctcttcattcagttgaacgagctgctgggatggccacaggcgcttgagtggcgcgagacaggacgctgggtgctgttcgaagagaaactcgaggtcgcggctgggagatggtccgcgcctcacgtgcctaccctggctctgccctcactccaaaagttacgcagcctcctcgcggagggactcgttttgctggactgcccagctcagtctctcctggagctggtagagcaggttacccgcgttgagtctttgagcccggaattacgaggccagctccaagccttattgttgcaaagaccgcagcactacaatcaaactactggtaccagaccttgctggggatccactcaccctcggaaagctagtgataatgaggaggctcctctgagggagcagtgtcaaaaccctcttagacagaagcttccaccgggagcagaggctgggaccgtcttggcgggtgaactagggtttctcgcccagccacttggcgcatttgttcgcttgagaaatccggtcgtgctcgggtctcttactgaggtttccctcccaagtaggttcttctgtttgcttctaggcccatgcatgctggggaagggttaccatgaaatgggcagggccgcagctgttctgctatctgacccccagttccagtggtccgtacgcagggcatcgaacctgcacgatctgctggccgcactggatgctttcctggaggaagttactgttctcccccctgggaggtgggaccctacagctcgaataccaccaccaaagtgcctacctagtcagcacaaacgcttgccctcgcagcaaagggaaatccgcggtcccgcagtgcctaggcttacatctgccgaagatcggcatcgtcacgggcctcatgcgcacagtcccgaactgcagagaaccggccgtttgttcggcggactaatccaagacgtgaggcggaaggtcccctggtatccatctgactttcttgacgccctccacctgcagtgtttcagtgccgtgctttacatctacctggctaccgtcacaaacgcaattaccttcggtggcttgctgggagacgccacggacggtgcacagggtgtgcttgagtctttcctggggacagccgtagctggcgctgccttctgtctcatggctggccaaccattaacaatccttagttccacaggtcctgtgttggtatttgaacgacttctattcagcttttctcgagactacagtctggattacctaccgtttagactgtgggtggggatctgggtagcaaccttttgtctggtgttggtcgccactgaggcctctgtcctagttcgatactttaccagattcactgaggagggattttgtgcccttatttccctcatttttatctatgacgcagtcgggaagatgctgaatctgacacacacatacccaattcagaagcccggttcttcagcgtacgggtgcttgtgtcagtacccaggccctggaggtaacgaaagccagtggattaggactcgcccaaaagatcgcgacgacattgtgtccatggatcttggtctgatcaacgcaagcttattaccgcctccagaatgcacccgacaggggggtcatcccagaggcccaggttgtcacactgtacctgacatcgcattcttctccctgttgttatttctgacgtctttcttcttcgccatggctttgaagtgcgtgaagacgtctaggttctttcctagcgtcgtgcgaaaaggtttgtcagactttagtagcgtgctagccatcctccttgggtgcgggctggacgcctttttagggctcgccacgccgaagttaatggtgcccagggaattcaagccgaccttgccaggaagaggatggttggtgagcccattcggggcaaatccgtggtggtggtctgtcgctgctgccctccctgctctcctgctgtcgatcctaattttcatggatcagcagattacagcagtgattctgaaccgcatggaatacaggctacagaagggagctggtttccacctggatctgttctgcgttgctgttttgatgcttttgacttcggccttgggcttaccttggtacgtgtctgctacagtcatctctcttgcgcacatggattccctgagacgggagagtagagcctgcgcaccaggggaacgacctaactttttgggcatcagagaacagcgccttactgggctggtcgtctttatcttaactggtgcctccattttcctcgcaccggtgctgaagttcatccctatgcccgttctgtacgggatctttttatacatgggggtggctgccttgagctctattcagtttacaaacagggtcaagctgctattgatgcctgccaagcatcagcccgacctgttactgcttagacacgtgccgctcacacgtgtccacctctttactgcaattcaacttgcttgcctcggattactgtggattatcaagtcaaccccagccgctattatatttcctctcatgctcctggggctggtcggtgttagaaaggctctcgaacgtgtcttctctccacaggagctcctctggctagacgagctgatgccggaggaagagcggtcgattcctgagaaaggccttgagcccgagcactctttttctgggtccgactctgaggactctgagctcatgtaccagcctaaggcccctgagattaacatctctgtgaattag

SEQ ID NO: 281935 - DNA, 3144 bp, Artificial Sequence
  derived and/or modified sequence
ggactgtactggttctgagattctgtgcaagcctcatggaaatgaagctgccaggccaggaagggtttgaagcctccagtgctcctagaaatattccttcaggggagctggacagcaaccctgaccctggcaccggccccagccctgatggcccctcagacacagagagcaaggaactgggagtacccaaagaccctctgctcttcattcagctgaatgagctgctgggctggccccaggcgctggagtggagagagacaggcaggtgggtactgtttgaggagaagttggaggtggctgcaggccggtggagtgccccccacgtgcccaccctggcactgcccagcctccagaagctccgcagcctgctggccgagggccttgtactgctggactgcccagctcagagcctcctggagctcgtggagcaggtgaccagggtggagtcgctgagcccagagctgagagggcagttgcaggccttgctgctgcagagaccccagcattacaaccagaccacaggcaccaggccctgctggggctctactcatccaagaaaggcttctgacaatgaggaagcccccctgagggaacagtgtcagaaccccctgagacagaagctacctccaggagctgaggcagggactgtgctggcaggggagctgggcttcctggcacagccactgggagcctttgttcgactgcggaaccctgtggtactggggtcccttactgaggtgtccctcccaagcaggtttttctgccttctcctgggcccctgtatgctgggaaagggctaccatgagatgggacgggcagcagctgtcctcctcagtgacccgcaattccagtggtcagttcgtcgggccagcaaccttcatgaccttctggcagccctggatgcattcctagaggaggtgacagtgcttcccccaggtcggtgggacccaacagcccggattcccccgcccaaatgtctgccatctcagcacaaaaggcttccctcgcaacagcgggagatcagaggtcccgccgtcccgcgcctgacctcggctgaggacaggcaccgccatgggccacacgcacacagcccggagttgcagcggaccggcaggctgtttgggggccttatccaggacgtgcgcaggaaggtcccgtggtaccccagcgatttcttggacgccctgcatctccagtgcttctcggccgtactctacatttacctggccactgtcactaatgccatcacttttgggggtctgctgggagatgccactgatggtgcccagggagtgctggaaagtttcctgggcacagcagtggctggagctgccttctgcctgatggcaggccagcccctcaccattctgagcagcacggggccagtgctggtctttgagcgcctgctcttctctttcagcagagattacagcctggactacctgcccttccgcctatgggtgggcatctgggtggctaccttttgcctggtgctggtggccacagaggccagtgtgctggtgcgctacttcacccgcttcactgaggaaggtttctgtgccctcatcagcctcatcttcatctacgatgctgtgggcaaaatgctgaacttgacccatacctatcctatccagaagcctgggtcctctgcctacgggtgcctctgccaatacccaggcccaggaggaaatgagtctcaatggataaggacaaggccaaaagacagagacgacattgtaagcatggacttaggcctgatcaatgcatccttgctgccgccacctgagtgcacccggcagggaggccaccctcgtggccctggctgtcatacagtcccagacattgccttcttctcccttctcctcttccttacttctttcttctttgctatggccctcaagtgtgtaaagaccagccgcttcttcccctctgtggtgcgcaaagggctcagcgacttctcctcagtcctggccatcctgctcggctgtggccttgatgctttcctgggcctagccacaccaaagctcatggtacccagagagttcaagcccacactccctgggcgtggctggctggtgtcaccttttggagccaacccctggtggtggagtgtggcagctgccctgcctgccctgctgctgtctatcctcatcttcatggaccaacagatcacagcagtcatcctcaaccgcatggaatacagactgcagaagggagctggcttccacctggacctcttctgtgtggctgtgctgatgctactcacatcagcgcttggactgccttggtatgtctcagccactgtcatctccctggctcacatggacagtcttcggagagagagcagagcctgtgcccccggggagcgccccaacttcctgggtatcagggaacagaggctgacaggcctggtggtgttcatccttacaggagcctccatcttcctggcacctgtgctcaagttcattccaatgcctgtgctctatggcatcttcctgtatatgggggtggcagcgctcagcagcattcagttcactaatagggtgaagctgttgttgatgccagcaaaacaccagccagacctgctactcttgcggcatgtgcctctgaccagggtccacctcttcacagccatccagcttgcctgtctggggctgctttggataatcaagtctacccctgcagccatcatcttccccctcatgttgctgggccttgtgggggtccgaaaggccctggagagggtcttctcaccacaggaactcctctggctggatgagctgatgccagaggaggagagaagcatccctgagaaggggctggagccagaacactcattcagtggaagtgacagtgaagattcagagctgatgtatcagccaaaggctccagaaatcaacatttctgtgaattagctggagtaggagtctgggagtggagaccccaggaaacagcatgagatgctcagtcggcttggggaaggactgaagggcagctgccaagacctcagttacctcctgacctgagggtggagagtggcaggaagcaagcatgtttgctgtgcacttaggaaaggctggtgagccagagggactgatcaggccccattcactctctactcattaaaaggtcctgagccacgaa

SEQ ID NO: 281936 - DNA, 399 bp, Artificial Sequence
  derived and/or modified sequence
atgagcttcgagtaccggcactacaagcgggaggccaagatctgcacttgtcgaggcggctgggcacacgtgctgctttgcattggggtgagccagggtgcttgcgctgagcacttgccacatagaccagcagtcgagaaagacgtgcccggggccggcgaagtccttttcatgtgttcctggagaatcttccctgtggctagcgccagcccgagttcaagcatctccggcctagctggccattcagtgttcctggttcccggtctggctgcgcacccggggtcacattccgatcagccgccaggggtgccgtcccgccggaagtcaagattggagcgctggtcgccaagcgttagccgaagtaccagccctcccacggaggctcccttctgcctgtag

SEQ ID NO: 281937 - protein, 171 aa, Artificial Sequence
  derived and/or modified sequence
MSSEDREAQEDELLALASIYDGDEFRKAESVQGGETRIYLDLPQNFKIFVSEKLMDLRNEYLQADEANKRLLDQRYGKRVIQKALEEMESKEWLEKNSKSCPCCGTPIEKLDGCNKMTCTGCMQYFCWICMGSLSRANPYKHFNDPGSPCFNRLFYAVDVDDDIWEDEVED

SEQ ID NO: 281938 - DNA, 1047 bp, Artificial Sequence
  derived and/or modified sequence
atgcaattcctcaaggaggaaactctcgcctacctgaacatcgtgagtcctttcgagttgaagatcggaagccagaaaaaagtccagcgtcgaaccgcacaggccagtcctaataccgaactggacttcggaggggcagccgggtctgatgtggaccaggaagaaatagtcgacgaacgagcagtacaggatgtggaatccttgtcaaacctgatccaggaaattctggatttcgatcaggcccaacaaatcaagtgttttaactcaaaactctttctctgcagcatttgtttctgcgaaaaactcggaagtgagtgcatgtactttcttgaatgccggcatgtctactgcaaggcttgtcttaaggactattttgagattcaaatccgcgacggacaggtacagtgcctgaactgccccgagcccaagtgtccaagcgttgccacccctggccaggtcaaagaactcgtggaggcagagcttttcgcccgctacgataggttgctgcttcaatcaagcctggaccttatggctgacgtggtgtactgcccgcgcccttgttgccagttgcccgtgatgcaagaaccagggtgcacaatgggcatctgtagttcatgtaactttgccttttgtactctctgtaggctgacgtaccacggtgtgtccccctgcaaagtgactgcagagaagttaatggacctccgcaatgagtaccttcaagccgatgaggctaataagcgtctgttagatcagcgatacggaaagagagtaatccagaaggccttggaagagatggaatctaaagaatggctggagaagaattcaaagtcctgcccatgctgtgggacacccattgagaaactcgacggctgcaataaaatgacatgtactggatgcatgcaatacttctgctggatctgcatggggtctctatcccgggccaatccctacaaacatttcaacgatccaggttccccttgctttaatagactcttctatgcggtcgatgtggacgacgacatttgggaggacgaagtggaggattag

SEQ ID NO: 281939 - DNA, 1047 bp, Artificial Sequence
  derived and/or modified sequence
atgcagttcctgaaggaggagaccctggcctacctgaacatcgtgagcccctttgagctgaagattggcagccagaagaaggtgcagaggagaacagcccaggccagccccaacacagagctggactttggaggagctgctggcagtgatgtggaccaggaggagatcgtggatgaaagagctgtgcaggatgtggagagcctgagcaacctgatccaggagatcctggactttgaccaggcccagcagatcaagtgcttcaacagcaagctgttcctgtgcagcatctgcttctgtgagaagctgggcagcgagtgcatgtacttcctggagtgccgccacgtgtactgcaaggcctgcctgaaggactactttgagatccagatcagagatggccaggtgcagtgcctgaactgcccagagcccaagtgccccagcgtggccaccccaggccaggtgaaggagctggtggaggccgagctgtttgcccgctatgaccggctgctgctgcagagcagcctggacctgatggctgatgtggtgtactgcccccggccctgctgccagctgcctgtgatgcaggagcccggctgcaccatgggcatctgcagcagctgcaactttgccttctgcaccctgtgccgcctgacctaccatggagtgagcccctgcaaggtgacagctgagaagctgatggacctgagaaatgagtacctgcaggctgatgaggccaacaagaggctgctggaccagagatatggcaagagggtcatccagaaggccctggaggagatggagagcaaggagtggctggagaagaacagcaagagctgcccctgctgcggcacccccatcgagaagctggatggctgcaacaagatgacctgcaccggctgcatgcagtacttctgctggatctgcatgggcagcctgagccgggccaacccctacaagcacttcaatgaccccggcagcccctgcttcaacagactcttctatgctgtggatgtggatgatgacatctgggaggatgaggtggaggactag

SEQ ID NO: 281940 - DNA, 1047 bp, Artificial Sequence
  derived and/or modified sequence
atgcagttcctgaaggaggagaccctggcctacctgaacatcgtgtcaccttttgaattaaagatcggcagccagaagaaagtgcagagacggacggcccaggctagtccaaacacagaattggacttcggaggcgcagcaggctctgacgtcgaccaggaggaaatcgtggatgaaagggctgtgcaggatgtagaaagtttgagtaacctcattcaggagatcctcgacttcgaccaggcccagcagatcaagtgttttaactctaagctattcctttgttctatttgcttctgcgaaaagctggggtccgaatgtatgtacttcttggaatgccgtcatgtgtactgcaaggcatgtctcaaagattacttcgagattcagatcagagacggtcaagtgcagtgcttaaactgccccgagccaaagtgcccatcggtggcaacgccgggccaagtgaaagaattggttgaggcagagctgttcgcacgctacgatcgcctcctgctccagtctagccttgatctaatggccgatgttgtgtactgtcctcgaccctgctgccagctgcctgtcatgcaagagcccgggtgcactatgggtatttgtagctcttgtaatttcgcgttttgcaccctgtgccgactgacctatcatggcgtttcgccatgcaaggtgacagcagagaagctcatggacctaagaaacgagtaccttcaggccgatgaagctaataagaggctgctcgatcaaagatatgggaagcgggttattcagaaagctttggaagaaatggaaagcaaagagtggctggagaagaattcaaagagctgcccatgctgcggcacaccaatcgagaaattggatggatgcaacaagatgacctgcactggctgtatgcagtatttctgttggatttgtatgggcagcctgagcagggctaacccatataagcacttcaacgaccctggcagcccctgttttaaccgattgttttacgccgtcgacgtggatgatgacatatgggaagacgaggttgaagactag

SEQ ID NO: 281941 - DNA, 1047 bp, Artificial Sequence
  derived and/or modified sequence
atgcagttcttgaaggaggaaacactggcttatctgaatatcgtaagtccctttgaactcaaaattggtagccagaaaaaagtccaacggcgaacagcgcaagcatcaccaaacacagagttggatttcgggggagccgcaggatccgatgtggatcaggaagagatcgttgacgagagagcagtccaggacgtcgagtctctaagtaacctgattcaggaaatactcgatttcgaccaggcccagcaaatcaaatgttttaatagtaaactgttcctctgtagcatttgtttttgtgaaaagctgggctcagaatgtatgtactttctagaatgccggcatgtctactgcaaagcttgcttaaaagactactttgagattcagattcgggacggacaggtgcaatgcttgaactgccctgagcccaagtgcccctcagtggccactcccggtcaagtgaaggagctggtcgaggccgagttattcgcaagatacgataggcttctactgcagtcatcactagatctgatggctgatgttgtgtattgtcctcggccatgttgccagttacctgtcatgcaagagcctggatgtaccatgggtatttgcagctcttgtaacttcgctttctgtaccctttgtaggctcacctaccatggggtctcaccatgcaaggtgaccgccgagaagctaatggatctgagaaacgagtatttgcaggctgacgaggctaacaagagactgctggatcagcgatacggcaaaagggtgatccagaaggctttggaagaaatggagtccaaagagtggctggagaagaacagcaagtcatgtccatgttgcggaacccctatcgaaaaacttgacggttgcaataagatgacatgcaccggatgtatgcagtatttttgctggatctgtatggggtcactgagtagagctaatccatacaagcactttaacgatcccggttccccatgttttaatcgcctgttttacgccgttgacgtggatgacgacatttgggaggacgaggttgaagactag

SEQ ID NO: 281942 - DNA, 1047 bp, Artificial Sequence
  derived and/or modified sequence
atgcagttcctgaaggaggagaccctggcctacctgaacatcgtgagccccttcgagctgaagatcggcagccagaagaaggtgcagagaagaaccgcccaggccagccccaacaccgagctggacttcggcggcgccgccggcagcgacgtggaccaggaggagatcgtggacgagagagccgtgcaggacgtggagagcctgagcaacctgatccaggagatcctggacttcgaccaggcccagcagatcaagtgcttcaacagcaagctgttcctgtgcagcatctgcttctgcgagaagctgggcagcgagtgcatgtacttcctggagtgcagacacgtgtactgcaaggcctgcctgaaggactacttcgagatccagatcagagacggccaggtgcagtgcctgaactgccccgagcccaagtgccccagcgtggccacccccggccaggtgaaggagctggtggaggccgagctgttcgccagatacgacagactgctgctgcagagcagcctggacctgatggccgacgtggtgtactgccccagaccctgctgccagctgcccgtgatgcaggagcccggctgcaccatgggcatctgcagcagctgcaacttcgccttctgcaccctgtgcagactgacctaccacggcgtgagcccctgcaaggtgaccgccgagaagctgatggacctgagaaacgagtacctgcaggccgacgaggccaacaagagactgctggaccagagatacggcaagagagtgatccagaaggccctggaggagatggagagcaaggagtggctggagaagaacagcaagagctgcccctgctgcggcacccccatcgagaagctggacggctgcaacaagatgacctgcaccggctgcatgcagtacttctgctggatctgcatgggcagcctgagcagagccaacccctacaagcacttcaacgaccccggcagcccctgcttcaacagactgttctacgccgtggacgtggacgacgacatctgggaggacgaggtggaggactag

SEQ ID NO: 281943 - protein, 298 aa, Artificial Sequence
  derived and/or modified sequence
MSSEDREAQEDELLALASIYDGDEFRKAESVQGGETRIYLDLPQNFKIFVSGNSNECLQNSGFEYTICFLPPLVLNFELPPDYPSSSPPSFTLSGKWLSPTQVKELVEAELFARYDRLLLQSSLDLMADVVYCPRPCCQLPVMQEPGCTMGICSSCNFAFCTLCRLTYHGVSPCKVTAEKLMDLRNEYLQADEANKRLLDQRYGKRVIQKALEEMESKEWLEKNSKSCPCCGTPIEKLDGCNKMTCTGCMQYFCWICMGSLSRANPYKHFNDPGSPCFNRLFYAVDVDDDIWEDEVED

SEQ ID NO: 281944 - protein, 15 aa, Artificial Sequence
  derived and/or modified sequence
MSSEDREAQEDELLA

SEQ ID NO: 281945 - protein, 61 aa, Artificial Sequence
  derived and/or modified sequence
MSSEDREAQEDELLALASIYDGDEFRKAESVQGGETRIYLDLPQNFKIFVSGNSNECLQNS

SEQ ID NO: 281946 - DNA, 897 bp, Artificial Sequence
  derived and/or modified sequence
atgagctcagaggatagagaggctcaggaggacgagctcctcgcattggcctctatatatgacggtgatgaattccggaaagccgaatccgtacagggaggcgagacaagaatctacctggacctacctcagaacttcaagattttcgttagcggaaatagtaacgaatgtttacagaattcggggtttgaatacactatttgcttcttgcctccgctggtgctgaacttcgaactaccaccagactatcccagtagctcacctccatccttcaccttgtcgggcaaatggttgtcgccgacacaggttaaagagctggttgaggccgaactttttgctcgctacgataggctgttgctgcagagctctttggacctaatggccgatgtcgtatattgtccgaggccatgttgccaactgcctgtgatgcaggagcccggatgcactatgggaatctgtagctcctgcaactttgccttctgcaccttatgtcgcctcacctaccatggcgtctcaccatgcaaagtgaccgcggaaaagcttatggaccttcggaacgaatatctgcaggccgacgaagccaataaacgactgttagatcagcggtatggcaagcgcgtaatccaaaaagctttggaagagatggagtctaaagagtggcttgagaaaaattcaaagtcttgcccgtgttgcggcacgccgattgagaagctcgacggctgcaacaagatgacctgcactggctgcatgcagtacttctgctggatctgtatgggcagcctttctcgtgcaaacccctataagcatttcaatgaccctggttccccttgcttcaacaggctgttttatgctgtggacgtggacgatgacatatgggaagatgaggtagaggattag

SEQ ID NO: 281947 - DNA, 186 bp, Artificial Sequence
  derived and/or modified sequence
atgtcaagcgaagacagagaagcacaggaagatgagttgctggccctggcatctatttacgacggggacgaatttcggaaagccgagagcgtccagggcggagagacacgcatctatctggaccttccacagaattttaagattttcgtctccggtaactcgaatgagtgcttacagaatagttag

SEQ ID NO: 281948 - DNA, 300 bp, Artificial Sequence
  derived and/or modified sequence
atgagctcagaagacagggaggcccaggaggatgagttattagcattagccagcatctatgacggggacgagttcaggaaggcagagtcagttcagggtggggagacaaggatatatctggatctaccccaaaacttcaaaatttttgtatccgggaactccaacgagtgccttcaaaactcaggattcgaatatacgatttgctttctgccccccctcgtcctgaattttgagcttcccccagactacccaagtagctctcctccctcatttacattgtccgggaaatggctgagctag

SEQ ID NO: 281949 - DNA, 516 bp, Artificial Sequence
  derived and/or modified sequence
atgtccagcgaggaccgtgaggcccaggaggatgaactgctggccctggcatcgatttacgacggggacgagtttagaaaagctgagtcagtgcaaggtggggaaacaaggatctacctcgatcttcctcaaaattttaagatctttgtgagcgagaagttgatggacctcagaaacgagtatctgcaggctgacgaggctaataagaggcttctcgaccagcgatacggcaagcgtgtgattcagaaggcattggaagagatggaatctaaggagtggctagagaagaattctaagtcctgcccttgttgcggcactccaatcgagaaacttgatggttgtaataagatgacatgtactggctgcatgcaatatttttgctggatatgtatgggatcactcagccgagctaacccatacaagcacttcaatgatccagggagcccgtgcttcaaccgcctgttttatgctgtcgacgtagacgacgatatttgggaggacgaggtggaggattag

SEQ ID NO: 281950 - DNA, 897 bp, Artificial Sequence
  derived and/or modified sequence
atgagcagcgaggaccgggaggcccaggaggatgagctgctggccctggccagcatctatgatggagatgagttcaggaaggccgagagcgtgcagggcggggagacccgcatctacctggacctgccccagaacttcaagatctttgtgtctggcaacagcaatgaatgtctgcagaacagcggctttgagtacaccatctgcttcctgccccccctggtgctgaactttgagctgcccccagactaccccagcagcagcccccccagcttcaccctgagcggcaagtggctgagccccacccaggtgaaggagctggtggaggccgagctgtttgcccgctatgaccggctgctgctgcagagcagcctggacctgatggctgatgtggtgtactgcccccggccctgctgccagctgcctgtgatgcaggagcccggctgcaccatgggcatctgcagcagctgcaactttgccttctgcaccctgtgccgcctgacctaccatggagtgagcccctgcaaggtgacagctgagaagctgatggacctgagaaatgagtacctgcaggctgatgaggccaacaagaggctgctggaccagagatatggcaagagggtcatccagaaggccctggaggagatggagagcaaggagtggctggagaagaacagcaagagctgcccctgctgcggcacccccatcgagaagctggatggctgcaacaagatgacctgcaccggctgcatgcagtacttctgctggatctgcatgggcagcctgagccgggccaacccctacaagcacttcaatgaccccggcagcccctgcttcaacagactcttctatgctgtggatgtggatgatgacatctgggaggatgaggtggaggactag

SEQ ID NO: 281951 - DNA, 186 bp, Artificial Sequence
  derived and/or modified sequence
atgagcagcgaggaccgggaggcccaggaggatgagctgctggccctggccagcatctatgatggagatgagttcaggaaggccgagagcgtgcagggcggggagacccgcatctacctggacctgccccagaacttcaagatctttgtgtctggcaacagcaatgaatgtctgcagaacagctag

SEQ ID NO: 281952 - DNA, 300 bp, Artificial Sequence
  derived and/or modified sequence
atgagcagcgaggaccgggaggcccaggaggatgagctgctggccctggccagcatctatgatggagatgagttcaggaaggccgagagcgtgcagggcggggagacccgcatctacctggacctgccccagaacttcaagatctttgtgtctggcaacagcaatgaatgtctgcagaacagcggctttgagtacaccatctgcttcctgccccccctggtgctgaactttgagctgcccccagactaccccagcagcagcccccccagcttcaccctgagcggcaagtggctgtcctag

SEQ ID NO: 281953 - DNA, 516 bp, Artificial Sequence
  derived and/or modified sequence
atgagcagcgaggaccgggaggcccaggaggatgagctgctggccctggccagcatctatgatggagatgagttcaggaaggccgagagcgtgcagggcggggagacccgcatctacctggacctgccccagaacttcaagatctttgtgtctgagaagctgatggacctgagaaatgagtacctgcaggctgatgaggccaacaagaggctgctggaccagagatatggcaagagggtcatccagaaggccctggaggagatggagagcaaggagtggctggagaagaacagcaagagctgcccctgctgcggcacccccatcgagaagctggatggctgcaacaagatgacctgcaccggctgcatgcagtacttctgctggatctgcatgggcagcctgagccgggccaacccctacaagcacttcaatgaccccggcagcccctgcttcaacagactcttctatgctgtggatgtggatgatgacatctgggaggatgaggtggaggactag

SEQ ID NO: 281954 - DNA, 897 bp, Artificial Sequence
  derived and/or modified sequence
atgagcagcgaggaccgggaggcccaggaggacgagctgctggccttagcttcaatttatgatggtgatgaattccggaaggcagagtctgtgcaaggaggggagaccaggatctaccttgacctgccacagaacttcaagatcttcgtctcaggaaattccaacgaatgcttacagaacagtggatttgaatacaccatctgctttctgccaccacttgtgcttaatttcgaattgcctcctgactatcccagctccagtcccccctctttcactctcagcggaaagtggctgagcccgacccaggtgaaggagctggtcgaagccgaactgttcgccagatatgatcgactgctgctccagagttccttggacctcatggcggatgtagtgtactgtcctagaccatgttgccagttgccagtgatgcaagagcctggctgcacaatgggcatttgttcatcttgcaattttgctttttgtacactctgccgtctgacctaccacggggtgagcccatgcaaggtgaccgcagaaaagttaatggacttacgaaatgagtacctgcaggctgacgaggccaacaaaaggttgctggatcagaggtacggcaaacgggtgattcagaaggcgctggaggagatggaatctaaagaatggcttgaaaagaactctaagtcttgtccatgctgcgggacaccgatcgagaagctcgacggatgtaacaaaatgacctgtactggatgtatgcagtatttctgctggatctgcatggggtccctgagccgcgctaacccctacaagcacttcaatgatccaggatcaccttgttttaatcggcttttttatgcggtcgacgtggatgacgacatatgggaagatgaggtggaggattag

SEQ ID NO: 281955 - DNA, 186 bp, Artificial Sequence
  derived and/or modified sequence
atgagcagcgaggaccgggaggcccaggaggacgagctgctggccctggcgtctatatacgatggggacgagttcaggaaagccgaatcggtccagggcggagaaactagaatctatctggacttgccccagaactttaagattttcgtgtcaggcaactcaaacgagtgtcttcagaactcctag

SEQ ID NO: 281956 - DNA, 300 bp, Artificial Sequence
  derived and/or modified sequence
atgagcagcgaggaccgggaggcccaggaggacgagctgctggccttggcctcaatctatgacggagacgaatttcgcaaggctgaaagtgtacagggcggcgagacccggatttatctggatttgccgcagaactttaagatcttcgtgtctgggaacagcaacgaatgccttcagaattcaggattcgaatataccatatgtttcttgcccccactggtcctgaattttgagctgcccccagactacccgtcttcatccccaccttccttcacactgtccgggaaatggctctcttag

SEQ ID NO: 281957 - DNA, 516 bp, Artificial Sequence
  derived and/or modified sequence
atgagcagcgaggaccgggaggcccaggaggacgagctgctggccctcgctagcatatacgatggcgacgaattccgaaaagcagagagcgtccagggcggagaaacaagaatctatctggacctgcctcagaattttaagatcttcgtgtctgagaagctcatggacctgcggaacgagtatctgcaggctgatgaagctaacaagcggctcctggaccagcgctacgggaagcgcgtcatccagaaggcactggaggaaatggaatctaaggagtggctcgagaagaattctaaaagctgtccctgttgcgggacccctatcgagaaactcgacggatgcaataagatgacttgcactgggtgcatgcaatacttttgctggatttgtatggggtctctgtctcgcgcaaacccatataagcacttcaatgaccctggcagcccctgtttcaatagactgttctatgccgtggatgtggacgacgacatatgggaagatgaggttgaagactag

SEQ ID NO: 281958 - DNA, 897 bp, Artificial Sequence
  derived and/or modified sequence
atgagcagtgaggatagagaagcccaagaagatgaactgctggcgctggctagcatttatgacggcgatgaattccggaaggccgagtcagtgcagggaggggaaacgcggatttatctggatctgccacagaattttaagatattcgtcagcgggaacagtaatgaatgtctacaaaacagcggcttcgagtacacgatatgctttctccctccactggtcctcaattttgaactgcctcccgactatccttcctcctcgccacctagtttcacactgtcagggaaatggctgtcgcctacacaagtgaaggaactcgttgaagctgaattgtttgctcgctatgaccgcctgctactgcaaagtagtctggacctaatggcagatgtagtgtactgtcccagaccatgttgtcaactgccagttatgcaagagcctgggtgcaccatgggaatctgttctagttgtaattttgccttctgcacgttgtgccggctgacatatcacggagtgagcccctgcaaagttaccgccgagaaactgatggatctgcgaaatgagtatctccaggcagacgaggccaataaacggctgctcgatcaaagatacgggaaacgggtgatccagaaggccctggaagagatggagtcaaaagagtggttggagaagaacagcaagagctgcccctgctgcggaacccccattgagaagctggatggatgtaacaaaatgacttgcactggatgtatgcaatacttttgctggatctgcatgggcagcttatctcgcgctaatccatacaaacacttcaatgacccgggatccccgtgtttcaatcgtctgttttacgccgtggatgttgatgacgatatttgggaggacgaagtcgaagactag

SEQ ID NO: 281959 - DNA, 186 bp, Artificial Sequence
  derived and/or modified sequence
atgagttcagaggatagagaagcacaggaggatgagctactcgcactggcatcgatatacgacggagacgaattcaggaaggctgaaagtgtacagggaggggaaacaaggatatacttagatttgccccaaaattttaaaatcttcgtgtcaggcaatagtaacgagtgcctgcaaaattcatag

SEQ ID NO: 281960 - DNA, 300 bp, Artificial Sequence
  derived and/or modified sequence
atgtcgtcagaagacagagaggcccaggaggatgaactgttggcacttgcttccatctacgacggagacgaattcaggaaagcagaaagcgttcaagggggagaaaccagaatatatttggacctaccccagaatttcaaaatattcgtctccggcaactctaatgaatgcttgcaaaactcaggatttgaatataccatctgcttcttgccccctttggtgctgaactttgagctcccccctgattacccgtcttcctcccctccctccttcaccctctctgggaagtggctgagctag

SEQ ID NO: 281961 - DNA, 516 bp, Artificial Sequence
  derived and/or modified sequence
atgtcgtcagaagaccgtgaagctcaggaggatgagctgttggcactagcgagcatctacgacggagacgagtttcggaaagccgagtcagtccaagggggagagacacggatctatttggacttacctcagaacttcaagatcttcgtttcggagaaactaatggacttgagaaacgagtatttgcaggccgacgaagcgaacaagcggctcttagaccagcgatatgggaaacgagtaatccagaaggcgctggaggaaatggagagtaaggaatggttggaaaaaaatagtaagtcctgtccgtgttgcggaactccaatagaaaagctcgacggatgcaacaagatgacttgtacaggatgcatgcagtacttttgttggatttgtatgggtagcctgagccgtgcaaacccgtataagcacttcaacgaccccggaagcccctgcttcaaccggttgttctacgctgtggacgtggatgacgacatctgggaggatgaagtggaagactag

SEQ ID NO: 281962 - DNA, 1229 bp, Artificial Sequence
  derived and/or modified sequence
gtctctaggcctggtcggctggcggcgatggcaggattttcataatatatgtagtatgagttccacatcttggcctcttacccagcttcagcagtctcagctccaccagttagagaataaatgggatttgcatgaactccactctgagctgaaatacagactgcggtgttaatatccttttcttctgattgttattaacaggtccttatgtcgtcagaagatcgagaagctcaggaggatgaattgctggccctggcaagtatttacgatggagatgaatttagaaaagcagagtctgtccaaggtggagaaaccaggatctatttggatttgccacagaatttcaagatatttgtgagcggcaattcaaatgagtgtctccagaatagtggctttgaatacaccatttgctttctgcctccacttgtgctgaactttgaactgccaccagattatccatcctcttccccaccttcattcacacttagtggcaaatggctgtcaccaactcaggtcaaagagttagtggaagcagagttatttgcccgttatgaccgccttctcctccagtcctccttggacctgatggcagatgtggtgtactgcccccggccgtgctgccagctgcctgtgatgcaggaacctggctgcaccatgggtatctgctccagctgcaattttgccttctgtactttgtgcaggttgacctaccatggggtctccccatgtaaggtgactgcagagaaattaatggacttacgaaatgaatacctgcaagcggatgaggctaataaaagacttttggatcaaaggtatggtaagagagtgattcagaaggcactggaagagatggaaagtaaggagtggctagagaagaactcaaagagctgcccatgttgtggaactcccatagagaaattagacggatgtaacaagatgacatgtactggctgtatgcaatatttctgttggatttgcatgggttctctctctagagcaaacccttacaaacatttcaatgaccctggttcaccatgttttaaccggctgttttatgctgtggatgttgacgacgatatttgggaagatgaggtagaagactagttaactactgctcaagatatggaagtggattgtttttccctaatcttccgtcaagtacacaaagtaactttgcgggatatttagggtactattcattcactcttcctgcgtagaagatatggaag

SEQ ID NO: 281963 - DNA, 473 bp, Artificial Sequence
  derived and/or modified sequence
ggaccgggctgggactgtacactgggcctcagtccctcaaatccgggaccgggcgtccgcagctcggctggccgggactcccttcgggacgctgaggaggaaggggaagatggcaggattttcataatatatgtagtatgagttccacatcttggcctcttacccagcttcagcagtctcagctccaccagttagagaataaatgggatttgcatgaactccactctgagctgaaatacagactgcggtgttaatatccttttcttctgattgttattaacaggtccttatgtcgtcagaagatcgagaagctcaggaggatgaattgctggccctggcaagtatttacgatggagatgaatttagaaaagcagagtctgtccaaggtggagaaaccaggatctatttggatttgccacagaatttcaagatatttgtgagcggcaattcaaatgagtgtctccagaatagtg

SEQ ID NO: 281964 - DNA, 563 bp, Artificial Sequence
  derived and/or modified sequence
atttcccaagctggttggtgcatgggcttcctcacttttttcctcacgaagaggtctctggtctcccctctctgagcactctgagatggcaggattttcataatatatgtagtatgagttccacatcttggcctcttacccagcttcagcagtctcagctccaccagttagagaataaatgggatttgcatgaactccactctgagctgaaatacagactgcggtgttaatatccttttcttctgattgttattaacaggtccttatgtcgtcagaagatcgagaagctcaggaggatgaattgctggccctggcaagtatttacgatggagatgaatttagaaaagcagagtctgtccaaggtggagaaaccaggatctatttggatttgccacagaatttcaagatatttgtgagcggcaattcaaatgagtgtctccagaatagtggctttgaatacaccatttgctttctgcctccacttgtgctgaactttgaactgccaccagattatccatcctcttccccaccttcattcacacttagtggcaaatggctgtcac

SEQ ID NO: 281965 - DNA, 1191 bp, Artificial Sequence
  derived and/or modified sequence
agctgacagctcccgagaacggaagaggcggcgcgccggttgagcagggcgtctctaggcctggtcggctggcggcgatggcaggattttcataatatatgtagtatgagttccacatcttggcctcttacccagcttcagcagtctcagctccaccagttagagaataaatgggatttgcatgaactccactctgagctgaaatacagactgcggtgttaatatccttttcttctgattgttattaacaggtccttatgtcgtcagaagatcgagaagctcaggaggatgaattgctggccctggcaagtatttacgatggagatgaatttagaaaagcagagtctgtccaaggtggagaaaccaggatctatttggatttgccacagaatttcaagatatttgtgagcgagaaattaatggacttacgaaatgaatacctgcaagcggatgaggctaataaaagacttttggatcaaaggtatggtaagagagtgattcagaaggcactggaagagatggaaagtaaggagtggctagagaagaactcaaagagctgcccatgttgtggaactcccatagagaaattagacggatgtaacaagatgacatgtactggctgtatgcaatatttctgttggatttgcatgggttctctctctagagcaaacccttacaaacatttcaatgaccctggttcaccatgttttaaccggctgttttatgctgtggatgttgacgacgatatttgggaagatgaggtagaagactagttaactactgctcaagatatggaagtggattgtttttccctaatcttccgtcaagtacacaaagtaactttgcgggatatttagggtactattcattcactcttcctgcgtagaagatatggaagaacgaggtttatattttcatgtggtactactgaagaaggtgcattgatacatttttaaatgtaagttgagaaaaatttataagccaaaggttcagaaaattaaactacagaatattaaatattataatgtgcccaaagctctgaatagttaaaaattaaatatttattttcttccccaagctttaggtaaggagaagaggggtcaagagttaaacttagagaccctttgtctctgagaagcatccttctaagacattctgttggagttccctcagtactattccttacaactg

SEQ ID NO: 281966 - DNA, 897 bp, Artificial Sequence
  derived and/or modified sequence
atgagcagcgaggacagagaggcccaggaggacgagctgctggccctggccagcatctacgacggcgacgagttcagaaaggccgagagcgtgcagggcggcgagaccagaatctacctggacctgccccagaacttcaagatcttcgtgagcggcaacagcaacgagtgcctgcagaacagcggcttcgagtacaccatctgcttcctgccccccctggtgctgaacttcgagctgccccccgactaccccagcagcagcccccccagcttcaccctgagcggcaagtggctgagccccacccaggtgaaggagctggtggaggccgagctgttcgccagatacgacagactgctgctgcagagcagcctggacctgatggccgacgtggtgtactgccccagaccctgctgccagctgcccgtgatgcaggagcccggctgcaccatgggcatctgcagcagctgcaacttcgccttctgcaccctgtgcagactgacctaccacggcgtgagcccctgcaaggtgaccgccgagaagctgatggacctgagaaacgagtacctgcaggccgacgaggccaacaagagactgctggaccagagatacggcaagagagtgatccagaaggccctggaggagatggagagcaaggagtggctggagaagaacagcaagagctgcccctgctgcggcacccccatcgagaagctggacggctgcaacaagatgacctgcaccggctgcatgcagtacttctgctggatctgcatgggcagcctgagcagagccaacccctacaagcacttcaacgaccccggcagcccctgcttcaacagactgttctacgccgtggacgtggacgacgacatctgggaggacgaggtggaggactag

SEQ ID NO: 281967 - DNA, 186 bp, Artificial Sequence
  derived and/or modified sequence
atgagcagcgaggacagagaggcccaggaggacgagctgctggccctggccagcatctacgacggcgacgagttcagaaaggccgagagcgtgcagggcggcgagaccagaatctacctggacctgccccagaacttcaagatcttcgtgagcggcaacagcaacgagtgcctgcagaacagctag

SEQ ID NO: 281968 - DNA, 300 bp, Artificial Sequence
  derived and/or modified sequence
atgagcagcgaggacagagaggcccaggaggacgagctgctggccctggccagcatctacgacggcgacgagttcagaaaggccgagagcgtgcagggcggcgagaccagaatctacctggacctgccccagaacttcaagatcttcgtgagcggcaacagcaacgagtgcctgcagaacagcggcttcgagtacaccatctgcttcctgccccccctggtgctgaacttcgagctgccccccgactaccccagcagcagcccccccagcttcaccctgagcggcaagtggctgagctag

SEQ ID NO: 281969 - DNA, 516 bp, Artificial Sequence
  derived and/or modified sequence
atgagcagcgaggacagagaggcccaggaggacgagctgctggccctggccagcatctacgacggcgacgagttcagaaaggccgagagcgtgcagggcggcgagaccagaatctacctggacctgccccagaacttcaagatcttcgtgagcgagaagctgatggacctgagaaacgagtacctgcaggccgacgaggccaacaagagactgctggaccagagatacggcaagagagtgatccagaaggccctggaggagatggagagcaaggagtggctggagaagaacagcaagagctgcccctgctgcggcacccccatcgagaagctggacggctgcaacaagatgacctgcaccggctgcatgcagtacttctgctggatctgcatgggcagcctgagcagagccaacccctacaagcacttcaacgaccccggcagcccctgcttcaacagactgttctacgccgtggacgtggacgacgacatctgggaggacgaggtggaggactag

SEQ ID NO: 281970 - protein, 462 aa, Artificial Sequence
  derived and/or modified sequence
MDKDSQGLLDSSLMASGTASRSEDEESLAGQKRASSQALGTIPKRRSSSRFIKRKKFDDELVESSLAKSSTRAKGASGVEPGRCSGSEPSSSEKKKVSKAPSTPVPPSPAPAPGLTKRVKKSKQPLQVTKDLGRWKPADDLLLINAVLQTNDLTSVHLGVKFSCRFTLREVQERWYALLYDPVISKLACQAMRQLHPEAIAAIQSKALFSKAEEQLLSKVGSTSQPTLETFQDLLHRHPDAFYLARTAKALQAHWQLMKQYYLLEDQTVQPLPKGDQVLNFSDAEDLIDDSKLKDMRDEVLEHELMVADRRQKREIRQLEQELHKWQVLVDSITGMSSPDFDNQTLAVLRGRMVRYLMRSREITLGRATKDNQIDVDLSLEGPAWKISRKQGVIKLKNNGDFFIANEGRRPIYIDGRPVLCGSKWRLSNNSVVEIASLRFVFLINQDLIALIRAEAAKITPQ

SEQ ID NO: 281971 - protein, 205 aa, Artificial Sequence
  derived and/or modified sequence
MDKDSQGLLDSSLMASGTASRSEDEESLAGQKRASSQALGTIPKRRSSSRFIKRKKFDDELVESSLAKSSTRAKGASGVEPGRCSGSEPSSSEKKKVSKAPSTPVPPSPAPAPGLTKRVKKSKQPLQVTKDLGRWKPADDLLLINAVLQTNDLTSVHLGVKFSCRFTLREVQERWYALLYDPVISKLACQAMRQLHPEAIAAIQS

SEQ ID NO: 281972 - protein, 185 aa, Artificial Sequence
  derived and/or modified sequence
MDKDSQGLLDSSLMASGTASRSEDEESLAGQKRASSQALGTIPKRRSSSRFIKRKKFDDELVESSLAKSSTRAKGASGVEPGRCSGSEPSSSEKKKVSKAPSTPVPPSPAPAPGLTKRVKKSKQPLQVTKDLGRWKPADDLLLINAVLQTNDLTSVHLGVKFSCRFTLREVQERWYALLYDPVIS

SEQ ID NO: 281973 - protein, 144 aa, Artificial Sequence
  derived and/or modified sequence
MDKDSQGLLDSSLMASGTASRSEDEESLAGQKRASSQALGTIPKRRSSSRTLYRFIKRKKFDDELVESSLAKSSTRAKGASGVEPGRCSGSEPSSSEKKKVSKAPSTPVPPSPAPAPGLTKRVKKSKQPLQVTKDLGRWKPADD

SEQ ID NO: 281974 - DNA, 1389 bp, Artificial Sequence
  derived and/or modified sequence
atggacaaggacagccagggcctgctggacagcagcctgatggccagcggcaccgccagcagaagcgaggacgaggagagcctggccggccagaagagagccagcagccaggccctgggcaccatccccaagagaagaagcagcagcagattcatcaagagaaagaagttcgacgacgagctggtggagagcagcctggccaagagcagcaccagagccaagggcgccagcggcgtggagcccggcagatgcagcggcagcgagcccagcagcagcgagaagaagaaggtgagcaaggcccccagcacccccgtgccccccagccccgcccccgcccccggcctgaccaagagagtgaagaagagcaagcagcccctgcaggtgaccaaggacctgggcagatggaagcccgccgacgacctgctgctgatcaacgccgtgctgcagaccaacgacctgaccagcgtgcacctgggcgtgaagttcagctgcagattcaccctgagagaggtgcaggagagatggtacgccctgctgtacgaccccgtgatcagcaagctggcctgccaggccatgagacagctgcaccccgaggccatcgccgccatccagagcaaggccctgttcagcaaggccgaggagcagctgctgagcaaggtgggcagcaccagccagcccaccctggagaccttccaggacctgctgcacagacaccccgacgccttctacctggccagaaccgccaaggccctgcaggcccactggcagctgatgaagcagtactacctgctggaggaccagaccgtgcagcccctgcccaagggcgaccaggtgctgaacttcagcgacgccgaggacctgatcgacgacagcaagctgaaggacatgagagacgaggtgctggagcacgagctgatggtggccgacagaagacagaagagagagatcagacagctggagcaggagctgcacaagtggcaggtgctggtggacagcatcaccggcatgagcagccccgacttcgacaaccagaccctggccgtgctgagaggcagaatggtgagatacctgatgagaagcagagagatcaccctgggcagagccaccaaggacaaccagatcgacgtggacctgagcctggagggccccgcctggaagatcagcagaaagcagggcgtgatcaagctgaagaacaacggcgacttcttcatcgccaacgagggcagaagacccatctacatcgacggcagacccgtgctgtgcggcagcaagtggagactgagcaacaacagcgtggtggagatcgccagcctgagattcgtgttcctgatcaaccaggacctgatcgccctgatcagagccgaggccgccaagatcaccccccagtag

SEQ ID NO: 281975 - DNA, 1928 bp, Artificial Sequence
  derived and/or modified sequence
cctggttcgttaaccggaagtagacgtacctcacggaagccggctttggccctgcggctgctaccgtcgccgcggagaaattgttggatctggcagtctaggaatgaatctcctctcagcctttaagctcacctggtcagaatccttggatgagcctgtgggaccgttcctcctagcccggtggtttggaaccagtggctttgggactgtaagaggatggacaaagattctcaggggctgctagattcatccctgatggcatcaggcactgccagccgctcagaggatgaggagtcactggcagggcagaagcgagcctcctcccaggccttgggcaccatccctaaacggagaagctcctccaggttcatcaagaggaagaagttcgatgatgagctggtggagagcagcctggcaaaatcttctacccgggcaaagggggccagtggggtggaaccagggcgctgttcggggagtgaaccctcctccagtgagaagaagaaggtatccaaagcccccagcactcctgtgccacccagcccagccccagcccctggactcaccaagcgtgtgaagaagagtaaacagccacttcaggtgaccaaggatctgggccgctggaagcctgcagatgacctcctgctcataaatgctgtgttgcagaccaacgacctgacctccgtccacctgggcgtgaaattcagctgccgcttcacccttcgggaggtccaggagcgttggtacgccctgctctacgatcctgtcatctccaagttggcctgtcaggccatgaggcagctgcacccagaggctattgcagccatccagagcaaggccctgtttagcaaggctgaggagcagctgctgagcaaagtgggatcgaccagccagcccaccttggagaccttccaggacctgctgcacagacaccctgatgccttctacctggcccgtaccgcgaaggccctgcaggcccactggcagctcatgaagcagtattacctgctggaggaccagacagtgcagccgctgcccaaaggggaccaagtgctgaacttctctgatgcagaggacctgattgatgacagtaagctcaaggacatgcgagatgaggtcctggaacatgagctgatggtggctgaccggcgccagaagcgagagattcggcagctggaacaggaactgcataagtggcaggtgctagtggacagcatcacaggcatgagctctccggacttcgacaaccagacactggcagtgctgcggggccgcatggtgcggtacctgatgcgctcgcgtgagatcaccctgggcagagcaaccaaggataaccagattgatgtggacctgtctctggagggtccggcctggaagatatcccggaaacaaggtgtcatcaagctgaagaacaacggtgatttcttcattgccaatgagggtcgacggcccatctacatcgatggacggccggtgctctgtggctccaaatggcgcctcagcaacaactctgtggtggagatcgccagcctgcgattcgtcttccttatcaaccaggacctcattgccctcatcagggctgaggctgccaagatcacaccacagtgaggagtggtggcaggactcgtgggccctctccggcctgtttcccctgccactccagcccccttgagctgggaactcaggctcctggaaaaacctgggcagtgggaggctcagctgcgggccattgatttgagcctttgagggaggatagggctggcctttgtgaagccagcagaggctgagaacctcaggcttccctagatccagagcccctccccatcttcctctctctaaaaacaaccctaccccccattgccaccttcactcctgtgtctccagctgattagcctcagactcttcttttattgtttttcttttgtaaataa

SEQ ID NO: 281976 - DNA, 618 bp, Artificial Sequence
  derived and/or modified sequence
atggacaaggacagccagggcctgctggacagcagcctgatggccagcggcaccgccagcagaagcgaggacgaggagagcctggccggccagaagagagccagcagccaggccctgggcaccatccccaagagaagaagcagcagcagattcatcaagagaaagaagttcgacgacgagctggtggagagcagcctggccaagagcagcaccagagccaagggcgccagcggcgtggagcccggcagatgcagcggcagcgagcccagcagcagcgagaagaagaaggtgagcaaggcccccagcacccccgtgccccccagccccgcccccgcccccggcctgaccaagagagtgaagaagagcaagcagcccctgcaggtgaccaaggacctgggcagatggaagcccgccgacgacctgctgctgatcaacgccgtgctgcagaccaacgacctgaccagcgtgcacctgggcgtgaagttcagctgcagattcaccctgagagaggtgcaggagagatggtacgccctgctgtacgaccccgtgatcagcaagctggcctgccaggccatgagacagctgcaccccgaggccatcgccgccatccagagctag

SEQ ID NO: 281977 - DNA, 558 bp, Artificial Sequence
  derived and/or modified sequence
atggacaaggacagccagggcctgctggacagcagcctgatggccagcggcaccgccagcagaagcgaggacgaggagagcctggccggccagaagagagccagcagccaggccctgggcaccatccccaagagaagaagcagcagcagattcatcaagagaaagaagttcgacgacgagctggtggagagcagcctggccaagagcagcaccagagccaagggcgccagcggcgtggagcccggcagatgcagcggcagcgagcccagcagcagcgagaagaagaaggtgagcaaggcccccagcacccccgtgccccccagccccgcccccgcccccggcctgaccaagagagtgaagaagagcaagcagcccctgcaggtgaccaaggacctgggcagatggaagcccgccgacgacctgctgctgatcaacgccgtgctgcagaccaacgacctgaccagcgtgcacctgggcgtgaagttcagctgcagattcaccctgagagaggtgcaggagagatggtacgccctgctgtacgaccccgtgatcagctag

SEQ ID NO: 281978 - DNA, 435 bp, Artificial Sequence
  derived and/or modified sequence
atggacaaggacagccagggcctgctggacagcagcctgatggccagcggcaccgccagcagaagcgaggacgaggagagcctggccggccagaagagagccagcagccaggccctgggcaccatccccaagagaagaagcagcagcagaaccctgtacagattcatcaagagaaagaagttcgacgacgagctggtggagagcagcctggccaagagcagcaccagagccaagggcgccagcggcgtggagcccggcagatgcagcggcagcgagcccagcagcagcgagaagaagaaggtgagcaaggcccccagcacccccgtgccccccagccccgcccccgcccccggcctgaccaagagagtgaagaagagcaagcagcccctgcaggtgaccaaggacctgggcagatggaagcccgccgacgactag

SEQ ID NO: 281979 - DNA, 1389 bp, Artificial Sequence
  derived and/or modified sequence
atggataaggacagtcaaggcctgctggacagtagtctgatggcctcaggaacagccagccgctctgaggacgaggaatctctggctggccagaaacgggcctccagtcaggcactcggtaccatacctaaaaggcgatcttcctcccgctttatcaagcgcaagaaattcgacgacgagctcgtggagagctctctcgcgaaatcttctactcgcgccaagggagcaagtggggttgaacctggcagatgcagcgggtctgaacccagcagtagtgaaaagaaaaaagtgtctaaggcaccgagcactccagtgcctccatcccccgcacctgcccccgggctgacaaagcgtgtgaagaaatcaaaacagcctttgcaggttactaaagacttgggccggtggaaacctgctgacgacttattgctgattaacgccgtgctgcagaccaacgacttaaccagtgtgcacctcggtgtgaaattttcatgcaggtttaccctccgtgaagttcaggaacgctggtatgcattgctttacgacccagtcatctctaaactcgcatgccaagccatgcggcagctgcaccccgaagccatagccgctattcagagcaaagctttattctcaaaggctgaggagcagctgctctctaaggtcggctctacctcccagcctacactggaaaccttccaggatttactccaccgccacccggatgccttctatttggctcggactgcgaaggcgttgcaggcacactggcagctaatgaagcagtactatttgcttgaggaccagactgtccaacctctccccaaaggtgaccaagtgctaaacttctccgatgcggaggacctcattgatgactccaagctgaaggatatgagggacgaagtgttagaacatgagctgatggtcgcggacaggagacaaaaacgagaaattcgtcaactagagcaggagctgcataaatggcaagttctggtagatagtataacggggatgagtagccctgacttcgacaatcagactttggcagttcttcggggccggatggtccgctacctgatgagatcacgcgagatcacactagggcgcgccactaaagacaaccagattgatgtagacctgagtctcgaaggccctgcatggaaaatatcccgcaagcaaggagtgattaagctcaagaataacggtgactttttcatcgctaacgagggccgcaggcctatttatatcgatggcagacctgtcctgtgcgggagtaaatggcggttgtccaataactctgtggtagagatagcctccctcagattcgtcttcttgattaaccaggatctaatcgcactcatcagagctgaggctgctaaaatcaccccccaatag

SEQ ID NO: 281980 - DNA, 618 bp, Artificial Sequence
  derived and/or modified sequence
atggacaaggatagccagggcctacttgactcctctctcatggcctcagggaccgcctctaggtctgaggatgaagaatcgttagccggccagaaacgagcaagcagccaggccttgggcaccatccccaaacggaggagttcgtctcggttcatcaagcggaagaagtttgatgacgaactcgttgagagtagcctggcaaagagtagtacacgagcaaaaggcgcctccggggtcgaacctggtagatgctctgggtcagaaccatccagctctgagaagaagaaagtttcgaaggcgccgtccacccccgttccaccttcaccagctcccgcccctggactcactaagcgagtcaaaaaaagcaaacagccattgcaggtgactaaggatctgggccgttggaaaccagctgacgatctgttacttattaacgccgtgctgcagaccaacgatctgacgagtgtgcatctcggagtgaaattcagttgcagattcaccctgagggaggtacaagaacgctggtacgccctgctgtacgaccccgtgatttctaaattggcatgccaggctatgagacagttacacccagaagccatcgctgctatccaaagttag

SEQ ID NO: 281981 - DNA, 558 bp, Artificial Sequence
  derived and/or modified sequence
atggataaggactctcagggcttgcttgatagtagccttatggccagcggaacagcctctcggtcagaggatgaagagtccctagccgggcagaagcgggcttcctctcaggcgcttggcactattccaaagcgccggtcctcaagcagattcatcaaacggaagaagttcgacgacgaactcgtggagtcttccctggccaagagttctacccgggctaagggcgcttctggcgtggagcctggccgctgctcaggctctgagccatccagctccgaaaaaaaaaaggtttcaaaagccccatccacgcccgtgccacccagtccggcccccgcccccgggctgactaagagagtgaaaaagagcaagcaaccgttgcaggtgaccaaggacctggggagatggaaacccgcagatgacctcttacttattaatgctgtgttacagacgaatgacctgacaagcgtacacttgggagttaagttttcttgccgctttactctcagagaggtacaggagcgatggtacgctctgctctatgatccagtaatcagctag

SEQ ID NO: 281982 - DNA, 435 bp, Artificial Sequence
  derived and/or modified sequence
atggataaagattcccagggcttgctggactccagtctgatggctagcggaacagcttctcgatcagaagatgaggagagcttggccggacagaagcgggcgtcgtcccaggcacttggcaccatccctaaaagacgcagtagcagtagaacactctataggttcatcaagcggaagaagttcgacgacgaactggtggagtcctcactggctaagagcagtaccagagcaaaaggagcaagcggcgtggaacctggtaggtgttcgggaagtgagcccagcagctccgaaaagaagaaggtgagcaaggccccttcgactcctgttccaccaagtccagctccagccccagggctcaccaagcgggtgaaaaaatcaaaacaacccctgcaagttactaaggatctcggtcgctggaaacccgccgatgactag

SEQ ID NO: 281983 - DNA, 1389 bp, Artificial Sequence
  derived and/or modified sequence
atggacaaggactcacagggcttactggacagtagtctgatggcaagcggtaccgcatctcgaagcgaagatgaagagagcttagctggccaaaagagggccagcagtcaagcgctcggcaccattccaaagagacggagctcttcacgattcattaaacggaaaaagtttgatgacgagctcgtggaatcgagtctggcaaaatcgtcaacccgggcaaaaggcgcttccggtgtggaaccaggtaggtgctccggtagcgaaccaagttccagcgagaaaaagaaagtttcaaaggcaccaagtacaccggtgccaccatctccagctccagcgcccggtctaactaaacgcgtcaaaaaaagtaagcagcctctccaggtgaccaaggatctggggaggtggaagccagcagacgacctgctactgataaacgcggtgctgcagactaacgacctcacctcagttcacctgggtgtaaaattttcctgtcggttcacccttagggaagtgcaggaaaggtggtacgcgctcctatacgacccagtgattagcaaacttgcttgtcaggccatgaggcagctacatcctgaggccatcgccgccattcagagtaaggcactattcagcaaggctgaggagcaacttctatcaaaggtaggcagtaccagtcaacctaccctggagacattccaggacctgctacaccggcatccagatgccttttatctggccagaacagcaaaggccctccaggcccattggcagcttatgaaacaatactacttactggaggaccagacagtgcagcccctgcccaagggtgaccaggtacttaatttcagcgatgcggaagacctgatcgacgattctaagcttaaagacatgcgcgatgaggtgttggagcatgaactgatggtggctgaccgacgccagaagagagagatcaggcagctcgagcaggagcttcataaatggcaggtgttagtggattcaatcaccggcatgagctctcccgattttgataaccagacgctggccgtcctaagagggaggatggtgcgttatctcatgagaagtcgcgagatcaccctggggcgggctactaaggataatcagatcgacgtggatctcagcctggaaggcccggcttggaagatatcacggaaacagggcgtaatcaagcttaagaacaacggagatttttttatcgcgaatgagggaaggagaccaatatacatcgatggccgtccggtgctctgcggctccaagtggaggctaagcaacaattccgtggtcgaaattgcctcactgaggttcgtgttcctcatcaaccaggaccttatcgctctcataagagctgaagctgctaaaattactccacagtag

SEQ ID NO: 281984 - DNA, 1389 bp, Artificial Sequence
  derived and/or modified sequence
atggacaaggacagccagggcctgctggacagcagcctgatggccagcggcacagccagccgctcagaagatgaggagagcctggccggccagaagagggccagcagccaggccctgggcaccatccccaagagaagaagcagcagccgcttcatcaagaggaagaagtttgatgatgagctggtggagagcagcctggccaagagcagcacccgggccaagggggccagcggcgtggagcccggccgctgcagcggcagcgagcccagcagcagcgagaagaagaaggtgtccaaggcccccagcacccctgtgccccccagccctgccccagcccctggcctgaccaagagggtgaagaagagcaagcagcccctgcaggtgaccaaggacctgggccgctggaagccagcagatgacctgctgctgatcaatgctgtgctgcagaccaatgacctgacctctgtgcacctgggcgtgaagttcagctgccgcttcaccctgcgggaggtgcaggagcgctggtacgccctgctgtatgaccccgtcatcagcaagctggcctgccaggccatgaggcagctgcaccctgaggccatcgccgccatccagagcaaggccctcttcagcaaggccgaggagcagctgctgagcaaggtgggcagcaccagccagcccaccctggagaccttccaggacctgctgcaccgccacccagatgccttctacctggccaggacagccaaggccctgcaggcccactggcagctgatgaagcagtactacctgctggaggaccagacagtgcagcccctgcccaagggggaccaggtgctgaacttcagtgatgctgaggacctgattgatgacagcaagctgaaggacatgagagatgaggtgctggagcacgagctgatggtggccgaccggcggcagaagcgggagatccggcagctggagcaggagctgcacaagtggcaggtgctggtggacagcatcaccggcatgagcagcccagactttgacaaccagaccctggccgtgctgcggggccgcatggtgcgctacctgatgaggagccgggagatcaccctgggccgggccaccaaggacaaccagattgatgtggacctgagcctggagggccctgcctggaagatcagcaggaagcagggcgtcatcaagctgaagaacaatggagacttcttcatcgccaatgaaggaagaagacccatctacattgatggccggcctgtgctgtgtggcagcaagtggaggctgagcaacaacagcgtggtggagatcgccagcctgcgctttgtgttcctgatcaaccaggacctgattgccctgatccgggcagaggccgccaagatcaccccccagtag

SEQ ID NO: 281985 - DNA, 618 bp, Artificial Sequence
  derived and/or modified sequence
atggacaaggacagccagggcctgctggacagcagcctgatggccagcggcacagccagccgctcagaagatgaggagagcctggccggccagaagagggccagcagccaggccctgggcaccatccccaagagaagaagcagcagccgcttcatcaagaggaagaagtttgatgatgagctggtggagagcagcctggccaagagcagcacccgggccaagggggccagcggcgtggagcccggccgctgcagcggcagcgagcccagcagcagcgagaagaagaaggtgtccaaggcccccagcacccctgtgccccccagccctgccccagcccctggcctgaccaagagggtgaagaagagcaagcagcccctgcaggtgaccaaggacctgggccgctggaagccagcagatgacctgctgctgatcaatgctgtgctgcagaccaatgacctgacctctgtgcacctgggcgtgaagttcagctgccgcttcaccctgcgggaggtgcaggagcgctggtacgccctgctgtatgaccccgtcatcagcaagctggcctgccaggccatgaggcagctgcaccctgaggccatcgccgccatccagagctag

SEQ ID NO: 281986 - DNA, 558 bp, Artificial Sequence
  derived and/or modified sequence
atggacaaggacagccagggcctgctggacagcagcctgatggccagcggcacagccagccgctcagaagatgaggagagcctggccggccagaagagggccagcagccaggccctgggcaccatccccaagagaagaagcagcagccgcttcatcaagaggaagaagtttgatgatgagctggtggagagcagcctggccaagagcagcacccgggccaagggggccagcggcgtggagcccggccgctgcagcggcagcgagcccagcagcagcgagaagaagaaggtgtccaaggcccccagcacccctgtgccccccagccctgccccagcccctggcctgaccaagagggtgaagaagagcaagcagcccctgcaggtgaccaaggacctgggccgctggaagccagcagatgacctgctgctgatcaatgctgtgctgcagaccaatgacctgacctctgtgcacctgggcgtgaagttcagctgccgcttcaccctgcgggaggtgcaggagcgctggtacgccctgctgtatgaccccgtcatctcctag

SEQ ID NO: 281987 - DNA, 435 bp, Artificial Sequence
  derived and/or modified sequence
atggacaaggacagccagggcctgctggacagcagcctgatggccagcggcacagccagccgctcagaagatgaggagagcctggccggccagaagagggccagcagccaggccctgggcaccatccccaagagaagaagcagcagcaggaccctgtaccgcttcatcaagaggaagaagtttgatgatgagctggtggagagcagcctggccaagagcagcacccgggccaagggggccagcggcgtggagcccggccgctgcagcggcagcgagcccagcagcagcgagaagaagaaggtgtccaaggcccccagcacccctgtgccccccagccctgccccagcccctggcctgaccaagagggtgaagaagagcaagcagcccctgcaggtgaccaaggacctgggccgctggaagccagcagatgactag

SEQ ID NO: 281988 - DNA, 1389 bp, Artificial Sequence
  derived and/or modified sequence
atggacaaggacagccagggcctgctggacagcagcctgatggcctcgggcaccgctagccggtccgaggatgaagaaagcctggccgggcagaaaagagccagttcacaagcactgggaaccattccaaagcgccggtcaagctcaagattcattaaaagaaagaaatttgacgacgagctggtggaatccagccttgccaaatcaagcacccgagctaagggcgcttccggagtggagcccggaaggtgttcggggtcagagccatcttcgtccgaaaaaaagaaagtgagcaaagccccaagcacacccgtgccacctagccccgcccctgcaccaggcttgacaaagcgagttaaaaagtcaaagcagccacttcaagttactaaagacctcggccgatggaagcccgccgatgacctgcttctgatcaatgctgttctgcaaacaaacgacctgacaagcgtgcatttgggagtgaagttctcgtgccgcttcacgctgagagaggtgcaggaaagatggtatgccctgctgtatgaccccgttatttcgaagctcgcctgtcaggcgatgcgtcagctgcacccagaagcaattgctgctattcaatccaaggcgcttttctctaaggccgaggaacagcttctgagcaaggtaggctccacaagtcagcccaccctggagaccttccaggatctgcttcaccgacatccggacgctttctatttggctcgaacggcaaaggccctccaggcccattggcagttgatgaagcagtactacctcttggaggaccagactgtacagcctctccccaagggagatcaggtgctgaacttttctgatgctgaggacctcattgatgattctaaattgaaggacatgcgggacgaggtgttagagcacgagctgatggttgcagaccgtaggcaaaaacgggagatcaggcaattggagcaagaactgcacaagtggcaggtgctggtcgattctattactggaatgtcaagtcctgatttcgataaccaaacactcgccgtgctacggggtcgaatggtgcggtacctgatgaggtcacgggagatcaccctgggccgcgcaacaaaggacaaccaaatcgacgtagacctcagccttgaggggcccgcatggaaaatctccaggaagcaaggggtgatcaagctcaagaacaacggcgacttttttatcgcaaacgagggaagaagacccatctacatagacggacgccccgtcctctgtggaagcaaatggcgactcagtaacaattctgtcgttgaaatcgcatcattgcgttttgtcttccttattaatcaagacctgatcgctttgattagagctgaggctgctaagattactccccagtag

SEQ ID NO: 281989 - DNA, 618 bp, Artificial Sequence
  derived and/or modified sequence
atggacaaggacagccagggcctgctggacagcagcctgatggccagcggtactgcatcaaggtctgaagatgaagagtccctggccggacagaagagagcctcctcccaggcgttaggaaccattcctaaaagacgaagtagtagcagattcataaaacgaaagaagttcgacgacgaacttgtcgagtcttccttagccaaatcctctacacgggcaaagggcgccagcggcgtcgaaccaggccgatgcagcgggtccgaacctagttcatcggagaagaagaaagttagtaaggccccaagtacgccagtcccaccaagcccagctccagccccagggctgacaaaaagggttaagaagagcaagcaaccattacaggttacaaaggacctgggccgatggaagccagccgacgacctgctcctgatcaacgcggtacttcagaccaacgaccttacttctgtgcatctgggcgtgaagttttcttgcaggttcaccctaagagaagtgcaagaaagatggtatgcactgctctatgatcccgtaatctccaagttggcatgccaggccatgaggcaacttcatcctgaggcaatcgctgcgattcagagttag

SEQ ID NO: 281990 - DNA, 558 bp, Artificial Sequence
  derived and/or modified sequence
atggacaaggacagccagggcctgctggacagcagcctgatggccagcgggaccgctagtcgatccgaggacgaagagagtctagccggacagaagcgcgctagtagccaagcactcgggaccattcccaagcgtaggtcaagttcacgatttattaagcgcaaaaagtttgacgacgaactggtggagagttccctggccaagtcatccacacgcgcaaagggagcctcaggggtcgaacctggacggtgttccggctctgaaccctcttccagtgagaaaaagaaagtctcaaaagccccatcaactccggtccccccgagcccggccccagcacctggtctgacaaagcgggtaaagaagtcaaaacagccacttcaggtgaccaaggacctgggtcgctggaagcctgctgatgacctgctcctgataaatgctgtgctgcaaactaacgatttgacatccgtgcatctgggggtcaagttctcttgcagattcacactccgggaagttcaggagcgatggtacgccttactctacgaccctgtgatctcctag

SEQ ID NO: 281991 - DNA, 435 bp, Artificial Sequence
  derived and/or modified sequence
atggacaaggacagccagggcctgctggacagcagcctgatggccagcgggaccgcatccagaagtgaagacgaggaaagccttgcaggccaaaagcgggcttcttcccaggctcttggtaccatacccaagagaagaagctctagtcggactctttatcgctttatcaaaaggaaaaagtttgacgatgagttggtggagtcttcactcgccaaatccagcacacgggcaaagggagcgagtggcgtggagcccggccggtgtagcggaagcgaaccaagctcttccgaaaagaaaaaggtgagtaaagccccatcaacccctgtgccccccagccctgcacccgctcccggtctgacaaaaagggtgaaaaagagcaagcagccgctgcaggtgaccaaggacctggggcgatggaagcctgcagatgactag

SEQ ID NO: 281992 - DNA, 1389 bp, Artificial Sequence
  derived and/or modified sequence
atggacaaggacagccagggcctgctggacagcagcctgatggcctctgggacagcctcaagaagtgaagacgaggagagcctggctgggcagaagagagcatcaagtcaggcgcttggtacaatccccaaaagacgatcaagctcacgtttcattaaacgaaaaaagtttgacgatgagcttgtagagtctagccttgccaaatcatccaccagggcgaagggcgctagcggtgttgaaccagggaggtgtagcggcagtgaaccgtcaagtagcgaaaaaaaaaaagtaagtaaggcaccctctaccccagttcctccatcccctgcaccagcaccaggcttgacaaagagagtcaagaaatcaaaacaaccgctgcaggtgaccaaggatttagggaggtggaagcctgccgacgacctgctgctgattaacgctgtgctccaaactaacgacctgacatctgtgcaccttggtgtgaaattctcatgtagattcacccttagggaagtgcaggaacggtggtatgccctgctgtacgatcctgtgatctcgaaactcgcatgtcaggccatgagacagcttcaccccgaggcaatcgccgcaatccagagtaaggctctgttctctaaggcagaagagcagttgctgagtaaagtaggatctaccagccagccaactctggaaacctttcaggacctgttgcaccggcacccagatgcattctatctggcccgtaccgctaaggctttgcaggcacattggcagctgatgaaacagtactatcttctggaagaccagaccgttcagcccttaccaaaaggcgatcaggtgctgaacttcagcgacgcagaggacctgattgatgactctaagttgaaggacatgcgtgacgaggtcttggagcacgagttaatggtggccgataggcgacaaaaacgcgagatcagacagttagagcaagaattgcacaaatggcaggtgttagtggactccatcacaggcatgtccagcccagatttcgataatcagacactggccgtgttgcgaggcagaatggtgagatatctgatgcgctcgagggaaattactttgggacgcgctactaaagataaccagatcgacgtcgacttaagcctcgaagggccagcctggaaaatcagccgaaaacagggagtgataaaattgaagaataacggcgatttcttcatagccaacgaaggccggcgcccgatttacatagacggcaggcctgtattgtgcgggagtaagtggaggctgtccaataactctgtggtcgaaatcgcatccttgcgctttgtcttcttgattaaccaagacttaattgctctgatcagggcagaagctgctaagatcaccccacagtag

SEQ ID NO: 281993 - DNA, 1389 bp, Artificial Sequence
  derived and/or modified sequence
atggacaaggactcacagggtctgctggattctagcctgatggcaagcgggactgcatcacgaagcgaggatgaagagagcttggctggacagaaaagagccagctcccaggcccttggcaccattccgaagagaaggtcaagctcccgttttattaaacggaagaagttcgacgacgaacttgtagagagctcccttgcaaagagctccaccagggcaaagggcgcaagtggtgtggagccgggacggtgcagcggatcagagccatcatcttcggagaaaaaaaaggttagtaaggctcctagtactcctgtgcccccatctccggcaccggcacccggattaacgaagagagtgaagaagagcaagcagccactgcaggttacaaaggatttgggaaggtggaagcctgccgatgacctcctgctgatcaacgcggttctgcagaccaacgacctgacctctgtacatctgggagtgaagtttagttgcaggtttactctgagggaggtgcaggaaagatggtacgctctgctgtacgatcccgtgatatcaaaactcgcctgtcaggccatgaggcagctccaccctgaggctatcgcggctatccaaagcaaggccctctttagcaaggccgaagaacaactcctatccaaagtgggctcgacaagccagcccacactggaaaccttccaagacctgcttcaccggcaccctgatgccttttacctagctcggaccgccaaggccctacaggcgcattggcagttgatgaaacagtactatctgctggaagaccaaaccgtgcagcccctgcccaagggcgatcaggttcttaattttagtgatgcggaagatctcatcgacgattcgaaactaaaggacatgagggacgaagtcctggagcacgagttgatggtcgccgatagacgacagaagcgtgaaatcaggcagttagagcaagaattacacaagtggcaggtactggtagattccattacgggcatgtcatcaccagacttcgataatcagactcttgccgtactcagggggcgaatggtacgttatttgatgcgcagcagagagatcacccttggtcgggctacaaaggataaccagatagatgtcgacctgagcctagagggacctgcctggaagatctcccggaagcagggcgtaatcaagttgaaaaacaatggagacttctttattgcaaatgagggtagaaggccaatctacatagatgggagacccgtgctgtgtgggtcaaagtggcgcctgagcaacaattcagttgtggaaatcgcatccctgaggttcgtgtttctcataaaccaagacctgattgcccttatacgagcggaggctgcgaagataactccccagtag

SEQ ID NO: 281994 - DNA, 618 bp, Artificial Sequence
  derived and/or modified sequence
atggacaaggactcccaaggattactcgacagctccctcatggcctctggcacagctagccgttctgaggatgaagagagtcttgccggtcagaagagggcatcctcccaggcccttggtacgatcccaaagaggagatccagctctcgctttatcaagaggaaaaagtttgacgatgaacttgtggaatcttcgctggccaagagctcgactcgcgctaagggtgccagcggtgtggaaccaggtagatgttctggtagtgagccctctagttctgaaaaaaaaaaggtgtcgaaagccccaagtaccccggtacctccgagccccgcaccagctcctgggctgactaaaagggttaagaaaagtaagcagccactgcaggttaccaaagatctcgggaggtggaaacctgccgatgatctcctactaatcaacgccgtcctgcagactaatgatttgacctctgtgcatctgggcgtgaagttcagttgccggtttacactgagggaagtgcaggaaaggtggtatgcactcttatacgacccagtaatctccaagctagcttgtcaggctatgcgccagctgcatcccgaagcaatcgctgctatccaatcctag

SEQ ID NO: 281995 - DNA, 558 bp, Artificial Sequence
  derived and/or modified sequence
atggataaggacagtcaaggtttactggattcctccttgatggcctctggtacagcaagtcggtccgaagatgaggaatcgctggccggacaaaagcgggcttcttcgcaggcactcggaaccattccgaagcggagatccagtagcagattcataaagagaaaaaaattcgacgacgagctggtagaatcaagtctagccaagagttctaccagagcgaagggtgccagcggcgtcgagcccggaaggtgctcaggttctgagcctagtagttctgaaaaaaagaaggtgagcaaggcgcctagcactccggtgccaccctctccagctccggctccaggtttgactaaaagagtgaaaaagtccaagcagcccttacaagtcacgaaagatctgggcagatggaagcctgccgatgatctgctgctgattaacgctgtcctacagactaacgatttaacatctgttcacttgggagtgaaattttcatgccggttcaccttaagagaggtgcaggaacggtggtatgccctgctctacgatcctgtgatttcttag

SEQ ID NO: 281996 - DNA, 435 bp, Artificial Sequence
  derived and/or modified sequence
atggacaaggacagtcaaggcctcctagactcctctctcatggcttctggcaccgcctcccggtctgaagatgaggaatccctcgccggacaaaagcgcgcatctagtcaggccttagggaccataccaaaaaggcgcagctcatcacggacgctctatcgttttatcaaacgcaagaagtttgacgacgaactcgtcgagtcgagtctagcaaaatcatctactcgggctaagggagccagtggagtcgagcccggacggtgctctggcagtgaaccaagctcctctgaaaaaaagaaagtatcaaaggccccttcaacacccgtgccaccatcgcctgcccctgctccgggtctcacgaagcgcgttaaaaaatctaaacagcctcttcaagtgacaaaggacctcggcagatggaagcctgctgatgattag

SEQ ID NO: 281997 - DNA, 1389 bp, Artificial Sequence
  derived and/or modified sequence
atggataaggactcccaggggctcctcgattctagcttgatggctagtgggaccgcgtctcgatccgaggacgaggagagcctcgccggacaaaaaagggcctcatcacaggcactgggtacgattcctaaaaggaggtctagctctagatttattaagcgcaagaaattcgatgatgaattagtggagtccagcttagccaagagctctacgagagctaaaggcgcatctggagtggaacctggccgatgctccgggtcagaacctagcagcagtgaaaaaaaaaaagtgagcaaagccccaagcactccggtcccaccgtccccagctccagcaccaggcctcactaagagggtcaagaaatcaaagcagcctctccaggttaccaaggacctcggcaggtggaaacctgctgacgatctcctcctgatcaatgctgttctgcagaccaatgacctcacatctgttcacctgggagtcaagttctcctgccggtttacgttaagggaggttcaggaaaggtggtacgccctgttgtatgaccctgtcattagcaaattagcttgccaagccatgagacagttgcatccggaggctatcgcggcaatacagtctaaggctctgttctctaaggcagaggaacagctcctgtctaaagtagggtcgacctcccaaccgacccttgaaacgttccaggatctgctgcataggcaccctgacgctttctacctcgctcggacagctaaagcactgcaggcgcactggcagctgatgaaacagtattacctgctggaggatcagactgttcagcccctgcctaagggcgaccaagtactgaatttctctgacgccgaagacctcatcgatgactccaaactcaaagacatgcgagatgaggttcttgaacatgaactgatggttgcagatcgacgccagaagcgcgaaataagacaacttgagcaggagctgcacaagtggcaggtgctggtcgatagcatcacggggatgtcttccccagatttcgataatcagactctggctgtgctgcgcggtcggatggtgcgatacctcatgcgctcccgcgaaataactctgggcagggccacaaaggacaatcaaatcgatgtcgacctgtcgctcgagggtcccgcatggaaaatttcgcgaaagcagggggtaatcaagcttaaaaataatggagacttctttatcgctaacgaggggaggcgtcccatctacatagacggaaggcccgtgctgtgcgggagcaaatggaggctcagtaataacagtgttgtggaaatcgccagcctcagatttgtctttctcattaaccaggacctgatcgctctgatcagagctgaggctgccaagatcacccctcagtag

SEQ ID NO: 281998 - DNA, 1662 bp, Artificial Sequence
  derived and/or modified sequence
gacgtacctcacggaagccggctttggccctgcggctgctaccgtcgccgcggagaaattgttggatctggcagtctaggaatggttcatcaagaggaagaagttcgatgatgagctggtggagagcagcctggcaaaatcttctacccgggcaaagggggccagtggggtggaaccagggcgctgttcggggagtgaaccctcctccagtgagaagaagaaggtatccaaagcccccagcactcctgtgccacccagcccagccccagcccctggactcaccaagcgtgtgaagaagagtaaacagccacttcaggtgaccaaggatctgggccgctggaagcctgcagatgacctcctgctcataaatgctgtgttgcagaccaacgacctgacctccgtccacctgggcgtgaaattcagctgccgcttcacccttcgggaggtccaggagcgttggtacgccctgctctacgatcctgtcatctccaagttggcctgtcaggccatgaggcagctgcacccagaggctattgcagccatccagagcaaggccctgtttagcaaggctgaggagcagctgctgagcaaagtgggatcgaccagccagcccaccttggagaccttccaggacctgctgcacagacaccctgatgccttctacctggcccgtaccgcgaaggccctgcaggcccactggcagctcatgaagcagtattacctgctggaggaccagacagtgcagccgctgcccaaaggggaccaagtgctgaacttctctgatgcagaggacctgattgatgacagtaagctcaaggacatgcgagatgaggtcctggaacatgagctgatggtggctgaccggcgccagaagcgagagattcggcagctggaacaggaactgcataagtggcaggtgctagtggacagcatcacaggcatgagctctccggacttcgacaaccagacactggcagtgctgcggggccgcatggtgcggtacctgatgcgctcgcgtgagatcaccctgggcagagcaaccaaggataaccagattgatgtggacctgtctctggagggtccggcctggaagatatcccggaaacaaggtgtcatcaagctgaagaacaacggtgatttcttcattgccaatgagggtcgacggcccatctacatcgatggacggccggtgctctgtggctccaaatggcgcctcagcaacaactctgtggtggagatcgccagcctgcgattcgtcttccttatcaaccaggacctcattgccctcatcagggctgaggctgccaagatcacaccacagtgaggagtggtggcaggactcgtgggccctctccggcctgtttcccctgccactccagcccccttgagctgggaactcaggctcctggaaaaacctgggcagtgggaggctcagctgcgggccattgatttgagcctttgagggaggatagggctggcctttgtgaagccagcagaggctgagaacctcaggcttccctagatccagagcccctccccatcttcctctctctaaaaacaaccctaccccccattgccaccttcactcctgtgtctccagctgattagcctcagactcttcttttattgtttttcttttgtaaataaaaagcaccaggttcc

SEQ ID NO: 281999 - DNA, 876 bp, Artificial Sequence
  derived and/or modified sequence
cttgcgagtttacccccacctccccagccaccagcctgtgggtctcaaaccaaggctacttggtgctctgctttgagttgcagaggtgacttcatcaatgctcctaccccgagttcttgagacagacctggaccgatcccctaccttggaatctcctctcagcctttaagctcacctggtcagaatccttggatgagcctgtgggaccgttcctcctagcccggtggtttggaaccagtggctttgggactgtaagaggatggacaaagattctcaggggctgctagattcatccctgatggcatcaggcactgccagccgctcagaggatgaggagtcactggcagggcagaagcgagcctcctcccaggccttgggcaccatccctaaacggagaagctcctccaggttcatcaagaggaagaagttcgatgatgagctggtggagagcagcctggcaaaatcttctacccgggcaaagggggccagtggggtggaaccagggcgctgttcggggagtgaaccctcctccagtgagaagaagaaggtatccaaagcccccagcactcctgtgccacccagcccagccccagcccctggactcaccaagcgtgtgaagaagagtaaacagccacttcaggtgaccaaggatctgggccgctggaagcctgcagatgacctcctgctcataaatgctgtgttgcagaccaacgacctgacctccgtccacctgggcgtgaaattcagctgccgcttcacccttcgggaggtccaggagcgttggtacgccctgctctacgatcctgtcatctccaagttggcctgtcaggccatgaggcagctgcacccagaggctattgcagccatccagagcaa

SEQ ID NO: 282000 - DNA, 894 bp, Artificial Sequence
  derived and/or modified sequence
acgcatgcgcaaaggcatggagaccgtggggtgagaatgggcttgcgagtttacccccacctccccagccaccagcctgtgggtctcaaaccaaggctacttggtgctctgctttgagttgcagaggtgacttcatcaatgctcctaccccgagttcttgagacagacctggaccgatcccctaccttgggtgtgcactcttgggagaacgaggggcggagggtccgaatctcctctcagcctttaagctcacctggtcagaatccttggatgagcctgtgggaccgttcctcctagcccggtggtttggaaccagtggctttgggactgtaagaggatggacaaagattctcaggggctgctagattcatccctgatggcatcaggcactgccagccgctcagaggatgaggagtcactggcagggcagaagcgagcctcctcccaggccttgggcaccatccctaaacggagaagctcctccaggttcatcaagaggaagaagttcgatgatgagctggtggagagcagcctggcaaaatcttctacccgggcaaagggggccagtggggtggaaccagggcgctgttcggggagtgaaccctcctccagtgagaagaagaaggtatccaaagcccccagcactcctgtgccacccagcccagccccagcccctggactcaccaagcgtgtgaagaagagtaaacagccacttcaggtgaccaaggatctgggccgctggaagcctgcagatgacctcctgctcataaatgctgtgttgcagaccaacgacctgacctccgtccacctgggcgtgaaattcagctgccgcttcacccttcgggaggtccaggagcgttggtacgccctgctctacgatcctgtcatctccaa

SEQ ID NO: 282001 - DNA, 646 bp, Artificial Sequence
  derived and/or modified sequence
ccgtggggtgagaatgggcttgcgagtttacccccacctccccagccaccagcctgtgggtctcaaaccaaggctacttggtgctctgctttgagttgcagagaatctcctctcagcctttaagctcacctggtcagaatccttggatgagcctgtgggaccgttcctcctagcccggtggtttggaaccagtggctttgggactgtaagaggatggacaaagattctcaggggctgctagattcatccctgatggcatcaggcactgccagccgctcagaggatgaggagtcactggcagggcagaagcgagcctcctcccaggccttgggcaccatccctaaacggagaagctcctccaggaccctttacaggttcatcaagaggaagaagttcgatgatgagctggtggagagcagcctggcaaaatcttctacccgggcaaagggggccagtggggtggaaccagggcgctgttcggggagtgaaccctcctccagtgagaagaagaaggtatccaaagcccccagcactcctgtgccacccagcccagccccagcccctggactcaccaagcgtgtgaagaagagtaaacagccacttcaggtgaccaaggatctgggccgctggaagcctgcagatgacc

SEQ ID NO: 282002 - DNA, 1936 bp, Artificial Sequence
  derived and/or modified sequence
tgcggctgctaccgtcgccgcggagaaattgttggatctggcagtctaggaatgaggtgacttcatcaatgctcctaccccgagttcttgagacagacctggaccgatcccctaccttgggtgtgcactcttgggagaacgaggggcggagggtccgaatctcctctcagcctttaagctcacctggtcagaatccttggatgagcctgtgggaccgttcctcctagcccggtggtttggaaccagtggctttgggactgtaagaggatggacaaagattctcaggggctgctagattcatccctgatggcatcaggcactgccagccgctcagaggatgaggagtcactggcagggcagaagcgagcctcctcccaggccttgggcaccatccctaaacggagaagctcctccaggttcatcaagaggaagaagttcgatgatgagctggtggagagcagcctggcaaaatcttctacccgggcaaagggggccagtggggtggaaccagggcgctgttcggggagtgaaccctcctccagtgagaagaagaaggtatccaaagcccccagcactcctgtgccacccagcccagccccagcccctggactcaccaagcgtgtgaagaagagtaaacagccacttcaggtgaccaaggatctgggccgctggaagcctgcagatgacctcctgctcataaatgctgtgttgcagaccaacgacctgacctccgtccacctgggcgtgaaattcagctgccgcttcacccttcgggaggtccaggagcgttggtacgccctgctctacgatcctgtcatctccaagttggcctgtcaggccatgaggcagctgcacccagaggctattgcagccatccagagcaaggccctgtttagcaaggctgaggagcagctgctgagcaaagtgggatcgaccagccagcccaccttggagaccttccaggacctgctgcacagacaccctgatgccttctacctggcccgtaccgcgaaggccctgcaggcccactggcagctcatgaagcagtattacctgctggaggaccagacagtgcagccgctgcccaaaggggaccaagtgctgaacttctctgatgcagaggacctgattgatgacagtaagctcaaggacatgcgagatgaggtcctggaacatgagctgatggtggctgaccggcgccagaagcgagagattcggcagctggaacaggaactgcataagtggcaggtgctagtggacagcatcacaggcatgagctctccggacttcgacaaccagacactggcagtgctgcggggccgcatggtgcggtacctgatgcgctcgcgtgagatcaccctgggcagagcaaccaaggataaccagattgatgtggacctgtctctggagggtccggcctggaagatatcccggaaacaaggtgtcatcaagctgaagaacaacggtgatttcttcattgccaatgagggtcgacggcccatctacatcgatggacggccggtgctctgtggctccaaatggcgcctcagcaacaactctgtggtggagatcgccagcctgcgattcgtcttccttatcaaccaggacctcattgccctcatcagggctgaggctgccaagatcacaccacagtgaggagtggtggcaggactcgtgggccctctccggcctgtttcccctgccactccagcccccttgagctgggaactcaggctcctggaaaaacctgggcagtgggaggctcagctgcgggccattgatttgagcctttgagggaggatagggctggcctttgtgaagccagcagaggctgagaacctcaggcttccctagatccagagcccctccccatcttcctctctctaaaaacaaccctaccccccattgccaccttcactcctgtgtctccagctga

SEQ ID NO: 282003 - protein, 483 aa, Artificial Sequence
  derived and/or modified sequence
MGDDRPFVCNAPGCGQRFTNEDHLAVHKHKHEMTLKFGPARTDSVIIADQTPTPTRFLKNCEEVGLFNELASSFEHEFKKAADEDEKKAAAGPLDMSLPSTPDIKIKEEEPVEVDSSPPDSPASSPCSPPLKEKEVTPKPVLISTPTPTIVRPGSLPLHLGYDPLHPTLPSPTSVITQAPPSNRQMGSPTGSLPLVMHLANGQTMPVLPGPPVQMPSVISLARPVSMVPNIPGIPGPPVNSSGSISPSGHPIPSEAKMRLKATLTHQVSSINGGCGMVVGTASTMVTARPEQSQILIQHPDAPSPAQPQVSPAQPTPSTGGRRRRTVDEDPDERRQRFLERNRAAASRCRQKRKLWVSSLEKKAEELTSQNIQLSNEVTLLRNEVAQLKQLLLAHKDCPVTALQKKTQGYLESPKESSEPTGSPAPVIQHSSATAPSNGLSVRSAAEAVATSVLTQMASQRTELSMPIQSHVIMTPQSQSAGR

SEQ ID NO: 282004 - DNA, 1452 bp, Artificial Sequence
  derived and/or modified sequence
atgggggacgacaggccgttcgtttgtaacgcgcccgggtgcggccagagattcactaatgaggatcatctggctgtccacaaacacaagcacgagatgacactaaaattcggccccgcaagaaccgacagcgtgatcatcgcagaccagacacccacgccaacccggttcctcaaaaactgcgaggaagtcggccttttcaatgaacttgcctccagtttcgaacatgagttcaaaaaagccgcagacgaggatgaaaaaaaagctgctgccgggcccctggacatgtctctcccttctacccccgatattaaaatcaaagaggaagagccggtcgaggtggactcatcccctcctgactcaccagcctcatctccatgcagccctcccctaaaagaaaaagaagtgactcctaagcccgtgttgatatcgacccccactccaacgatcgtaaggccaggcagtcttccccttcatctcggttatgatcctctgcacccaactttgccatcccctacctctgtgattacccaggcacccccctcaaaccgccagatgggaagtcctacaggctctcttccacttgtcatgcatctcgcaaacggacaaaccatgccagtcctgcccggtccacctgttcaaatgccctccgtaattagcctcgctcgtcctgtgtctatggtgcccaatattcctggaattccagggccccctgtgaacagcagcgggtccatttcaccaagcgggcaccctatccctagtgaggccaaaatgcgactgaaggctacactgacccaccaggtgtcatccattaatggggggtgcggtatggtcgtcggcaccgcctccacaatggtaaccgcccgccccgaacaatcccagatattgattcagcacccggatgcgcctagtcccgctcagccccaggtctcccccgcccaaccgaccccaagtaccgggggccggaggaggaggacagtggacgaagacccagacgagagacgccagcgcttcctggagcgaaacagggctgctgcgtccagatgccgacagaaacggaaactgtgggtcagctcactggagaagaaggcggaggaactgacctcacagaatatccagctttctaatgaggttactctgcttcgaaatgaagtggcccagttgaaacagctactgcttgcacacaaggattgccccgtaactgccctgcaaaagaaaacacagggttacttggagtcaccaaaggaatcttctgaacctactggatccccagcccccgtaatacaacatagctctgcaactgccccgtcgaacggccttagtgtgcgcagtgcagctgaggctgtcgcaacttcagtgcttactcagatggccagtcagcgaaccgagttgagcatgcccatccaatcccacgttatcatgaccccccagtcacaatcagccgggaggtag

SEQ ID NO: 282005 - DNA, 1452 bp, Artificial Sequence
  derived and/or modified sequence
atgggcgatgacagaccattcgtgtgcaacgctccagggtgtgggcagcgattcaccaatgaggaccatctcgccgtacacaagcataagcacgagatgaccctgaaatttggtcccgccagaaccgacagcgtgataatcgctgaccagacacccacccccactagatttttaaaaaattgcgaggaagtcggtttgttcaacgagctggcctccagcttcgagcacgaattcaagaaggctgctgatgaggatgaaaaaaaggcagctgctggtccgctggatatgtccctgccatccacacctgacattaagataaaggaggaggaaccagttgaagtggatagtagtccacctgacagccctgcctccagtccttgctctccgccactgaaagagaaagaagtgacccccaagccggtgctgatttccactcctacgcccacaatcgtacgtccaggttcactgccacttcacctagggtatgaccctctgcacccgacactccctagtcctaccagcgtcatcactcaggcacccccctctaatcggcagatgggatccccaaccgggtctcttcccctggtgatgcatctagccaatggtcagacaatgccagtcttaccaggcccccctgtgcagatgccatcagtgatcagcctggctcgaccggttagtatggttcccaatattcctggtattccgggtccgcccgtaaactcatccggatcaatctcccccagtggtcacccaatcccttctgaagccaagatgcgcctgaaagctacactgacccatcaagtctcgtctattaacggcggctgtggtatggtggtcggaaccgcctccaccatggtgacagcacgaccagagcagtcccagatcctgatacagcatccagacgccccgagcccagcacagccccaggtctctccggcccagcccacccctagcactggtgggaggcgtaggcggaccgtggatgaagatccagacgaaaggaggcaacgctttctggagaggaatcgcgctgcagcgagcagatgtcggcaaaagcggaaactatgggtttcatctctggaaaaaaaagcagaagagcttacttcccagaacatccagctctctaatgaagtaacactccttcgcaacgaagtagctcagcttaagcagttattattggcacacaaggattgccccgtgaccgctctgcaaaaaaagacccaaggctatttagaatccccaaaagaaagcagtgagcctaccggctcaccagcgccggtaatacaacattccagcgccactgctcccagtaacggactgagtgtccggtccgccgcagaagctgtagccactagtgtcctaacccagatggctagtcagaggaccgagctgagcatgcccatccagtcccacgtgattatgactccccagtcccagtcagccgggcggtag

SEQ ID NO: 282006 - DNA, 1452 bp, Artificial Sequence
  derived and/or modified sequence
atgggagatgaccggccctttgtgtgcaatgcccctggctgcggccagcgcttcaccaatgaagaccacctggccgtgcacaagcacaagcatgagatgaccctgaagtttggacctgccaggacagacagcgtcatcatcgctgaccagacccccacccccacccgcttcctgaagaactgtgaggaggtgggcctcttcaatgagctggccagcagctttgagcacgagttcaagaaggccgcagatgaagatgagaagaaggctgctgctggccccctggacatgagcctgcccagcaccccagacatcaagatcaaggaggaggagcctgtggaggtggacagcagccccccagacagccctgccagcagcccctgcagcccccccctgaaggagaaggaggtgacccccaagcctgtgctgatcagcacccccacccccaccatcgtgcggcccggcagcctgcccctgcacctgggctatgaccccctgcaccccaccctgcccagccccaccagcgtcatcacccaggccccacccagcaaccggcagatgggcagccccaccggcagcctgcccctggtgatgcacctggccaacggccagaccatgcctgtgctgcccggcccccctgtgcagatgcccagcgtcatcagcctggcccggcctgtgtccatggtgcccaacatccctggcatccctggcccccctgtgaacagcagcggcagcatcagccccagcggccaccccatccccagcgaggccaagatgaggctgaaggccaccctgacccaccaggtgagcagcatcaatggaggctgcggcatggtggtgggcacagccagcaccatggtgacagcccggcctgagcagagccagatcctgatccagcacccagatgcccccagccctgcccagccccaggtgtccccagcccagcccacccccagcactggaggaagaagaagaagaacagtggatgaagatcctgatgagcggcggcagcgcttcctggagaggaacagagctgctgccagccgctgccggcagaagaggaagctgtgggtgagcagcctggagaagaaggccgaggagctgaccagccagaacatccagctgagcaatgaggtgaccctgctgagaaatgaggtggcccagctgaagcagctgctgctggcccacaaggactgccctgtgacagccctgcagaagaagacccagggctacctggagagccccaaggagagcagcgagcccaccggcagccctgcccctgtgatccagcacagcagcgccacagcccccagcaatggcctgtctgtgcgctctgctgctgaggccgtggccacctctgtgctgacccagatggccagccagaggacagagctgtccatgcccatccagagccacgtgatcatgaccccccagagccagagcgctggaagatag

SEQ ID NO: 282007 - DNA, 1452 bp, Artificial Sequence
  derived and/or modified sequence
atgggcgacgaccggcccttcgtgtgcaacgcccccggctgcggccagcggtttactaacgaagaccacctcgcggtacacaagcataagcacgagatgacacttaaattcggaccagcgcgcacagacagtgtgattattgctgaccagacaccgactcccaccagattcttgaaaaattgtgaagaagtgggcctgttcaatgagctagcctcctctttcgaacatgagttcaaaaaggccgccgatgaagacgagaaaaaagctgcagccggccctctcgatatgtccttaccctctactcccgatattaaaatcaaggaggaggagcctgtggaggtagacagtagccctccagacagtcccgccagcagcccatgctctccccctttgaaagaaaaagaggtgaccccaaagccagttttaatcagcacccctacacccacgattgtgcgacccggctccttgcccctgcatctgggttatgaccctctgcatcccacactgcccagccccacgagcgtaatcactcaagcaccaccctctaatcgccagatgggctcacctaccggatccctccccctggtcatgcacctggccaatggccagactatgccagtccttcccggtcccccagtacaaatgccgtcagtgatatcccttgcgcgccccgtaagcatggtgccgaacatcccaggaatccctggaccccctgtaaattcatcaggatctatcagcccaagcgggcatccaatcccctcagaggcaaaaatgcgacttaaggccacactcacacatcaggtgtcttcgatcaacggcgggtgtggaatggtggtggggaccgcaagcactatggtcaccgctagacctgagcagagccagatcttgatccagcaccctgacgctcccagtcccgcacagccacaagtgagtccggctcagccaactcctagcacagggggtcgaagaaggcgaacagtggatgaggacccagatgagcgtcggcagcgcttcctggagcggaacagagccgccgcatcaaggtgccgccagaaaagaaagctatgggtgtcaagccttgaaaagaaggccgaggagctcacaagccagaacatacaactgagtaacgaggtaacgctgctgcgcaacgaggtcgcacagttgaagcagttattgctggcgcataaagattgccctgttacagcccttcagaaaaagacccaaggttaccttgagtctcccaaagagtcgtctgaacccactgggtcccccgcaccggtgattcagcacagctcagctactgccccctccaacggcttgagcgtgcggagcgcagccgaagctgtggccacatcagttctcactcagatggctagccagcggaccgagctgtcaatgcccattcagagccacgtaattatgaccccccaatcccaaagcgctggcaggtag

SEQ ID NO: 282008 - DNA, 1452 bp, Artificial Sequence
  derived and/or modified sequence
atgggcgacgaccggcccttcgtgtgcaacgcccccggctgcggccagcgatttaccaacgaagatcatctcgccgtccataagcataagcacgagatgacactcaaattcggtcccgcgcgtacagactctgtcattatcgccgaccagactcctacccctacccgcttcttgaagaattgcgaggaggtggggctattcaatgagctcgcgagctcatttgagcacgagtttaagaaggctgcagacgaggacgagaagaaagccgcagccggccccctcgacatgtctctcccatcgacgcccgacatcaagattaaagaggaggaaccagtcgaggtggactccagtccacctgatagtccagcttctagcccctgttctcctcctctgaaagaaaaggaggtgactcccaagcctgtgctgatctcgacgcccacgccgacaattgttagaccaggctccctgcctctacatctcggatatgaccccctgcacccaacactgcctagccctacctcggtgatcacccaggctccacccagtaatcggcaaatgggatcacctacaggatccctgccacttgtcatgcatctggcaaacggtcagactatgccggtgctgccaggaccgcctgtgcagatgcccagtgtgataagcctcgctcgaccagtttctatggttcccaacatacccgggatccctggtcctcccgtgaactcctctggctccatatctcctagcggccacccgatccccagtgaagcgaaaatgaggttaaaagccaccctcactcaccaggtcagcagtatcaacggaggctgtggcatggtagtaggcaccgccagtaccatggtgacagctagaccagaacagtcccagatcctgatacaacacccagacgccccatcccctgcccagccgcaagtatctccagcgcagccaaccccttccactggcggacggagaaggcgaactgtggacgaagatccagatgagaggaggcagagatttttggaacggaatagagccgccgcgtcaagatgtaggcagaagcgtaagctgtgggtcagtagcctggagaaaaaagccgaagaactgacgtcgcaaaacatccaattgtctaatgaggtgacactgctacgtaatgaagtggcacaattgaagcagctactgttagcgcacaaagactgccctgtcactgccctgcagaagaagacacagggctacttagaaagcccaaaagagtcatctgagcccaccgggagccctgcacccgtgattcagcatagcagcgcaaccgctcctagtaatggcctgtccgttcggtccgccgctgaggccgtggccacctcggtcctgactcaaatggccagccagagaaccgagctttccatgcctatccagtcccacgtgatcatgacaccgcaaagccagagtgccggccgatag

SEQ ID NO: 282009 - DNA, 1452 bp, Artificial Sequence
  derived and/or modified sequence
atgggcgatgaccgcccttttgtgtgcaatgcaccgggttgcggtcagagattcactaacgaggatcatttagcagtccacaagcacaaacacgaaatgacactgaaatttgggccagcaaggaccgacagcgtcatcatcgctgaccagacccccacacctacgagatttctaaagaactgcgaggaggtggggctgtttaacgagctcgccagcagtttcgaacatgagtttaaaaaagctgctgacgaggatgagaaaaaagccgcagcgggtccactagatatgagtctgccttcaacacccgatattaagataaaggaggaagagcctgtggaagttgattcttctcctcctgattctcccgcttctagcccttgttcaccacccctgaaagagaaggaggttacacctaagccggtgctcatctctacaccaacacctactattgttcgcccaggtagcctcccgttgcacctaggctacgaccctctgcaccccacactgccaagtcctacttcggtgatcacccaggcacctcccagcaacagacagatgggtagccccaccgggtctctgccgctcgttatgcatctggctaacggccagaccatgcctgttttgcctggacctccggtccagatgcctagcgtaatttctttggcacggcctgtcagcatggttcccaacattcccggaatccccggacccccagtgaatagtagcgggagcatctcaccatctggccaccccatcccgtctgaggcaaagatgcggctgaaggctacactgactcatcaggtgtcctcaattaacggtggatgcgggatggtagtcggtactgccagcaccatggtgacagccagaccagagcagagccagattcttattcaacatcccgatgcaccctcccctgcacagccccaagtctcccccgctcagcctactccttcgacgggcggtcgtcgcagaagaaccgtagatgaagatcctgatgaaagacgccaaagatttctcgagagaaaccgcgcagccgcttcccggtgtcgccagaagcgcaagttatgggttagcagcttagaaaaaaaagccgaggagttaaccagtcaaaacatccagctgagcaacgaggttacactgttaagaaacgaagtcgcacagcttaagcagctgctgttagcacacaaagattgccccgttacagcattacagaagaagacacaaggctatttggaaagtcctaaggagagtagcgagcccacaggttcacctgcgccagtgatacaacattcatctgcgacagccccttccaacgggctgtccgtgaggtccgccgctgaggccgtagccacgtctgtgctgacccagatggctagccagagaactgagctctcaatgccaatccagagccatgtcatcatgacaccacagtcccaatcggccggtagatag

SEQ ID NO: 282010 - DNA, 1452 bp, Artificial Sequence
  derived and/or modified sequence
atgggcgatgataggcccttcgtgtgcaatgccccaggctgcggtcaacgttttactaacgaggatcaccttgcggtgcacaaacacaagcatgagatgacactgaaattcgggcctgcacgaacagattctgtcattatcgccgaccagacccctacacccacccgattcctgaaaaattgcgaagaagtgggcctgtttaacgagctcgctagttccttcgaacacgagtttaagaaagctgcagacgaggacgagaagaaagcggcagccggaccactggacatgtcactgccgtcaacccccgacataaaaatcaaggaggaagagcctgtggaagtggattcttctccccctgattcacctgcaagctctccttgctcccccccactgaaagaaaaggaggtcactcccaaacccgttctgatatccaccccgacacctaccattgtcaggcccggatctctgcctcttcatctcggttatgatcccctgcatcctactctgccttcccccacgagcgtcatcacccaggcccctcccagtaatcggcagatgggtagccctaccggctccctgccattggttatgcaccttgctaacggtcaaaccatgcccgtcctgcctggcccacctgttcaaatgccctcagtcatctctctggcccgtccagttagcatggttcccaatatacctggcatcccagggcctccggttaattctagtggctctatttcccccagtggccaccccatccctagcgaggccaaaatgagactgaaggctacattgacccaccaggtgtcgtctataaatgggggatgcggtatggtggtcggcacggctagcactatggtaacagccaggccggaacagtcacagatcctcattcagcacccagacgcgccatctcccgcacagcctcaggtgtcacctgcacaacctactccaagcacagggggacggagaagacggacggtggatgaagaccccgacgaacgcaggcaaaggttcctggaaaggaatcgagctgccgcttctaggtgtcgccagaagcgaaagctttgggtttctagcctggaaaaaaaagcggaagaactgacatctcagaatattcagctcagtaacgaggtgacacttttacgtaatgaagtcgcccaactgaaacagctgctgcttgctcacaaagactgtcctgtgacagccctgcagaagaagacccagggttacttagaatcccctaaggagtcttccgagcctactggcagccccgctccggtcattcagcactcatccgccacagccccaagcaacggactgtcggtgagaagtgcggctgaagcggttgcaacctctgtgctgacacagatggcatcccagagaactgaattgagtatgccgatccagtcccatgttatcatgactccgcaatctcagagcgctgggagatag

SEQ ID NO: 282011 - DNA, 1452 bp, Artificial Sequence
  derived and/or modified sequence
atgggcgacgacagacccttcgtgtgcaacgcccccggctgcggccagagattcaccaacgaggaccacctggccgtgcacaagcacaagcacgagatgaccctgaagttcggccccgccagaaccgacagcgtgatcatcgccgaccagacccccacccccaccagattcctgaagaactgcgaggaggtgggcctgttcaacgagctggccagcagcttcgagcacgagttcaagaaggccgccgacgaggacgagaagaaggccgccgccggccccctggacatgagcctgcccagcacccccgacatcaagatcaaggaggaggagcccgtggaggtggacagcagcccccccgacagccccgccagcagcccctgcagcccccccctgaaggagaaggaggtgacccccaagcccgtgctgatcagcacccccacccccaccatcgtgagacccggcagcctgcccctgcacctgggctacgaccccctgcaccccaccctgcccagccccaccagcgtgatcacccaggccccccccagcaacagacagatgggcagccccaccggcagcctgcccctggtgatgcacctggccaacggccagaccatgcccgtgctgcccggcccccccgtgcagatgcccagcgtgatcagcctggccagacccgtgagcatggtgcccaacatccccggcatccccggcccccccgtgaacagcagcggcagcatcagccccagcggccaccccatccccagcgaggccaagatgagactgaaggccaccctgacccaccaggtgagcagcatcaacggcggctgcggcatggtggtgggcaccgccagcaccatggtgaccgccagacccgagcagagccagatcctgatccagcaccccgacgcccccagccccgcccagccccaggtgagccccgcccagcccacccccagcaccggcggcagaagaagaagaaccgtggacgaggaccccgacgagagaagacagagattcctggagagaaacagagccgccgccagcagatgcagacagaagagaaagctgtgggtgagcagcctggagaagaaggccgaggagctgaccagccagaacatccagctgagcaacgaggtgaccctgctgagaaacgaggtggcccagctgaagcagctgctgctggcccacaaggactgccccgtgaccgccctgcagaagaagacccagggctacctggagagccccaaggagagcagcgagcccaccggcagccccgcccccgtgatccagcacagcagcgccaccgcccccagcaacggcctgagcgtgagaagcgccgccgaggccgtggccaccagcgtgctgacccagatggccagccagagaaccgagctgagcatgcccatccagagccacgtgatcatgaccccccagagccagagcgccggcagatag

SEQ ID NO: 282012 - DNA, 6686 bp, Artificial Sequence
  derived and/or modified sequence
atgacttctcgcgagagttgagcgcgcctggccggacgggaggaaagtatccgttccgccaaggggggaaaggaggagctggagacagattgtaggaccgagcgcgggcaggcgggaggcaacggagctaccagccgctcctctctgctatatgaaatatgggagacgacagaccgtttgtgtgcaatgccccgggctgtggacagagatttacaaacgaggaccacctggcagttcataaacacaagcatgagatgacattgaaatttggcccagcccgaactgactcagtcatcattgcagatcaaacgcctactccaactagattcctgaagaactgtgaggaggtgggactcttcaatgaactagctagctcctttgaacatgaattcaagaaagctgcagatgaggatgagaaaaaggctgctgctgggccccttgacatgtctctgccttccacaccagacatcaaaatcaaagaagaagagccagtggaggtagactcatccccacctgatagccctgcctctagtccctgttccccaccactgaaggagaaggaggttaccccaaagcctgttctgatctctacccccacacccaccattgtacgtcctggctccctgcctctccacttgggctatgatccacttcatccaacccttccctccccaacctctgtcatcacacaggctccaccatccaacaggcaaatggggtctcccactggctccctccctcttgtcatgcatcttgctaatggacagaccatgcctgtgttgccagggcctccagtacagatgccgtctgttatatcgctggccagacctgtgtccatggtgcccaacattcctggtatccctggcccaccagttaacagtagtggctccatttctccctctggccaccctataccatcagaagccaagatgagactgaaagccaccctaactcaccaagtctcctcaatcaatggtggttgtggaatggtggtgggtactgccagcaccatggtgacagcccgcccagagcagagccagattctcatccagcaccctgatgccccatcccctgcccagccacaggtctcaccagctcagcccacccctagtactggggggcgacggcggcgcacagtagatgaagatccagatgagcgacggcagcgctttctggagcgcaaccgggctgcagcctcccgctgccgccaaaagcgaaagctgtgggtgtcctccctagagaagaaggccgaagaactcacttctcagaacattcagctgagtaatgaagtcacattactacgcaatgaggtggcccagttgaaacagctactgttagctcataaagactgcccagtcactgcactacagaaaaagactcaaggctatttagaaagccccaaggaaagctcagagccaacgggttctccagcccctgtgattcagcacagctcagcaacagcccctagcaatggcctcagtgttcgctctgcagctgaagctgtggccacctcggtcctcactcagatggccagccaaaggacagaactgagcatgccgatacaatcgcatgtaatcatgaccccacagtcccagtctgcgggcagatgatgcctcctctggtggagaggtcctcagccagagctcgcccgcccaagagccaagagagatgtcatcttatcccctcccatctgccttggacatggcaatatgggtggggggaattgtgtgttgtgagtaatggacagatatggggctttttagccatgtggtcatgtacgtttgacacctgtgctgggggcctcccagccccggagcctcatagatcatcccccagggtggggtttctgatgcatccacagccaaaggcctttccagatggtccgaacaatcacccctgccccatgcacgtgtatctgtctcttttaacactaacccttggcacttctaggtttggggtttctcagttccctctcttcccactaagccgtggctgttacctttttgttccttaccagcatgccacttcctgccagatagagggaggctagatttgatgacatattacccgctgacccagccccagccaccccatggactcaggactcaggtctcccatagctgcttatttacccgtttcctttttcctcttccttaattctagttaaaacattcacttacggagaatgtaaggttacctttgatgtatgaagtagcagtattttccagtttttccataagctttattccttctctctacctgccaccaaaaagaaagaaaccctcaagagttctaattctttttcatctatttgcagagctatttgggtacctcattttgtcccttgactttagtgtagtggtggggtctttcccaccaccccactaagccttggcaacctcattttgtggccttattattaaagattgcttggtagtgaaaagggaagggcccagaatctgactggctgattctgtctcctcccctccctccttctttagtttaaccatcagggcagacaggaacaaagtatttcaaagcttgttccatcaagttagggattaatcgattcctttatgttttataagagtttaccggccaaagcatattgtcatctttggtcatttttctgctcctgcttctctctcttcattcccctatcaacattaccgcccctgtctctcttctgtaactacttcagactcagccctcctggaggctgtcatgtaggggactctcgagttcctttgttctaccccatctctccccctcacacatctgtctgcttttctgagctagagtcttctgttcacaagtgcccatcaccgtctggactatcttctttctctttcaccaggttcctagcttagccactaggtcttccaggtcctccagagtttcttcaacccatttcttctctcttctctttacatgcagtgctccaggatcttgaagcgtcatagccaagatgctgagtgggtttacttgagtataagattgaaaggagggaggaagaggagagggaaagtgcagaactggtcccagcaaaggaccccaggttctggcctgggaaattggtgactattgctctcaaccattcttactttgaagagttgggttgcagagggagcaattcatctctcttgtccctcttccacgttaaggcttctcatctccccttggctctgaactatgcagtttctaccaggaccataggaagcaattcagagccagaggcctgtggatagataggtcagctttaattgcctttccgtatgaaacccttccagttgtcccagagccactttctgccatctgtgcaagccaagaatgtccttctctccatctttcctacctccatcttaaacatacatacaaaataactgccagcttcctttcttattttgtctccaaaattgactgtcacaggggaatgagaaaatgttctaagctacaagattcccgtttccttaaagtgatatcctgtcctagtgaaccagtcaggtaacaggttctgctgcatttgttttaaatttcccctcctgcttttcagagctggtgctgaacaggccacacccctaaagacaaaggagagaaaacacggttttctcatcctctaccatcaggtacccaacaggaataggccctgaagtgattcagactagcaaatgttatggcagatggtcaggacgcaggttaccacatccagggacttcacttttgcctttaaaaattcacagccgtaacttgtgctcaggacttcccctttagctggctgctccctgggattttctcctgctttagagttttgtttcatttttttattgtcttgatttcccagtagcagccttgccctaaagcttgactgagtttatggctcctaaggagctttcctaagactcttgactatttttcttcccccttcagtcaagtgtttttacagttaagaattaatttgtaactgcatacatgccctgccagtctgtccctgtgttgggtggctaatttatgtagcgggtcttttttatttcttagcccccatgactaattatctagtcctaacttcatttttatcagtgggaagatgtgtacgggacctcagtgaggagcactgccagaaccacagtaacaaaatggcactgaaataaggaagcagcaggtcagaaccccctagatagttcttgagttggttctcagtctcactaaggaggcagaataattgctgccctgaaacttctctgatagtcaaaggtaacttcacttaccttgttattgctaccagccatgtggtcactctccccaaatctttgtcttccagatccatctggaccagaaccaaacatcatggaaggtgtcacttggcccttcctaaagtccatggcgtttctagaggcctaagggaggacactttcagaaaggagctgagtgtatggtgggtgtcctgaattcgttcatgtgaatacaggactcaggcttcccaccccactccaatgtgagtgctcgatacacaagcactctagctagctgccacgtacccaaggccacagagggaggggacagaaccaggtcttctggtctgctcactttctgccccattcccctaacagaaagtttgcttagagttgaaaagtctaagaaagcctcccacaatactagagaggccaacaaaaaaaaagtcatgccccctttacttactcttttgctgctggttatgcatctcaaatctgacttccttagccttcacctccctccttggccctaagcattagaccatgtactctaagtagtggttaaagagggactgagcaaactgaacctcctctcgctcacttctctatccctgttctgttggttttggctcctttcttgattcactgccctctagcaccacccatcctggtagatggagtgcttaaccccaaccgtgccctatgtacagcctgaaccaccaaacagacaccaaaaaaattcttcctgtggtttctggggctcccctgctccacactgagaggctccttaaaggtgctagcccctgatacagctatccccgccagttttctccttttttcataacttccttcccatccccaaatcattaatttttcattaatattgtacattatatacacaggaaggaaatacattattttttttaaatttcataaccagcctgtttagattccagtcttcctagctatatcacatatgccttgttgatatgctctttctgctttctttagacttaatgtttgacgggggtgggggtgtctggaagaacaggaaaggtggggatcctaaggcagattaaaggactccctccaccccactacagcctcccataactctagtcatccctctcatagtacaggactgatttctctgtgtctgtttgtacacacaaatgtgcatacagacataaattcccccaccccataccaaggtggttacctagcaggaatgagcgtaggtggctgctggccaccattaccaccgtctgcatcagctgtgttgtctctctttggggtaaagtcctaccccagaatgagaaaaggctggggagagtagggcaggttaaaggagcttatgtcctctgtagatgtaggtttgtatcatagctactagggtttatttttttaatggggggctaatagcacagagttatctcaccagcagtagctactggtgagtgatgttttagctgtaagaagtggctatgagcaatagtttcactgactttaccttagggcagtgccacagtaatctgggaacttgttagaaatacacattctcaggccccatcccagacttattgaatcacagactctgggggcagggtttaaaagcactccaagtgattctaatgcacactaaaggttgagaaccatttcttagggataagctgggaaatttttacaggtgtggaggatatttcaaatacatcttttgcctttgcactaacatgctttcatttctttcagtctcttcctccattccctttaaagtcttccccatcatatcactgatctcaaaagctagatttgtcttcattttagtcgtatccctaaaaccatgcattggtctggacaggagttgtcccatattcccttgcagactggtcactccatgttctctgttacagtaaggaccagccaagcttcagctgtcccattcctccccctacaacacacacacctttcaggcagggaggagatgagcttccagccccaagagtggaggctgccacatcctaacatagtatctattgaaaaggaagcagtgtgtatctatgattatatctctgttcatctatatatttttgacatgtagcaacacctctccatcttatcaaggaactcaactcggtctgggtctccccagtgcccagtggtggcctttgacaggtaggaggatgcagtgctgcaggctattttgttttttgttacaaaactgtcttttcccttttcccctccacctgattcagcatgatccctgtgagctggttctcacaatctcctgggactgggctgaggcaggggcttcgctctattctccctaaccatactgtcttcctttcccccttgccacttagcagttatccccccagctatgccttctccctccctcccttgccctggcatatattgtgccttatttatgctgcaaatataacattaaactatcaagtg

SEQ ID NO: 282013 - DNA, 2634 bp, Artificial Sequence
  derived and/or modified sequence
gctcctctctgctatatgaaatatgggagacgacagaccgtttgtgtgcaatgccccgggctgtggacagagatttacaaacgaggaccacctggcagttcataaacacaagcatgagatgacattgaaatttggcccagcccgaactgactcagtcatcattgcagatcaaacgcctactccaactagattcctgaagaactgtgaggaggtgggactcttcaatgaactagctagctcctttgaacatgaattcaagaaagctgcagatgaggatgagaaaaaggctgctgctgggccccttgacatgtctctgccttccacaccagacatcaaaatcaaagaagaagagccagtggaggtagactcatccccacctgatagccctgcctctagtccctgttccccaccactgaaggagaaggaggttaccccaaagcctgttctgatctctacccccacacccaccattgtacgtcctggctccctgcctctccacttgggctatgatccacttcatccaacccttccctccccaacctctgtcatcacacaggctccaccatccaacaggcaaatggggtctcccactggctccctccctcttgtcatgcatcttgctaatggacagaccatgcctgtgttgccagggcctccagtacagatgccgtctgttatatcgctggccagacctgtgtccatggtgcccaacattcctggtatccctggcccaccagttaacagtagtggctccatttctccctctggccaccctataccatcagaagccaagatgagactgaaagccaccctaactcaccaagtctcctcaatcaatggtggttgtggaatggtggtgggtactgccagcaccatggtgacagcccgcccagagcagagccagattctcatccagcaccctgatgccccatcccctgcccagccacaggtctcaccagctcagcccacccctagtactggggggcgacggcggcgcacagtagatgaagatccagatgagcgacggcagcgctttctggagcgcaaccgggctgcagcctcccgctgccgccaaaagcgaaagctgtgggtgtcctccctagagaagaaggccgaagaactcacttctcagaacattcagctgagtaatgaagtcacattactacgcaatgaggtggcccagttgaaacagctactgttagctcataaagactgcccagtcactgcactacagaaaaagactcaaggctatttagaaagccccaaggaaagctcagagccaacgggttctccagcccctgtgattcagcacagctcagcaacagcccctagcaatggcctcagtgttcgctctgcagctgaagctgtggccacctcggtcctcactcagatggccagccaaaggacagaactgagcatgccgatacaatcgcatgtaatcatgaccccacagtcccagtctgcgggcagatgatgcctcctctggtggagaggtcctcagccagagctcgcccgcccaagagccaagagagatgtcatcttatcccctcccatctgccttggacatggcaatatgggtggggggaattgtgtgttgtgagtaatggacagatatggggctttttagccatgtggtcatgtacgtttgacacctgtgctgggggcctcccagccccggagcctcatagatcatcccccagggtggggtttctgatgcatccacagccaaaggcctttccagatggtccgaacaatcacccctgccccatgcacgtgtatctgtctcttttaacactaacccttggcacttctaggtttggggtttctcagttccctctcttcccactaagccgtggctgttacctttttgttccttaccagcatgccacttcctgccagatagagggaggctagatttgatgacatattacccgctgacccagccccagccaccccatggactcaggactcaggtctcccatagctgcttatttacccgtttcctttttcctcttccttaattctagttaaaacattcacttacggagaatgtaaggttacctttgatgtatgaagtagcagtattttccagtttttccataagctttattccttctctctacctgccaccaaaaagaaagaaaccctcaagagttctaattctttttcatctatttgcagagctatttgggtacctcattttgtcccttgactttagtgtagtggtggggtctttcccaccaccccactaagccttggcaacctcattttgtggccttattattaaagattgcttggtagtgaaaagggaagggcccagaatctgactggctgattctgtctcctcccctccctccttctttagtttaaccatcagggcagacaggaacaaagtatttcaaagcttgttccatcaagttagggattaatcgattcctttatgttttataagagtttaccggccaaagcatattgtcatctttggtcatttttctgctcctgcttctctctcttcattcccctatcaacattaccgcccctgtctctcttctgtaactacttcagactcagccctcctggaggctgtcatgtaggggactctcgagttcctttgttctaccccatctctccccc

SEQ ID NO: 282014 - DNA, 1245 bp, Artificial Sequence
  derived and/or modified sequence
atgctcggcgctctgcctctcccactgtctctaggacagcctccgcccagcccattactgaatcattcattatttggggttcttacaggcggaggcggacagcctcctcctgagcccctcctgccaccccctggtggtccagggcctcctttagccccaggcgagcccgaaggcccgtcactgctggtcgcttctttgctaccacccccaccttccgacctgctcccacctccgtcagcaccaccttctaacctgctcgcttcttttttacccctgctggcgcttgggccaaccgctggggatggtgaaggcagcgccgaaggagctgggggacccagtggggaaccgtttagcgggctcggcgatttaagtccccttcttttccctcccctgtctgccccacctacactgattgccttgaactccgcgttgctcgccgctactcttgatccaccttctgggactcctcctcagccatgcgtgctgtctgccccccaacccgggccccccaccagcagcgtcactaccgctactaccgatcctggggctagctctctcggcaaagccccgtccaactctggaaggcctcctcagcttttgagccccctgctgggcgcaagccttctgggggatctgtcctcactaacatcctcccccggcgccctgcccagtctcctgcaacctcctggccccttgctttctggtcaactcggcctgcaactgcttccgggcggcggagcccctccgccgctcagcgaggcttctagccccttggcctgccttctgcagtccctgcagatcccacccgagcagccagaggccccatgcctgccccctgaatcacctgcttcggccttagagccagagcccgctagacccccactaagcgccctggcgccaccccacggatctcccgacccaccagtcccggaactcctcactggacggggctccggaaagcgaggccgtcgtggcggagggggccttcggggcataaacggcgaggcccggcccgcccgggggagaaagcccggatctaggagagagccagggcgactagccttgaaatggggcaccaggggaggttttaatggccagatggagcgacaggaagagcccactatcgggtcaattatgggcagctggctgaaaggcgtccttagccctagaatacaccccctgcctggaccgattctgcgcactctccgctgcccttccagccaaaaggtgtcatcctggccttag

SEQ ID NO: 282015 - DNA, 3012 bp, Artificial Sequence
  derived and/or modified sequence
atgaacggaggcaacgagtccagtggtgccgatcgggccggcggccctgtggccacgagtgtaccgattgggtggcagcgctgcgttagagagggagccgttttgtatatatccccatctggcacggagctatcaagtctggaacagactaggagttacctcctcagcgacgggacgtgcaagtgcgggttagagtgtccactcaacgtaccgaaggtgttcaacttcgaccctctggccccagttacccctgggggggccggcgtggggcccgcgtccgaggaagacatgaccaagctctgcaaccatcgaagaaaggcagtggctatggccacgttgtataggtccatggaaaccacttgttcacattcctctccaggggagggcgcatctccgcaaatgtttcacactgtcagccccgggcctcccagcgcaaggcccccatgcagggtcccccccacaacccccctcaacggtgggcctggatctcttccaccagagcctcccagtgtaagccaggccttcccgacactcgccggtcctggcggacttttcccacctagactggccgatccagtacccagcggaggatcttcctctccacggtttctgccacgcgggaacgcaccctcaccagccccgccacccccacctgcaatctctctcaacgccccatcatacaactggggcgccgctctgcgctcgtcattggtcccgtcagatcttgggtcacctcctgcccctcacgcgtcctctagccccccctccgaccccccattgttccactgtagcgacgcattgacaccaccacctttaccaccaagtaataacctgcctgcccaccctgggcctgcttctcaacctccagtgtcctcggccactatgcacctaccattggttctcggccccctgggtggagcgccaacagtagaaggacccggggcgcctccctttctagcatcctcgctgttaagtgctgccgcaaaagcgcagcatcctcctctccccccgccctccactctccaaggccgaagacctagagcccaggccccctccgctagtcactcttcttccctgcgaccctctcagcggcggcctaggcggcctccaaccgtgtttcgtctcttagaggggcgggggccacagacacctagacgaagcaggcctagagcccctgctcctgtgcctcaacctttttccctgcccgagccctctcagccaatactacctagtgttttgagcctcctgggactgcccacccctggcccatctcacagtgatggctcattcaacctgctgggctcggatgctcaccttcctccgccgcctaccctgtcctctggctcgcctccccagcctcgccatcccattcaacctagcctgcccggaactacgagtggaagtttaagctccgttcctggcgcacccgcgccacccgccgcatctaaagcacctgttgtgccatccccagtgctccagtcacctagcgagggcctcggcatgggggctggcccagcatgcccactgccacccctcgcaggaggggaggctttccctttccccagtcctgaacagggactggccctgagcggggccggcttcccaggaatgctgggagccttgcctctcccattgagtctcggccagcctccaccgagcccgttgctgaaccattcactgttcggtgtgctgaccgggggcggcggccagccaccccccgagccactactgcccccgcctggcggtcccggacctcctctagcacccggagagcccgagggccccagcttgctcgtggcatctctgttgcccccgcctcctagtgatctgctgccacctccaagcgcccccccgagcaatctgttagcatcgtttctgcccttgctggccctgggccctacggccggcgatggtgaaggttccgctgagggcgccggcggacccagcggtgaaccattctccgggctgggggacttatcccccctcctgttcccgcccctttccgccccacccaccttgatcgcattaaattcggcgctcttggctgcaactctcgaccctccttctggtacgccgcctcagccctgtgttctgtccgccccgcaacccggcccaccaacatcctcagtcacaacagccactacagacccaggggccagttccctggggaaggctccaagcaattctggccgccctccccagctccttagccccctgttgggcgcctcattgttaggcgacctgtctagtttgacctccagtccgggtgccctgccatcgctgcttcagccccctggccctttactcagtggtcagctgggattgcaactcctccccggcgggggagcaccccccccattatcagaggcgagcagccctctggcatgcctgctgcagagtctgcaaataccacctgaacagcccgaggcaccctgcctgcctccggagagcccagcttctgcactggagcccgagcccgccagaccccctctctctgctttggcaccgccacatggatccccggacccacccgtccccgagcttttaacaggccgcggatccggcaagcggggtcgccgaggcggggggggtctgcggggaatcaacggcgaggcccgacccgcgcgagggcgtaagcccgggagtaggcgagaaccaggtcggcttgctctcaaatggggaaccagggggggctttaacggtcagatggaacgttccccacgacgcacccaccactggcaacacaacggcgagctggccgaaggcggtgctgagcccaaggatccgcccccccccggacctcattctgaagatttgaaggtgcctccaggtgtggttagaaagtcgaggcgtgggaggcggagaaagtacaatcctacacggaactccaatagttcacgtcaagacataaccctagagccaagccccactgctagagctgcagtgcctctgcccccgcgggcacgtccaggcaggccagccaagaataagagacgcaaacttgcaccatag

SEQ ID NO: 282016 - DNA, 3012 bp, Artificial Sequence
  derived and/or modified sequence
atgaacggcgggaacgaatcctccggtgcagacagggccggaggtcctgtcgcaacttctgttcccatcgggtggcagagatgtgtgcgagagggagccgtgctctacatctcaccctccggcactgagctctcctcgttagagcagactcgctcatatctactgtcggacggcacctgcaagtgtggcctggagtgcccgctgaacgttccaaaagtgttcaattttgatcccctggcacctgttactcccggtggcgctggcgtgggcccagcttccgaggaggatatgaccaagctttgcaaccacagacgtaaagccgtcgccatggctacgttgtaccgaagtatggagactacatgttctcactccagtccaggcgaaggcgcgtcacctcagatgttccacacagtatctcccgggccacccagtgccagacccccatgtcgcgtgccacccactactccccttaatggaggccccggctccttgcccccagagcctccgagcgtaagtcaagcatttccaacactggcaggtccaggaggcctatttcccccacgcctcgccgacccagttccgagcgggggcagcagttcacctcgtttcctcccaaggggtaacgctcccagtccagcaccacccccaccccccgccatctcactcaacgcgccttcttataactggggggctgctctgaggagcagcctcgttcccagcgatcttggtagcccccccgctccacacgcatcctccagtccacccagcgatccaccactttttcattgcagtgatgcattgacaccaccaccgttacccccatccaataacttacccgcccaccctggacccgcgagccagccccccgtgtcaagtgctactatgcatctgccactggttctgggtcccttgggaggggcccccacggtggagggccccggagctcctccttttctggctagttcccttctgagtgcagcagccaaggcccaacatccacccctgcccccgccctccactctacagggacggcgtcctagagcccaagcgccctccgcgtcacactcgtccagcctccggccttcccagagaaggccaagacggcctcccacagtctttaggctgctagaaggccgaggaccacagacaccacgccgcagtcgtcctagggcccccgcccctgtacctcaacccttttcgctgcctgagccttctcaacccatactaccttctgtgcttagccttctgggcctgcctacaccgggtccaagtcattccgacgggtctttcaatctcctgggaagcgatgcccatttgcctccgccgcctactctctcgagtgggtctccccctcagccaagacatcctatacagccctctttgcctggcacgacttccggaagtttgtccagcgtgcctggtgccccggcacccccagcggcaagtaaagctcctgtcgtgccttccccagtgctacagagcccatccgaggggctgggtatgggtgcaggacctgcttgtccactcccgccactcgccggcggtgaagctttccctttcccctcccccgaacaggggctggctttaagtggcgcaggcttccctggaatgcttggggcacttcccctccccctgagcctgggtcaaccccctccctctcccctgctgaatcactcattgttcggcgtgttgacaggagggggcggccagccaccacctgagcccctgctgccccctcctggtggcccagggcccccgcttgctccaggagaacctgaggggccttcactgctcgttgcctccttactcccccctccgccctctgatctcctgcccccgccgtctgcccctccctcaaacttactagccagtttcctgcccctgctggccttaggcccaacggctggtgatggcgagggaagcgctgagggcgcaggcggaccgtctggcgaacctttcagcgggctaggcgacctgtcgccgctgcttttcccccctctgagcgcgcctccaacgctcattgcactcaactcagcactgctggccgccactctggaccctccttcaggcacgccacctcaaccgtgcgtcttgtcagcaccccaacctggcccaccgacatcaagtgtgacgactgcaactacggacccgggagcctcgagtctgggcaaggcaccttctaattctggacggccacctcagctactaagtccactactcggcgccagcttattaggtgatctgtcttcgctcactagctcccccggagctcttccctctcttttgcagccccccggacctttgctctcagggcagttgggtctgcaattattgccaggggggggggcccccccacctctttctgaagcttcatcacctctggcctgtttactccagtctctccaaatcccacccgagcagcccgaggccccctgtctccccccagaatcaccagcctctgcgctggagcccgagcccgcccgcccccctctcagtgccctggcgccgcctcatgggtcccccgaccctcctgttcctgaactgctcaccggaaggggctcaggaaaacgcggtcggaggggaggcggcggcctgcgcggcatcaacggtgaggctagaccagcacgcggtaggaagccaggatccagaagggagccaggccggctcgccttaaagtggggaactcgaggaggcttcaacgggcagatggaacgttctccaaggaggacccaccattggcaacataacggtgagcttgctgaggggggcgccgagccaaaggacccccctcctcctggaccacacagcgaagacctgaaggtaccccccggggtggttcggaaatctagacgaggccgccgccggaaatacaaccctacaaggaacagtaattcgtcccggcaagatataaccctggagccctccccaactgcgcgcgcagccgtccccttaccaccccgcgctagacccggtcgacctgccaagaataaaagacgcaaactcgctccttag

SEQ ID NO: 282017 - DNA, 222 bp, Artificial Sequence
  derived and/or modified sequence
atgaacggtggcaatgagagcagcggagccgaccgcgcaggaggtccggtggccacctcggtgccaatcggctggcagaggtgtgtgcgcgagggggcggtgctctacatctccccaagtggaactgagctgagctccctggagcagacacggtcatatctactcagcgacggtacttgcaagtgtggacttgagtgcccacttaacgttcctaaagtatag

SEQ ID NO: 282018 - DNA, 447 bp, Artificial Sequence
  derived and/or modified sequence
atgaacggtggcaatgagtcaagtggcgcagatagggcaggaggccccgttgccacatcagtgcctatagggtggcagcgatgcgtgagggagggcgctgtactgtacatctctccctccggaacagagttgagttccctggagcagacaaggtcctacctactgtcggatgggacatgcaagtgtggtctagagtgtcccctgaacgttcccaaggtgttcaactttgatcctctggcacccgtgacaccaggtggtgctggcgtgggcccagcttctgaagaggatatgaccaaactctgtaatcaccggaggaaagctgtcgccatggcaacgctgtatcgttccatggaaactacctgttcacactccagcccgggagagggggcttccccccaaatgtttcacaccgtgtccccaggtcccccgtcggcacgtcctccctag

SEQ ID NO: 282019 - DNA, 3584 bp, Artificial Sequence
  derived and/or modified sequence
atgcgcgggaggccgctcggtgatccgcggcggcggcagcggcgcttcctgctaggaccggccggggccgtaccggaggctcgggctccaccgaccctcctcccaccccctcccactcaccctctgggccgcgactgcgcagggcggggccggccgaaccatgggccgcggtgtgggctaagctggtggccccggctttagactggaccccacaatgtttgcagagatgttcaggcacgcgggagctgattacacacaatgaatgggggcaatgagagcagtggagcagacagagctgggggccctgtggccacatctgtccccatcggctggcagcgctgtgtgcgagagggtgctgtgctctacatcagtccaagtggcacagagctgtcttccttggagcaaacccggagctacctcctcagcgatgggacctgcaagtgcggtctggagtgtccacttaatgtccccaaggttttcaactttgaccctttggccccggtgaccccgggtggggctggggtggggccagcatcagaggaggacatgaccaagctgtgcaaccaccggcggaaagctgttgctatggcaactctgtaccgcagcatggagaccacctgctcacactcttctcctggagagggagcgagcccccaaatgttccacactgtgtccccagggcccccctctgcccgccctccctgtcgagttcctcctacaactccacttaatgggggtcctggctcccttcccccagaaccaccctcagtttcccaggcctttcccactctagcaggccctggggggcttttccccccaaggcttgctgacccagtcccttctgggggcagtagcagcccccgtttcctcccaaggggcaatgccccctctccagccccacctcctccacctgctatcagcctcaatgctccctcatacaactggggagctgccctcagatccagcctggtgccctctgacctgggctctcctccggcccctcatgcctcctcctcaccaccttcagaccctcctctcttccactgtagtgatgccttaacaccccctcccctgcccccgagcaataatctccccgcccaccctggtcctgcctctcagccaccagtgtcttcagccactatgcacctgcccctggtcctggggcccctgggaggggcccccacggtggaggggcctggggcaccccccttccttgctagcagcctactctctgcagcggccaaggcacagcatcccccactaccccctcccagcactttacagggccgaaggccccgtgcccaggcaccctcagcttcccactcctcatcacttcgtccctctcagcgtcgtccccgcagaccccctactgtatttcgattgctagaagggagaggccctcaaacccctagacggagccgtcctcgggcccctgctcctgtcccccaacccttttctctcccggagccatcccaaccaattctcccttctgtgctgtccctgctgggactccccacccctggcccttcccactctgatggaagctttaaccttttggggtcagatgcacaccttcctcctcccccaaccctctcctcagggagccctccccagcccaggcaccccatccagccctccctgcctgggaccaccagtggcagcctcagcagtgtgccaggtgcccctgccccaccagctgcctccaaagccccagtagtccccagccctgtgcttcaaagcccatccgaaggactggggatgggggcaggcccggcctgccctctgcctcccctggctggtggagaggctttccctttccccagccctgagcagggcctggcactgagtggagctggcttccctgggatgcttggggccttgcctctccctctgagtctggggcagcctccaccttctccattgctcaaccacagtttatttggtgtgctgactgggggaggaggacaacctccccctgagcccctgctacccccaccaggaggacctggtcctcccctagccccaggagagcctgaagggccttcgcttttggtggcttccttgcttcctccaccaccctcagaccttcttccacctccttcagcacctcccagcaacctccttgcctctttcctgcccctgttggctctgggccccacagctggggatggggagggatctgcagagggagccgggggtccaagtggggagccattttcaggcttgggagacctgtcccccctacttttccccccactttcagccccccctaccctcatagctttaaattctgcgctgctggctgccaccctggatcccccctcggggacacccccccagccctgtgtcctgagtgccccccaacctggaccacctacctccagtgtcaccacggcaactactgacccgggggcctcctctctgggcaaggccccctccaactcagggagacccccccaactccttagccctctgctgggtgccagcctgctgggtgacctgtcttcactgaccagcagccctggagccctccccagcctgttgcagcctcctggccctcttctctctggccagttggggctgcagctcctccctggggggggagctcctccacccctctcagaggcttctagtcccctagcctgcctgctacagagtctccagatccctccagagcagccagaagccccctgtctaccccccgagagccctgcctcagccctcgaaccagagcctgccaggcctcccctcagtgccttagccccaccccatggttctcccgaccccccagtccctgagctgctcactgggagggggtcagggaaacggggccggaggggaggagggggacttaggggcattaatggtgaggccaggccagcccggggccgaaagcctggcagccggcgggagcctggccgactggccctcaaatgggggacacgtggtggcttcaatggacaaatggaaaggcaagaagaacccaccattggcagcataatggggagctggctgaagggggtgctgagcccaaggatccaccccctcccgggccccattctgaggaccttaaggtgccccagtagtcagaaagtctcgtcgtggccgtaggagaaaatacaaccctacccggaacagcaatagctcccgccaggacattaccttggaacccagccctacagcccgagcagctgtccctctgcctccccgggcccgccctggccgtcctgccaaaaacaagaggaggaaactggccccatagcagccatacctggagctggatctgaccctgattggggagagctgagtgctgagccttgggagcccctgccagccacctgcacctgctgccctccttcccagtgaaagagacgttgtgatgatgcgactgaggattatgcaacgtggtccaaccggagcggccagcatgaccagctgtccaggggctgcctcctgccttttcttttgtaaagacaagacccttgggagttttaattctgttttgtacttgccctgtggggcctccactgcttttctatgggagacactcttaatttaacagatgagaatattttgaaactctg

SEQ ID NO: 282020 - DNA, 4282 bp, Artificial Sequence
  derived and/or modified sequence
gcggctgcggcagcgacggcggcggcggcagcggcagcagcctgcgcagtgccttctgggaacggaatccccagggctgcccctggcccccatggcgcatgcgcgggaggccgctcggtgatccgcggcggcggcagcggcgcttcctgctaggaccggccggggccgtaccggaggctcgggctccaccgaccctcctcccaccccctcccactcaccctctgggccgcgactgcgcagggcggggccggccgaaccatgggccgcggtgtgggctaagctggtggccccggctttagactggaccccacaatgtttgcagagatgttcaggcacgcgggagctgattacacacaatgaatgggggcaatgagagcagtggagcagacagagctgggggccctgtggccacatctgtccccatcggctggcagcgctgtgtgcgagagggtgctgtgctctacatcagtccaagtggcacagagctgtcttccttggagcaaacccggagctacctcctcagcgatgggacctgcaagtgcggtctggagtgtccacttaatgtccccaaggttttcaactttgaccctttggccccggtgaccccgggtggggctggggtggggccagcatcagaggaggacatgaccaagctgtgcaaccaccggcggaaagctgttgctatggcaactctgtaccgcagcatggagaccacctgctcacactcttctcctggagagggagcgagcccccaaatgttccacactgtgtccccagggcccccctctgcccgccctccctgtcgagttcctcctacaactccacttaatgggggtcctggctcccttcccccagaaccaccctcagtttcccaggcctttcccactctagcaggccctggggggcttttccccccaaggcttgctgacccagtcccttctgggggcagtagcagcccccgtttcctcccaaggggcaatgccccctctccagccccacctcctccacctgctatcagcctcaatgctccctcatacaactggggagctgccctcagatccagcctggtgccctctgacctgggctctcctccggcccctcatgcctcctcctcaccaccttcagaccctcctctcttccactgtagtgatgccttaacaccccctcccctgcccccgagcaataatctccccgcccaccctggtcctgcctctcagccaccagtgtcttcagccactatgcacctgcccctggtcctggggcccctgggaggggcccccacggtggaggggcctggggcaccccccttccttgctagcagcctactctctgcagcggccaaggcacagcatcccccactaccccctcccagcactttacagggccgaaggccccgtgcccaggcaccctcagcttcccactcctcatcacttcgtccctctcagcgtcgtccccgcagaccccctactgtatttcgattgctagaagggagaggccctcaaacccctagacggagccgtcctcgggcccctgctcctgtcccccaacccttttctctcccggagccatcccaaccaattctcccttctgtgctgtccctgctgggactccccacccctggcccttcccactctgatggaagctttaaccttttggggtcagatgcacaccttcctcctcccccaaccctctcctcagggagccctccccagcccaggcaccccatccagccctccctgcctgggaccaccagtggcagcctcagcagtgtgccaggtgcccctgccccaccagctgcctccaaagccccagtagtccccagccctgtgcttcaaagcccatccgaaggactggggatgggggcaggcccggcctgccctctgcctcccctggctggtggagaggctttccctttccccagccctgagcagggcctggcactgagtggagctggcttccctgggatgcttggggccttgcctctccctctgagtctggggcagcctccaccttctccattgctcaaccacagtttatttggtgtgctgactgggggaggaggacaacctccccctgagcccctgctacccccaccaggaggacctggtcctcccctagccccaggagagcctgaagggccttcgcttttggtggcttccttgcttcctccaccaccctcagaccttcttccacctccttcagcacctcccagcaacctccttgcctctttcctgcccctgttggctctgggccccacagctggggatggggagggatctgcagagggagccgggggtccaagtggggagccattttcaggcttgggagacctgtcccccctacttttccccccactttcagccccccctaccctcatagctttaaattctgcgctgctggctgccaccctggatcccccctcggggacacccccccagccctgtgtcctgagtgccccccaacctggaccacctacctccagtgtcaccacggcaactactgacccgggggcctcctctctgggcaaggccccctccaactcagggagacccccccaactccttagccctctgctgggtgccagcctgctgggtgacctgtcttcactgaccagcagccctggagccctccccagcctgttgcagcctcctggccctcttctctctggccagttggggctgcagctcctccctggggggggagctcctccacccctctcagaggcttctagtcccctagcctgcctgctacagagtctccagatccctccagagcagccagaagccccctgtctaccccccgagagccctgcctcagccctcgaaccagagcctgccaggcctcccctcagtgccttagccccaccccatggttctcccgaccccccagtccctgagctgctcactgggagggggtcagggaaacggggccggaggggaggagggggacttaggggcattaatggtgaggccaggccagcccggggccgaaagcctggcagccggcgggagcctggccgactggccctcaaatgggggacacgtggtggcttcaatggacaaatggaaaggtccccaagaagaacccaccattggcagcataatggggagctggctgaagggggtgctgagcccaaggatccaccccctcccgggccccattctgaggaccttaaggtgcccccgggagtagtcagaaagtctcgtcgtggccgtaggagaaaatacaaccctacccggaacagcaatagctcccgccaggacattaccttggaacccagccctacagcccgagcagctgtccctctgcctccccgggcccgccctggccgtcctgccaaaaacaagaggaggaaactggccccatagcagccatacctggagctggatctgaccctgattggggagagctgagtgctgagccttgggagcccctgccagccacctgcacctgtggacagtgggtgggggcactactccccactcagagcacaaatgcaactccttcccctacaatcccatcctgagccattgcagggggcagggaagttcacccccccccaccacccccccgcccccccgaagccatgtcactgaaaaggcctgggggggatggtatatggccctttccccaccaggcgctaaggggaacacccccttccccaggtcttttatttgtttaagttatttttgcacaaatgactcttttatatttaattcgatttcattgcctcccttcttaaagccaacaggctcagtttacaaacctgtgagctactgttggctgctgccctccttcccagtgaaaggtacaaagcaataagcatcatgcatcctccccttacccctccaacacccctctgcctctggctcaggttgctcaaagcacagatcctctcttaccccgtccccaggtttgaaacacatagcctcatttcaaggtgtagccaggttcccccgactttcctctgggatataaaaaagggggtaagggggcaaagagagccctctgggcctctcctcccatacacactacactgccccttctccccccatcaaaacgctcagagacgttgtgatgatgcgactgaggattatgcaacgtggtccaaccggagcggccagcatgaccagctgtccaggggctgcctcctgccttttcttttgtaaagacaagacccttgggagttttaattctgttttgtacttgccctgtggggcctccactgcttttctatgggagacactcttaatttaacagatgagaatattttgaaactctg

SEQ ID NO: 282021 - DNA, 3592 bp, Artificial Sequence
  derived and/or modified sequence
atgcgcgggaggccgctcggtgatccgcggcggcggcagcggcgcttcctgctaggaccggccggggccgtaccggaggctcgggctccaccgaccctcctcccaccccctcccactcaccctctgggccgcgactgcgcagggcggggccggccgaaccatgggccgcggtgtgggctaagctggtggccccggctttagactggaccccacaatgtttgcagagatgttcaggcacgcgggagctgattacacacaatgaatgggggcaatgagagcagtggagcagacagagctgggggccctgtggccacatctgtccccatcggctggcagcgctgtgtgcgagagggtgctgtgctctacatcagtccaagtggcacagagctgtcttccttggagcaaacccggagctacctcctcagcgatgggacctgcaagtgcggtctggagtgtccacttaatgtccccaaggttttcaactttgaccctttggccccggtgaccccgggtggggctggggtggggccagcatcagaggaggacatgaccaagctgtgcaaccaccggcggaaagctgttgctatggcaactctgtaccgcagcatggagaccacctgctcacactcttctcctggagagggagcgagcccccaaatgttccacactgtgtccccagggcccccctctgcccgccctccctgtcgagttcctcctacaactccacttaatgggggtcctggctcccttcccccagaaccaccctcagtttcccaggcctttcccactctagcaggccctggggggcttttccccccaaggcttgctgacccagtcccttctgggggcagtagcagcccccgtttcctcccaaggggcaatgccccctctccagccccacctcctccacctgctatcagcctcaatgctccctcatacaactggggagctgccctcagatccagcctggtgccctctgacctgggctctcctccggcccctcatgcctcctcctcaccaccttcagaccctcctctcttccactgtagtgatgccttaacaccccctcccctgcccccgagcaataatctccccgcccaccctggtcctgcctctcagccaccagtgtcttcagccactatgcacctgcccctggtcctggggcccctgggaggggcccccacggtggaggggcctggggcaccccccttccttgctagcagcctactctctgcagcggccaaggcacagcatcccccactaccccctcccagcactttacagggccgaaggccccgtgcccaggcaccctcagcttcccactcctcatcacttcgtccctctcagcgtcgtccccgcagaccccctactgtatttcgattgctagaagggagaggccctcaaacccctagacggagccgtcctcgggcccctgctcctgtcccccaacccttttctctcccggagccatcccaaccaattctcccttctgtgctgtccctgctgggactccccacccctggcccttcccactctgatggaagctttaaccttttggggtcagatgcacaccttcctcctcccccaaccctctcctcagggagccctccccagcccaggcaccccatccagccctccctgcctgggaccaccagtggcagcctcagcagtgtgccaggtgcccctgccccaccagctgcctccaaagccccagtagtccccagccctgtgcttcaaagcccatccgaaggactggggatgggggcaggcccggcctgccctctgcctcccctggctggtggagaggctttccctttccccagccctgagcagggcctggcactgagtggagctggcttccctgggatgcttggggccttgcctctccctctgagtctggggcagcctccaccttctccattgctcaaccacagtttatttggtgtgctgactgggggaggaggacaacctccccctgagcccctgctacccccaccaggaggacctggtcctcccctagccccaggagagcctgaagggccttcgcttttggtggcttccttgcttcctccaccaccctcagaccttcttccacctccttcagcacctcccagcaacctccttgcctctttcctgcccctgttggctctgggccccacagctggggatggggagggatctgcagagggagccgggggtccaagtggggagccattttcaggcttgggagacctgtcccccctacttttccccccactttcagccccccctaccctcatagctttaaattctgcgctgctggctgccaccctggatcccccctcggggacacccccccagccctgtgtcctgagtgccccccaacctggaccacctacctccagtgtcaccacggcaactactgacccgggggcctcctctctgggcaaggccccctccaactcagggagacccccccaactccttagccctctgctgggtgccagcctgctgggtgacctgtcttcactgaccagcagccctggagccctccccagcctgttgcagcctcctggccctcttctctctggccagttggggctgcagctcctccctggggggggagctcctccacccctctcagaggcttctagtcccctagcctgcctgctacagagtctccagatccctccagagcagccagaagccccctgtctaccccccgagagccctgcctcagccctcgaaccagagcctgccaggcctcccctcagtgccttagccccaccccatggttctcccgaccccccagtccctgagctgctcactgggagggggtcagggaaacggggccggaggggaggagggggacttaggggcattaatggtgaggccaggccagcccggggccgaaagcctggcagccggcgggagcctggccgactggccctcaaatgggggacacgtggtggcttcaatggacaaatggaaaggtccccaagaagaacccaccattggcagcataatggggagctggctgaagggggtgctgagcccaaggatccaccccctcccgggccccattctgaggaccttaaggtgcccccgggagtagtcagaaagtctcgtcgtggccgtaggagaaaatacaaccctacccggaacagcaatagctcccgccaggacattaccttggaacccagccctacagcccgagcagctgtccctctgcctccccgggcccgccctggccgtcctgccaaaaacaagaggaggaaactggccccatagcagccatacctggagctggatctgaccctgattggggagagctgagtgctgagccttgggagcccctgccagccacctgcacctgctgccctccttcccagtgaaagagacgttgtgatgatgcgactgaggattatgcaacgtggtccaaccggagcggccagcatgaccagctgtccaggggctgcctcctgccttttcttttgtaaagacaagacccttgggagttttaattctgttttgtacttgccctgtggggcctccactgcttttctatgggagacactcttaatttaacagatgagaatattttgaaactctg

SEQ ID NO: 282022 - DNA, 607 bp, Artificial Sequence
  derived and/or modified sequence
gcatgcgcgggaggccgctcggtgatccgcggcggcggcagcggcgcttcctgctaggaccggccggggccgtaccggaggctcgggctccaccgaccctcctcccaccccctcccactcaccctctgggccgcgactgcgcagggcggggccggccgaaccatgggccgcggtgtgggctaagctggtggccccggctttagactggaccccacaatgtttgcagagatgttcaggtagctgtggtgatacggcagaggactcctcagtctccctcccagctgaggggttccccttgctcctctggggcttcccctgagttttcttgggtctccccacaacctttgccttcctggagtcctctctcaggtacttcgctcagtttaatcctcctagtgcctacatggatgtctgtgttatcaggcacgcgggagctgattacacacaatgaatgggggcaatgagagcagtggagcagacagagctgggggccctgtggccacatctgtccccatcggctggcagcgctgtgtgcgagagggtgctgtgctctacatcagtccaagtggcacagagctgtcttccttggagcaaacccggagctacc

SEQ ID NO: 282023 - DNA, 596 bp, Artificial Sequence
  derived and/or modified sequence
acctattttcccccacggtactcctatggctttctccaagaccctctcttgctgtaccagacagcaagtcctgtgactccctgtgtgaggagcgcggcacaggcctgcctcctaggtgttcgggtcgagatttacagcggagtctcatcccgggacgtgtgagtgcacttcagcgcaggactgccctggactggggagaccggagccgcgattttagactcaactccccatcacttgccaagggatcttaccgtccttgtttgtaaattaaagataaaagttgtgaaggtgtgggctaagctggtggccccggctttagactggaccccacaatgtttgcagagatgttcaggcacgcgggagctgattacacacaatgaatgggggcaatgagagcagtggagcagacagagctgggggccctgtggccacatctgtccccatcggctggcagcgctgtgtgcgagagggtgctgtgctctacatcagtccaagtggcacagagctgtcttccttggagcaaacccggagctacctcctcagcgatgggacctgcaagtgcggtctggagtgtccacttaatgtccccaaggttt

SEQ ID NO: 282024 - DNA, 568 bp, Artificial Sequence
  derived and/or modified sequence
aagtggctttgggtcacgaggcttcacggaggaggtgtgggctaagctggtggccccggctttagactggaccccacaatgtttgcagagatgttcaggcacgcgggagctgattacacacaatgaatgggggcaatgagagcagtggagcagacagagctgggggccctgtggccacatctgtccccatcggctggcagcgctgtgtgcgagagggtgctgtgctctacatcagtccaagtggcacagagctgtcttccttggagcaaacccggagctacctcctcagcgatgggacctgcaagtgcggtctggagtgtccacttaatgtccccaaggttttcaactttgaccctttggccccggtgaccccgggtggggctggggtggggccagcatcagaggaggacatgaccaagctgtgcaaccaccggcggaaagctgttgctatggcaactctgtaccgcagcatggagaccacctgctcacactcttctcctggagagggagcgagcccccaaatgttccacactgtgtccccagggcccccctctgcccgccctccctg

SEQ ID NO: 282025 - DNA, 532 bp, Artificial Sequence
  derived and/or modified sequence
agtcggtcgtgagcctctttgccgcttgtctcccccagaagctgctgttccgcccacctagctttacccgccgttttacccccactataagggactcccatatttcttggcccctcccagctaatgggcacataggccttttgaacttttctttttaaagttggtatccatccactgggattgtcgacatctcgagtcttcttaaagaggtctcctggccgggctcagtggcttacgcctgtaatcccagcactttgggaggctgaggagagcggatcacttgaggtgtgggctaagctggtggccccggctttagactggaccccacaatgtttgcagagatgttcaggcacgcgggagctgattacacacaatgaatgggggcaatgagagcagtggagcagacagagctgggggccctgtggccacatctgtccccatcggctggcagcgctgtgtgcgagagggtgctgtgctctacatcagtccaagtggcacagagctgtcttccttggagcaaacccggagctac

SEQ ID NO: 282026 - DNA, 509 bp, Artificial Sequence
  derived and/or modified sequence
accctctgccccctccgcgtcctctcggcccctttccccggccccatccccactcccccgccctcacctgcccccgccgcttctccctctcactgccagacttctgccttcctcaccgccctcccctcagtgcttcgcccaccctccgcccgccctctccccaagttccttcctacttcgtgcgccttcccctcctcctcaagctgagggaagcagtctgggtgacagggcgccttgttgtgagagggaaagtttggaagccgccagtgtggggtgggagcaatggtgtgggctaagctggtggccccggctttagactggaccccacaatgtttgcagagatgttcaggcacgcgggagctgattacacacaatgaatgggggcaatgagagcagtggagcagacagagctgggggccctgtggccacatctgtccccatcggctggcagcgctgtgtgcgagagggtgctgtgctctacatcagtccaagtggcacagagctgtctt

SEQ ID NO: 282027 - DNA, 1245 bp, Artificial Sequence
  derived and/or modified sequence
atgctgggcgccctgcccctgcccctgagcctgggccagcccccacccagccccctgctgaaccacagcctgtttggagtgctgactggaggcggcggccagcccccacctgagcccctgctgcccccacctgggggccctggcccccccctggcccctggagagcctgagggccccagcctgctggtggccagcctgctgcccccaccacccagcgacctgctgcccccaccttctgccccacccagcaacctgctggccagcttcctgcccctgctggccctgggccccacagctggagatggagagggcagcgctgagggcgccggcggccccagcggggagcccttcagcggcctgggggacctgagccccctgctcttcccccccctgagcgccccacccaccctcatcgccctgaacagcgccctgctggccgccaccctggaccccccatctggcaccccaccccagccctgtgtgctgagcgccccccagcccggcccccccaccagctctgtgaccacagccaccacagatcctggggccagcagcctgggcaaggcccccagcaacagcggccggcccccccagctgctgagccccctgctgggcgccagcctgctgggggacctgagcagcctgaccagcagccctggggccctgcccagcctgctgcagcccccaggccccctgctgagcggccagctgggcctgcagctgctgcccggcggcggggcccccccacccctgtctgaggccagcagccccctggcctgcctgctgcagagcctgcagatccccccagagcagcctgaggccccctgcctgcccccagagagccctgccagcgccctggagcctgagcccgcccggccccccctgagcgccctggccccaccccacggcagcccagacccccctgtgcctgagctgctgaccggccggggcagcggcaagagaggaagaagaggaggcggcggcctgcggggcatcaatggagaggcccggcctgcccggggcaggaagccaggcagcagaagagagcccggccgcctggccctgaagtggggcacccggggcggcttcaacggccagatggagcggcaggaggagcccaccatcggcagcatcatgggctcctggctgaagggcgtgctgagcccccgcatccaccccctgcccggccccatcctgcggaccctgcgctgccccagcagccagaaggtgtcctcctggccctag

SEQ ID NO: 282028 - DNA, 3012 bp, Artificial Sequence
  derived and/or modified sequence
atgaatggaggaaatgaaagcagcggggctgacagagctgggggccctgtggccacctctgtgcccatcggctggcagagatgtgtgcgggagggcgctgtgctgtacatcagccccagcggcacagagctgagcagcctggagcagaccaggagctacctgctgagtgatggcacctgcaagtgtggcctggagtgccccctgaatgtgcccaaggtgttcaactttgaccccctggcccctgtgacccctgggggcgccggcgtgggccctgccagcgaggaggacatgaccaagctgtgcaaccacaggaggaaggctgtggccatggccaccctgtaccgctccatggagaccacctgcagccacagcagccctggagagggcgccagcccccagatgttccacacagtgtccccaggcccccccagcgcccggcccccctgccgggtgccccccaccacccccctgaatggaggccctggcagcctgcccccagagccccccagcgtgtcccaggccttccccaccctggccggccctgggggcctcttccccccccggctggccgaccctgtgcccagcggcggcagcagcagcccccgcttcctgcccagaggaaatgcccccagccctgcccctcctcctcctccagccatcagcctgaatgcccccagctacaactggggcgccgccctgcggagcagcctggtgcccagcgacctgggcagccccccagcccctcatgccagcagcagcccccccagcgaccccccactcttccactgcagtgatgccctgaccccaccacccctgccccccagcaacaacctgcctgcccaccctggccctgccagccagccccctgtgagcagcgccaccatgcacctgcccctggtgctgggccccctgggcggggcccccaccgtggagggccctggggccccacccttcctggccagcagcctgctgtctgctgctgccaaggcccagcacccccccctgcccccacccagcaccctgcagggccggcggccccgggcccaggcccccagcgccagccacagcagcagcctgcggcccagccagaggcggccccggcggcccccaacagtgttccggctgctggagggccggggcccccagaccccaagaagaagccggccccgggccccagcccctgtgccccagcccttcagcctgcctgagcccagccagcccatcctgcccagcgtgctgagcctgctgggcctgcccaccccaggccccagccacagtgatggcagcttcaacctgctgggcagtgatgcccacctgcccccaccacccaccctgagcagcggcagccccccccagcccaggcaccccatccagcccagcctgcccggcaccaccagcggcagcctgagctctgtgcctggggccccagcccccccagctgccagcaaggcccctgtggtgcccagccctgtgctgcagagccccagcgagggcctgggcatgggcgccggccctgcctgccccctgccccccctggccggcggggaggccttccccttccccagccctgagcagggcctggccctgagcggggccggcttccctggcatgctgggcgccctgcccctgcccctgagcctgggccagcccccacccagccccctgctgaaccacagcctgtttggagtgctgactggaggcggcggccagcccccacctgagcccctgctgcccccacctgggggccctggcccccccctggcccctggagagcctgagggccccagcctgctggtggccagcctgctgcccccaccacccagcgacctgctgcccccaccttctgccccacccagcaacctgctggccagcttcctgcccctgctggccctgggccccacagctggagatggagagggcagcgctgagggcgccggcggccccagcggggagcccttcagcggcctgggggacctgagccccctgctcttcccccccctgagcgccccacccaccctcatcgccctgaacagcgccctgctggccgccaccctggaccccccatctggcaccccaccccagccctgtgtgctgagcgccccccagcccggcccccccaccagctctgtgaccacagccaccacagatcctggggccagcagcctgggcaaggcccccagcaacagcggccggcccccccagctgctgagccccctgctgggcgccagcctgctgggggacctgagcagcctgaccagcagccctggggccctgcccagcctgctgcagcccccaggccccctgctgagcggccagctgggcctgcagctgctgcccggcggcggggcccccccacccctgtctgaggccagcagccccctggcctgcctgctgcagagcctgcagatccccccagagcagcctgaggccccctgcctgcccccagagagccctgccagcgccctggagcctgagcccgcccggccccccctgagcgccctggccccaccccacggcagcccagacccccctgtgcctgagctgctgaccggccggggcagcggcaagagaggaagaagaggaggcggcggcctgcggggcatcaatggagaggcccggcctgcccggggcaggaagccaggcagcagaagagagcccggccgcctggccctgaagtggggcacccggggcggcttcaacggccagatggagaggagccccaggaggacccaccactggcagcacaacggggagctggccgagggcggcgctgagcccaaggaccccccacctcctggcccccacagcgaggacctgaaggtgcccccaggagtggtgaggaagagccggcggggcagaagaaggaagtacaaccccaccaggaacagcaacagcagccggcaggacatcaccctggagcccagccccacagcccgggctgctgtgcccctgcccccccgggcccggcccggccgcccagccaagaacaagaggaggaagctggccccctag

SEQ ID NO: 282029 - DNA, 222 bp, Artificial Sequence
  derived and/or modified sequence
atgaatggaggaaatgaaagcagcggggctgacagagctgggggccctgtggccacctctgtgcccatcggctggcagagatgtgtgcgggagggcgctgtgctgtacatcagccccagcggcacagagctgagcagcctggagcagaccaggagctacctgctgagtgatggcacctgcaagtgtggcctggagtgccccctgaatgtgcccaaggtgtag

SEQ ID NO: 282030 - DNA, 447 bp, Artificial Sequence
  derived and/or modified sequence
atgaatggaggaaatgaaagcagcggggctgacagagctgggggccctgtggccacctctgtgcccatcggctggcagagatgtgtgcgggagggcgctgtgctgtacatcagccccagcggcacagagctgagcagcctggagcagaccaggagctacctgctgagtgatggcacctgcaagtgtggcctggagtgccccctgaatgtgcccaaggtgttcaactttgaccccctggcccctgtgacccctgggggcgccggcgtgggccctgccagcgaggaggacatgaccaagctgtgcaaccacaggaggaaggctgtggccatggccaccctgtaccgctccatggagaccacctgcagccacagcagccctggagagggcgccagcccccagatgttccacacagtgtccccaggcccccccagcgcccggcccccatag

SEQ ID NO: 282031 - DNA, 1245 bp, Artificial Sequence
  derived and/or modified sequence
atgctgggcgccctgcccctgcccctgagcctgggccagccccccccgtcccctctacttaatcattctctgttcggcgtcttgacggggggggggggacaaccaccaccagaacctctcctgccgcccccggggggaccggggccacctctcgccccaggggaacccgaaggcccttctctgctcgtggcctccctgctgccccccccaccctctgatcttcttccccctccttctgctccaccatctaacctgctcgcaagctttctgcctctgttggccctcggccccactgcgggcgacggagaaggtagtgcggagggggctggcggaccctctggggaacctttctctgggcttggagacctgtctccgctgctgtttccacccctgtccgctccacccaccctgatcgccttaaactcggccttactcgctgcaaccttagatccaccttccggaaccccaccacagccttgcgtgctgtcagcgccgcagccgggaccccccacttctagcgtcactacagccactacagatcccggtgccagctctctcggaaaagctcctagtaattccgggcggccaccacagctccttagcccattgctgggggcctccctcctgggtgacctaagttccctcacctcctctcccggggccctcccctctctgctgcagcctccaggcccactgctgagcgggcaactcggactccaattgctgcccggtgggggggctccccctcccttgtccgaggcctccagtcctctggcttgccttttacagtccctacagatcccacccgaacagcctgaggcaccatgcctgccaccagagtcccctgcgagtgctctggagcccgagccagctcgaccgcctctcagcgctctggccccaccccacggatctccagacccacctgtccctgaactactgacgggtcggggctccggtaagcgagggcggcgcggaggcggcggactcagaggaatcaatggggaagcccggccggcaaggggccgaaaacccggatccagaagagagccgggccgtctggccctcaaatggggaacacgaggcgggttcaacgggcagatggaacggcaggaagaacctactatcgggtctatcatggggtcttggctgaaaggcgtcctgtctccaagaattcacccactaccaggtcccattctgagaacactgcgctgtccttcatcgcagaaagtctccagctggccttag

SEQ ID NO: 282032 - DNA, 3012 bp, Artificial Sequence
  derived and/or modified sequence
atgaacggcggcaacgagagcagcggcgccgaccgggccggcggccccgtggctacaagcgttccgatcgggtggcaacgctgcgtgagagaaggcgccgtgctctacatcagcccatcaggaactgagctgagcagtctggagcaaacgcggtcatacttgctcagtgacggtacctgcaagtgcggactggaatgtccactgaacgttccgaaagtcttcaactttgaccccctcgcgcctgtcaccccaggaggggccggcgtcggtcccgcgtcagaggaggacatgactaaactgtgtaaccacaggagaaaggccgtggccatggccacactgtaccgcagtatggagacaacctgttcacactctagccccggcgagggtgcatccccacagatgtttcatactgtgagccccgggcccccgtcagcccgtcccccttgccgcgtgccacccacgaccccccttaatggcggaccaggaagcctccccccagaaccgccaagcgtgtctcaggcattcccgactctggcggggccaggcgggctatttccccctcgactggccgatccagtgccctctggaggatcaagcagcccgaggttcctgccgaggggtaacgcccctagtccagcccctcctccccctcctgcaatctcgctgaacgccccgagctacaattggggtgctgcgttacgcagctctctggtcccgtccgacctcggcagtcctccagccccacatgcgtcatcttcaccccctagcgatcctcctctgtttcattgtagcgatgccctgacacccccacccttgcctccatcaaacaacctgcctgctcaccccggccctgcttcccagcctcccgtgagtagtgccaccatgcatctgccccttgtgcttggaccattaggcggagctcctaccgtggagggccccggtgcacctcccttcttagcatcttcacttctgagtgcagcagcaaaagcacagcatccacctctgcctcccccgtcaactctgcaaggtcgtaggccacgcgctcaagccccatccgccagccactcctcttcattaaggcccagtcaacggaggcctcggagaccccctactgtgtttagattactggagggaagggggccacagacacctcgcaggagccggccaagggcccctgcccctgtgccccagcccttttcccttccggaaccatcacagccaattctgcccagcgttctgtccttactgggacttcccacacccgggcccagccattctgacggatcctttaatttactgggatccgacgcacacctgcctcctccacccaccttgagttcagggtcacccccccagcctcggcacccaatccagccctcattaccaggtactacctccggctctcttagctctgtgcccggtgctcccgccccacctgctgccagtaaggcacccgtggtgccttcaccggtgctgcagtctcccagtgagggacttggcatgggtgctggaccagcatgccctctcccccccctggcagggggcgaagctttcccttttccgagccccgagcaaggactcgccctgtcaggggccggattcccaggcatgctgggtgccctgccactgccactgagcttgggccaaccacctccaagcccgcttctgaatcactccctcttcggggtcctgacaggcggcggcggccagcctccaccagagcctttactgccccctccaggcggcccagggccacctctagcacccggcgagcctgaaggtccaagcttgctggtggccagtctgctacctccacccccatctgatctgctgcctcccccatctgcccccccctctaatctgctggcttcctttcttcccctgctggcattagggcccacagcgggcgacggcgaaggcagtgccgagggcgctggcggacctagcggggaacccttcagcggcttaggtgacctgtcaccactactgttcccgcccctttcagccccaccaactctgatagcacttaattcagcgctcctggctgcaactttggatccacccagtggcacccccccccagccctgcgtgctatccgctcctcagcctggtccgcccacgagcagcgtgacaactgccacgaccgatcccggcgccagcagccttggcaaggctccttctaatagtggtcgcccaccgcaactcctatcacctctacttggagcgtccttactcggagacctgagtagcctaacctcgtcacctggtgccctgccaagtctgttacagccccccggacccttactgagtggtcagttaggcttgcagctcctccctgggggcggagcaccccccccattgtctgaggctagttcccccctcgcttgtctgctccaaagcttgcagattccccccgagcagccagaggccccttgccttccacccgagagcccagcctccgcactggaacctgagcctgcaaggcctccgctgtccgcattagcgcctccgcacggcagtcctgacccgcccgtgccagagctgctgaccggccgtggctcagggaagcggggaaggaggggcggaggtgggctccgtgggattaacggcgaggcacgcccggcccgtggaaggaaaccagggtcacgacgcgaacccgggcggctggcccttaaatgggggaccagaggggggtttaacggtcaaatggagcgcagtcccagaagaacacaccattggcaacataacggagaactggcggagggaggggccgagccaaaagatccccccccccccgggccccactctgaagacctcaaggttccccctggcgtcgtcagaaaaagcaggaggggccggaggcggaagtacaatccaacaaggaattcaaactctagcaggcaggacataaccctagaacctagccctaccgcaagggcagcggtgccgctcccaccacgtgcgagaccaggtcggcccgctaagaacaaaaggaggaagctggctccatag

SEQ ID NO: 282033 - DNA, 3012 bp, Artificial Sequence
  derived and/or modified sequence
atgaacggcggcaacgagagcagcggcgccgaccgggccggcggcccagtcgccacgtccgtgcccattggctggcagaggtgtgtgagagaaggggccgtcttgtacatctcgccaagcgggactgaactcagtagcctggaacagacaagaagctacctgctgagcgatggaacctgcaagtgcggacttgagtgccccctgaacgtccctaaagtgttcaatttcgatcctttagcacctgtcactcctggaggcgccggcgtagggcccgcttccgaagaggatatgaccaagctgtgtaatcatcggcggaaggccgtcgctatggctactctgtaccggtccatggaaacgacctgcagtcattccagtccaggtgagggagccagcccgcaaatgtttcatacagtgtcccccggacccccttctgctaggcccccctgccgcgtgccacctacaacccctttgaacggtggacccggcagtctgccgcctgaacccccgagcgtctcccaggccttcccaaccctggccggccccggaggcctattccctcctagactggcagatccggtcccctccggcgggagcagttccccacgctttttgccccgcggtaatgcgccttctcccgcaccgccgcccccgcccgccattagcctgaacgcgcccagctacaactggggcgcggctctccggagctctctcgtcccaagcgatcttggtagcccccccgctccacatgcttcctcttcccctccatcagacccgcctctgttccactgcagtgatgcgctgaccccacctccgttaccacctagtaacaacttaccagctcaccccggcccagcttctcagcctccagtgtcctcagccactatgcatcttcccctggtccttggccccttgggtggtgcaccaactgtggaaggtcccggcgcgccaccatttctcgcttccagcctgcttagtgctgccgcaaaggcgcagcacccacctcttccccctcctagcacgctgcagggaagaagacctagagcacaggccccaagcgcaagtcactcaagttctctccgccctagtcagaggagacctagacggcctcctaccgtttttaggctgttggagggacgtggcccccagactcccaggagatcccgtccccgagctccagcacccgtcccccaacctttcagccttccagagcccagccaacctatacttccatcagtgctttcactgctgggcctgcccacacccggcccatctcatagtgatgggtcctttaatttgctgggctccgatgctcatctgcccccccccccaactctctcttcaggcagccccccccagcccagacatcctattcagccttcccttcctggtaccaccagtggttcactctctagtgtgcccggcgctccggcacctccagctgcctcaaaagcgcctgtagttcccagtcccgtattgcagtctccatcagaaggattgggtatgggcgcaggtcccgcgtgccccttacctcccctcgcgggaggggaggctttccctttcccaagccctgaacagggattggccctgtcaggagctggatttcccggcatgctgggggcactgcccctccctttgtccctcggtcagccccctcctagtcccctgcttaaccactcattattcggggtactgaccgggggaggcgggcagcctccaccagaacctttattgcctccgcccgggggacccggccctcccctcgctccaggcgaaccagagggaccctccctgctggttgcatctctccttcctccacccccgtctgaccttctgcctcctccgagtgcccctccttctaacctgctggcctccttcttgcctctcctggcattagggcctaccgccggtgacggcgagggctctgcggaaggtgcaggtggaccaagcggtgaacctttctccggactgggagatctgagcccgctactgttcccccccctttctgcccctcctaccctcatcgccctgaactcggcattgctggcagccactctcgacccccccagcgggacaccgcctcaaccctgcgttctgtcagccccacagcctggtcctcctacaagttccgtgacaactgccactactgacccgggtgcctcgagtctaggcaaggcccccagcaacagcggtaggccgccccaattgctcagtcctctgttaggcgccagtctcctgggcgacctgagttcactgaccagtagccccggagctctgcccagcctcctgcagccgccaggtccactgctttcagggcagctgggcttgcagctgttaccaggggggggagcacccccacccctgtctgaggcttcctccccacttgcctgtttactgcaaagtctgcagatccctcccgaacaaccagaagcaccatgccttcctcctgagagcccagcatctgctctcgagcccgaacctgcccgccctccactgtccgccctggcaccccctcacggaagcccggatcccccagtccccgaactcttaaccggacgggggagtggtaaaagagggcgtcgtggaggcggggggctgcggggtattaatggcgaagcccgcccggcacggggccgaaagccagggagcaggcgggagccaggacgccttgccctgaaatggggcactagaggaggcttcaatggacagatggaacgctctccccggcgtacccaccattggcaacacaacggcgagcttgccgaaggcggcgctgaacctaaagatccacccccgcccggacctcactccgaagatttaaaggtgccaccgggtgtcgtaagaaagagccggagagggcggaggcgaaaatataacccaaccaggaacagcaatagcagccgtcaggacataactcttgagccctcacctaccgcccgcgcggcggtacctctgcctcctagggcccgtccgggcagacctgcgaagaacaagaggcgaaaactggctccatag

SEQ ID NO: 282034 - DNA, 222 bp, Artificial Sequence
  derived and/or modified sequence
atgaacggcggcaacgagagcagcggcgccgaccgggccggcggccccgtggcaacaagcgttcccattggttggcaacgctgcgtgcgggagggagctgtgttgtacatttcaccatcgggcacggaactttcttcactggagcagactcggtcttaccttctgtccgatgggacatgcaagtgcgggcttgagtgcccactgaacgtgcctaaggtctag

SEQ ID NO: 282035 - DNA, 447 bp, Artificial Sequence
  derived and/or modified sequence
atgaacggcggcaacgagagcagcggcgccgaccgggccggcggcccagtggctactagcgttccaatcggctggcagaggtgcgtgcgcgaaggcgctgtgctgtacatatctcctagcggaactgaactctcttccctggagcagacgaggtcttatcttctcagcgatggcacatgtaagtgtgggctggagtgcccgctgaatgttcccaaggtgtttaacttcgatccacttgcgccagtgacacctgggggtgctggagtcggacccgcaagcgaagaggacatgacaaagctgtgcaatcaccggaggaaggcagtcgccatggccactctgtacaggtctatggagaccacatgctcgcatagcagcccgggggagggcgcctcaccacagatgttccatactgtgtcccccggccctccaagcgcaaggccgccctag

SEQ ID NO: 282036 - DNA, 1245 bp, Artificial Sequence
  derived and/or modified sequence
atgctaggcgctctgcccttgcctctgtctttgggtcagccgcctccatctccactactgaatcactctcttttcggggtcctgaccggaggcggtggtcagcccccaccagagccattgttgccaccaccaggtggccctggaccgccactagccccaggagagccagaggggccttctttgcttgtggcctcactcctgcccccacccccttctgatttactgccacccccaagcgcccctccttccaaccttctcgctagtttcctaccgttacttgccctgggccctaccgcaggagatggcgaaggatcagccgagggcgcaggtggccctagcggtgagccgttttccggcctcggcgaccttagccccctgctgtttcccccactgtctgctccccctacccttatcgctctcaattctgctctactcgccgcaactctagaccccccatcaggcactcctccacagccctgtgtcctgtccgcgcctcagccaggcccaccaacaagttctgtgacaactgctacaactgaccccggagcctcctccctgggcaaggccccatctaattcaggacggccaccgcaactcttgagtccgctcctcggtgcctcattgctgggagatctttccagtctcacctcttcccccggagcgctgccctccctcctgcagcctcctggtccactgctgtccggtcaactgggactgcagttacttccagggggaggcgctcctcctcctctgtctgaggcatccagcccactcgcctgcttactacagtcactgcagatcccacctgagcagccggaggcaccttgcttaccccctgagtctccggcttcagccctggagcccgagcctgccaggcctccgctaagtgcactagcccctccacatggatcaccggatccacctgtacctgaactcctcaccgggagaggatccggtaaacgcggacgtcgaggcggaggtggactgcggggaatcaacggtgaggcgcgacctgctcgtggaagaaaacccggatcaaggcgcgaacctggcagactggccctcaaatggggcaccagaggagggtttaatggccagatggagcggcaggaagaacctaccatcggctccatcatggggagctggcttaaaggggtactgtcccctcggattcacccactaccgggacccattttgaggacacttcgttgtcccagcagccagaaagtgtcatcatggccgtag

SEQ ID NO: 282037 - DNA, 3012 bp, Artificial Sequence
  derived and/or modified sequence
atgaacgggggaaacgagtcatctggcgctgaccgggcagggggtcctgtggctaccagtgtaccgattggatggcaacgatgtgtgagggagggggcagtgctttatatcagccccagtggcaccgaactgtcttcactggagcagacacgcagttacctgctgtctgatggcacttgtaagtgtggactggagtgtccacttaatgtgcctaaggtgtttaattttgatcctttagcacccgtcacacctggcggagcgggagttggtcccgcttctgaggaggatatgaccaaactttgcaaccatagacgcaaagccgtggccatggctaccctgtaccggtccatggagacaacatgttcccacagctctcctggagagggcgcaagtcctcagatgtttcacacagtcagtcccggtcctccatccgctcggccaccctgccgcgtgcctccaactacaccactgaatggaggtcctggttccctgcctcctgaacctccaagcgtgtcccaagcctttcctaccctggctggacccggaggactgttcccccctcgcctggcggaccccgtgcctagcggaggttccagctcgccgcgttttttacccaggggcaacgcacctagtccagcgccaccccctccgcctgcaatttcccttaatgccccttcctataactggggggctgcactgagaagcagccttgtgccaagcgacctcggcagccccccagcccctcacgcttcctcctcgccgcctagtgatcctcctttgttccattgttctgacgctttgaccccaccccctctcccaccctctaacaatctcccagctcaccccggacccgcttcacagccaccagtctccagtgctactatgcacctgcctctcgtcctcgggcctctaggcggagccccaactgtagaaggcccaggagcaccgcctttcttggcaagcagtctgctgtctgccgcagcaaaagcacagcatccgccactccctccgccatctaccctccagggccgacgacccagggcacaggcaccaagtgctagtcattcatcctcactcaggcctagccagcgaagacccaggcgtcccccaaccgtctttcgcctcttggagggtagagggccacagacgccacgccgatctcggccaagggctcccgctcccgtacctcagccgttctcccttcccgaacctagccagccgattttgccttctgtgttgagcttactaggactgccaacacctggcccatcccatagcgatggctcttttaacctgttggggagcgacgcgcacctgccacctccacctacactcagtagcggttccccgcctcagcccagacaccctatacagccctcactgcccggaacaacgagcggatccttaagttccgtcccaggggcacctgccccacctgccgcttctaaggcacctgtggtgccctctccagtattgcaatcacctagcgaagggttgggcatgggagccggtcccgcatgtcccttgcctcccctggccggaggagaggcttttcctttcccttcacctgagcaggggttggctctatcaggagcaggcttccccggaatgctcggtgctttaccactgccactgagcctcgggcagccacccccatcccctctcctgaatcatagcctgtttggtgtgctgaccgggggtggtgggcagccccctcctgagcccctgcttcctcctccgggaggacccggaccgccactggctccaggcgagccggaaggacccagcctgttggtggccagcctgctgcccccacctccttccgacctgctaccaccaccaagcgcgccacctagcaatctgctggcttcattcttgcctctgctggctctggggcctaccgctggcgacggcgaagggagcgcagagggcgcaggtggtcccagtggagagcctttttccgggctgggagatctgagccctctcctcttccccccactttccgcgcctccaacactgattgccttaaacagcgctcttctggccgctactttggacccaccctccgggacaccaccacagccatgtgtgcttagtgctccacagcccggtccaccgacctcatcagtaaccacagcgaccaccgacccgggtgctagtagcctcggaaaggctccaagcaatagcgggaggccccctcagctcctgtcacccctcctgggggcaagtttactcggagacttgtccagcctcacctcaagcccgggagcacttccctccctgttgcagccccctgggcctttgctgtctggacagctcgggttgcagctgctccccggtggcggagcgcctcccccactttccgaggcctcttctccccttgcctgtctgctgcagtctctccagatcccgcctgaacagccagaagctccatgtcttcctcccgagagccccgcttccgcattggagcccgaaccagcccgtcccccactgagcgccctcgcgccaccgcacggaagccccgacccgccagtgccggagctgctgacaggcaggggcagtggaaaaagggggaggcggggaggcggtggcctgcgaggcattaatggagaagcccgtcctgccagaggccgtaaacctgggtccaggagagaaccagggagactggctctcaaatggggaacaaggggtggctttaacggccagatggagcgcagccctaggcgcacgcatcactggcaacataacggtgaactcgccgagggcggagcagagcctaaagaccctcctccccctggtccgcactcagaagacctgaaggtccccccaggagtggtgcggaagtcccggagaggaagacgcagaaaatacaatccgactcgcaatagcaactcctcccgacaggatatcaccctcgaaccgtcaccaaccgcaagggcagcagtgcctctccctcctcgcgcacgaccgggaaggcctgcaaagaataagaggagaaagctggccccatag

SEQ ID NO: 282038 - DNA, 3012 bp, Artificial Sequence
  derived and/or modified sequence
atgaacggtgggaatgagagtagcggtgctgatagagccggtggccctgtggccacctcggttcccatcgggtggcagcgttgcgttcgggagggcgcagtcttgtatatctctcctagtggaacagagctcagctcactggagcagacgcgttcttacctgttgtccgacggcacttgtaaatgcgggctggagtgccctcttaacgtcccaaaggtgttcaatttcgaccctctcgcccctgtaacgccaggcggagccggtgtgggtccagctagcgaggaggatatgactaagctttgcaatcatagaaggaaagctgtagcaatggccaccttatatcgcagcatggagaccacctgcagccattcctctcccggagagggggctagcccgcagatgttccacactgtgagccctggacccccatctgccagacctccttgccgcgttccccctaccacgcctctgaacggagggcctggctcactcccccctgagccaccatcagtctcgcaggccttcccaaccctggccggtccaggagggctgttcccccctagactggctgaccccgtgcctagcggcggttctagcagtccaagatttttgcctagaggcaatgcaccgtcacctgcaccccctcctccccctgccatatccctgaacgcgccatcttataactggggcgcagccctgcgaagcagcttggtgccatccgatctgggctccccgccagccccacacgccagcagctcacctccttcggaccctcccctgtttcattgctccgatgcgctgacccctcctcctctgccaccgtccaataacctgccagctcatccagggccagcgagtcagccacctgtcagctcagccacaatgcatctgccgttagtcctgggcccactcggcggagcaccgacggtagaaggtcctggagcccctccctttctcgcctcctcactcctgtccgccgcagccaaagcacagcacccccctttaccaccccctagtaccctgcagggcaggagacccagggcgcaggcacccagcgccagccatagctcgtctctcaggccatcccagagacggccacggagacccccaactgttttcagattactcgagggtcggggaccccagacacctcggagatccaggcccagggctccagctcccgtgccccagccattttcattgcccgaacccagtcagccgatcctaccctcagtgctctctctgctgggccttccaaccccgggaccatcacactccgacgggagctttaatctcttgggaagcgacgcgcacctgccaccaccacccaccctttcctcaggatccccaccacagccgagacacccgatacagccttccttgccaggcactaccagcggctccctctcgtcagtcccaggggctcctgccccaccagcagcttccaaagctcctgtagtcccaagtccagtgctgcagagcccatctgagggactgggaatgggtgcaggcccagcctgccccctgccccctctggcgggaggagaggctttcccgtttcctagtccagagcaggggctcgcactgtctggcgctggctttcctggaatgctcggagcgttgcccttgcctctttccctcggtcagccacctccatccccgctgttgaatcattctttgtttggggtcttgacagggggaggagggcagcccccacctgagcctctgctgcccccacccggaggccctggcccaccgctggctccgggagagccagagggtccatcacttctcgtggcatctctgttacctccgcctccgtcagatcttctgcctccgccatcagcccctccgagcaacttgctcgcctcctttcttccgttactcgcacttggccctactgcgggagatggagaaggctccgccgaaggcgcaggcggtcccagtggcgagccctttagcggcctgggagatctctcgcccttgctgtttcctccattgagcgcgcctccaactctaattgctttgaactcagccctactcgctgcgacactcgatccaccgagcggaacacccccacaaccatgcgtcctctccgctccacagcctggtcctccaacttcttccgtcacaactgccacaactgatcccggagcatcgagtcttggtaaggccccatctaactcaggccgacccccacagctactgtccccgctattgggagcttctttgctgggggatctctcttccctaacctcttcccctggggctctaccctcactgttgcaaccacctggccctctactgtctggacaacttggcctgcaactgttgcctggtggcggtgctcctccacccctatctgaagcctccagcccgcttgcttgcttattgcagtctctgcagatcccaccagagcaacctgaggctccatgtcttccaccggagtcccccgcatcagcactggagcctgaacctgctaggccccctctgagcgcgctggcaccgcctcacggcagcccagatcccccagtgcctgagctcctcacgggcagggggtctggaaaacgaggcaggcgcggaggcggtggcctaagaggtattaacggagaagctaggcctgcacggggtcggaaacctggaagtcgacgggagcccggaaggctcgcacttaaatggggaaccagaggcggatttaacgggcagatggaaagatctccacgccgtacacatcattggcagcacaatggtgaactggccgaaggtggcgctgagccaaaagacccaccacctccgggaccgcattcggaggaccttaaggtaccaccaggcgtggtgcgcaaatctagaaggggacgtagacgcaaatataacccgactagaaatagcaacagttctcgccaggatatcacattagaaccatcaccaacggctcgcgctgctgtgccactgccccctagagcgcgtcccggtcgcccagcaaaaaacaaacgtcgtaagcttgcgccttag

SEQ ID NO: 282039 - DNA, 222 bp, Artificial Sequence
  derived and/or modified sequence
atgaacggcggaaatgagtcaagcggcgcagatcgggcaggtggccctgtggcaacatctgtgcctataggctggcagcggtgtgtgcgagaaggcgctgtgttatacatctcaccaagcggtacagagctgtccagtctggaacagacgcgctcctatctgttgtctgatggcacttgtaagtgcgggttggagtgccctctcaatgtcccgaaggtgtag

SEQ ID NO: 282040 - DNA, 447 bp, Artificial Sequence
  derived and/or modified sequence
atgaacggaggcaatgagtcctcaggagcggatcgcgctggaggccctgtagccactagtgtaccaatcggctggcagaggtgtgtgagagaaggcgctgtgttgtacatttctccttccgggaccgagctcagcagtcttgagcagacccggagttatctactgtctgacgggacctgtaaatgcggactagagtgtccactgaatgttcccaaggttttcaacttcgatcccttggcccctgtgacacctgggggagccggagtaggtcccgcttcagaagaggacatgacaaaattatgtaaccaccgcagaaaagcggtcgccatggctacactataccgctcgatggagactacatgttctcattcttcacccggtgagggggctagccctcagatgttccataccgtatcccctggaccaccaagtgcgaggcctccatag

SEQ ID NO: 282041 - DNA, 1245 bp, Artificial Sequence
  derived and/or modified sequence
atgctgggcgccctgcccctgcccctgagcctgggccagcccccccccagccccctgctgaaccacagcctgttcggcgtgctgaccggcggcggcggccagcccccccccgagcccctgctgcccccccccggcggccccggcccccccctggcccccggcgagcccgagggccccagcctgctggtggccagcctgctgccccccccccccagcgacctgctgcccccccccagcgccccccccagcaacctgctggccagcttcctgcccctgctggccctgggccccaccgccggcgacggcgagggcagcgccgagggcgccggcggccccagcggcgagcccttcagcggcctgggcgacctgagccccctgctgttcccccccctgagcgccccccccaccctgatcgccctgaacagcgccctgctggccgccaccctggacccccccagcggcacccccccccagccctgcgtgctgagcgccccccagcccggcccccccaccagcagcgtgaccaccgccaccaccgaccccggcgccagcagcctgggcaaggcccccagcaacagcggcagacccccccagctgctgagccccctgctgggcgccagcctgctgggcgacctgagcagcctgaccagcagccccggcgccctgcccagcctgctgcagccccccggccccctgctgagcggccagctgggcctgcagctgctgcccggcggcggcgcccccccccccctgagcgaggccagcagccccctggcctgcctgctgcagagcctgcagatcccccccgagcagcccgaggccccctgcctgccccccgagagccccgccagcgccctggagcccgagcccgccagaccccccctgagcgccctggcccccccccacggcagccccgacccccccgtgcccgagctgctgaccggcagaggcagcggcaagagaggcagaagaggcggcggcggcctgagaggcatcaacggcgaggccagacccgccagaggcagaaagcccggcagcagaagagagcccggcagactggccctgaagtggggcaccagaggcggcttcaacggccagatggagagacaggaggagcccaccatcggcagcatcatgggcagctggctgaagggcgtgctgagccccagaatccaccccctgcccggccccatcctgagaaccctgagatgccccagcagccagaaggtgagcagctggccctag

SEQ ID NO: 282042 - DNA, 3012 bp, Artificial Sequence
  derived and/or modified sequence
atgaacggcggcaacgagagcagcggcgccgacagagccggcggccccgtggccaccagcgtgcccatcggctggcagagatgcgtgagagagggcgccgtgctgtacatcagccccagcggcaccgagctgagcagcctggagcagaccagaagctacctgctgagcgacggcacctgcaagtgcggcctggagtgccccctgaacgtgcccaaggtgttcaacttcgaccccctggcccccgtgacccccggcggcgccggcgtgggccccgccagcgaggaggacatgaccaagctgtgcaaccacagaagaaaggccgtggccatggccaccctgtacagaagcatggagaccacctgcagccacagcagccccggcgagggcgccagcccccagatgttccacaccgtgagccccggcccccccagcgccagacccccctgcagagtgccccccaccacccccctgaacggcggccccggcagcctgccccccgagccccccagcgtgagccaggccttccccaccctggccggccccggcggcctgttcccccccagactggccgaccccgtgcccagcggcggcagcagcagccccagattcctgcccagaggcaacgcccccagccccgcccccccccccccccccgccatcagcctgaacgcccccagctacaactggggcgccgccctgagaagcagcctggtgcccagcgacctgggcagcccccccgccccccacgccagcagcagcccccccagcgacccccccctgttccactgcagcgacgccctgacccccccccccctgccccccagcaacaacctgcccgcccaccccggccccgccagccagccccccgtgagcagcgccaccatgcacctgcccctggtgctgggccccctgggcggcgcccccaccgtggagggccccggcgccccccccttcctggccagcagcctgctgagcgccgccgccaaggcccagcacccccccctgcccccccccagcaccctgcagggcagaagacccagagcccaggcccccagcgccagccacagcagcagcctgagacccagccagagaagacccagaagaccccccaccgtgttcagactgctggagggcagaggcccccagacccccagaagaagcagacccagagcccccgcccccgtgccccagcccttcagcctgcccgagcccagccagcccatcctgcccagcgtgctgagcctgctgggcctgcccacccccggccccagccacagcgacggcagcttcaacctgctgggcagcgacgcccacctgccccccccccccaccctgagcagcggcagccccccccagcccagacaccccatccagcccagcctgcccggcaccaccagcggcagcctgagcagcgtgcccggcgcccccgccccccccgccgccagcaaggcccccgtggtgcccagccccgtgctgcagagccccagcgagggcctgggcatgggcgccggccccgcctgccccctgccccccctggccggcggcgaggccttccccttccccagccccgagcagggcctggccctgagcggcgccggcttccccggcatgctgggcgccctgcccctgcccctgagcctgggccagcccccccccagccccctgctgaaccacagcctgttcggcgtgctgaccggcggcggcggccagcccccccccgagcccctgctgcccccccccggcggccccggcccccccctggcccccggcgagcccgagggccccagcctgctggtggccagcctgctgccccccccccccagcgacctgctgcccccccccagcgccccccccagcaacctgctggccagcttcctgcccctgctggccctgggccccaccgccggcgacggcgagggcagcgccgagggcgccggcggccccagcggcgagcccttcagcggcctgggcgacctgagccccctgctgttcccccccctgagcgccccccccaccctgatcgccctgaacagcgccctgctggccgccaccctggacccccccagcggcacccccccccagccctgcgtgctgagcgccccccagcccggcccccccaccagcagcgtgaccaccgccaccaccgaccccggcgccagcagcctgggcaaggcccccagcaacagcggcagacccccccagctgctgagccccctgctgggcgccagcctgctgggcgacctgagcagcctgaccagcagccccggcgccctgcccagcctgctgcagccccccggccccctgctgagcggccagctgggcctgcagctgctgcccggcggcggcgcccccccccccctgagcgaggccagcagccccctggcctgcctgctgcagagcctgcagatcccccccgagcagcccgaggccccctgcctgccccccgagagccccgccagcgccctggagcccgagcccgccagaccccccctgagcgccctggcccccccccacggcagccccgacccccccgtgcccgagctgctgaccggcagaggcagcggcaagagaggcagaagaggcggcggcggcctgagaggcatcaacggcgaggccagacccgccagaggcagaaagcccggcagcagaagagagcccggcagactggccctgaagtggggcaccagaggcggcttcaacggccagatggagagaagccccagaagaacccaccactggcagcacaacggcgagctggccgagggcggcgccgagcccaaggacccccccccccccggcccccacagcgaggacctgaaggtgccccccggcgtggtgagaaagagcagaagaggcagaagaagaaagtacaaccccaccagaaacagcaacagcagcagacaggacatcaccctggagcccagccccaccgccagagccgccgtgcccctgccccccagagccagacccggcagacccgccaagaacaagagaagaaagctggccccctag

SEQ ID NO: 282043 - DNA, 222 bp, Artificial Sequence
  derived and/or modified sequence
atgaacggcggcaacgagagcagcggcgccgacagagccggcggccccgtggccaccagcgtgcccatcggctggcagagatgcgtgagagagggcgccgtgctgtacatcagccccagcggcaccgagctgagcagcctggagcagaccagaagctacctgctgagcgacggcacctgcaagtgcggcctggagtgccccctgaacgtgcccaaggtgtag

SEQ ID NO: 282044 - DNA, 447 bp, Artificial Sequence
  derived and/or modified sequence
atgaacggcggcaacgagagcagcggcgccgacagagccggcggccccgtggccaccagcgtgcccatcggctggcagagatgcgtgagagagggcgccgtgctgtacatcagccccagcggcaccgagctgagcagcctggagcagaccagaagctacctgctgagcgacggcacctgcaagtgcggcctggagtgccccctgaacgtgcccaaggtgttcaacttcgaccccctggcccccgtgacccccggcggcgccggcgtgggccccgccagcgaggaggacatgaccaagctgtgcaaccacagaagaaaggccgtggccatggccaccctgtacagaagcatggagaccacctgcagccacagcagccccggcgagggcgccagcccccagatgttccacaccgtgagccccggcccccccagcgccagacccccctag

SEQ ID NO: 282045 - DNA, 2541 bp, Artificial Sequence
  derived and/or modified sequence
ggcactgactgggtcactggtgaagttccccgcaggaactgagtcagaccccatctcagggccctgcacaagataggtacctgctctaaggcgtggaccctcgccacagccctggcccgtcttgacgggcgagggttactgtacttgtcccaaccgtacagatgagaaagctgagactcagggccagcaacccgggtcccagcggagcgcccggcacgcgccaacacttcagcaccagtcgcggtggccaccactgtgcgcggagatggctgcgacgcgtgcgcagatctcgatcccaaactccctcctaccagaatctggacccgaatccacccattgtccgttttccgctgccgctggagagaatctctgaggtccccaggagagcctgcctgcacggaagagacgcctcctcggtatggccgcccccggagaggagcgattaagtgcagacctccatgttgctcttgagcctgagcggcttcagggagccatgtttgttactggcgggcgccgacctcactgagcatgtgcagccctggccgggcggcctcaaagttctgacatcacagggcggttcctgaagtggacatagttgtaagagctagttattttagacaatgcctctgtgatcagggactctaatctggaaataggtagtcggagaggtcggtgatgcagtctctggatcagagacctgagctatatggggttagagaggggccctgggcaggcgagtctctggggagtgtggtgagaatccttgtgtaagatgctgggaggaggtggggtcagggctggggtccgtgggccgacgggttgggggatggccagcgtcagggatcagtagtagagattctatgtgccctgatcgccagtggaggttttaaatacagagtattcatgagtttagcaatgttattcgcctctcattatttaaataatttgaagttttccccaataactagtgtcttagaagtcatgaaaatttcagaaaatgacaggtcttctgagttcatgatgggagttgggcagcagtcgcatacgagcacctggagagtccttgccagttctttggggatggggagctcttaagactgccctgagaccgccctttgacctcattgtggtcctttctagattaaatgctgttttccatgaccgtctctgttcttcccatacgcgaatggcaggcattcagatctccaagaatagaggattaggagagactccaccacctatgtcctcacagttaattatcgatttgtgtcagttgcccattttctcacttcctgtttgtgtgtcaaggggtattaataaatctttgcctatttaaagatattagccttggattttcaaatattgcatattttgacatgtaaaaatttgttagttttattttttcaaccgatctgacctgtatagttgggcttgaggaagcttcctcattctacatgttactatggattttctaatattaacacagggttgtattttttccatataactttctattgaatttctttttccatatgataggtggtgaaggtttagcccagtaaagcagagaggttaagaggttagattgggggctctggagccagacctgtgtagatctgagtcctggctctggcacttgaaagccgtgtgaccttggttaagatacttagtccctctctgccaaatggagaaataagggcacctaccccatagggtagttgtgtgattacacaagttaatacacttcaatcagtagcaagaaagtgaatgtcaagctgtatttgttcaggcagccatatggtagccccacgtccttagtaaactgaggtattgaagtatcttctttttctttcagaaaatatttgtcaagcaccttctgtgttcaaagaactgttctagagctttacatgctatggaggtctagaaattcacattatggtggcaggtgacagacaatacaaagagataaagcaattttatatagtgataagctagggaggagtgctaaaaggagccaaggtgtagtggtgactggaaggtgaccagggaaaccactgtagggtttctaagtgatgagatctgtgacaaatccctgtggtcagcagcaggcattggatatgtaactttattctgtcccattgatcttgtagtcaaccctggtctgttctgtattgttttaattacataatctttgtaataatctttaatacctggtggagtgctctgtttacttatttctgcgtaattaaccacccctaagcttaacttactcatggttctgcagggtgactgctctccatggttctaggtggttctgcatggggcctctcacatgtgctacagtcaaacattagccggggccacagtcatctgaaactcacttacatggctgacaattgatgttggctgttgcctggagaagacatatgtggcgtggtggaatggaatggtgactagattcaagaaagagcttcccaggaggaaggctaccaagagaccgaagtagaggcttcagtttcttaaaaaaaaaaaaaaaaaaaa

SEQ ID NO: 282046 - protein, 53 aa, Artificial Sequence
  derived and/or modified sequence
MEGGLADGEPDRTSLLGDSKDVLGPSTNSDESQLLTPGKMSQRQGKEAYPTPT

SEQ ID NO: 282047 - DNA, 162 bp, Artificial Sequence
  derived and/or modified sequence
atggagggggggctcgcagatggagaacccgaccgcactagtctgctgggcgatagcaaagacgtgctgggaccgagcacaaattctgatgaatcacagctgctcactccgggcaagatgtcccagcgccagggtaaggaggcataccccactcctacctag

SEQ ID NO: 282048 - DNA, 162 bp, Artificial Sequence
  derived and/or modified sequence
atggagggcggcctggctgatggagagccagacaggaccagcctgctgggggacagcaaggatgtgctgggccccagcaccaacagtgatgagagccagctgctgaccccaggcaagatgagccagaggcagggcaaggaggcctaccccacccccacctag

SEQ ID NO: 282049 - DNA, 162 bp, Artificial Sequence
  derived and/or modified sequence
atggagggcggcctggccgacggcgagcccgaccggaccagcctgcttggagattccaaggacgtgctaggaccaagcacgaatagtgatgaatcccagctgctaacgccaggcaaaatgtctcagagacagggaaaagaagcctacccaacacccacatag

SEQ ID NO: 282050 - DNA, 363 bp, Artificial Sequence
  derived and/or modified sequence
gagaagttggggtctgactagacgcttacggggcctcggaccccggcgccgcggcgacctcggaggaaccggctccttgcgtcccgcctccctgggagctccgcacggcaatctccattggtgctactgcgtttaaaggatttgcagatttacagaatggctgcacattaatggaaagagaagcataaacctatcttctttcattatggagggaggtttggcagatggagaacctgatcgaacttcgcttcttggtgatagcaaagatgtccttgggccatcaacaaacagtgacgaatctcagcttctgacaccaggaaagatgagtcagcgccaaggaaaagaagcttatccaacgccaac

SEQ ID NO: 282051 - DNA, 162 bp, Artificial Sequence
  derived and/or modified sequence
atggagggcggattggctgatggcgagcccgatcgcacctctcttctgggtgattctaaggatgtactggggccatccactaatagcgatgaatctcagttactcacgcctggcaagatgagtcagcggcaaggaaaggaggcctacccaaccccaacatag

SEQ ID NO: 282052 - DNA, 162 bp, Artificial Sequence
  derived and/or modified sequence
atggagggcggcctggccgacggcgagcccgacagaaccagcctgctgggcgacagcaaggacgtgctgggccccagcaccaacagcgacgagagccagctgctgacccccggcaagatgagccagagacagggcaaggaggcctaccccacccccacctag

SEQ ID NO: 282053 - DNA, 231 bp, Artificial Sequence
  derived and/or modified sequence
atggccagaggcgccgccctggccctgctgctgttcggcctgctgggcgtgctggtggccgcccccggcttcggcgacctgagactgcaggccgccagaggcggcagacccggcgtggcctgccacagccacgccctgagacccggccccaagttcggcatcgccagaagcctgagacccggctggtggggcgagggcaaggagaagctggagaagaacttcgagccctag

SEQ ID NO: 282054 - protein, 167 aa, Artificial Sequence
  derived and/or modified sequence
MHFTGAVMQENLRFASSGDDIKIWDASSMTLVDKFNPHTSPHGISSICWSSNNNFLVTASSSGDKIVVSSCKCKPVPLLELAEGQKQTCVNLNSTSMYLVSGGLNNTVNIWDLKSKRVHRSLKDHKDQVTCVTYNWNDCYIASGSLSGEIILHSVTTNLSSTPFGHG

SEQ ID NO: 282055 - protein, 165 aa, Artificial Sequence
  derived and/or modified sequence
MQENLRFASSGDDIKIWDASSMTLVDKFNPHTSPHGISSICWSSNNNFLVTASSSGDKIVVSSCKCKPVPLLELAEGQKQTCVNLNSTSMYLVSGGLNNTVNIWDLKSKRVHRSLKDHKDQVTCVTYNWNDCYIASGSLSGEIILHSVTTNLSSTPFGHGSNQSV

SEQ ID NO: 282056 - protein, 667 aa, Artificial Sequence
  derived and/or modified sequence
MHFTGAVMQENLRFASSGDDIKIWDASSMTLVDKFNPHTSPHGISSICWSSNNNFLVTASSSGDKIVVSSCKCKPVPLLELAEGQKQTCVNLNSTSMYLVSGGLNNTVNIWDLKSKRVHRSLKDHKDQVTCVTYNWNDCYIASGSLSGEIILHSVTTNLSSTPFGHGSNQSVRHLKYSLFKKSLLGSVSDNGIVTLWDVNSQSPYHNFDSVHKAPASGICFSPVNELLFVTIGLDKRIILYDTSSKKLVKTLVADTPLTAVDFMPDGATLAIGSSRGKIYQYDLRMLKSPVKTISAHKTSVQCIAFQYSTVLTKSSLNKGCSNKPTTVNKRSVNVNAASGGVQNSGIVREAPATSIATVLPQPMTSAMGKGTVAVQEKAGLPRSINTDTLSKETDSGKNQDFSSFDDTGKSSLGDMFSPIRDDAVVNKGSDESIGKGDGFDFLPQLNSVFPPRKNPVTSSTSVLHSSPLNVFMGSPGKEENENRDLTAESKKIYMGKQESKDSFKQLAKLVTSGAESGNLNTSPSSNQTRNSEKFEKPENEIEAQLICEPPINGSSTPNPKIASSVTAGVASSLSEKIADSIGNNRQNAPLTSIQIRFIQNMIQETLDDFREACHRDIVNLQVEMIKQFHMQLNEMHSLLERYSVNEGLVAEIERLREENKRLRAHF

SEQ ID NO: 282057 - DNA, 1983 bp, Artificial Sequence
  derived and/or modified sequence
atgcaggaaaatctgaggttcgccagcagcggcgacgatataaagatctgggacgccagttctatgactctggtggataaatttaatccccatactagtccgcatggcataagctccatctgctggtcctcgaataataatttccttgtaacagcttctagcagcggggacaagatcgtggtgtcaagttgtaaatgcaaaccagttcccctcctggagctggcagagggacaaaaacagacctgcgtgaatctgaattctaccagtatgtatttggtgtccggcggacttaacaatactgttaatatctgggatctgaagtctaaacgcgtacatcggtccctcaaggaccacaaggaccaggtgacctgcgtcacttataattggaacgattgttacattgcctccggttcattatccggggaaatcatcctgcattcagtaaccacaaacctgagttcgacaccttttggccacggctctaatcagagcgtccggcacctgaaatattctctgttcaagaagtcccttctgggaagcgttagcgacaacgggatcgtgaccctctgggacgttaactctcagagtccctatcataactttgactccgtgcacaaggctcctgcgtccggaatttgcttcagcccagtgaatgagctcttattcgtgaccatcggcctcgacaaacgcattatactgtacgacacatcttctaagaagttagtgaagacgctggtggctgatacaccccttacagcagtggatttcatgccagacggagcaacactggctatagggtcgagtcgagggaagatttaccaatatgacctgcgaatgctgaagtctccagtcaagaccatctcagcacacaaaactagtgtgcagtgcatcgcattccagtatagcaccgtgctgaccaaatcctcacttaataagggctgtagcaacaaacctacaaccgtgaacaagcgaagcgtgaacgttaacgcagcgagcggcggtgttcagaactccgggatcgtgcgcgaagcacccgctaccagcatcgctacagtgctgccccagccgatgacctctgcgatggggaaagggactgtggcagttcaggagaaggctgggcttcctcgcagcattaacaccgataccctctctaaggagaccgactctggaaagaatcaagacttcagcagctttgatgatacggggaagtcttccctcggtgatatgttttcacctataagagatgatgccgtggtcaacaaggggagcgatgaatcgatcggaaaaggcgatgggttcgatttcctcccacaactgaattcggtgtttcccccgagaaagaaccctgtgacaagctcgacatcggttttacattcaagtccacttaacgttttcatggggagtcccggaaaagaggaaaacgagaaccgtgacctgactgccgagtccaaaaagatatatatgggaaagcaagagtcaaaagactcgttcaagcagttggctaagctcgtgactagtggcgccgagagtggaaatctcaataccagcccctcatctaaccagaccagaaactccgagaagttcgagaagccagagaatgagattgaggctcagctgatttgcgagccacctataaacgggtccagtactccgaatcccaaaatcgcctctagcgtaacagccggggttgcttcttctttaagcgagaaaattgcggattcaatcggtaataaccgccagaacgcccccctaacctccatacagatcaggtttatccagaatatgatacaggagactctcgacgattttagagaagcatgtcaccgcgatatcgtgaatctccaggtggaaatgattaagcaatttcatatgcagttgaatgagatgcactcacttctcgagagatacagcgtgaatgagggtctggtcgccgagatcgaaaggttgcgcgaggagaataagaggctccgggcgcacttttag

SEQ ID NO: 282058 - DNA, 1983 bp, Artificial Sequence
  derived and/or modified sequence
atgcaagagaacctccgcttcgcaagttctggagacgacatcaagatctgggacgcttcatctatgactctcgtagataaattcaatccccatactagcccccatggtatttcttccatttgctggtcctcaaacaataatttcctcgtgacggcaagttctagcggggataagatcgtcgtgagctcctgtaagtgtaagccagtgcccctgctggagctggctgaaggccagaaacaaacgtgcgtgaatctgaacagtacctctatgtacctagtaagcgggggcctaaataatacagtgaacatctgggacctcaagagtaagagggtccaccggtcactgaaggaccataaagaccaggtgacgtgcgtgacctacaattggaatgactgctatatagcctccggctcccttagtggggagattattttacacagcgttactactaacctatcatcaaccccatttggccatggttctaatcaatcagtccggcatttgaaatatagcctgttcaagaaatcactcctgggttcggtgtccgacaacggtatcgttaccctgtgggatgtcaatagccagagcccgtaccacaacttcgattctgttcacaaggcaccagctagtgggatatgcttctccccggtgaatgagctactttttgtcactatcgggttagacaaacgcataattctgtatgacacatcatcaaaaaaacttgtcaagacactggtcgccgatacgccccttactgccgtcgacttcatgcctgacggggcaactttggccatcggcagcagccggggaaagatctaccaatacgatctgagaatgctgaaatccccagtcaaaacaataagcgctcataaaacgtccgtccagtgtatcgcatttcagtactcaaccgtgctgacaaagagctccctgaataagggatgctccaacaaacctaccaccgtgaataaaaggagcgttaacgtgaacgccgctagcggaggagttcagaattctgggattgtgagagaggctcctgcaacaagcatcgcaacggtgctaccacagcccatgactagcgcgatgggcaagggcacagtcgccgtgcaggaaaaagccgggctgcctaggtcgataaatacagatactctcagtaaggaaacagatagtggtaagaatcaggatttctcgagttttgacgacactgggaaatcatccctgggtgacatgttctcacctatcagagacgacgcagtggttaacaaggggagcgacgagtctattgggaaaggagacgggtttgacttcctcccgcaactcaactctgtctttcctcctaggaagaaccccgttacaagttccacctctgtgcttcatagtagcccactgaatgtgttcatgggtagtcctggcaaggaagaaaacgaaaatcgcgatctcaccgccgagagcaagaagatttacatggggaagcaggagagtaaggattctttcaaacagctggccaagctcgtgacctcgggcgccgaatctggcaatctgaacacaagccccagctctaaccaaacacggaattccgaaaagttcgaaaagcccgaaaacgagatagaggctcagttgatatgcgaaccgcccatcaacggttcttccactcccaatcctaaaatcgcttcatctgtaaccgctggggtggcgagtagtttatccgaaaagatcgccgacagtataggaaataataggcaaaacgccccgcttactagcatacagatcagattcattcagaacatgattcaggagaccttggatgactttcgtgaggcttgtcaccgagatatcgtgaatctccaggttgaaatgatcaagcagttccacatgcaactgaacgaaatgcactctctcttggaacgctattcggtaaacgaaggcctggttgccgagattgaaaggcttagggaagagaataaacgcctgcgcgctcacttttag

SEQ ID NO: 282059 - DNA, 504 bp, Artificial Sequence
  derived and/or modified sequence
atgcacttcacgggggctgtcatgcaggagaatctccggttcgcatctagcggagatgacattaagatctgggacgccagtagcatgaccttggtggacaaatttaacccacatacatccccacacggcattagcagtatatgctggtcctcgaacaacaacttcctggtgaccgcgagctcctccggcgacaagattgtggtctcatcttgcaagtgcaagccagtaccactcctggagttggccgagggtcaaaagcagacatgcgttaatctgaattctacgtcaatgtacctcgtgtccggcgggctgaacaataccgtgaacatctgggatctcaagtccaaacgagttcataggtcattgaaagaccacaaggatcaggtgacgtgcgttacctacaactggaacgactgctatattgcctctggatccttgtccggagagataatcctgcatagcgtgaccactaatctgtcatccaccccttttgggcatggctag

SEQ ID NO: 282060 - DNA, 2004 bp, Artificial Sequence
  derived and/or modified sequence
atgcattttacaggagccgttatgcaggagaatctgagatttgcgtcctccggggacgacatcaagatttgggacgccagctcaatgaccttagtggacaagtttaacccacatacctctccccatggcattagctctatctgctggtccagtaataacaactttttggtgactgctagctctagcggcgataagattgtagtctccagctgtaagtgcaaacccgtgcccctcctagagctggctgagggccagaagcagacttgcgtcaacctaaactcgacatctatgtatctcgtgtctggaggactaaataacaccgtgaatatttgggacttaaagagtaagcgggtccaccggtctttgaaggaccataaagaccaggtcacctgcgtgacatacaactggaacgattgctacattgcctcaggatcactaagcggtgaaataatcctgcattccgttaccactaatctctcttccacgcctttcggacatggcagcaaccaatccgtgcgccaccttaaatactctctgtttaagaaatccctgctcggctcggtgagtgacaacggtatcgtgaccctttgggacgtcaatagtcaaagcccctatcataacttcgactccgttcacaaagcacccgccagtggcatctgtttcagtccagtgaacgagctgctgtttgttactataggactggataaacgcataattctgtatgacactagcagcaagaagttagttaaaacattggtcgccgacactccactcaccgctgtggactttatgcccgatggcgccactttggcaattggctcttcgagaggtaagatctatcagtatgatctccgtatgcttaagtctccagtcaagacaatcagtgctcacaaaacctcagtccaatgcatagcctttcagtatagtacagtgttaaccaagagctctctgaacaagggatgctcaaataaacctaccactgtcaataaaaggtcagtcaacgtcaacgctgcctctggcggcgtgcagaatagtggcatagtgagggaagccccggcaacctccattgctaccgtgctcccccagcctatgacgagcgcgatgggcaaaggaacagtagccgtccaagaaaaggccggcctgccccggtcgatcaatacagatacactgtccaaagagaccgacagcggaaagaaccaggacttttcttccttcgacgatacaggcaagagctctctgggagacatgttttctccaattcgggacgatgctgtagtaaacaagggtagtgacgagagtatcggaaagggcgatggttttgactttctgccccagctaaatagcgttttcccacctaggaagaaccctgtgacatctagtacctccgtgctgcacagtagccccttgaatgtgttcatgggctcccccggtaaggaggaaaatgaaaatcgggatctgacagcggagagtaagaaaatttatatggggaaacaggagagcaaggactcctttaaacaacttgccaagctggtcacctcaggggctgagtcgggaaacttaaataccagcccttcttccaaccaaactcgcaacagcgagaagttcgaaaagccagaaaacgagatcgaggcccagcttatctgcgagcccccgatcaatgggagtagtacaccgaaccctaaaatcgcaagcagcgtgaccgcaggagtggctagctcactgtctgagaaaattgccgatagcattggcaacaaccggcagaatgcaccccttacatcaatacaaatccggtttatacaaaatatgatccaggagacccttgacgactttcgagaagcatgccaccgggacattgtgaatctgcaagtagagatgattaagcaattccatatgcagctgaatgagatgcacagtctgttagaacggtacagcgtaaacgagggccttgtagccgagattgaaagattgcgagaagagaataagagactgcgcgcccacttctag

SEQ ID NO: 282061 - DNA, 1983 bp, Artificial Sequence
  derived and/or modified sequence
atgcaggagaacctgcgctttgccagcagtggagatgacatcaagatctgggatgccagctccatgaccctggtggacaagttcaacccccacaccagcccccacggcatcagcagcatctgctggagcagcaacaacaacttcctggtgacagccagcagcagcggggacaagatcgtggtgagcagctgcaagtgcaagcctgtgcccctgctggagctggccgagggccagaagcagacctgtgtgaacctgaacagcacctccatgtacctggtgtctgggggcctgaacaacacagtgaacatctgggacctgaagagcaagagggtgcacaggagcctgaaggaccacaaggaccaggtgacctgtgtgacctacaactggaatgactgctacatcgccagcggcagcctgagcggggagatcatcctgcacagcgtgaccaccaacctgagcagcaccccatttggacatggcagcaaccagagcgtgcgccacctgaagtacagcctcttcaagaagagcctgctgggctctgtgtctgacaatggcatcgtgaccctgtgggatgtgaacagccagagcccctaccacaactttgattctgtgcacaaggccccagccagcggcatctgcttcagccctgtgaatgagctgctgtttgtgaccatcggcctggacaagaggatcatcctgtatgacaccagcagcaagaagctggtgaagaccctggtggccgacacccccctgacagctgtggacttcatgccagatggagccaccctggccatcggcagcagccggggcaagatctaccagtatgacctgaggatgctgaagagccctgtgaagaccatcagcgcccacaagacctctgtgcagtgcatcgccttccagtacagcacagtgctgaccaagagcagcctgaacaagggctgcagcaacaagcccaccaccgtgaacaagaggtctgtgaatgtgaatgctgccagcggcggcgtgcagaacagcggcatcgtgcgggaggccccagccaccagcatcgccaccgtgctgccccagcccatgaccagcgccatgggcaaaggaacagtggccgtgcaggagaaggccggcctgcccaggagcatcaacacagacaccctgagcaaggagacagattctgggaagaaccaggacttcagcagctttgatgacaccgggaagagcagcctgggggacatgttcagccccatcagagatgatgctgtggtgaacaagggcagtgatgagagcattggaaaaggagatggctttgacttcctgccccagctgaacagcgtcttcccccccaggaagaaccctgtgaccagcagcacctctgtgctgcacagcagccccctgaatgtgttcatgggcagccctgggaaggaggagaatgaaaatagagacctgacagctgagagcaagaagatctacatgggcaagcaggagagcaaggacagcttcaagcagctggccaagctggtgaccagcggggctgagagcggcaacctgaacaccagccccagcagcaaccagaccagaaattctgagaagtttgagaagccagaaaatgaaattgaggcccagctgatctgtgagccccccatcaatggcagcagcacccccaaccccaagatcgccagctctgtgacagctggggtggccagcagcctgtctgagaagattgctgacagcatcggcaacaaccggcagaatgcccccctgaccagcatccagatccgcttcatccagaacatgatccaggagaccctggatgacttccgggaggcctgccaccgggacatcgtgaacctgcaggtggagatgatcaagcagttccacatgcagctgaatgagatgcacagcctgctggagcgctacagcgtgaatgaaggcctggtggccgagattgaaaggctgcgggaggagaacaagaggctgcgggcccacttctag

SEQ ID NO: 282062 - DNA, 504 bp, Artificial Sequence
  derived and/or modified sequence
atgcacttcaccggggctgtgatgcaggagaacctgcgctttgccagcagtggagatgacatcaagatctgggatgccagctccatgaccctggtggacaagttcaacccccacaccagcccccacggcatcagcagcatctgctggagcagcaacaacaacttcctggtgacagccagcagcagcggggacaagatcgtggtgagcagctgcaagtgcaagcctgtgcccctgctggagctggccgagggccagaagcagacctgtgtgaacctgaacagcacctccatgtacctggtgtctgggggcctgaacaacacagtgaacatctgggacctgaagagcaagagggtgcacaggagcctgaaggaccacaaggaccaggtgacctgtgtgacctacaactggaatgactgctacatcgccagcggcagcctgtctggagagatcatcctgcacagcgtgaccaccaacctgagcagcacccccttcggccacggctag

SEQ ID NO: 282063 - DNA, 2004 bp, Artificial Sequence
  derived and/or modified sequence
atgcacttcaccggggctgtgatgcaggagaacctgcgctttgccagcagtggagatgacatcaagatctgggatgccagctccatgaccctggtggacaagttcaacccccacaccagcccccacggcatcagcagcatctgctggagcagcaacaacaacttcctggtgacagccagcagcagcggggacaagatcgtggtgagcagctgcaagtgcaagcctgtgcccctgctggagctggccgagggccagaagcagacctgtgtgaacctgaacagcacctccatgtacctggtgtctgggggcctgaacaacacagtgaacatctgggacctgaagagcaagagggtgcacaggagcctgaaggaccacaaggaccaggtgacctgtgtgacctacaactggaatgactgctacatcgccagcggcagcctgtctggagagatcatcctgcacagcgtgaccaccaacctgagcagcacccccttcggccacggcagcaaccagagcgtgcgccacctgaagtacagcctcttcaagaagagcctgctgggctctgtgtctgacaatggaattgtgaccctgtgggatgtgaacagccagagcccctaccacaactttgacagcgtgcacaaggccccagccagcggcatctgcttcagccctgtgaatgagctgctgtttgtgaccatcggcctggacaagaggatcatcctgtatgacaccagcagcaagaagctggtgaagaccctggtggccgacacccccctgacagctgtggacttcatgccagatggagccaccctggccatcggcagcagccggggcaagatctaccagtatgacctgaggatgctgaagagccctgtgaagaccatcagcgcccacaagacctctgtgcagtgcatcgccttccagtacagcacagtgctgaccaagagcagcctgaacaagggctgcagcaacaagcccaccaccgtgaacaagaggtctgtgaatgtgaatgctgccagcggaggagtgcagaacagcggcatcgtgcgggaggccccagccaccagcatcgccaccgtgctgccccagcccatgaccagcgccatgggcaagggcaccgtggccgtgcaggagaaggccggcctgcccaggagcatcaacacagacaccctgagcaaggagacagacagcggcaagaaccaggacttcagcagctttgatgacaccgggaagagcagcctgggggacatgttcagccccatcagagatgatgctgtggtgaacaagggcagtgatgagagcatcggcaaaggagatggctttgacttcctgccccagctgaacagcgtcttcccccccaggaagaaccctgtgaccagcagcacctctgtgctgcacagcagccccctgaatgtgttcatgggcagccctgggaaggaggagaatgaaaatagagacctgacagctgagagcaagaagatctacatgggcaagcaggagagcaaggacagcttcaagcagctggccaagctggtgaccagcggggctgagagcggcaacctgaacaccagccccagcagcaaccagaccaggaacagcgagaagtttgagaagccagaaaatgaaattgaggcccagctgatctgtgagccccccatcaatggcagcagcacccccaaccccaagatcgccagctctgtgacagctggggtggccagcagcctgtctgagaagattgctgacagcatcggcaacaaccggcagaatgcccccctgaccagcatccagatccgcttcatccagaacatgatccaggagaccctggatgacttccgggaggcctgccaccgggacatcgtgaacctgcaggtggagatgatcaagcagttccacatgcagctgaatgagatgcacagcctgctggagcgctacagcgtgaatgaaggcctggtggccgagattgagcggctgcgggaggagaacaagaggctgcgggcccacttctag

SEQ ID NO: 282064 - DNA, 1983 bp, Artificial Sequence
  derived and/or modified sequence
atgcaggagaacctgcggttcgccagcagcggcgacgacatcaagatctgggatgcgtcttccatgacattggttgacaagttcaaccctcataccagcccccacggcatctcttccatttgctggagttctaacaacaactttcttgtcaccgcttcttcgtctggagataaaatcgtcgtgtcctcttgcaagtgtaagcccgtgccactgctggagctagcagaaggccagaagcagacgtgcgtgaacctgaattctacctcgatgtatctggtgtcaggcggccttaacaatactgtgaatatctgggacctgaaatctaaacgggtacatcgcagcctgaaagatcataaagatcaagtgacatgtgtgacatacaactggaatgattgttacatagcctccgggtctctctctggggagatcattttacactctgtgacaaccaacctgtcttctaccccgttcggccatggtagtaaccagagcgtgcgacatctgaagtactccttgtttaagaagtctctacttgggagcgtgagtgataatgggatcgtcacgctgtgggacgtaaactcccaaagcccctatcacaacttcgattccgtgcacaaagcacctgcgtccggcatttgtttttcacctgtcaacgaactgcttttcgtcacaattggactggacaaacggataattttgtatgatacatcctctaaaaaactagttaaaactctcgtagcggatacacccctgaccgccgtcgacttcatgcccgacggagccaccttggcaattggatcatcacggggtaagatttatcagtatgaccttagaatgttgaaatcgcccgttaaaacaattagcgctcacaaaacgagcgtacaatgtatcgcatttcagtactctactgtgctcaccaagtcatccctcaataaagggtgttctaacaagcctaccacagtgaataagcggagcgtcaatgtcaatgccgcttccggaggcgtccagaacagcggaattgttcgcgaagcccctgctacctcaattgcaactgtgctgcctcagccgatgacctctgccatgggcaagggtaccgtagccgtccaggagaaggcgggactcccaaggtccattaacactgacacactctctaaggaaacagatagcgggaaaaatcaggacttttccagcttcgatgatacaggaaagtcttccctgggagacatgttctcacccattagagacgacgcggtcgtaaacaagggatccgatgaaagcatcggaaagggcgatggattcgacttcttaccacagcttaacagcgtctttcccccccgaaaaaaccctgtgacaagctctacctcagtgctacacagttcccctctcaacgtgttcatgggctcacccggaaaagaagagaacgaaaaccgcgacctcactgccgaatccaagaaaatctatatgggaaagcaggagtctaaagacagtttcaagcagctggccaagttggtgacatctggagcagaaagtggaaacttgaatacctctcctagctctaaccagacaaggaactcagagaaatttgagaaacccgagaacgaaattgaggcccaattaatctgcgaacctcccattaatggatcttctactccaaatcccaagatcgcctcatccgtcacagctggagtagcaagcagcctttcggagaagatcgcagactctatcggaaacaacaggcagaatgcccccctgacttcaatacagataaggtttatacagaatatgatacaagaaactctggatgacttcagggaagcctgccaccgcgacatcgtgaatctccaggtggagatgatcaaacagtttcacatgcagctcaatgagatgcatagcctgcttgaacggtattctgtgaatgagggtctggtcgccgaaatcgagcggctccgagaggaaaacaagagactgagagcccacttctag

SEQ ID NO: 282065 - DNA, 1983 bp, Artificial Sequence
  derived and/or modified sequence
atgcaggagaacctgcggttcgccagcagcggcgacgacatcaagatatgggatgccagctccatgactctcgtagataagttcaacccacatacatctccacatggcattagctctatttgctggtccagcaacaacaacttcttggtcactgcaagtagctctggcgataagatcgtcgtgtcatcatgcaagtgcaaaccagttcccttgctggagttggctgaaggccagaaacagacttgcgtgaatcttaactcgacatctatgtatctggtgtccggcgggttgaacaacacagtgaatatctgggacctaaagtcaaagagggtacaccgatcgctgaaagaccataaagaccaagtcacgtgcgtgacctataactggaacgactgttatatagctagcgggtcactcagtggggaaataattcttcactcagtgaccacgaatctctcttccacgccgtttggccacggctctaaccagtccgtcagacacctgaagtactcactgtttaaaaagagcttgctgggctcagtatctgataacgggatagtgacattgtgggatgttaacagtcagtctccgtaccacaatttcgacagcgtgcataaggctcccgccagcgggatttgcttctccccggtgaacgaactgctgttcgtcacaattggcctcgataaacggataatcctgtatgataccagctccaagaagctggtaaagacactagtggccgacacacctctcaccgccgtcgattttatgcctgatggagcaactctcgcgatagggtctagtagggggaaaatataccagtacgatcttagaatgctgaaaagccctgtgaagacaatctctgctcacaaaacatcagttcagtgtatcgcattccagtacagtacagtgctgacgaaatcgtctctcaacaagggatgctccaacaaacctacaaccgttaataaacgttcagttaacgtgaacgcagccagtggaggggttcaaaattctggaatcgtccgggaagccccagctacttccattgcaaccgtgctacctcagccgatgacttccgctatgggaaagggaaccgtcgccgttcaggaaaaggcaggcctccccaggagcatcaataccgacacgctgtccaaagaaaccgacagcggcaaaaatcaagacttctcctcctttgacgataccggtaagtcctccctgggggatatgttttctcccattagagacgacgccgtcgtgaacaagggcagcgacgaaagcatcggtaagggggacggattcgacttccttccgcaattgaactcagtgtttcctcccaggaagaaccctgtgaccagttccacgtccgtgttgcattctagcccactgaatgtcttcatgggctctcctggaaaggaggagaacgaaaatcgggatctgacagcagaaagcaaaaaaatttatatgggcaaacaggaaagcaaggacagttttaaacagttggccaaattagtcactagcggcgctgaatccggtaacctaaacacatctccttcttctaatcagacgcgcaactcggagaaatttgagaaaccggagaacgaaatcgaagcccaactgatctgcgaaccccctattaacggcagcagcacccccaacccaaaaatcgcctcaagtgtcactgccggcgtggcctcctccctgtccgagaagattgcagatagcatcggaaacaatcgccagaacgcccctctaactagcatccagattagattcattcaaaatatgatccaagaaacactggatgattttagggaagcgtgccatcgcgacattgttaatctgcaggttgagatgatcaaacagttccacatgcagctcaacgagatgcacagtctcttagaacgatactcagtcaacgagggcctggttgccgaaatcgagagactgagagaggagaacaaaaggctaagggcccacttctag

SEQ ID NO: 282066 - DNA, 504 bp, Artificial Sequence
  derived and/or modified sequence
atgcacttcaccggcgccgtgatgcaggagaacctgcggttcgcctcaagcggggatgacatcaagatttgggatgcgtctagtatgacgctggtggataaattcaatccacacacaagtccacatggcatctcctccatctgctggtcatccaacaataattttcttgtaacagcttcaagttctggcgataaaatcgtggtcagctcctgcaagtgcaaacctgttccgctcctggagctggcggaagggcaaaaacagacgtgtgtgaatctcaacagcacctctatgtaccttgtgagcggtgggctcaataatactgtcaacatatgggacctgaagtcaaaaagagtgcaccggtccctcaaggatcacaaagaccaggttacatgcgtgacttacaattggaacgactgctacatagccagcgggagcctcagcggagagattatcctccacagtgttaccaccaacttgtccagcaccccatttgggcacggttag

SEQ ID NO: 282067 - DNA, 2004 bp, Artificial Sequence
  derived and/or modified sequence
atgcacttcaccggcgccgtgatgcaggagaacctgcggttcgccagttccggcgacgatatcaagatttgggatgcatcttctatgacccttgttgataagtttaaccctcacactagccctcatggaatctccagcatttgctggagcagcaacaataatttcctcgtcaccgcctcatccagcggtgacaaaatcgtggtgtcatcctgcaagtgcaagccagtgccactgctggagctcgcggaagggcagaagcagacttgcgtaaacttgaattctacgtcgatgtacctggtgtcaggcggactgaataataccgtaaacatctgggatctgaagagtaaaagagttcatagatcccttaaagatcacaaagatcaagttacctgcgtgacttacaactggaatgactgctatatagcctctgggagcctcagcggggagattatcctgcactctgtcacaaccaatctgtctagcacaccattcggacacggttccaatcagtccgtgagacacctgaagtattctctctttaaaaagagcctattggggagtgtgagcgacaatggtatcgtcacactgtgggacgtgaatagccagagcccttaccacaactttgattcggtgcacaaagcacccgcgtccggaatttgcttctcccccgttaacgagctcctgtttgttactatcggcttggataaaaggatcatcctgtacgatacctccagtaaaaaactggtcaagacattggtcgctgacaccccactgaccgcagttgactttatgccagacggcgccacactcgccatagggtcctcccggggcaaaatctaccagtacgaccttcgcatgttaaaatcaccggtgaagaccatcagtgcgcacaagacatctgtacagtgtatcgcctttcagtacagcaccgtgttgacgaagtcatccctgaacaagggctgttccaataagcccactacggtgaacaagagatctgtcaacgttaacgccgcttcaggaggtgtgcaaaattctggaatcgtgcgtgaagcgcccgcgacgtccatcgccactgtgcttcctcagcccatgacatccgccatgggaaaggggactgtggcagtgcaggaaaaggccggacttcccagaagcatcaacacagatactctaagcaaggaaacagacagcgggaaaaatcaggacttttctagtttcgatgatacgggcaaaagttctctgggcgacatgttctcacccatcagagacgatgccgtcgtgaacaaggggtccgatgagtcaatcggtaagggcgacggcttcgatttcctcccccagcttaacagcgtctttccaccgaggaagaaccctgtgacttcttccacctcagttctgcacagctccccactcaatgtgttcatgggctcaccggggaaagaggaaaacgaaaatcgggatttgacagcagaaagcaagaaaatctacatggggaagcaggagagcaaggacagctttaagcagcttgccaaactcgtgacctctggagccgaatctggtaaccttaacacaagtcccagctctaatcagacccggaattcggaaaaattcgagaagccggaaaatgaaattgaagcacaactgatctgcgaaccccctatcaatgggagttccacccccaaccctaaaatcgcaagctccgtgacagcaggagtggcctcgtcactgtccgagaagatcgccgattctatagggaacaacaggcagaacgcacccctgacatccatccagataaggttcattcaaaacatgatccaggaaaccttggatgatttcagggaagcctgtcatcgcgacatcgtaaaccttcaggtcgaaatgattaaacagtttcatatgcaactgaatgaaatgcattccctgttggagcgctattctgttaacgagggattggtggcggaaatagaaaggctgcgagaggagaataagaggctcagagcgcacttctag

SEQ ID NO: 282068 - DNA, 3620 bp, Artificial Sequence
  derived and/or modified sequence
gaagtttaacagtccaggcgggagccggaagcccagcgcggagccggccgcggccccctgttgtgttgctgcggagaggtacttggatgcattttacaggttagcctcacttgagctgttgtcctgcaagtaaagtgtatttttggtgattgaaagttggagaactttcatttcagctgagtggtgtagttgaattggttcctgtagccgctgtccctaaacccaggccgacgttaccgccttgtgtcctgactgctagctttcgacgggaccgtctttgagggactcatgtaaagtctctcccttaatgctcagttcttagaagaccgaggcgcagtcatgcaggaaaacctcagatttgcttcatcaggagatgatattaaaatatgggatgcttcatctatgacattggtggataaattcaacccacacacatcaccacatggaatcagctcaatatgttggagcagcaataataactttttagtaacagcatcttccagtggcgacaaaatagttgtctcaagttgcaaatgtaaacctgttccacttttagagcttgctgaagggcaaaagcagacatgtgtcaatttaaattctacatctatgtatttggtaagcggaggcctaaataacactgttaatatttgggatttaaaatcaaaaagagttcatcgatctcttaaggatcataaagatcaagtaacttgtgtaacatacaattggaatgattgctacattgcttctggatctcttagtggtgaaattattttacacagtgtaaccactaatttatctagtactccttttggccatggtagtaaccagtctgttcggcacttgaagtactccttgtttaagaaatcactactgggcagtgtttcggataatggaatagtaactctctgggatgtaaatagtcagagtccataccataactttgacagtgtacacaaagctccagcgtcaggcatctgtttttctcctgtcaatgaattgctctttgtaaccataggcttggataaaagaatcatcctctatgacacttcaagtaagaagctagtgaaaactttagtggctgacactcctctaactgcggtagatttcatgcctgatggagccactttggctattggatcttcccgggggaaaatatatcaatatgatttaagaatgttgaaatcaccagttaagaccatcagtgctcacaagacatctgtgcagtgtatagcatttcagtactccactgttcttactaagtcaagtttaaataaaggctgttcaaataagcccacaacagtgaacaaacgaagtgttaatgtgaatgctgctagtggaggagttcagaattccggaattgtcagagaagcacctgccacgtccattgccacagttctaccacaacctatgacatcagctatggggaaaggaacagttgctgttcaagaaaaagcaggtttgcctcgaagcataaacacagacactttatctaaggaaacagacagtggaaaaaatcaggatttctccagctttgatgatactgggaaaagtagtttaggtgacatgttctcacctatcagagatgatgctgtagttaacaagggaagtgatgagtccataggcaaaggagatggctttgactttctaccgcagttgaactcagtgtttcctccaagaaaaaatccagtaacttcaagtacttcagtattgcattctagtcctcttaatgtttttatgggatctccagggaaagaggaaaatgaaaaccgtgatctaacagctgagtctaagaaaatatatatgggaaaacaggaatctaaagactccttcaaacagttagcaaagttggtcacatctggtgctgaaagtggaaatctaaatacctctccatcatctaaccaaacaagaaattctgagaaatttgaaaagccagagaatgaaattgaagcccagttgatatgtgaacccccaatcaatggatcctcaactccaaatccaaagatagcatcttctgtcactgctggagttgccagttcactctcagaaaaaatagccgacagcattggaaataaccggcaaaatgcaccattgacttccattcaaattcgttttattcagaacatgatacaggaaacgttggatgactttagagaagcatgccatagggacattgtgaatttgcaagtggagatgattaaacagtttcatatgcaactgaatgaaatgcattctttgctggaaagatactcagtgaatgaaggtttagtggctgaaattgaaagactacgagaagaaaacaaaagattacgggcccacttttgaaatttcagtgaataccttaatgttctgtaatttgggaagtttctggcaacacagaactacatagaatcagtattgttttcatggcctccagggaaaaaatgtttttcaagtaagagtaaaaggatgatgggattttataccaacaactgtttcatcttaaaaatatgtatatttttatattaaaaattgtacagtatgtcatctacccaataggaaagtcaacaggatctttattttttgaaagctttagccatccactaagtgccctttttcataagagaagaaaattgtgcataaaaattggttatgtttgttttttagtcatcttttttaacatatatttttgattgacaaattgcctttcaaatttttggggctagttgagatttaaagagtttgatatgccttctatttttatggagaaagtaattttaaaatggcaattggtgtttctaagccattgactaataaaacatagggttggctagtaattattttgttaacttgatgaagtcaagtatgactattatttattgtacatttgataagacaatttttggaattttgaattgcacaaattacatgatatcttttgcatttatgttactatattgtacttctgacaaatctttattcctgggtggtatttttaagatatctttacctataaaaaatgtttaaggttcataggactcgacaagagctatctggtgattttctcattagtaacatgcaacgttgtactgcaaaatttcaatcaacatgacaacttataatgagtggagatttcatattaggtactaaatattatagtattatttctattttctttttccaaataagaagcttggattattttattttgtggtctttatcattaactttaattctttctgtactgtgtataatatttttatattattggccttaccataaaattatttagaaaggttgtcaaaataagttatacctctttggcaatagatagatgtatacatctacctactatgatctacaattttaggttaagtgaagcttgggggggctactgacttggttaccttcttgtctcttgtcccaaagatttaaactgtgtacctttgtatagctcttctgccccattttgacttctgagatgaaagtatttactaaaattaaaaaaaaaaaaacaaaaaacaaacctttagctcactaactttatgggtttctgaagtgatggaaatttttaaggatatatttaataagcataaacttactaataattacttccaaaaataaaaacaggaatattactttta

SEQ ID NO: 282069 - DNA, 2490 bp, Artificial Sequence
  derived and/or modified sequence
aggcgggagccggaagcccagcgcggagccggccgcggccccctgttgtgttgctgcggagaggtacttggatgcattttacaggttagcctcacttgagctgttgtcctgcaagtaaagtgtatttttggtgattgaaagttggagaactttcatttcagctgagtggtgtagttgaattggttcctgtagccgctgtccctaaacccaggccgacgttaccgccttgtgtcctgactgctagctttcgacgggaccgtctttgagggactcatgtaaagtctctcccttaatgctcagttcttagaagaccgagcaaaagcagacatgtgtcaatttaaattctacatctatgtatttggtaagcggaggcctaaataacactgttaatatttgggatttaaaatcaaaaagagttcatcgatctcttaaggatcataaagatcaagtaacttgtgtaacatacaattggaatgattgctacattgcttctggatctcttagtggtgaaattattttacacagtgtaaccactaatttatctagtactccttttggccatggtagtaaccagtctgttcggcacttgaagtactccttgtttaagaaatcactactgggcagtgtttcggataatggaatagtaactctctgggatgtaaatagtcagagtccataccataactttgacagtgtacacaaagctccagcgtcaggcatctgtttttctcctgtcaatgaattgctctttgtaaccataggcttggataaaagaatcatcctctatgacacttcaagtaagaagctagtgaaaactttagtggctgacactcctctaactgcggtagatttcatgcctgatggagccactttggctattggatcttcccgggggaaaatatatcaatatgatttaagaatgttgaaatcaccagttaagaccatcagtgctcacaagacatctgtgcagtgtatagcatttcagtactccactgttcttactaagtcaagtttaaataaaggctgttcaaataagcccacaacagtgaacaaacgaagtgttaatgtgaatgctgctagtggaggagttcagaattccggaattgtcagagaagcacctgccacgtccattgccacagttctaccacaacctatgacatcagctatggggaaaggaacagttgctgttcaagaaaaagcaggtttgcctcgaagcataaacacagacactttatctaaggaaacagacagtggaaaaaatcaggatttctccagctttgatgatactgggaaaagtagtttaggtgacatgttctcacctatcagagatgatgctgtagttaacaagggaagtgatgagtccataggcaaaggagatggctttgactttctaccgcagttgaactcagtgtttcctccaagaaaaaatccagtaacttcaagtacttcagtattgcattctagtcctcttaatgtttttatgggatctccagggaaagaggaaaatgaaaaccgtgatctaacagctgagtctaagaaaatatatatgggaaaacaggaatctaaagactccttcaaacagttagcaaagttggtcacatctggtgctgaaagtggaaatctaaatacctctccatcatctaaccaaacaagaaattctgagaaatttgaaaagccagagaatgaaattgaagcccagttgatatgtgaacccccaatcaatggatcctcaactccaaatccaaagatagcatcttctgtcactgctggagttgccagttcactctcagaaaaaatagccgacagcattggaaataaccggcaaaatgcaccattgacttccattcaaattcgttttattcagaacatgatacaggaaacgttggatgactttagagaagcatgccatagggacattgtgaatttgcaagtggagatgattaaacagtttcatatgcaactgaatgaaatgcattctttgctggaaagatactcagtgaatgaaggtttagtggctgaaattgaaagactacgagaagaaaacaaaagattacgggcccacttttgaaatttcagtgaataccttaatgttctgtaatttgggaagtttctggcaacacagaactacatagaatcagtattgttttcatggcctccagggaaaaaatgtttttcaagtaagagtaaaaggatgatgggattttataccaacaactgtttcatcttaaaaatatgtatatttttatattaaaaattgtacagtatgtcatctacccaataggaaagtcaacaggatctttattttttgaaagctttagccatccactaagtgccctttttcataagagaagaaaattgtgcataaaaattggttatgtttgttttttagtcatcttttttaacatatatttttgattgacaaattgcctttcaaatttttggggctagttgagatttaaagagtttgatatgccttctatttttatggag

SEQ ID NO: 282070 - DNA, 3366 bp, Artificial Sequence
  derived and/or modified sequence
aagtttaacagtccaggcgggagccggaagcccagcgcggagccggccgcggccccctgttgtgttgctgcggagaggcgcagtcatgcaggaaaacctcagatttgcttcatcaggagatgatattaaaatatgggatgcttcatctatgacattggtggataaattcaacccacacacatcaccacatggaatcagctcaatatgttggagcagcaataataactttttagtaacagcatcttccagtggcgacaaaatagttgtctcaagttgcaaatgtaaacctgttccacttttagagcttgctgaagggcaaaagcagacatgtgtcaatttaaattctacatctatgtatttggtaagcggaggcctaaataacactgttaatatttgggatttaaaatcaaaaagagttcatcgatctcttaaggatcataaagatcaagtaacttgtgtaacatacaattggaatgattgctacattgcttctggatctcttagtggtgaaattattttacacagtgtaaccactaatttatctagtactccttttggccatggtagtaaccagtctgttcggcacttgaagtactccttgtttaagaaatcactactgggcagtgtttcggataatggaatagtaactctctgggatgtaaatagtcagagtccataccataactttgacagtgtacacaaagctccagcgtcaggcatctgtttttctcctgtcaatgaattgctctttgtaaccataggcttggataaaagaatcatcctctatgacacttcaagtaagaagctagtgaaaactttagtggctgacactcctctaactgcggtagatttcatgcctgatggagccactttggctattggatcttcccgggggaaaatatatcaatatgatttaagaatgttgaaatcaccagttaagaccatcagtgctcacaagacatctgtgcagtgtatagcatttcagtactccactgttcttactaagtcaagtttaaataaaggctgttcaaataagcccacaacagtgaacaaacgaagtgttaatgtgaatgctgctagtggaggagttcagaattccggaattgtcagagaagcacctgccacgtccattgccacagttctaccacaacctatgacatcagctatggggaaaggaacagttgctgttcaagaaaaagcaggtttgcctcgaagcataaacacagacactttatctaaggaaacagacagtggaaaaaatcaggatttctccagctttgatgatactgggaaaagtagtttaggtgacatgttctcacctatcagagatgatgctgtagttaacaagggaagtgatgagtccataggcaaaggagatggctttgactttctaccgcagttgaactcagtgtttcctccaagaaaaaatccagtaacttcaagtacttcagtattgcattctagtcctcttaatgtttttatgggatctccagggaaagaggaaaatgaaaaccgtgatctaacagctgagtctaagaaaatatatatgggaaaacaggaatctaaagactccttcaaacagttagcaaagttggtcacatctggtgctgaaagtggaaatctaaatacctctccatcatctaaccaaacaagaaattctgagaaatttgaaaagccagagaatgaaattgaagcccagttgatatgtgaacccccaatcaatggatcctcaactccaaatccaaagatagcatcttctgtcactgctggagttgccagttcactctcagaaaaaatagccgacagcattggaaataaccggcaaaatgcaccattgacttccattcaaattcgttttattcagaacatgatacaggaaacgttggatgactttagagaagcatgccatagggacattgtgaatttgcaagtggagatgattaaacagtttcatatgcaactgaatgaaatgcattctttgctggaaagatactcagtgaatgaaggtttagtggctgaaattgaaagactacgagaagaaaacaaaagattacgggcccacttttgaaatttcagtgaataccttaatgttctgtaatttgggaagtttctggcaacacagaactacatagaatcagtattgttttcatggcctccagggaaaaaatgtttttcaagtaagagtaaaaggatgatgggattttataccaacaactgtttcatcttaaaaatatgtatatttttatattaaaaattgtacagtatgtcatctacccaataggaaagtcaacaggatctttattttttgaaagctttagccatccactaagtgccctttttcataagagaagaaaattgtgcataaaaattggttatgtttgttttttagtcatcttttttaacatatatttttgattgacaaattgcctttcaaatttttggggctagttgagatttaaagagtttgatatgccttctatttttatggagaaagtaattttaaaatggcaattggtgtttctaagccattgactaataaaacatagggttggctagtaattattttgttaacttgatgaagtcaagtatgactattatttattgtacatttgataagacaatttttggaattttgaattgcacaaattacatgatatcttttgcatttatgttactatattgtacttctgacaaatctttattcctgggtggtatttttaagatatctttacctataaaaaatgtttaaggttcataggactcgacaagagctatctggtgattttctcattagtaacatgcaacgttgtactgcaaaatttcaatcaacatgacaacttataatgagtggagatttcatattaggtactaaatattatagtattatttctattttctttttccaaataagaagcttggattattttattttgtggtctttatcattaactttaattctttctgtactgtgtataatatttttatattattggccttaccataaaattatttagaaaggttgtcaaaataagttatacctctttggcaatagatagatgtatacatctacctactatgatctacaattttaggttaagtgaagcttgggggggctactgacttggttaccttcttgtctcttgtcccaaagatttaaactgtgtacctttgtatagctcttctgccccattttgacttctgagatgaaagtatttactaaaattaaaaaaaaaaaaacaaaaaacaaacctttagctcactaactttatgggtttctgaagtgatggaaatttttaaggatatatttaataagcataaacttactaataattacttccaaaaataaaaacaggaatattactttta

SEQ ID NO: 282071 - DNA, 3162 bp, Artificial Sequence
  derived and/or modified sequence
aatgtgagccatttttgaaagctactctgtaagctatactcattgcttgtcttcttagtgtgttagcttttataatcgcaattcttataatagtctagtgctatagatgttcatggattgtttgatgctccataactcctcatttagataactttttagtaacagcatcttccagtggcgacaaaatagttgtctcaagttgcaaatgtaaacctgttccacttttagagcttgctgaagggcaaaagcagacatgtgtcaatttaaattctacatctatgtatttggtaagcggaggcctaaataacactgttaatatttgggatttaaaatcaaaaagagttcatcgatctcttaaggatcataaagatcaagtaacttgtgtaacatacaattggaatgattgctacattgcttctggatctcttagtggtgaaattattttacacagtgtaaccactaatttatctagtactccttttggccatggtagtaaccagtctgttcggcacttgaagtactccttgtttaagaaatcactactgggcagtgtttcggataatggaatagtaactctctgggatgtaaatagtcagagtccataccataactttgacagtgtacacaaagctccagcgtcaggcatctgtttttctcctgtcaatgaattgctctttgtaaccataggcttggataaaagaatcatcctctatgacacttcaagtaagaagctagtgaaaactttagtggctgacactcctctaactgcggtagatttcatgcctgatggagccactttggctattggatcttcccgggggaaaatatatcaatatgatttaagaatgttgaaatcaccagttaagaccatcagtgctcacaagacatctgtgcagtgtatagcatttcagtactccactgttcttactaagtcaagtttaaataaaggctgttcaaataagcccacaacagtgaacaaacgaagtgttaatgtgaatgctgctagtggaggagttcagaattccggaattgtcagagaagcacctgccacgtccattgccacagttctaccacaacctatgacatcagctatggggaaaggaacagttgctgttcaagaaaaagcaggtttgcctcgaagcataaacacagacactttatctaaggaaacagacagtggaaaaaatcaggatttctccagctttgatgatactgggaaaagtagtttaggtgacatgttctcacctatcagagatgatgctgtagttaacaagggaagtgatgagtccataggcaaaggagatggctttgactttctaccgcagttgaactcagtgtttcctccaagaaaaaatccagtaacttcaagtacttcagtattgcattctagtcctcttaatgtttttatgggatctccagggaaagaggaaaatgaaaaccgtgatctaacagctgagtctaagaaaatatatatgggaaaacaggaatctaaagactccttcaaacagttagcaaagttggtcacatctggtgctgaaagtggaaatctaaatacctctccatcatctaaccaaacaagaaattctgagaaatttgaaaagccagagaatgaaattgaagcccagttgatatgtgaacccccaatcaatggatcctcaactccaaatccaaagatagcatcttctgtcactgctggagttgccagttcactctcagaaaaaatagccgacagcattggaaataaccggcaaaatgcaccattgacttccattcaaattcgttttattcagaacatgatacaggaaacgttggatgactttagagaagcatgccatagggacattgtgaatttgcaagtggagatgattaaacagtttcatatgcaactgaatgaaatgcattctttgctggaaagatactcagtgaatgaaggtttagtggctgaaattgaaagactacgagaagaaaacaaaagattacgggcccacttttgaaatttcagtgaataccttaatgttctgtaatttgggaagtttctggcaacacagaactacatagaatcagtattgttttcatggcctccagggaaaaaatgtttttcaagtaagagtaaaaggatgatgggattttataccaacaactgtttcatcttaaaaatatgtatatttttatattaaaaattgtacagtatgtcatctacccaataggaaagtcaacaggatctttattttttgaaagctttagccatccactaagtgccctttttcataagagaagaaaattgtgcataaaaattggttatgtttgttttttagtcatcttttttaacatatatttttgattgacaaattgcctttcaaatttttggggctagttgagatttaaagagtttgatatgccttctatttttatggagaaagtaattttaaaatggcaattggtgtttctaagccattgactaataaaacatagggttggctagtaattattttgttaacttgatgaagtcaagtatgactattatttattgtacatttgataagacaatttttggaattttgaattgcacaaattacatgatatcttttgcatttatgttactatattgtacttctgacaaatctttattcctgggtggtatttttaagatatctttacctataaaaaatgtttaaggttcataggactcgacaagagctatctggtgattttctcattagtaacatgcaacgttgtactgcaaaatttcaatcaacatgacaacttataatgagtggagatttcatattaggtactaaatattatagtattatttctattttctttttccaaataagaagcttggattattttattttgtggtctttatcattaactttaattctttctgtactgtgtataatatttttatattattggccttaccataaaattatttagaaaggttgtcaaaataagttatacctctttggcaatagatagatgtatacatctacctactatgatctacaattttaggttaagtgaagcttgggggggctactgacttggttaccttcttgtctcttgtcccaaagatttaaactgtgtacctttgtatagctcttctgccccattttgacttctgagatgaaagtatttactaaaattaaaaaaaaaaaa

SEQ ID NO: 282072 - DNA, 582 bp, Artificial Sequence
  derived and/or modified sequence
aacagtccaggcgggagccggaagcccagcgcggagccggccgcggccccctgttgtgttgctgcggagaggtacttggatgcattttacaggcgcagtcatgcaggaaaacctcagatttgcttcatcaggagatgatattaaaatatgggatgcttcatctatgacattggtggataaattcaacccacacacatcaccacatggaatcagctcaatatgttggagcagcaataataactttttagtaacagcatcttccagtggcgacaaaatagttgtctcaagttgcaaatgtaaacctgttccacttttagagcttgctgaagggcaaaagcagacatgtgtcaatttaaattctacatctatgtatttggtaagcggaggcctaaataacactgttaatatttgggatttaaaatcaaaaagagttcatcgatctcttaaggatcataaagatcaagtaacttgtgtaacatacaattggaatgattgctacattgcttctggatctcttagtggtgaaattattttacacagtgtaaccactaatttatctagtactccttttggccatggtag

SEQ ID NO: 282073 - DNA, 554 bp, Artificial Sequence
  derived and/or modified sequence
agtccaggcgggagccggaagcccagcgcggagccggccgcggccccctgttgtgttgctgcggagaggtacttggatgcattttacagctgagtggtgtagttgaattggttcctgtagccgctgtccctaaacccaggccgacgttaccgccttgtgtcctgactgctagctttcgacgggaccgtctttgagggactcatgtaaagtctctcccttaatgctcagttcttagaagaccgaggcgcagtcatgcaggaaaacctcagatttgcttcatcaggagatgatattaaaatatgggatgcttcatctatgacattggtggataaattcaacccacacacatcaccacatggaatcagctcaatatgttggagcagcaataataactttttagtaacagcatcttccagtggcgacaaaatagttgtctcaagttgcaaatgtaaacctgttccacttttagagcttgctgaagggcaaaagcagacatgtgtcaatttaaattctacatctatgtatttggtaagcggaggcctaaataacactgt

SEQ ID NO: 282074 - DNA, 595 bp, Artificial Sequence
  derived and/or modified sequence
aacagtccaggcgggagccggaagcccagcgcggagccggccgcggccccctgttgtgttgctgcggagaggtgaggttccggaggccctgaggcgcagtcatgcaggaaaacctcagatttgcttcatcaggagatgatattaaaatatgggatgcttcatctatgacattggtggataaattcaacccacacacatcaccacatggaatcagctcaatatgttggagcagcaataataactttttagtaacagcatcttccagtggcgacaaaatagttgtctcaagttgcaaatgtaaacctgttccacttttagagcttgctgaagggcaaaagcagacatgtgtcaatttaaattctacatctatgtatttggtaagcggaggcctaaataacactgttaatatttgggatttaaaatcaaaaagagttcatcgatctcttaaggatcataaagatcaagtaacttgtgtaacatacaattggaatgattgctacattgcttctggatctcttagtggtgaaattattttacacagtgtaaccactaatttatctagtactccttttggccatggtagtaaccagtctgt

SEQ ID NO: 282075 - DNA, 2367 bp, Artificial Sequence
  derived and/or modified sequence
gggaagtgtccggggaggcgcgggccggggtcgcgcacctcccggagccttgtggggtgtgctgcctccgaaaagtttgcctcgtctccacaagtctgtctccttttttgtcaacctcaagtacttttcttttggcaggtacttggatgcattttacaggcgcagtcatgcaggaaaacctcagatttgcttcatcaggagatgatattaaaatatgggatgcttcatctatgacattggtggataaattcaacccacacacatcaccacatggaatcagctcaatatgttggagcagcaataataactttttagtaacagcatcttccagtggcgacaaaatagttgtctcaagttgcaaatgtaaacctgttccacttttagagcttgctgaagggcaaaagcagacatgtgtcaatttaaattctacatctatgtatttggtaagcggaggcctaaataacactgttaatatttgggatttaaaatcaaaaagagttcatcgatctcttaaggatcataaagatcaagtaacttgtgtaacatacaattggaatgattgctacattgcttctggatctcttagtggtgaaattattttacacagtgtaaccactaatttatctagtactccttttggccatggtagtaaccagtctgttcggcacttgaagtactccttgtttaagaaatcactactgggcagtgtttcggataatggaatagtaactctctgggatgtaaatagtcagagtccataccataactttgacagtgtacacaaagctccagcgtcaggcatctgtttttctcctgtcaatgaattgctctttgtaaccataggcttggataaaagaatcatcctctatgacacttcaagtaagaagctagtgaaaactttagtggctgacactcctctaactgcggtagatttcatgcctgatggagccactttggctattggatcttcccgggggaaaatatatcaatatgatttaagaatgttgaaatcaccagttaagaccatcagtgctcacaagacatctgtgcagtgtatagcatttcagtactccactgttcttactaagtcaagtttaaataaaggctgttcaaataagcccacaacagtgaacaaacgaagtgttaatgtgaatgctgctagtggaggagttcagaattccggaattgtcagagaagcacctgccacgtccattgccacagttctaccacaacctatgacatcagctatggggaaaggaacagttgctgttcaagaaaaagcaggtttgcctcgaagcataaacacagacactttatctaaggaaacagacagtggaaaaaatcaggatttctccagctttgatgatactgggaaaagtagtttaggtgacatgttctcacctatcagagatgatgctgtagttaacaagggaagtgatgagtccataggcaaaggagatggctttgactttctaccgcagttgaactcagtgtttcctccaagaaaaaatccagtaacttcaagtacttcagtattgcattctagtcctcttaatgtttttatgggatctccagggaaagaggaaaatgaaaaccgtgatctaacagctgagtctaagaaaatatatatgggaaaacaggaatctaaagactccttcaaacagttagcaaagttggtcacatctggtgctgaaagtggaaatctaaatacctctccatcatctaaccaaacaagaaattctgagaaatttgaaaagccagagaatgaaattgaagcccagttgatatgtgaacccccaatcaatggatcctcaactccaaatccaaagatagcatcttctgtcactgctggagttgccagttcactctcagaaaaaatagccgacagcattggaaataaccggcaaaatgcaccattgacttccattcaaattcgttttattcagaacatgatacaggaaacgttggatgactttagagaagcatgccatagggacattgtgaatttgcaagtggagatgattaaacagtttcatatgcaactgaatgaaatgcattctttgctggaaagatactcagtgaatgaaggtttagtggctgaaattgaaagactacgagaagaaaacaaaagattacgggcccacttttgaaatttcagtgaataccttaatgttctgtaatttgggaagtttctggcaacacagaactacatagaatcagtattgttttcatggcctccagggaaaaaatgtttttcaagtaagagtaaaaggatgatgggattttataccaacaactgtttcatcttaaaaatatgtatatttttatattaaaaattgtacagtatgtcatctacccaataggaaa

SEQ ID NO: 282076 - DNA, 1983 bp, Artificial Sequence
  derived and/or modified sequence
atgcaggaaaaccttcggtttgcgtcttctggcgatgacatcaagatatgggatgccagctccatgaccctggtggataagtttaaccctcacacgtctccgcacggaatttcctcaatttgctggagctccaacaacaattttctcgtcaccgcttcctcctccggtgacaagatcgtggtttcgagctgtaagtgtaaaccagttccgctattggagttagctgagggacagaagcaaacctgtgtcaatctgaactcgacgtctatgtatctagtgagtggcggtctgaataatacagtgaacatctgggatcttaaatctaagcgtgtgcaccgcagcctgaaggaccataaagaccaggtgacctgcgtgacttacaactggaatgattgctatatcgcatcgggctccttgagtggagagataattctgcattctgtcacgacaaacctgtcatctactccctttggccatggctctaatcagtccgtgcgccatctcaaatactcactatttaaaaagagcttgcttggatctgtgtcagataacggcatcgtgacattatgggacgtcaattctcaaagtccataccacaactttgattctgtgcacaaagccccagcctctggcatttgcttttctcccgtcaacgaactgcttttcgtgactattggtctggataaaagaataattctgtacgacacgagctctaaaaagctggttaaaacgctggtagccgacactcctctgacagctgttgatttcatgcccgatggcgcaacactcgccatcggtagctctcggggaaagatataccagtacgacctgagaatgctgaaatctccagtgaagactatttctgctcacaagactagcgtccagtgtatagcctttcagtactctaccgttctcacgaaatcctcactgaacaaaggctgctcgaataagcctacgactgtgaacaaacggagtgtcaatgtgaacgccgcaagtggtggtgtgcaaaactctggaatcgtgagagaggctccagccactagtattgcaaccgtgttaccgcagcccatgacttcggccatgggaaaggggaccgtagcagtccaagagaaggccggattaccaaggtctattaacaccgacacgctgagtaaggaaacagacagcggaaaaaaccaggattttagctcttttgacgatacagggaagtcaagtttgggcgatatgtttagcccaatccgggatgatgctgtggtgaataaaggctctgacgaaagcatcgggaagggcgatggctttgatttccttcctcagctgaacagcgtgttccctcccagaaaaaacccagtgacttcttctacgtcagttttacacagtagtcccctgaatgtcttcatgggcagtcccggtaaagaggagaacgagaatcgcgatttgaccgcagaaagcaaaaaaatctacatggggaagcaggagagcaaagattccttcaaacagctggccaaactagttacctcaggggctgagtctgggaacctgaatacaagtcctagttcgaatcagactcggaactccgaaaaattcgagaagcctgaaaacgagatcgaggcacagttgatctgtgaacctccaatcaatgggtcttctactccgaaccctaaaattgctagttccgtgacggccggagtcgcttccagtctgagcgagaaaattgcagattcaatcggcaataacaggcagaatgccccactcacatcgattcagatacggttcatccagaatatgatccaggaaactctagacgactttcgggaggcttgtcaccgagatattgttaacctgcaggttgaaatgatcaaacagttccatatgcaactgaacgaaatgcacagtctgctcgagagatactctgttaacgaggggctagtggctgaaattgaacgcctcagggaagagaataagcggttgcgcgcacacttctag

SEQ ID NO: 282077 - DNA, 1983 bp, Artificial Sequence
  derived and/or modified sequence
atgcaggagaacttgcgctttgcgtcgtccggcgacgatatcaagatctgggacgcttcgagcatgactctggtagataaattcaacccccatactagcccccacggcatcagctcaatctgctggagttcgaacaataactttctggtaaccgcttcctcatctggcgacaaaattgtggtgtctagctgcaaatgcaaacccgtgccactgcttgagttagccgaaggacaaaaacaaacatgcgtgaaccttaactccacttcgatgtacctcgtgtctgggggtttgaacaataccgtgaacatctgggatctcaagtcaaaaagagtgcatcgctccctgaaggaccacaaagaccaggtcacatgcgttacatataattggaatgactgctatatcgcttctggatccctgtcgggcgagattatccttcactctgttaccactaacctgagcagcacaccctttggacatggctccaatcagtctgtgcggcatctaaaatactctctgttcaagaaatccttacttggatctgtatccgataatgggatcgtcacgctgtgggacgtgaattctcagagtccttaccataacttcgacagcgtccacaaagccccagcttcaggaatctgtttctctccagttaatgagctgctattcgtcacaattggcctggacaaacgcatcatcctgtatgacaccagctctaaaaagcttgtaaaaacactggtcgctgacaccccactgacggcagttgactttatgcctgatggagccacactagctatcggcagttcccggggaaagatatatcaatacgacctgagaatgttgaagtcaccagtgaaaaccatctctgcacacaagacttccgttcagtgtattgcctttcagtatagcaccgtgctgaccaaaagttctctgaataagggttgtagtaacaagcccactacagttaataagcgtagtgtgaatgtaaatgctgcaagcggaggtgtccagaatagtgggattgtcagggaagctccagctaccagtatagcaaccgtcttgccccagccaatgacaagtgccatggggaagggtaccgtagctgtgcaggagaaagctgggttaccacgctccataaacaccgatacactgagcaaagaaactgattccgggaagaatcaggatttttcgtcatttgatgatactggaaagtcatccctgggagatatgttctctcccatccgggacgatgccgtagtaaacaaagggtcagacgagtctatcggcaagggagacggttttgatttcttgccccaattaaactccgtgttcccaccacggaaaaatcccgtcaccagcagcacctcagtgttacactctagtcctctgaatgtgtttatgggcagccccggtaaagaagagaacgaaaatagagacctaactgccgagagcaagaagatctacatgggcaaacaagaatccaaggattcgtttaaacagctggctaagctcgtaactagtggagcagagtcaggtaacctgaacacatcaccttcctcgaaccagactaggaattcggaaaagtttgagaagcctgagaacgaaatcgaagctcaactgatatgcgagccgccaatcaacggctcatccaccccaaatccaaagattgcctcatctgttacagctggagttgccagctctctttccgaaaaaattgcggattccattgggaataaccgacagaacgctccgctgacgtcgattcaaattagattcattcaaaacatgattcaagagaccctagacgactttcgggaagcttgtcatagggacatcgtaaacttacaggtggagatgatcaagcagttccacatgcagctaaacgaaatgcattcactgcttgagcgatactctgtgaatgagggcctggttgccgagattgagaggctgcgcgaggagaataagagactgcgcgctcacttctag

SEQ ID NO: 282078 - DNA, 504 bp, Artificial Sequence
  derived and/or modified sequence
atgcatttcaccggcgcagtgatgcaggagaatttgaggttcgcgagttctggtgatgatataaaaatttgggatgcaagtagcatgaccctcgtggacaagtttaatccccataccagtcctcacggcatcagcagcatatgctggtcgtcaaacaataattttctcgtcacagcatctagctccggagacaaaatcgtagtctcatcgtgtaagtgcaagccagtccccctgttggagctggccgagggtcaaaagcagacctgcgtgaacctgaactcaacttccatgtatcttgtgtcaggagggctgaacaacacagtgaatatttgggatttgaagtctaaacgagttcaccggtctcttaaagatcataaagaccaggtgacttgtgtgacatataattggaatgactgttatattgccagtggctctctgtccggtgagattatcctgcacagcgtcacgacgaatctgtcctccacccccttcggccacggatag

SEQ ID NO: 282079 - DNA, 2004 bp, Artificial Sequence
  derived and/or modified sequence
atgcatttcactggggctgtcatgcaggagaacctcaggttcgcgtccagcggggacgatatcaaaatctgggacgcatcttctatgacacttgttgataagttcaatccacatacatccccccacggcataagttctatttgttggtccagtaataataatttcttggttaccgcttcctcatccggggataagattgtggtttccagctgtaagtgcaagcccgtgccactcttagaactggctgagggccaaaagcagacttgcgttaatctcaatagcaccagtatgtatctagtgagcggaggtctgaataacactgtaaacatttgggacctgaaaagcaaaagagtacacagaagtctcaaggatcacaaagatcaagtcacatgtgtgacatataactggaatgattgttacattgctagcggtagcctgtccggagaaattatcttacattccgtaaccacgaatctctcgtcaactcctttcgggcatggtagcaaccagagtgtccggcatcttaagtacagtttgttcaaaaaatctctcttgggtagtgtgagcgataacggcatcgtgacactctgggatgttaactcacagtctccttaccacaattttgacagcgtccacaaggcccctgcctccggcatctgtttcagccctgttaacgaacttctctttgtgactatcggcctggataagcggattatcctctacgacaccagctccaagaaactcgtcaaaacccttgtcgccgatacgccgctcaccgcagtagattttatgcccgatggcgcaaccctcgctatcggttcatccaggggcaagatatatcaatatgatctgagaatgttgaaatcacctgtcaagaccatttcggcacacaaaacatccgtccagtgcatcgctttccagtacagtactgtattaacgaagtccagtctgaacaaaggctgcagcaataagcccacaacagtgaataaaagaagtgttaacgtgaatgccgcttcaggcggtgtccagaatagtggaattgtccgcgaagcccctgccacttctatagcgactgtactgcctcagcccatgacatctgccatgggcaagggcaccgtggccgttcaggaaaaggcgggacttccacgcagcatcaacaccgatacgctgtccaaggagaccgactcaggcaagaatcaggatttctcctcatttgacgatactgggaagagcagcctgggtgacatgttttccccaatacgggatgacgcagtggtcaataaggggtctgacgaatccattggaaaaggtgatggattcgattttctgccacagcttaattctgtgtttccccctcgaaagaacccagttacttctagcacctcagtcctgcattccagcccactgaatgtgtttatgggaagccccggtaaggaggagaacgagaaccgagacctgacggccgaatctaagaagatctatatgggaaagcaggagtccaaggacagcttcaaacagctggccaaactggtcacatcaggagccgaatcaggcaaccttaacacaagcccgtcgagtaatcagactcgcaacagcgagaaatttgagaagcctgaaaacgaaatcgaggcccagcttatctgtgagcctccaattaatggctctagtacaccgaaccctaagattgctagttctgtgacagcaggcgtagcttcttcgctctccgagaaaatcgccgactctattggaaacaatcggcagaacgcccctcttaccagcatccagattcggttcatccagaacatgatccaagagaccctagatgacttccgagaggcctgccatagagacattgtgaacctccaggttgagatgatcaagcagtttcacatgcaattgaacgagatgcactcccttcttgagcgttacagcgtgaatgaggggctggtagcagaaatagaacggctgagggaggaaaataaacgactcagagcccatttctag

SEQ ID NO: 282080 - DNA, 1983 bp, Artificial Sequence
  derived and/or modified sequence
atgcaggagaacctgagattcgccagcagcggcgacgacatcaagatctgggacgccagcagcatgaccctggtggacaagttcaacccccacaccagcccccacggcatcagcagcatctgctggagcagcaacaacaacttcctggtgaccgccagcagcagcggcgacaagatcgtggtgagcagctgcaagtgcaagcccgtgcccctgctggagctggccgagggccagaagcagacctgcgtgaacctgaacagcaccagcatgtacctggtgagcggcggcctgaacaacaccgtgaacatctgggacctgaagagcaagagagtgcacagaagcctgaaggaccacaaggaccaggtgacctgcgtgacctacaactggaacgactgctacatcgccagcggcagcctgagcggcgagatcatcctgcacagcgtgaccaccaacctgagcagcacccccttcggccacggcagcaaccagagcgtgagacacctgaagtacagcctgttcaagaagagcctgctgggcagcgtgagcgacaacggcatcgtgaccctgtgggacgtgaacagccagagcccctaccacaacttcgacagcgtgcacaaggcccccgccagcggcatctgcttcagccccgtgaacgagctgctgttcgtgaccatcggcctggacaagagaatcatcctgtacgacaccagcagcaagaagctggtgaagaccctggtggccgacacccccctgaccgccgtggacttcatgcccgacggcgccaccctggccatcggcagcagcagaggcaagatctaccagtacgacctgagaatgctgaagagccccgtgaagaccatcagcgcccacaagaccagcgtgcagtgcatcgccttccagtacagcaccgtgctgaccaagagcagcctgaacaagggctgcagcaacaagcccaccaccgtgaacaagagaagcgtgaacgtgaacgccgccagcggcggcgtgcagaacagcggcatcgtgagagaggcccccgccaccagcatcgccaccgtgctgccccagcccatgaccagcgccatgggcaagggcaccgtggccgtgcaggagaaggccggcctgcccagaagcatcaacaccgacaccctgagcaaggagaccgacagcggcaagaaccaggacttcagcagcttcgacgacaccggcaagagcagcctgggcgacatgttcagccccatcagagacgacgccgtggtgaacaagggcagcgacgagagcatcggcaagggcgacggcttcgacttcctgccccagctgaacagcgtgttcccccccagaaagaaccccgtgaccagcagcaccagcgtgctgcacagcagccccctgaacgtgttcatgggcagccccggcaaggaggagaacgagaacagagacctgaccgccgagagcaagaagatctacatgggcaagcaggagagcaaggacagcttcaagcagctggccaagctggtgaccagcggcgccgagagcggcaacctgaacaccagccccagcagcaaccagaccagaaacagcgagaagttcgagaagcccgagaacgagatcgaggcccagctgatctgcgagccccccatcaacggcagcagcacccccaaccccaagatcgccagcagcgtgaccgccggcgtggccagcagcctgagcgagaagatcgccgacagcatcggcaacaacagacagaacgcccccctgaccagcatccagatcagattcatccagaacatgatccaggagaccctggacgacttcagagaggcctgccacagagacatcgtgaacctgcaggtggagatgatcaagcagttccacatgcagctgaacgagatgcacagcctgctggagagatacagcgtgaacgagggcctggtggccgagatcgagagactgagagaggagaacaagagactgagagcccacttctag

SEQ ID NO: 282081 - DNA, 504 bp, Artificial Sequence
  derived and/or modified sequence
atgcacttcaccggcgccgtgatgcaggagaacctgagattcgccagcagcggcgacgacatcaagatctgggacgccagcagcatgaccctggtggacaagttcaacccccacaccagcccccacggcatcagcagcatctgctggagcagcaacaacaacttcctggtgaccgccagcagcagcggcgacaagatcgtggtgagcagctgcaagtgcaagcccgtgcccctgctggagctggccgagggccagaagcagacctgcgtgaacctgaacagcaccagcatgtacctggtgagcggcggcctgaacaacaccgtgaacatctgggacctgaagagcaagagagtgcacagaagcctgaaggaccacaaggaccaggtgacctgcgtgacctacaactggaacgactgctacatcgccagcggcagcctgagcggcgagatcatcctgcacagcgtgaccaccaacctgagcagcacccccttcggccacggctag

SEQ ID NO: 282082 - DNA, 2004 bp, Artificial Sequence
  derived and/or modified sequence
atgcacttcaccggcgccgtgatgcaggagaacctgagattcgccagcagcggcgacgacatcaagatctgggacgccagcagcatgaccctggtggacaagttcaacccccacaccagcccccacggcatcagcagcatctgctggagcagcaacaacaacttcctggtgaccgccagcagcagcggcgacaagatcgtggtgagcagctgcaagtgcaagcccgtgcccctgctggagctggccgagggccagaagcagacctgcgtgaacctgaacagcaccagcatgtacctggtgagcggcggcctgaacaacaccgtgaacatctgggacctgaagagcaagagagtgcacagaagcctgaaggaccacaaggaccaggtgacctgcgtgacctacaactggaacgactgctacatcgccagcggcagcctgagcggcgagatcatcctgcacagcgtgaccaccaacctgagcagcacccccttcggccacggcagcaaccagagcgtgagacacctgaagtacagcctgttcaagaagagcctgctgggcagcgtgagcgacaacggcatcgtgaccctgtgggacgtgaacagccagagcccctaccacaacttcgacagcgtgcacaaggcccccgccagcggcatctgcttcagccccgtgaacgagctgctgttcgtgaccatcggcctggacaagagaatcatcctgtacgacaccagcagcaagaagctggtgaagaccctggtggccgacacccccctgaccgccgtggacttcatgcccgacggcgccaccctggccatcggcagcagcagaggcaagatctaccagtacgacctgagaatgctgaagagccccgtgaagaccatcagcgcccacaagaccagcgtgcagtgcatcgccttccagtacagcaccgtgctgaccaagagcagcctgaacaagggctgcagcaacaagcccaccaccgtgaacaagagaagcgtgaacgtgaacgccgccagcggcggcgtgcagaacagcggcatcgtgagagaggcccccgccaccagcatcgccaccgtgctgccccagcccatgaccagcgccatgggcaagggcaccgtggccgtgcaggagaaggccggcctgcccagaagcatcaacaccgacaccctgagcaaggagaccgacagcggcaagaaccaggacttcagcagcttcgacgacaccggcaagagcagcctgggcgacatgttcagccccatcagagacgacgccgtggtgaacaagggcagcgacgagagcatcggcaagggcgacggcttcgacttcctgccccagctgaacagcgtgttcccccccagaaagaaccccgtgaccagcagcaccagcgtgctgcacagcagccccctgaacgtgttcatgggcagccccggcaaggaggagaacgagaacagagacctgaccgccgagagcaagaagatctacatgggcaagcaggagagcaaggacagcttcaagcagctggccaagctggtgaccagcggcgccgagagcggcaacctgaacaccagccccagcagcaaccagaccagaaacagcgagaagttcgagaagcccgagaacgagatcgaggcccagctgatctgcgagccccccatcaacggcagcagcacccccaaccccaagatcgccagcagcgtgaccgccggcgtggccagcagcctgagcgagaagatcgccgacagcatcggcaacaacagacagaacgcccccctgaccagcatccagatcagattcatccagaacatgatccaggagaccctggacgacttcagagaggcctgccacagagacatcgtgaacctgcaggtggagatgatcaagcagttccacatgcagctgaacgagatgcacagcctgctggagagatacagcgtgaacgagggcctggtggccgagatcgagagactgagagaggagaacaagagactgagagcccacttctag

SEQ ID NO: 282083 - protein, 735 aa, Artificial Sequence
  derived and/or modified sequence
MAKERGLISPSDFAQLQKYMEYSTKKVSDVLKLFEDGEMAKYVQGDAIGYEGFQQFLKIYLEVDNVPRHLSLALFQSFETGHCLNETNVTKDVVCLNDVSCYFSLLEGGRPEDKLEFTFKLYDTDRNGILDSSEVDKIILQMMRVAEYLDWDVSELRPILQEMMKEIDYDGSGSVSQAEWVRAGATTVPLLVLLGLEMTLKDDGQHMWRPKRFPRPVYCNLCESSIGLGKQGLSCNLCKYTVHDQCAMKALPCEVSTYAKSRKDIGVQSHVWVRGGCESGRCDRCQKKIRIYHSLTGLHCVWCHLEIHDDCLQAVGHECDCGLLRDHILPPSSIYPSVLASGPDRKNSKTSQKTMDDLNLSTSEALRIDPVPNTHPLLVFVNPKSGGKQGQRVLWKFQYILNPRQVFNLLKDGPEIGLRLFKDVPDSRILVCGGDGTVGWILETIDKANLPVLPPVAVLPLGTGNDLARCLRWGGGYEGQNLAKILKDLEMSKVVHMDRWSVEVIPQQTEEKSDPVPFQIINNYFSIGVDASIAHRFHIMREKYPEKFNSRMKNKLWYFEFATSESIFSTCKKLEESLTVEICGKPLDLSNLSLEGIAVLNIPSMHGGSNLWGDTRRPHGDIYGINQALGATAKVITDPDILKTCVPDLSDKRLEVVGLEGAIEMGQIYTKLKNAGRRLAKCSEITFHTTKTLPMQIDGEPWMQTPCTIKITHKNQMPMLMGPPPRSTNFFGFLS

SEQ ID NO: 282084 - DNA, 66 bp, Artificial Sequence
  derived and/or modified sequence
atggctaaggagagggggcttatttctcctagtgattttgcccaactacagaagtacatggagtag

SEQ ID NO: 282085 - DNA, 135 bp, Artificial Sequence
  derived and/or modified sequence
atggcgaaggagcgtggattaatctcaccttccgattttgcccagctccaaaagtacatggaatactctacaaaaaaggtgtctgacgttctaaagctctttgaagatggggagatggcgaaatatgtacagtag

SEQ ID NO: 282086 - DNA, 135 bp, Artificial Sequence
  derived and/or modified sequence
atggcaaaggaacgcggcctgatttcacccagcgactttgcccagctccagaagtatatggaatacagcacaaaaaaggtgtccgacgtgctaaagttgtttgaagatggcgagatggctaagtacgtgcagtag

SEQ ID NO: 282087 - DNA, 135 bp, Artificial Sequence
  derived and/or modified sequence
atggcgaaagaaagggggcttatctctcccagtgatttcgcgcagcttcagaagtacatggaatatagcaccaagaaggtgtccgatgtccttaaactttttgaggatggcgagatggccaaatacgtgcagtag

SEQ ID NO: 282088 - DNA, 66 bp, Artificial Sequence
  derived and/or modified sequence
atggccaaggagcggggcctcatcagccccagcgactttgcccagctgcagaagtacatggagtag

SEQ ID NO: 282089 - DNA, 135 bp, Artificial Sequence
  derived and/or modified sequence
atggccaaggagcggggcctcatcagccccagcgactttgcccagctgcagaagtacatggagtacagcaccaagaaggtgtctgatgtgctgaagctgtttgaagatggagagatggccaagtatgtgcagtag

SEQ ID NO: 282090 - DNA, 66 bp, Artificial Sequence
  derived and/or modified sequence
atggccaaggagcggggcctgatcagccccagcgacttcgcccagctgcagaagtacatggagtag

SEQ ID NO: 282091 - DNA, 135 bp, Artificial Sequence
  derived and/or modified sequence
atggccaaggagcggggcctgatcagccccagcgacttcgcccagctgcaaaaatacatggagtatagcactaaaaaggtttcagacgtattgaaattattcgaagacggagaaatggctaagtacgtgcagtag

SEQ ID NO: 282092 - DNA, 135 bp, Artificial Sequence
  derived and/or modified sequence
atggccaaggagcggggcctgatcagccccagcgacttcgcccagcttcagaaatacatggagtactcgacaaaaaaagtttccgacgtgttgaagttattcgaagacggtgagatggcaaaatacgttcagtag

SEQ ID NO: 282093 - DNA, 135 bp, Artificial Sequence
  derived and/or modified sequence
atggccaaggagcggggcctgatcagccccagcgacttcgcccagctgcagaagtatatggaatatagtaccaagaaagtaagtgatgtgttgaaactgttcgaagacggcgagatggccaagtatgtgcagtag

SEQ ID NO: 282094 - DNA, 66 bp, Artificial Sequence
  derived and/or modified sequence
atggccaaagagcgcggtctcataagcccgagtgacttcgctcaactccagaagtacatggaatag

SEQ ID NO: 282095 - DNA, 135 bp, Artificial Sequence
  derived and/or modified sequence
atggccaaagagcgcggactgatttccccctctgactttgctcagctgcagaagtatatggagtatagcactaaaaaggtgtccgatgtccttaaactgttcgaggatggagaaatggccaaatatgtacagtag

SEQ ID NO: 282096 - DNA, 135 bp, Artificial Sequence
  derived and/or modified sequence
atggcgaaagagcggggtcttatttctccttctgactttgcacagctccaaaagtacatggagtacagtacgaaaaaggttagcgacgtactgaagctgttcgaggatggcgaaatggccaaatatgtccaatag

SEQ ID NO: 282097 - DNA, 135 bp, Artificial Sequence
  derived and/or modified sequence
atggcaaaagaacgaggactgataagtccctcagattttgcccagctgcagaaatacatggaatattcgaccaagaaagtgtccgacgtgctgaaactgttcgaggatggcgaaatggctaaatatgtgcaatag

SEQ ID NO: 282098 - DNA, 66 bp, Artificial Sequence
  derived and/or modified sequence
atggccaaggagagaggcctgatcagccccagcgacttcgcccagctgcagaagtacatggagtag

SEQ ID NO: 282099 - DNA, 135 bp, Artificial Sequence
  derived and/or modified sequence
atggccaaggagagaggcctgatcagccccagcgacttcgcccagctgcagaagtacatggagtacagcaccaagaaggtgagcgacgtgctgaagctgttcgaggacggcgagatggccaagtacgtgcagtag

SEQ ID NO: 282100 - DNA, 2909 bp, Artificial Sequence
  derived and/or modified sequence
acacaatacccacacatgcatatacccttctagtcagaggtctcccctcccccttcttcccacccccaggtgtaagaaggacgattccaggaacctaaggctttgttactctgccccattttcaatgaagggtaggagggagttagacaggggttggggcggggccagtgagcaggatgcctgggtctccagttcctgccagtgagtccctaggcctccatctctctcccttgctgtaccaccttcaccaccatccatgcgaccccaagagccttaatgactctagaagagactccaggcaggggaagctgaaaggacctttcactccctacttttggccagggccttctgtgccacctgccaagaccagcaggcctaccctctgaagaggtccaagcaacggaagtactactacgaagctgcctttctggccatccttgagaaaaatagacagatggccaaggagaggggcctaataagccccagtgattttgcccagctgcaaaaatacatggaatactccaccaaaaaggtcagtgatgtcctaaagctcttcgaggatggcgagatggctaaatatgtccaaggagatgccattgggtacgagggattccagcaattcctgaaaatctatctcgaagtggataatgttcccagacacctaagcctggcactgtttcaatcctttgagactggtcactgcttaaatgagacaaatgtgacaaaagatgtggtgtgtctcaatgatgtttcctgctacttttcccttctggagggtggtcggccagaagacaagttagaattcaccttcaagctgtacgacacggacagaaatgggatcctggacagctcagaagtggacaaaattatcctacagatgatgcgagtggctgaatacctggattgggatgtgtctgagctgaggccgattcttcaggagatgatgaaagagattgactatgatggcagtggctctgtctctcaagctgagtgggtccgggctggggccaccaccgtgccactgctagtgctgctgggtctggagatgactctgaaggacgacggacagcacatgtggaggcccaagaggttccccagaccagtctactgcaatctgtgcgagtcaagcattggtcttggcaaacagggactgagctgtaacctctgtaagtacactgttcacgaccagtgtgccatgaaagccctgccttgtgaagtcagcacctatgccaagtctcggaaggacattggtgtccaatcacatgtgtgggtgcgaggaggctgtgagtccgggcgctgcgaccgctgtcagaaaaagatccggatctaccacagtctgaccgggctgcattgtgtatggtgccacctagagatccacgatgactgcctgcaagcggtgggccatgagtgtgactgtgggctgctccgggatcacatcctgcctccatcttccatctatcccagtgtcctggcctctggaccggatcgtaaaaatagcaaaacaagccagaagaccatggatgatttaaatttgagcacctctgaggctctgcggattgaccctgttcctaacacccacccacttctcgtctttgtcaatcctaagagtggcgggaagcaggggcaaagggtgctctggaagttccagtatatattaaaccctcgacaggtgttcaacctcctaaaggatggtcctgagatagggctccgattattcaaggatgttcctgatagccggattttggtgtgtggtggagacggcacagtaggctggattctagagaccattgacaaagctaacttgccagttttgcctcctgttgctgtgttgcccctgggtactggaaatgatctggctcgatgcctaagatggggaggaggttatgaaggacagaatctggcaaagatcctcaaggatttagagatgagtaaagtggtacatatggatcgatggtctgtggaggtgatacctcaacaaactgaagaaaaaagtgacccagtcccctttcaaatcatcaataactacttctctattggcgtggatgcctctattgctcatcgattccacatcatgcgagagaaatatccggagaagttcaacagcagaatgaagaacaagctatggtacttcgaatttgccacatctgaatccatcttctcaacatgcaaaaagctggaggagtctttgacagttgagatctgtgggaaaccgctggatctgagcaacctgtccctagaaggcatcgcagtgctaaacatccctagcatgcatggtggctccaacctctggggtgataccaggagaccccatggggatatctatgggatcaaccaggccttaggtgctacagctaaagtcatcaccgaccctgatatcctgaaaacctgtgtaccagacctaagtgacaagagactggaagtggttgggctggagggtgcaattgagatgggccaaatctataccaagctcaagaatgctggacgtcggctggccaagtgctctgagatcaccttccacaccacaaaaacccttcccatgcaaattgacggagaaccctggatgcagacgccctgtacaatcaagatcacccacaagaaccagatgcccatgctcatgggcccacccccccgctccaccaatttctttggcttcttgagctaagggggacacccttggcctccaagccagccttgaacccacctccctgtccctggactctactcccgaggctctgtacattgctgccacatactcctgccagcttgggggagtgttccttcaccctcacagtatttattatcctgcaccacctcactgttccccatgcgcacacacatacacacaccccaaaacacatacattgaaagtgcctcatctgaataaaatgacttgtgtttcccctttggga

SEQ ID NO: 282101 - DNA, 2770 bp, Artificial Sequence
  derived and/or modified sequence
gcggccgcgtctgcctggcccgtcccctccagcccagctcgggctccagctccagcgccggcgcttcagctgcgaccgcgagccctctcaagcaaggtagagaccccgcgagccccccagcgccccaccctcccccatcggaaaaggacaggggtagggaagccgaggacccacgggctgcgttcgtgctgctgggtcgggaaggaggaagcgtgacagctggagcgggcctaccctctgaagaggtccaagcaacggaagtactactacgaagctgcctttctggccatccttgagaaaaatagacagatggccaaggagaggggcctaataagccccagtgattttgcccagctgcaaaaatacatggaatactccaccaaaaaggtcagtgatgtcctaaagctcttcgaggatggcgagatggctaaatatgtccaaggagatgccattgggtacgagggattccagcaattcctgaaaatctatctcgaagtggataatgttcccagacacctaagcctggcactgtttcaatcctttgagactggtcactgcttaaatgagacaaatgtgacaaaagatgtggtgtgtctcaatgatgtttcctgctacttttcccttctggagggtggtcggccagaagacaagttagaattcaccttcaagctgtacgacacggacagaaatgggatcctggacagctcagaagtggacaaaattatcctacagatgatgcgagtggctgaatacctggattgggatgtgtctgagctgaggccgattcttcaggagatgatgaaagagattgactatgatggcagtggctctgtctctcaagctgagtgggtccgggctggggccaccaccgtgccactgctagtgctgctgggtctggagatgactctgaaggacgacggacagcacatgtggaggcccaagaggttccccagaccagtctactgcaatctgtgcgagtcaagcattggtcttggcaaacagggactgagctgtaacctctgtaagtacactgttcacgaccagtgtgccatgaaagccctgccttgtgaagtcagcacctatgccaagtctcggaaggacattggtgtccaatcacatgtgtgggtgcgaggaggctgtgagtccgggcgctgcgaccgctgtcagaaaaagatccggatctaccacagtctgaccgggctgcattgtgtatggtgccacctagagatccacgatgactgcctgcaagcggtgggccatgagtgtgactgtgggctgctccgggatcacatcctgcctccatcttccatctatcccagtgtcctggcctctggaccggatcgtaaaaatagcaaaacaagccagaagaccatggatgatttaaatttgagcacctctgaggctctgcggattgaccctgttcctaacacccacccacttctcgtctttgtcaatcctaagagtggcgggaagcaggggcaaagggtgctctggaagttccagtatatattaaaccctcgacaggtgttcaacctcctaaaggatggtcctgagatagggctccgattattcaaggatgttcctgatagccggattttggtgtgtggtggagacggcacagtaggctggattctagagaccattgacaaagctaacttgccagttttgcctcctgttgctgtgttgcccctgggtactggaaatgatctggctcgatgcctaagatggggaggaggttatgaaggacagaatctggcaaagatcctcaaggatttagagatgagtaaagtggtacatatggatcgatggtctgtggaggtgatacctcaacaaactgaagaaaaaagtgacccagtcccctttcaaatcatcaataactacttctctattggcgtggatgcctctattgctcatcgattccacatcatgcgagagaaatatccggagaagttcaacagcagaatgaagaacaagctatggtacttcgaatttgccacatctgaatccatcttctcaacatgcaaaaagctggaggagtctttgacagttgagatctgtgggaaaccgctggatctgagcaacctgtccctagaaggcatcgcagtgctaaacatccctagcatgcatggtggctccaacctctggggtgataccaggagaccccatggggatatctatgggatcaaccaggccttaggtgctacagctaaagtcatcaccgaccctgatatcctgaaaacctgtgtaccagacctaagtgacaagagactggaagtggttgggctggagggtgcaattgagatgggccaaatctataccaagctcaagaatgctggacgtcggctggccaagtgctctgagatcaccttccacaccacaaaaacccttcccatgcaaattgacggagaaccctggatgcagacgccctgtacaatcaagatcacccacaagaaccagatgcccatgctcatgggcccacccccccgctccaccaatttctttggcttcttgagctaagggggacacccttggcctccaagccagccttgaacccacctccctgtccctggactctactcccgaggctctgtacattgctgccacatactcctgccagcttgggggagtgttccttcaccctcacagtatttattatcctgcaccacctcactgttccccatgcgcacacacatacacacaccccaaaacacatacattgaaagtgcctcatctgaataaaatgacttgtgtttcccctttgggatctgct

SEQ ID NO: 282102 - DNA, 2671 bp, Artificial Sequence
  derived and/or modified sequence
agcccagctcgggctccagctccagcgccggcgcttcagctgcgaccgcgagccctctcaagcaaggtagagaccccgcgagccccccagcgccccaccctcccccatcggaaaaggacaggggcctaccctctgaagaggtccaagcaacggaagtactactacgaagctgcctttctggccatccttgagaaaaatagacagatggccaaggagaggggcctaataagccccagtgattttgcccagctgcaaaaatacatggaatactccaccaaaaaggtcagtgatgtcctaaagctcttcgaggatggcgagatggctaaatatgtccaaggagatgccattgggtacgagggattccagcaattcctgaaaatctatctcgaagtggataatgttcccagacacctaagcctggcactgtttcaatcctttgagactggtcactgcttaaatgagacaaatgtgacaaaagatgtggtgtgtctcaatgatgtttcctgctacttttcccttctggagggtggtcggccagaagacaagttagaattcaccttcaagctgtacgacacggacagaaatgggatcctggacagctcagaagtggacaaaattatcctacagatgatgcgagtggctgaatacctggattgggatgtgtctgagctgaggccgattcttcaggagatgatgaaagagattgactatgatggcagtggctctgtctctcaagctgagtgggtccgggctggggccaccaccgtgccactgctagtgctgctgggtctggagatgactctgaaggacgacggacagcacatgtggaggcccaagaggttccccagaccagtctactgcaatctgtgcgagtcaagcattggtcttggcaaacagggactgagctgtaacctctgtaagtacactgttcacgaccagtgtgccatgaaagccctgccttgtgaagtcagcacctatgccaagtctcggaaggacattggtgtccaatcacatgtgtgggtgcgaggaggctgtgagtccgggcgctgcgaccgctgtcagaaaaagatccggatctaccacagtctgaccgggctgcattgtgtatggtgccacctagagatccacgatgactgcctgcaagcggtgggccatgagtgtgactgtgggctgctccgggatcacatcctgcctccatcttccatctatcccagtgtcctggcctctggaccggatcgtaaaaatagcaaaacaagccagaagaccatggatgatttaaatttgagcacctctgaggctctgcggattgaccctgttcctaacacccacccacttctcgtctttgtcaatcctaagagtggcgggaagcaggggcaaagggtgctctggaagttccagtatatattaaaccctcgacaggtgttcaacctcctaaaggatggtcctgagatagggctccgattattcaaggatgttcctgatagccggattttggtgtgtggtggagacggcacagtaggctggattctagagaccattgacaaagctaacttgccagttttgcctcctgttgctgtgttgcccctgggtactggaaatgatctggctcgatgcctaagatggggaggaggttatgaaggacagaatctggcaaagatcctcaaggatttagagatgagtaaagtggtacatatggatcgatggtctgtggaggtgatacctcaacaaactgaagaaaaaagtgacccagtcccctttcaaatcatcaataactacttctctattggcgtggatgcctctattgctcatcgattccacatcatgcgagagaaatatccggagaagttcaacagcagaatgaagaacaagctatggtacttcgaatttgccacatctgaatccatcttctcaacatgcaaaaagctggaggagtctttgacagttgagatctgtgggaaaccgctggatctgagcaacctgtccctagaaggcatcgcagtgctaaacatccctagcatgcatggtggctccaacctctggggtgataccaggagaccccatggggatatctatgggatcaaccaggccttaggtgctacagctaaagtcatcaccgaccctgatatcctgaaaacctgtgtaccagacctaagtgacaagagactggaagtggttgggctggagggtgcaattgagatgggccaaatctataccaagctcaagaatgctggacgtcggctggccaagtgctctgagatcaccttccacaccacaaaaacccttcccatgcaaattgacggagaaccctggatgcagacgccctgtacaatcaagatcacccacaagaaccagatgcccatgctcatgggcccacccccccgctccaccaatttctttggcttcttgagctaagggggacacccttggcctccaagccagccttgaacccacctccctgtccctggactctactcccgaggctctgtacattgctgccacatactcctgccagcttgggggagtgttccttcaccctcacagtatttattatcctgcaccacctcactgttccccatgcgcacacacatacacacaccccaaaacacatacattgaaagtgcctcatctgaataaaatgacttgtgtttcccctttgggatctgctaagtaa

SEQ ID NO: 282103 - protein, 216 aa, Artificial Sequence
  derived and/or modified sequence
MSTIPKRAVCPFSTQRYGIYERCRELVEAGYDVRQPDKENVTLLHWAAINNRIDLVKYYISKGAIVDQLGGDLNSTPLHWATRQGHLSMVVQLMKYGADPSLIDGEGCSCIHLAAQFGHTSIVAYLIAKGQDVDMMDQNGMTPLMWAAYRTHSVDPTRLLLTFNVSVNLGDKYHKNTALHWAVLAGNTTVISLLLEAGANVDAQNIKAILRCHMAL

SEQ ID NO: 282104 - DNA, 651 bp, Artificial Sequence
  derived and/or modified sequence
atgagcaccatccccaagagagccgtgtgccccttcagcacccagagatacggcatctacgagagatgcagagagctggtggaggccggctacgacgtgagacagcccgacaaggagaacgtgaccctgctgcactgggccgccatcaacaacagaatcgacctggtgaagtactacatcagcaagggcgccatcgtggaccagctgggcggcgacctgaacagcacccccctgcactgggccaccagacagggccacctgagcatggtggtgcagctgatgaagtacggcgccgaccccagcctgatcgacggcgagggctgcagctgcatccacctggccgcccagttcggccacaccagcatcgtggcctacctgatcgccaagggccaggacgtggacatgatggaccagaacggcatgacccccctgatgtgggccgcctacagaacccacagcgtggaccccaccagactgctgctgaccttcaacgtgagcgtgaacctgggcgacaagtaccacaagaacaccgccctgcactgggccgtgctggccggcaacaccaccgtgatcagcctgctgctggaggccggcgccaacgtggacgcccagaacatcaaggccatcctgagatgccacatggccctgtag

SEQ ID NO: 282105 - DNA, 651 bp, Artificial Sequence
  derived and/or modified sequence
atgtccaccataccaaagagggccgtttgtccctttagcacacagaggtacgggatctacgagagatgccgggaactcgttgaagcaggctatgacgtcagacaaccagacaaagaaaacgttacgctgctgcactgggcagcaatcaataaccggatagatttagtgaaatattatattagcaagggcgccatcgtcgaccagctaggtggggacctgaacagcacaccgctgcactgggctacaaggcagggtcacttgtccatggtagtccagctgatgaaatacggcgcagatcccagcctaattgacggggaaggctgtagctgtatacacctggcggcacagtttggtcatacgtccatagtcgcctatctgatcgctaaagggcaagacgttgatatgatggatcaaaatggcatgaccccactcatgtgggccgcgtacagaacacactccgtcgacccgactcgcctgctgctgacatttaacgtctctgtaaatcttggggacaaataccacaagaatactgcgctccactgggccgtgcttgccggcaacacaactgtaatatcacttttgctcgaggcgggcgccaacgtcgatgcacagaacattaaagcaatactgcggtgtcatatggccttatag

SEQ ID NO: 282106 - DNA, 651 bp, Artificial Sequence
  derived and/or modified sequence
atgagcaccatccccaagagagctgtgtgccccttcagcacccagagatatggcatctatgagcgctgccgggagctggtggaggccggctatgatgtgcggcagcctgacaaggaaaatgtgaccctgctgcactgggccgccatcaacaacagaattgacctggtgaagtactacatcagcaagggggccatcgtggaccagctgggcggggacctgaacagcacccccctgcactgggccacccggcagggccacctgtccatggtggtgcagctgatgaagtacggggctgaccccagcctgattgatggagagggctgcagctgcatccacctggccgcccagtttggccacaccagcatcgtggcctacctgattgccaagggccaggatgtggacatgatggaccagaatggcatgacccccctgatgtgggccgcctaccgcacccacagcgtggaccccacccggctgctgctgaccttcaacgtgtctgtgaacctgggggacaagtaccacaagaacacagccctgcactgggccgtgctggccggcaacaccaccgtcatcagcctgctgctggaggccggggccaacgtggatgcccagaacatcaaggccatcctgcgctgccacatggccctgtag

SEQ ID NO: 282107 - DNA, 651 bp, Artificial Sequence
  derived and/or modified sequence
atgagcaccatccccaagcgggccgtgtgccccttcagcacccagagatacggaatttacgaaaggtgtcgagagttagtcgaagccggctatgatgtgcgccagccggataaggagaatgtaacattacttcattgggccgccattaataaccggatcgacttagtaaagtactatatttccaaaggtgccattgtagatcaactgggcggggatctcaattcaactcctctgcactgggcaactcggcaaggtcatctgagcatggttgttcagctgatgaagtatggcgccgaccccagcctgattgatggagagggatgctcctgcatacacttggccgctcagtttgggcacacctctatcgtcgcctacttgatcgccaagggtcaagacgtggacatgatggaccagaatggtatgacaccactgatgtgggccgcttaccgtacacattcagttgatcccacaagacttctgctgaccttcaacgttagtgtcaatctcggcgataagtaccataaaaacacggcactccactgggctgtcttggctgggaacaccacagtgatttccttacttctagaagctggagccaacgtggatgcccagaatatcaaggcaatcctgaggtgtcacatggctctgtag

SEQ ID NO: 282108 - DNA, 651 bp, Artificial Sequence
  derived and/or modified sequence
atgagcacaatccctaagagagctgtgtgtccattttccacccagagatatggaatttatgaaagatgtagagaattggtagaggccggttacgacgtccggcagcctgacaaggagaatgtcacactgttgcactgggctgccattaacaacagaatcgacctggtgaagtattacatctctaaaggtgctatcgtcgaccagctaggcggagacctgaacagcacacccctgcattgggccactcggcaagggcacctgtctatggttgtccagctgatgaagtatggggctgacccctcattgatagacggcgaaggatgtagctgtatccacctggcagcccagttcggccacacctctatcgtcgcgtacctgatcgctaaaggacaggacgtcgatatgatggatcagaacgggatgactcctctaatgtgggctgcttacaggacacatagcgtggaccccactcgcctgttattgactttcaacgtaagcgtgaacctgggggacaagtaccacaagaacaccgccctccattgggccgtcctggcgggaaacacgaccgtaattagcctgctcctagaagccggagccaatgtagacgcccagaacataaaagccatattgaggtgtcatatggctctctag

SEQ ID NO: 282109 - DNA, 1346 bp, Artificial Sequence
  derived and/or modified sequence
ttgtatccatgtttttccgggcgtcccccggagggacaggttgcgggtgaccttttcaagtgtggaggaaagggaagctgcttttgtcttcaggaatgatgcaggtctcgactcaagcctgacgggcccaaacctccctggagctggctgacgactctgcccgagttcctgaagaggggtcccgggggtcccggagcggaagtgggagcgcgtgggcgtgggctcctcggctgcctggggctccagacttgtgctgcgtgcggctccggagctctgttctcgctcctgagcagctgctaggtttcccaagcgactgtctcaaccgcccggccgcctcccccgggcagccagagcttcacatctacctccagccgggacccgcccccgagccgcggggcccacgcccagagccctccgccgtccccagcgcagtgcagcagagcgcgatccagtctggggccgggccgcgcttccgcgcacgcgcggagaaacccgcgccctccgaggggggaggggacagagggggcgtcacgggggcaggagaagaaggaggaggaggcccgcgtcgcctccggcggggctcgcgctcgccccgcgctcgccctccgcctcgcccgagccccgggagggtgaaacgctttctcccagcatgcagcgggaggagggatttaacaccaagatggcggacggcccggatgagtacgataccgaagcgggctgtgtgccccttctccacccagagatatggaatatatgaacgctgtcgagaattggtggaagcaggttatgatgtacggcaaccggacaaagaaaatgttaccctcctccattgggctgccatcaataacagaatagatttagtcaaatactatatttcgaaaggtgctattgtggatcaacttggaggggacctgaattcaactccattgcactgggccacaagacaaggccatctatccatggttgtgcaactaatgaaatatggtgcagatccttcattaattgatggagaaggatgtagctgtattcatctggctgctcagttcggacatacctcaattgttgcttatctcatagcaaaaggacaggatgtagatatgatggatcagaatggaatgacgcctttaatgtgggcagcatatagaacacatagtgtggatccaactagattgcttttaacattcaatgtttcagttaaccttggtgacaagtatcacaaaaacactgctctgcattgggcagtgctagcagggaataccacagtcattagccttcttctggaagctggagctaatgttgatgcccagaatatcaaggcaatccttaggtgtcacatggccctctag

SEQ ID NO: 282110 - protein, 120 aa, Artificial Sequence
  derived and/or modified sequence
MWLGRRALCALVLLLACASLGLLYASTRDAPGLRLPLAPWAPPQSPRRPELPDLAPEPRYAHIPVRIKEQVVGLLAWNNCSCESSGGGLPLPFQKQVRAIDLTKAFDPAELRAASATREQ

SEQ ID NO: 282111 - protein, 507 aa, Artificial Sequence
  derived and/or modified sequence
MLGKDMVRFVVRKTVQRSVAKGSRRCKKRMFKFHQMKHIFEILDKMRCLRKRSTVSFLGVLVIFLLFMNLYIEDSYVLEGDKQLIRETSTHQLNSERYVHTFKDLSNFSGAINVTYRYLAATPLQRKRYLTIGLSSVKRKKGNYLLETIKSIFEQSSYEELKEISVVVHLADFNSSWRDAMVQDITQKFAHHIIAGRLMVIHAPEEYYPILDGLKRNYNDPEDRVKFRSKQNVDYAFLLNFCANTSDYYVMLEDDVRCSKNFLTAIKKVIASLEGTYWVTLEFSKLGYIGKLYHSHDLPRLAHFLLMFYQEMPCDWLLTHFRGLLAQKNVIRFKPSLFQHMGYYSSYKGTENKLKDDDFEEESFDIPDNPPASLYTNMNVFENYEASKAYSSVDEYFWGKPPSTGDVFVIVFENPIIIKKIKVNTGTEDRQNDILHHGALDVGENVMPSKQRRQCSTYLRLGEFKNGNFEMSGVNQKIPFDIHCMRIYVTKTQKEWLIIRSISIWTS

SEQ ID NO: 282112 - DNA, 1524 bp, Artificial Sequence
  derived and/or modified sequence
atgctgggcaaggacatggtgagattcgtggtgagaaagaccgtgcagagaagcgtggccaagggcagcagaagatgcaagaagagaatgttcaagttccaccagatgaagcacatcttcgagatcctggacaagatgagatgcctgagaaagagaagcaccgtgagcttcctgggcgtgctggtgatcttcctgctgttcatgaacctgtacatcgaggacagctacgtgctggagggcgacaagcagctgatcagagagaccagcacccaccagctgaacagcgagagatacgtgcacaccttcaaggacctgagcaacttcagcggcgccatcaacgtgacctacagatacctggccgccacccccctgcagagaaagagatacctgaccatcggcctgagcagcgtgaagagaaagaagggcaactacctgctggagaccatcaagagcatcttcgagcagagcagctacgaggagctgaaggagatcagcgtggtggtgcacctggccgacttcaacagcagctggagagacgccatggtgcaggacatcacccagaagttcgcccaccacatcatcgccggcagactgatggtgatccacgcccccgaggagtactaccccatcctggacggcctgaagagaaactacaacgaccccgaggacagagtgaagttcagaagcaagcagaacgtggactacgccttcctgctgaacttctgcgccaacaccagcgactactacgtgatgctggaggacgacgtgagatgcagcaagaacttcctgaccgccatcaagaaggtgatcgccagcctggagggcacctactgggtgaccctggagttcagcaagctgggctacatcggcaagctgtaccacagccacgacctgcccagactggcccacttcctgctgatgttctaccaggagatgccctgcgactggctgctgacccacttcagaggcctgctggcccagaagaacgtgatcagattcaagcccagcctgttccagcacatgggctactacagcagctacaagggcaccgagaacaagctgaaggacgacgacttcgaggaggagagcttcgacatccccgacaacccccccgccagcctgtacaccaacatgaacgtgttcgagaactacgaggccagcaaggcctacagcagcgtggacgagtacttctggggcaagccccccagcaccggcgacgtgttcgtgatcgtgttcgagaaccccatcatcatcaagaagatcaaggtgaacaccggcaccgaggacagacagaacgacatcctgcaccacggcgccctggacgtgggcgagaacgtgatgcccagcaagcagagaagacagtgcagcacctacctgagactgggcgagttcaagaacggcaacttcgagatgagcggcgtgaaccagaagatccccttcgacatccactgcatgagaatctacgtgaccaagacccagaaggagtggctgatcatcagaagcatcagcatctggaccagctag

SEQ ID NO: 282113 - DNA, 1524 bp, Artificial Sequence
  derived and/or modified sequence
atgcttggaaaggacatggttagattcgtcgtgcggaagacggtgcagcgcagtgttgctaagggaagtcgaagatgtaagaagcgcatgtttaagttccatcagatgaaacatatctttgagattttggataagatgcgctgcctgagaaaacgaagtaccgtctccttccttggcgtcctcgtgatctttcttcttttcatgaatttgtacattgaagactcatatgtcctggagggggataagcagttaataagagaaactagtacacaccagctgaattcagagaggtacgttcacaccttcaaggacctgtcgaatttctctggggcgatcaacgtaacttatcgatatctagccgccactccattgcaacggaagagatacctcaccatcggcctctcttccgtgaagcggaagaagggtaactacctgttagagaccataaagagtatctttgagcagtcgagttatgaagaattgaaagagatatccgtggtcgtgcacctggcagattttaattcctcttggcgggacgcaatggttcaggacatcacacagaagtttgcgcatcacataattgctgggaggctcatggtgattcatgccccggaggagtactatccaattctggacggactgaagagaaattacaacgatcctgaggatcgcgtcaagtttcgaagtaaacaaaacgtcgactatgcctttctgctgaacttctgcgccaatactagcgattactatgtgatgctcgaggatgatgtcaggtgctccaaaaatttcctgaccgctatcaagaaggtgattgccagtttggaggggacttactgggtgacgctcgaattttcaaagctgggatacatcggaaaattataccattcccatgacctacctcggctcgcacactttctattgatgttctaccaggaaatgccttgtgactggttgctgacgcatttccgagggctgctggctcagaaaaacgtaatccggttcaagccaagcctgttccagcacatggggtactactcctcatataagggaaccgagaacaaactcaaggacgacgacttcgaagaagaatcattcgatatccctgataatccgcccgcaagtctgtacacaaacatgaacgtattcgaaaattatgaagcctccaaagcttattctagcgttgacgagtatttctggggcaaaccgcccagcactggcgacgtgttcgtaattgtgttcgagaatcccattatcatcaagaaaatcaaggtaaataccggtacagaggacaggcagaatgacatccttcaccatggggctctcgacgttggtgagaatgtgatgccctccaaacagcggcggcagtgctccacttatctgaggcttggtgagtttaaaaacgggaatttcgaaatgtccggcgtaaaccagaaaatccccttcgacatccactgtatgaggatctatgttacaaagacccaaaaagagtggctgataatccgcagtatcagcatctggacgtcttag

SEQ ID NO: 282114 - DNA, 1524 bp, Artificial Sequence
  derived and/or modified sequence
atgctgggcaaggacatggtgcgctttgtggtgaggaagacagtgcagaggtctgtggccaagggcagccgccgctgcaagaagaggatgttcaagttccaccagatgaagcacatctttgagatcctggacaagatgcgctgcctgaggaagaggagcacagtgtccttcctgggcgtgctggtgatcttcctgctcttcatgaacctgtacattgaagattcctatgtgctggagggggacaagcagctgatccgggagaccagcacccaccagctgaacagcgagcgctacgtgcacaccttcaaggacctgagcaacttcagcggggccatcaacgtgacctaccgctacctggccgccacccccctgcagaggaagcgctacctgaccatcggcctgagctctgtgaagaggaagaagggcaactacctgctggagaccatcaagagcatctttgagcagagcagctatgaggagctgaaggagatctctgtggtggtgcacctggccgacttcaacagctcctggagagatgccatggtgcaggacatcacccagaagtttgcccaccacatcatcgccggccgcctgatggtgatccacgcccctgaggagtactaccccatcctggatggcctgaagaggaactacaatgaccctgaggacagagtgaagttccgcagcaagcagaatgtggactatgccttcctgctgaacttctgtgccaacaccagtgactactacgtgatgctggaggatgatgtgcgctgcagcaagaacttcctgacagccatcaagaaggtgattgccagcctggagggcacctactgggtgaccctggagttcagcaagctgggctacatcggcaagctgtaccacagccatgacctgccccggctggcccacttcctgctgatgttctaccaggagatgccctgtgactggctgctgacccacttccggggcctgctggcccagaagaatgtcatccgcttcaagcccagcctcttccagcacatgggctactacagcagctacaagggcacagagaacaagctgaaggatgatgactttgaggaggagagctttgacatcccagacaaccccccagccagcctgtacaccaacatgaatgtgtttgagaactatgaggccagcaaggcctacagctctgtggatgagtacttctggggcaagccacccagcactggagatgtgtttgtgattgtgtttgagaaccccatcatcatcaagaagatcaaggtgaacacaggaacagaggaccggcagaatgacatcctgcaccacggggccctggatgtgggggagaatgtgatgcccagcaagcagaggcggcagtgcagcacctacctgcggctgggggagttcaagaatggaaactttgagatgtctggagtgaaccagaagatcccctttgacatccactgcatgaggatctacgtgaccaagacccagaaggagtggctgatcatccgcagcatcagcatctggaccagctag

SEQ ID NO: 282115 - DNA, 2075 bp, Artificial Sequence
  derived and/or modified sequence
atgcttgggaaggacatggtcagatttgttgtaagaaagactgtgcagaggagtgtggcaaagggatccagaagatgcaagaagagaatgtttaaatttcatcaaatgaaacatatttttgaaatacttgataaaatgagatgcctgagaaaacgttctacagtgtcattcttgggagttcttgtcatttttctcctttttatgaacttgtacattgaagatagctatgttctggaaggagacaaacaacttataagggaaacatccacacatcaactgaattcagaacgctatgttcatactttcaaggatttatctaatttctcaggagccataaatgtcacctatcgctacctagctgccacacctttacaaagaaagcggtatcttacaattggactttcttcagtaaagcgaaaaaaaggaaactatttacttgagacaattaagtcaatttttgagcaatccagctatgaagagctgaaggaaatttcagtggtggttcacctagcagactttaattcttcctggcgtgatgccatggtccaggatattacacagaaatttgcgcaccatattattgcaggaagattaatggttatacatgctccagaggagtattacccaatcctagatggccttaaaagaaattacaatgatccagaagatagagtcaaatttcgttccaagcaaaatgtagattatgcttttctgcttaatttttgtgccaatacttcagactattatgtaatgcttgaagatgatgttcgatgttcaaaaaatttcttaactgccatcaagaaagtcattgcatccctagaaggaacttactgggtaactcttgaattctctaagcttggctacattggtaaactctatcattctcatgatctcccacgtttggcccattttttattaatgttttatcaagaaatgccttgtgattggctattgactcatttccgtggtctgttggctcagaaaaatgtgatccgttttaaaccatctctctttcagcacatgggctattattcatcatacaaagggacggagaataagctgaaggatgatgattttgaagaggagtcatttgacattcctgataacccccctgcaagtctgtacaccaacatgaatgtgtttgaaaattatgaagcaagcaaggcttacagtagtgttgatgagtacttttgggggaaaccaccttcaacaggagatgtttttgtgattgtatttgaaaatccaattataataaaaaaaattaaagtaaatactggaacagaagatcggcaaaatgatattttgcatcatggagccctagatgttggggaaaacgttatgcctagcaaacaaaggagacaatgttctacttacttaagactaggagaattcaaaaatggaaactttgaaatgtcaggtgtaaatcaaaaaattccatttgatatacattgtatgaggatatatgtcaccaaaacacaaaaggaatggctaattattaggagtattagcatttggacttcttagccaattaaatcagtatgttcagtttctgaagcagttcttcctgcttcgtcttttgctacctttgtcttttggagggaaagcaatggatgggatatgttaaaagaaacattaattacattggcagttttcatttatacattgttgacataattttactcttaatacacacttgtatttattttaacgtctgaagttgaatatcagtctatagctaatgctactttcatttatatttttaaatgttcttagttttaaaatttcaactgattgtcgaaagggtaatatgaaagattttaaatgaaaaaaatttgttggatgatgatttttgaaaaatagtcaccaactgtatatacttcctcaagaactgataattcattatatcatcagatagcttttattaagcatctgtgggaatatacagttgggggaatgataatctggtttattttttctgtaaacttaagtttccgttgacttctgtacatctacaatgaatacctcctcatagaagtggtgtctttacataattttttgtgtaggtgacactatgg

SEQ ID NO: 282116 - DNA, 1523 bp, Artificial Sequence
  derived and/or modified sequence
ggtatcaacggtttctgtacagcacagattatgacagcgtctttcttaagaagagaatgtttaaatttcatcaaatgaaacatatttttgaaatacttgataaaatgagatgcctgagaaaacgttctacagtgtcattcttgggagttcttgtcatttttctcctttttatgaacttgtacattgaagatagctatgttctggaaggagacaaacaacttataagggaaacatccacacatcaactgaattcagaacgctatgttcatactttcaaggatttatctaatttctcaggagccataaatgtcacctatcgctacctagctgccacacctttacaaagaaagcggtatcttacaattggactttcttcagtaaagcgaaaaaaaggaaactatttacttgagacaattaagtcaatttttgagcaatccagctatgaagagctgaaggaaatttcagtggtggttcacctagcagactttaattcttcctggcgtgatgccatggtccaggatattacacagaaatttgcgcaccatattattgcaggaagattaatggttatacatgctccagaggagtattacccaatcctagatggccttaaaagaaattacaatgatccagaagatagagtcaaatttcgttccaagcaaaatgtagattatgcttttctgcttaatttttgtgccaatacttcagactattatgtaatgcttgaagatgatgttcgatgttcaaaaaatttcttaactgccatcaagaaagtcattgcatccctagaaggaacttactgggtaactcttgaattctctaagcttggctacattggtaaactctatcattctcatgatctcccacgtttggcccattttttattaatgttttatcaagaaatgccttgtgattggctattgactcatttccgtggtctgttggctcagaaaaatgtgatccgttttaaaccatctctctttcagcacatgggctattattcatcatacaaagggacggagaataagctgaaggatgatgattttgaagaggagtcatttgacattcctgataacccccctgcaagtctgtacaccaacatgaatgtgtttgaaaattatgaagcaagcaaggcttacagtagtgttgatgagtacttttgggggaaaccaccttcaacaggagatgtttttgtgattgtatttgaaaatccaattataataaaaaaaattaaagtaaatactggaacagaagatcggcaaaatgatattttgcatcatggagccctagatgttggggaaaacgttatgcctagcaaacaaaggagacaatgttctacttacttaagactaggagaattcaaaaatggaaactttgaaatgtcaggtgtaaatcaaaaaattccatttgatatacattgtatgaggatatatgtcaccaaaacacaaaaggaatggctaattattaggagtattagcatttggacttcttagccaattaaatcagtatgttcagtttctgaa

SEQ ID NO: 282117 - DNA, 2297 bp, Artificial Sequence
  derived and/or modified sequence
atttagaaagattttataaatatgatcctaatgcagttagatggaaaatggcaagttattacagagaatactttttattttacttttatcagcaagaaaccagtgggttgtattagtaatattagactttcttttttccagggtatcaacggtttctgtacagcacagattatgacagcgtctttcttaagcagatggaatcttggaacgtctcatgcttgggaaggacatggtcagatttgttgtaagaaagactgtgcagaggagtgtggcaaagggatccagaagatgcaaggtattatttagaaaagaagagaatgtttaaatttcatcaaatgaaacatatttttgaaatacttgataaaatgagatgcctgagaaaacgttctacagtgtcattcttgggagttcttgtcatttttctcctttttatgaacttgtacattgaagatagctatgttctggaaggagacaaacaacttataagggaaacatccacacatcaactgaattcagaacgctatgttcatactttcaaggatttatctaatttctcaggagccataaatgtcacctatcgctacctagctgccacacctttacaaagaaagcggtatcttacaattggactttcttcagtaaagcgaaaaaaaggaaactatttacttgagacaattaagtcaatttttgagcaatccagctatgaagagctgaaggaaatttcagtggtggttcacctagcagactttaattcttcctggcgtgatgccatggtccaggatattacacagaaatttgcgcaccatattattgcaggaagattaatggttatacatgctccagaggagtattacccaatcctagatggccttaaaagaaattacaatgatccagaagatagagtcaaatttcgttccaagcaaaatgtagattatgcttttctgcttaatttttgtgccaatacttcagactattatgtaatgcttgaagatgatgttcgatgttcaaaaaatttcttaactgccatcaagaaagtcattgcatccctagaaggaacttactgggtaactcttgaattctctaagcttggctacattggtaaactctatcattctcatgatctcccacgtttggcccattttttattaatgttttatcaagaaatgccttgtgattggctattgactcatttccgtggtctgttggctcagaaaaatgtgatccgttttaaaccatctctctttcagcacatgggctattattcatcatacaaagggacggagaataagctgaaggatgatgattttgaagaggagtcatttgacattcctgataacccccctgcaagtctgtacaccaacatgaatgtgtttgaaaattatgaagcaagcaaggcttacagtagtgttgatgagtacttttgggggaaaccaccttcaacaggagatgtttttgtgattgtatttgaaaatccaattataataaaaaaaattaaagtaaatactggaacagaagatcggcaaaatgatattttgcatcatggagccctagatgttggggaaaacgttatgcctagcaaacaaaggagacaatgttctacttacttaagactaggagaattcaaaaatggaaactttgaaatgtcaggtgtaaatcaaaaaattccatttgatatacattgtatgaggatatatgtcaccaaaacacaaaaggaatggctaattattaggagtattagcatttggacttcttagccaattaaatcagtatgttcagtttctgaagcagttcttcctgcttcgtcttttgctacctttgtcttttggagggaaagcaatggatgggatatgttaaaagaaacattaattacattggcagttttcatttatacattgttgacataattttactcttaatacacacttgtatttattttaacgtctgaagttgaatatcagtctatagctaatgctactttcatttatatttttaaatgttcttagttttaaaatttcaactgattgtcgaaagggtaatatgaaagattttaaatgaaaaaaatttgttggatgatgatttttgaaaaatagtcaccaactgtatatacttcctcaagaactgataattcattatatcatcagatagcttttattaagcatctgtgggaatatacagttgggggaatgataatctggtttattttttctgtaaacttaagtttccgttgacttctgtacatctacaatgaatacctcctcatagaagtggtgtctttacataattttttgtgtaggtga

SEQ ID NO: 282118 - DNA, 2278 bp, Artificial Sequence
  derived and/or modified sequence
gtcctatttctttcctccttttcctcgaataagcattcgtatgcagatgacgggggccttcaaaagaactggagatcagccagatcacttgtatgcacaaagctgctgtggatctgtctttcaaacaagagctgcagaaaacgctatagcaaggttgaagctttatccactctgactcacccagaaagcacagccctgattctgcgtgagaaaggctatctctacagaaactaaaacggtatcaacggtttctgtacagcacagattatgacagcgtctttcttaagaagagaagagaatgtttaaatttcatcaaatgaaacatatttttgaaatacttgataaaatgagatgcctgagaaaacgttctacagtgtcattcttgggagttcttgtcatttttctcctttttatgaacttgtacattgaagatagctatgttctggaaggagacaaacaacttataagggaaacatccacacatcaactgaattcagaacgctatgttcatactttcaaggatttatctaatttctcaggagccataaatgtcacctatcgctacctagctgccacacctttacaaagaaagcggtatcttacaattggactttcttcagtaaagcgaaaaaaaggaaactatttacttgagacaattaagtcaatttttgagcaatccagctatgaagagctgaaggaaatttcagtggtggttcacctagcagactttaattcttcctggcgtgatgccatggtccaggatattacacagaaatttgcgcaccatattattgcaggaagattaatggttatacatgctccagaggagtattacccaatcctagatggccttaaaagaaattacaatgatccagaagatagagtcaaatttcgttccaagcaaaatgtagattatgcttttctgcttaatttttgtgccaatacttcagactattatgtaatgcttgaagatgatgttcgatgttcaaaaaatttcttaactgccatcaagaaagtcattgcatccctagaaggaacttactgggtaactcttgaattctctaagcttggctacattggtaaactctatcattctcatgatctcccacgtttggcccattttttattaatgttttatcaagaaatgccttgtgattggctattgactcatttccgtggtctgttggctcagaaaaatgtgatccgttttaaaccatctctctttcagcacatgggctattattcatcatacaaagggacggagaataagctgaaggatgatgattttgaagaggagtcatttgacattcctgataacccccctgcaagtctgtacaccaacatgaatgtgtttgaaaattatgaagcaagcaaggcttacagtagtgttgatgagtacttttgggggaaaccaccttcaacaggagatgtttttgtgattgtatttgaaaatccaattataataaaaaaaattaaagtaaatactggaacagaagatcggcaaaatgatattttgcatcatggagccctagatgttggggaaaacgttatgcctagcaaacaaaggagacaatgttctacttacttaagactaggagaattcaaaaatggaaactttgaaatgtcaggtgtaaatcaaaaaattccatttgatatacattgtatgaggatatatgtcaccaaaacacaaaaggaatggctaattattaggagtattagcatttggacttcttagccaattaaatcagtatgttcagtttctgaagcagttcttcctgcttcgtcttttgctacctttgtcttttggagggaaagcaatggatgggatatgttaaaagaaacattaattacattggcagttttcatttatacattgttgacataattttactcttaatacacacttgtatttattttaacgtctgaagttgaatatcagtctatagctaatgctactttcatttatatttttaaatgttcttagttttaaaatttcaactgattgtcgaaagggtaatatgaaagattttaaatgaaaaaaatttgttggatgatgatttttgaaaaatagtcaccaactgtatatacttcctcaagaactgataattcattatatcatcagatagcttttattaagcatctgtgggaatatacagttgggggaatgataatctggtttattttttctgtaaacttaagtttccgttgacttctgtacatctacaatgaatacctcctcatagaagtggtgtctttacataattttttgtgtaggtga

SEQ ID NO: 282119 - DNA, 1922 bp, Artificial Sequence
  derived and/or modified sequence
cagcaagaaaccagtgggttgtattagtaatattagactttcttttttccagggtatcaacggtttctgtacagcacagattatgacagcgtctttcttaagatggaatcttggaacgtctcatgcttgggaaggacatggtcagatttgttgtaagaaagactgtgcagaggagtgtggcaaagggatccagaagatgcaagaagagaatgtttaaatttcatcaaatgaaacatatttttgaaatacttgataaaatgagatgcctgagaaaacgttctacagtgtcattcttgggagttcttgtcatttttctcctttttatgaacttgtacattgaagatagctatgttctggaaggagacaaacaacttataagggaaacatccacacatcaactgaattcagaacgctatgttcatactttcaaggatttatctaatttctcaggagccataaatgtcacctatcgctacctagctgccacacctttacaaagaaagcggtatcttacaattggactttcttcagtaaagcgaaaaaaaggaaactatttacttgagacaattaagtcaatttttgagcaatccagctatgaagagctgaaggaaatttcagtggtggttcacctagcagactttaattcttcctggcgtgatgccatggtccaggatattacacagaaatttgcgcaccatattattgcaggaagattaatggttatacatgctccagaggagtattacccaatcctagatggccttaaaagaaattacaatgatccagaagatagagtcaaatttcgttccaagcaaaatgtagattatgcttttctgcttaatttttgtgccaatacttcagactattatgtaatgcttgaagatgatgttcgatgttcaaaaaatttcttaactgccatcaagaaagtcattgcatccctagaaggaacttactgggtaactcttgaattctctaagcttggctacattggtaaactctatcattctcatgatctcccacgtttggcccattttttattaatgttttatcaagaaatgccttgtgattggctattgactcatttccgtggtctgttggctcagaaaaatgtgatccgttttaaaccatctctctttcagcacatgggctattattcatcatacaaagggacggagaataagctgaaggatgatgattttgaagaggagtcatttgacattcctgataacccccctgcaagtctgtacaccaacatgaatgtgtttgaaaattatgaagcaagcaaggcttacagtagtgttgatgagtacttttgggggaaaccaccttcaacaggagatgtttttgtgattgtatttgaaaatccaattataataaaaaaaattaaagtaaatactggaacagaagatcggcaaaatgatattttgcatcatggagccctagatgttggggaaaacgttatgcctagcaaacaaaggagacaatgttctacttacttaagactaggagaattcaaaaatggaaactttgaaatgtcaggtgtaaatcaaaaaattccatttgatatacattgtatgaggatatatgtcaccaaaacacaaaaggaatggctaattattaggagtattagcatttggacttcttagccaattaaatcagtatgttcagtttctgaagcagttcttcctgcttcgtcttttgctacctttgtcttttggagggaaagcaatggatgggatatgttaaaagaaacattaattacattggcagttttcatttatacattgttgacataattttactcttaatacacacttgtatttattttaacgtctgaagttgaatatcagtctatagctaatgctactttcatttatatttttaaatgttcttagttttaaaatttcaactgattgtcgaaa

SEQ ID NO: 282120 - DNA, 1524 bp, Artificial Sequence
  derived and/or modified sequence
atgctgggcaaggacatggtgcggttcgtggtgcggaagaccgtgcagcgcagtgtggctaagggctctcgtcgctgtaaaaagcggatgttcaagttccatcagatgaagcacatctttgagatactggataaaatgcgatgtttgcgaaagcggtccacagttagttttctgggggttcttgtgatattcctgcttttcatgaacctttacattgaggacagctatgtcctggagggagacaagcagctgatcagagaaacatcaacccatcagttaaactccgaacgatacgtgcacacatttaaagatctctcaaatttcagcggtgcaattaatgtgacctataggtatttggccgcgacccctctccagcgaaaaagatatttaacaattggcctgtcctctgtgaagaggaagaaggggaattacctgctggagactattaagagtatttttgaacagagttcatatgaagaactgaaggagattagtgtcgttgtccatctggcagatttcaattcttcctggagggacgcgatggttcaggatatcacacaaaaatttgcccaccacattatcgctggacggctgatggtcatccatgcacccgaagagtattacccaatcctggacggtctgaagcggaactacaatgaccccgaggatcgggtcaagtttaggtcaaagcagaacgtcgactacgctttcctgttgaacttctgtgccaatacctccgattactatgttatgctggaagacgatgtgagatgtagcaaaaattttctcacggctattaagaaagtgattgccagtctggaaggcacctattgggttacactcgaattctccaagttaggctacatcggcaaattgtaccatagccatgacctgccacggctcgctcactttcttttgatgttttatcaggagatgccctgtgattggcttttaacgcatttcaggggacttctggcacaaaagaacgtcattcgatttaagccttctttattccagcacatgggatactattcttcctacaaagggactgaaaacaagctgaaggatgacgactttgaagaagagtcgtttgacattccagataatcctcccgcgtctctatacaccaatatgaacgtgttcgagaattacgaggccagtaaagcctacagctccgtggatgagtatttttgggggaagccaccctcgacgggagacgtgttcgtgatagtattcgaaaacccaattatcattaaaaaaatcaaggtgaatactgggacagaggatcgccagaacgatatcctgcaccacggagcccttgacgtgggggaaaacgtgatgccatctaaacagcgtaggcaatgttcaacataccttaggttaggcgagttcaagaatggaaactttgagatgtctggagtcaatcagaagattccatttgatatccattgtatgagaatctacgtcacgaaaacccagaaggaatggctgatcatccgcagcatctccatatggacatcttag

SEQ ID NO: 282121 - DNA, 1524 bp, Artificial Sequence
  derived and/or modified sequence
atgctcgggaaagatatggtcagattcgtggtacggaagactgtgcaacggtcggtggccaaggggagccgacgctgcaagaagcgaatgttcaagtttcaccaaatgaaacacatctttgagattctcgataagatgaggtgtttacggaagcgcagcaccgtgtcgttcctgggcgtgctggtcatcttcctgcttttcatgaatctctatatcgaggattcttacgttctcgagggcgacaagcagctcatccgcgaaactagtacccatcagctgaatagcgagcggtacgtgcatacctttaaagacctctcaaacttcagcggcgcaatcaatgtcacctatcgttacctcgcagctaccccgctccagcggaaaaggtatctcaccattggactttcctctgtcaaacgcaagaaaggaaactaccttctcgaaacaattaagtcaatttttgagcagtctagttatgaggaactgaaggagatctctgtggtggtccacctggccgatttcaacagctcttggcgagacgcaatggttcaagatattacacagaagttcgcacatcacataattgctggaaggctcatggtcatacacgcgccagaagaatattatcctatactggatggacttaagcgaaactacaacgacccagaagatcgagtgaagttccggagcaaacagaacgtggattacgctttcctcctcaacttctgcgcaaacacatctgattactacgtgatgttggaagatgatgttcgatgctcaaagaattttcttacggcaattaaaaaagtcattgcatccttggagggcacttactgggtgaccttggagtttagtaagttaggctacattggaaaactgtatcacagtcacgatttgcctcgattagctcacttcctccttatgttttatcaggaaatgccatgtgactggctgctgacccatttccggggactgctagcccagaagaatgtgattagattcaagcccagtctgtttcagcacatgggttattatagttcttacaaggggactgagaacaagctcaaagatgacgatttcgaggaagagagttttgacattcctgacaaccctcctgctagcctgtacactaacatgaacgtgtttgaaaattacgaagcatccaaagcatattcgtcagtagatgaatatttctgggggaagccccctagcacaggggacgttttcgtgatcgtgttcgaaaatcccattattattaaaaagatcaaagtcaatacaggaacagaggataggcaaaatgatatcctgcaccatggcgcactagatgtaggagagaacgtgatgcccagtaagcagcgcaggcagtgcagcacatacctccgactgggggaattcaagaatggcaatttcgagatgtccggcgtcaaccaaaaaatccccttcgacatccactgcatgcgtatctacgtgacaaagacacaaaaggagtggctgattatacggtctatcagtatctggacttcctag

SEQ ID NO: 282122 - DNA, 1725 bp, Artificial Sequence
  derived and/or modified sequence
ctgagccccagcctgggcttccccgcccagatgaaccaccagaagggccccagccccagcttcggcgtgcagccctgcggcccccacgacagcgccagaggcggcatgatcccccacccccagagcagaggccccttccccacctgccagctgaagagcgagctggacatgctggtgggcaagtgcagagaggagcccctggagggcgacatgagcagccccaacagcaccggcatccaggaccccctgctgggcatgctggacggcagagaggacctggagagagaggagaagagagagcccgagagcgtgtacgagaccgactgcagatgggacggctgcagccaggagttcgacagccaggagcagctggtgcaccacatcaacagcgagcacatccacggcgagagaaaggagttcgtgtgccactggggcggctgcagcagagagctgagacccttcaaggcccagtacatgctggtggtgcacatgagaagacacaccggcgagaagccccacaagtgcaccttcgagggctgcagaaagagctacagcagactggagaacctgaagacccacctgagaagccacaccggcgagaagccctacatgtgcgagcacgagggctgcagcaaggccttcagcaacgccagcgacagagccaagcaccagaacagaacccacagcaacgagaagccctacgtgtgcaagctgcccggctgcaccaagagatacaccgaccccagcagcctgagaaagcacgtgaagaccgtgcacggccccgacgcccacgtgaccaagagacacagaggcgacggccccctgcccagagcccccagcatcagcaccgtggagcccaagagagagagagagggcggccccatcagagaggagagcagactgaccgtgcccgagggcgccatgcccccccacccccagcccctgttcagccactacccccagcccagccccccccagtacctgcagagcggcccctacacccagcccccccccgactacctgcccagcgagcccagaccctgcctggacttcgacagccccacccacagcaccggccagctgaaggcccagctggtgtgcaactacgtgcagagccagcaggagctgctgtgggagggcggcggcagagaggacgcccccgcccaggagcccagctaccagagccccaagttcctgggcggcagccaggtgagccccagcagagccaaggcccccgtgaacacctacggccccggcttcggccccaacctgcccaaccacaagagcggcagctaccccacccccagcccctgccacgagaacttcgtggtgggcgccaacagagccagccacagagccgccgccccccccagactgctgccccccctgcccacctgctacggccccctgaaggtgggcggcaccaaccccagctgcggccaccccgaggtgggcagactgggcggcggccccgccctgtaccccccccccgagggccaggtgtgcaaccccctggacagcctggacctggacaacacccagctggacttcgtggccatcctggacgagccccagggcctgagccccccccccagccacgaccagagaggcagcagcggccacacccccccccccagcggcccccccaacatggccgtgggcaacatgagcgtgctgctgagaagcctgcccggcgagaccgagttcctgaacagcagcgcctag

SEQ ID NO: 282123 - DNA, 528 bp, Artificial Sequence
  derived and/or modified sequence
atgagccccagcctgggcttccccgcccagatgaaccaccagaagggccccagccccagcttcggcgtgcagccctgcggcccccacgacagcgccagaggcggcatgatcccccacccccagagcagaggccccttccccacctgccagctgaagagcgagctggacatgctggtgggcaagtgcagagaggagcccctggagggcgacatgagcagccccaacagcaccggcatccaggaccccctgctgggcatgctggacggcagagaggacctggagagagaggagaagagagagcccgagagcgtgtacgagaccgactgcagatgggacggctgcagccaggagttcgacagccaggagcagctggtgcaccacatcaacagcgagcacatccacggcgagagaaaggagttcgtgtgccactggggcggctgcagcagagagctgagacccttcaaggcccagtacatgctggtggtgcacatgagaagacacaccggcgagaagccccacaagtgctag

SEQ ID NO: 282124 - DNA, 2937 bp, Artificial Sequence
  derived and/or modified sequence
atgagccccagcctgggcttccccgcccagatgaaccaccagaagggccccagccccagcttcggcgtgcagccctgcggcccccacgacagcgccagaggcggcatgatcccccacccccagagcagaggccccttccccacctgccagctgaagagcgagctggacatgctggtgggcaagtgcagagaggagcccctggagggcgacatgagcagccccaacagcaccggcatccaggaccccctgctgggcatgctggacggcagagaggacctggagagagaggagaagagagagcccgagagcgtgtacgagaccgactgcagatgggacggctgcagccaggagttcgacagccaggagcagctggtgcaccacatcaacagcgagcacatccacggcgagagaaaggagttcgtgtgccactggggcggctgcagcagagagctgagacccttcaaggcccagtacatgctggtggtgcacatgagaagacacaccggcgagaagccccacaagtgcaccttcgagggctgcagaaagagctacagcagactggagaacctgaagacccacctgagaagccacaccggcgagaagccctacatgtgcgagcacgagggctgcagcaaggccttcagcaacgccagcgacagagccaagcaccagaacagaacccacagcaacgagaagccctacgtgtgcaagctgcccggctgcaccaagagatacaccgaccccagcagcctgagaaagcacgtgaagaccgtgcacggccccgacgcccacgtgaccaagagacacagaggcgacggccccctgcccagagcccccagcatcagcaccgtggagcccaagagagagagagagggcggccccatcagagaggagagcagactgaccgtgcccgagggcgccatgaagccccagcccagccccggcgcccagagcagctgcagcagcgaccacagccccgccggcagcgccgccaacaccgacagcggcgtggagatgaccggcaacgccggcggcagcaccgaggacctgagcagcctggacgagggcccctgcatcgccggcaccggcctgagcaccctgagaagactggagaacctgagactggaccagctgcaccagctgagacccatcggcaccagaggcctgaagctgcccagcctgagccacaccggcaccaccgtgagcagaagagtgggcccccccgtgagcctggagagaagaagcagcagcagcagcagcatcagcagcgcctacaccgtgagcagaagaagcagcctggccagccccttcccccccggcagcccccccgagaacggcgccagcagcctgcccggcctgatgcccgcccagcactacctgctgagagccagatacgccagcgccagaggcggcggcaccagccccaccgccgccagcagcctggacagaatcggcggcctgcccatgcccccctggagaagcagagccgagtaccccggctacaaccccaacgccggcgtgaccagaagagccagcgaccccgcccaggccgccgacagacccgcccccgccagagtgcagagattcaagagcctgggctgcgtgcacaccccccccaccgtggccggcggcggccagaacttcgacccctacctgcccaccagcgtgtacagcccccagccccccagcatcaccgagaacgccgccatggacgccagaggcctgcaggaggagcccgaggtgggcaccagcatggtgggcagcggcctgaacccctacatggacttcccccccaccgacaccctgggctacggcggccccgagggcgccgccgccgagccctacggcgccagaggccccggcagcctgcccctgggccccggcccccccaccaactacggccccaacccctgcccccagcaggccagctaccccgaccccacccaggagacctggggcgagttccccagccacagcggcctgtaccccggccccaaggccctgggcggcacctacagccagtgccccagactggagcactacggccaggtgcaggtgaagcccgagcagggctgccccgtgggcagcgacagcaccggcctggccccctgcctgaacgcccaccccagcgagggccccccccacccccagcccctgttcagccactacccccagcccagccccccccagtacctgcagagcggcccctacacccagcccccccccgactacctgcccagcgagcccagaccctgcctggacttcgacagccccacccacagcaccggccagctgaaggcccagctggtgtgcaactacgtgcagagccagcaggagctgctgtgggagggcggcggcagagaggacgcccccgcccaggagcccagctaccagagccccaagttcctgggcggcagccaggtgagccccagcagagccaaggcccccgtgaacacctacggccccggcttcggccccaacctgcccaaccacaagagcggcagctaccccacccccagcccctgccacgagaacttcgtggtgggcgccaacagagccagccacagagccgccgccccccccagactgctgccccccctgcccacctgctacggccccctgaaggtgggcggcaccaaccccagctgcggccaccccgaggtgggcagactgggcggcggccccgccctgtaccccccccccgagggccaggtgtgcaaccccctggacagcctggacctggacaacacccagctggacttcgtggccatcctggacgagccccagggcctgagccccccccccagccacgaccagagaggcagcagcggccacacccccccccccagcggcccccccaacatggccgtgggcaacatgagcgtgctgctgagaagcctgcccggcgagaccgagttcctgaacagcagcgcctag

SEQ ID NO: 282125 - DNA, 1725 bp, Artificial Sequence
  derived and/or modified sequence
ctgtcacccagtcttgggttcccagcccagatgaaccatcagaaggggccctctccaagtttcggggtacaaccatgcggcccacatgattcagcacgtggggggatgatcccacatccccagagccggggaccattccccacatgtcagctcaaatctgagcttgacatgctggtaggcaaatgtagggaggagcctctagagggggatatgtcgtcccctaatagcacaggcatacaggaccctttattgggaatgttggatggcagggaggacctggagcgcgaggaaaaacgggaacctgaaagcgtctacgaaacagattgtcggtgggacggctgcagtcaggaatttgactctcaggagcaactggtgcaccacatcaactccgagcatatccacggggaaaggaaggagtttgtgtgtcactggggaggttgctcgagggagctgcgaccctttaaagcccagtacatgcttgttgtgcatatgcggagacacactggggagaagcctcacaagtgcacttttgaaggatgccgcaaatcttactcacgcctggaaaacctaaaaacccacctgcgctcccacacaggggagaaaccctatatgtgtgagcacgagggctgtagtaaggccttctctaatgcttcggatcgtgcaaagcatcagaatagaacccattccaatgaaaaaccctatgtgtgtaagctgccaggctgtacaaagcgctataccgacccttccagtctcagaaagcacgtgaagactgtccacggcccagacgcgcacgtgacaaagcgtcataggggcgacggacccctcccacgggcgccgtccataagcaccgttgaaccgaaaagagagagagagggaggcccgatccgggaagaatcccgtttaactgtgcctgagggggccatgccacctcaccctcagcctttgttctcccattacccccagccttcaccgcctcaatacctacagagcggaccatacacccagccacccccagactatctcccttccgagccaagaccctgtctggacttcgattctcccacccactccacaggacaactcaaagctcagctggtatgcaactatgtccagtctcagcaggagctgctgtgggagggaggtgggagagaggacgctcccgcccaggaaccttcgtaccagtcgcctaaattcctcgggggctctcaggtcagcccctctcgggctaaggcccctgtgaacacttacggccccggttttgggcccaacctgcctaaccataaatccggctcctatccgacccctagtccctgccacgagaattttgtggttggcgctaatcgcgcctcacaccgagccgctgcccctcctagactgttgccccccctgcccacatgctacgggccactgaaagtgggcggaaccaatcccagttgtggtcacccagaggtggggcgactgggcggagggccagctctgtatcctccgccagaaggtcaggtgtgtaaccctctcgacagcctagatcttgataatacacagctggacttcgtggctatcctcgatgaaccccagggccttagtccacctccttcccacgaccagcgcggaagctcagggcataccccacctccctccgggccacctaacatggccgtgggtaatatgagcgttctgctgaggtccctccctggcgaaaccgagtttctgaattcctcagcctag

SEQ ID NO: 282126 - DNA, 528 bp, Artificial Sequence
  derived and/or modified sequence
atgtcgcccagtctgggcttcccggctcagatgaaccaccagaagggccccagcccctccttcggtgtccagccctgcggtccccatgactctgctaggggcggtatgattccccatcctcagtccaggggcccatttcccacatgtcagctgaaatctgagctggacatgctggtgggtaagtgcagagaggagccgctagagggtgacatgtcctcacctaactccacgggcattcaggatccgctcctggggatgctggatggtagagaggacttagaacgggaagaaaaacgagaaccggagtccgtctatgagacggactgtcgatgggatgggtgttctcaggaatttgacagtcaggagcagttggttcaccacataaattccgagcacatccatggggagcggaaagagtttgtttgccactgggggggctgctccagggagttgcgtccgtttaaggctcagtatatgttggtggtgcacatgaggcggcataccggagagaagccacacaaatgctag

SEQ ID NO: 282127 - DNA, 2937 bp, Artificial Sequence
  derived and/or modified sequence
atgagtccctctttaggatttccggcccagatgaaccaccagaaagggcctagccccagcttcggggtccaaccctgtgggccacatgattccgcgcggggtggcatgatcccacatcctcaatcacgggggcctttccctacttgtcaactgaaaagcgaattggatatgcttgtcggtaaatgccgcgaagagcccctggagggcgatatgagttcccctaactccactggtattcaggacccgcttctcggcatgctcgacggcagggaagacttggaaagggaagaaaagcgcgagcccgaatcggtgtatgagaccgactgtcggtgggatggatgctctcaagagtttgattctcaggagcagctggtacatcacataaattctgaacatatccatggcgagcggaaagagttcgtctgccattggggaggctgcagccgggagctcaggccctttaaagcgcaatacatgctcgttgtgcacatgaggcgccacacgggcgaaaaacctcacaagtgcactttcgaaggctgcagaaagtcttattcgcgcctggagaaccttaaaacccatcttagatcccacaccggggaaaagccctatatgtgcgagcatgagggttgtagtaaagctttcagtaacgctagcgatcgcgctaagcaccaaaaccgaactcattcgaacgagaagccctacgtgtgtaaactccccggatgtactaaaaggtacaccgacccttcctctctgcgcaagcacgttaagaccgtacacgggcccgacgcccacgtgactaagaggcaccgaggcgatggccctcttccccgtgctcccagtatatctacagtggagcctaaaagagaacgagagggcggccccatcagggaggagagtcggctcaccgtgccggaaggcgccatgaagccacagccgtcacccggagcacagtctagctgcagcagtgaccattcccctgcagggtctgcggctaacacagatagcggtgtagagatgacaggaaacgccggtggctccaccgaagatctaagtagtctggatgaagggccttgcatcgcgggcaccggactgtcgactttgagacgactagagaacctcagactggatcagctgcatcagctgagaccgatcgggactagggggctcaaactacctagcctttctcacacgggtacaaccgtcagtcgcagggtgggccctccggttagcctggaaaggcgatccagctctagtagtagcattagttccgcctacactgtttcacggcgctcttccctcgctagcccatttccacccggcagccctccagagaatggagccagctcccttccaggcctgatgcccgcccaacactacctcctccgggccagatatgctagtgcaagaggaggaggcacctcgccaaccgctgcgtcatctcttgatcgcattggcggtctgccaatgcctccctggaggtcaagagcagagtatccgggttacaatcctaacgccggcgttacacggagggccagcgatcccgctcaagcagcagacaggcccgccccggccagggttcaaagatttaagtccttgggctgcgtccacaccccaccgacagtagctggcgggggccaaaacttcgatccgtacctgccaacctctgtatattccccgcagcccccgtctatcacagagaatgctgctatggatgcaagaggacttcaagaggaaccggaggtgggcacatcaatggttggctccggcctgaatccttatatggactttccacctaccgataccctggggtacggaggtccagaaggcgccgcggcagagccttatggggctcgggggcctggctctctcccgttaggtcctggcccaccaactaattacggccctaatccctgcccccagcaggcttcataccccgatccgactcaagagacgtggggggagttcccctctcacagcggcctgtaccctggcccaaaggccttgggcgggacctattcacagtgtccaaggctggagcattatggacaggtccaagtaaagccagagcaaggttgtcccgtggggagcgacagcactggcctggctccgtgcttgaatgcgcaccctagcgaaggtcctccacacccacagccgctgttcagccactacccccagcccagtcctcctcagtatctccagtccggaccatacacccaacctcctcccgactatctcccctctgagcccagaccctgtttggactttgacagtccaacacacagtactggacaattaaaggctcagctggtttgcaactatgtccagtcacaacaagaactcctgtgggaaggaggtgggagagaagacgctcccgcccaggagcctagctaccaatcccccaagttcctcggagggtcccaagtttcaccctcccgggccaaggctccagtgaacacatacggtcctggcttcggtccgaatctccccaatcataaatcgggttcataccctacacccagtccttgtcacgaaaattttgtcgttggcgcaaatagagcctcacaccgcgccgccgccccgcctagactgttacctcctcttccgacctgttatggccctctcaaggttgggggcacaaatccatcctgcgggcatcctgaagtggggcgcctgggaggcggtccagcactctatccccctccagaaggtcaggtgtgcaatccactagacagcctggacttggacaatacacagctcgatttcgtggctatcctcgatgagcctcagggactttccccccctccatcacacgaccagcgggggtcttccggccataccccgcccccatcaggccctccgaacatggcagtcggaaacatgagtgtgctgttaagatccctacccggtgaaacggaattcctgaatagttccgcgtag

SEQ ID NO: 282128 - DNA, 1725 bp, Artificial Sequence
  derived and/or modified sequence
ctcagcccatctctgggattcccagcccagatgaatcaccaaaaagggccctcgccttcctttggggtccagccttgtggtccccatgactctgcccggggtgggatgatcccacatcctcagtcccggggacccttcccaacttgccagctgaagtctgagctggacatgctggttggcaagtgccgggaggaacccttggaaggtgatatgtccagccccaactccacaggcatacaggatcccctgttggggatgctggatgggcgggaggacctcgagagagaggagaagcgtgagcctgaatctgtgtatgaaactgactgccgttgggatggctgcagccaggaatttgactcccaagagcagctggtgcaccacatcaacagcgagcacatccacggggagcggaaggagttcgtgtgccactgggggggctgctccagggagctgaggcccttcaaagcccagtacatgctggtggttcacatgcgcagacacactggcgagaagccacacaagtgcacgtttgaagggtgccggaagtcatactcacgcctcgaaaacctgaagacgcacctgcggtcacacacgggtgagaagccatacatgtgtgagcacgagggctgcagtaaagccttcagcaatgccagtgaccgagccaagcaccagaatcggacccattccaatgagaagccgtatgtatgtaagctccctggctgcaccaaacgctatacagatcctagctcgctgcgaaaacatgtcaagacagtgcatggtcctgacgcccatgtgaccaaacggcaccgtggggatggccccctgcctcgggcaccatccatttctacagtggagcccaagagggagcgggaaggaggtcccatcagggaggaaagcagactgactgtgccagagggtgccatgcccccacatccacagcctctcttttcccattacccccagccctctcctccccaatatctccagtcaggcccctatacccagccaccccctgattatcttccttcagaacccaggccttgcctggactttgattcccccacccattccacagggcagctcaaggctcagcttgtgtgtaattatgttcaatctcaacaggagctactgtgggagggtgggggcagggaagatgcccccgcccaggaaccttcctaccagagtcccaagtttctggggggttcccaggttagcccaagccgtgctaaagctccagtgaacacatatggacctggctttggacccaacttgcccaatcacaagtcaggttcctatcccaccccttcaccatgccatgaaaattttgtagtgggggcaaatagggcttcacatagggcagcagcaccacctcgacttctgcccccattgcccacttgctatgggcctctcaaagtgggaggcacaaaccccagctgtggtcatcctgaggtgggcaggctaggagggggtcctgccttgtaccctcctcccgaaggacaggtatgtaaccccctggactctcttgatcttgacaacactcagctggactttgtggctattctggatgagccccaggggctgagtcctcctccttcccatgatcagcggggcagctctggacataccccacctccctctgggccccccaacatggctgtgggcaacatgagtgtcttactgagatccctacctggggaaacagaattcctcaactctagtgcctaa

SEQ ID NO: 282129 - DNA, 1725 bp, Artificial Sequence
  derived and/or modified sequence
ctgagccccagcctgggcttccctgcccagatgaaccaccagaagggccccagccccagctttggagtgcagccctgtggcccccatgattctgcccggggcggcatgatcccccacccccagagccggggccccttccccacctgccagctgaagtctgagctggacatgctggtgggcaaatgtcgggaggagcccctggagggggacatgagcagccccaacagcacaggcatccaggaccccctgctgggcatgctggatggaagagaggacctggagcgggaggagaagcgggagcctgagagcgtgtatgaaacagactgccgctgggatggctgcagccaggagtttgacagccaggagcagctggtgcaccacatcaacagcgagcacatccacggggagaggaaggagtttgtgtgccactggggcggctgcagccgggagctgcggcccttcaaggcccagtacatgctggtggtgcacatgagaagacacactggagagaagccccacaagtgcacctttgagggctgcaggaagagctacagccggctggagaacctgaagacccacctgcggagccacactggagagaagccctacatgtgtgaacatgagggctgcagcaaggccttcagcaatgccagtgaccgggccaagcaccagaacagaacccacagcaatgagaagccctacgtgtgcaagctgcccggctgcaccaagcgctacacagaccccagcagcctgaggaagcacgtgaagacagtgcacggcccagatgcccacgtgaccaagaggcacagaggagatggccccctgccccgggcccccagcatcagcacagtggagcccaagcgggagcgggagggcggccccatccgggaggagagccggctgactgtgcctgagggcgccatgccaccccacccccagcccctcttcagccactacccccagcccagccccccccagtacctgcagagcggcccctacacccagcccccaccagactacctgcccagcgagccccggccctgcctggactttgacagccccacccacagcacaggccagctgaaggcccagctggtgtgcaactacgtgcagagccagcaggagctgctgtgggagggcggcggccgggaggatgccccagcccaggagcccagctaccagagccccaagttcctgggcggcagccaggtgagccccagccgggccaaggcccctgtgaacacctacggccctggcttcggccccaacctgcccaaccacaagagcggcagctaccccacccccagcccctgccacgagaactttgtggtgggcgccaacagagccagccacagagctgctgccccaccccggctgctgccccccctgcccacctgctacggccccctgaaggtgggcggcaccaaccccagctgtggccaccctgaggtgggccgcctgggcggcggccctgccctgtacccacctcctgagggccaggtgtgcaaccccctggacagcctggacctggacaacacccagctggactttgtggccatcctggatgagccccagggcctgagccccccacccagccatgaccagaggggcagcagcggccacaccccaccacccagcggcccccccaacatggctgtgggcaacatgtctgtgctgctgcggagcctgcccggggagacagagttcctgaacagcagcgcctag

SEQ ID NO: 282130 - DNA, 528 bp, Artificial Sequence
  derived and/or modified sequence
atgagccccagcctgggcttccctgcccagatgaaccaccagaagggccccagccccagctttggagtgcagccctgtggcccccatgattctgcccggggcggcatgatcccccacccccagagccggggccccttccccacctgccagctgaagtctgagctggacatgctggtgggcaaatgtcgggaggagcccctggagggggacatgagcagccccaacagcacaggcatccaggaccccctgctgggcatgctggatggaagagaggacctggagcgggaggagaagcgggagcctgagagcgtgtatgaaacagactgccgctgggatggctgcagccaggagtttgacagccaggagcagctggtgcaccacatcaacagcgagcacatccacggggagaggaaggagtttgtgtgccactggggcggctgcagccgggagctgcggcccttcaaggcccagtacatgctggtggtgcacatgagaagacacactggagagaagccccacaagtgctag

SEQ ID NO: 282131 - DNA, 2937 bp, Artificial Sequence
  derived and/or modified sequence
atgagccccagcctgggcttccctgcccagatgaaccaccagaagggccccagccccagctttggagtgcagccctgtggcccccatgattctgcccggggcggcatgatcccccacccccagagccggggccccttccccacctgccagctgaagtctgagctggacatgctggtgggcaaatgtcgggaggagcccctggagggggacatgagcagccccaacagcacaggcatccaggaccccctgctgggcatgctggatggaagagaggacctggagcgggaggagaagcgggagcctgagagcgtgtatgaaacagactgccgctgggatggctgcagccaggagtttgacagccaggagcagctggtgcaccacatcaacagcgagcacatccacggggagaggaaggagtttgtgtgccactggggcggctgcagccgggagctgcggcccttcaaggcccagtacatgctggtggtgcacatgagaagacacactggagagaagccccacaagtgcacctttgagggctgcaggaagagctacagccggctggagaacctgaagacccacctgcggagccacactggagagaagccctacatgtgtgaacatgagggctgcagcaaggccttcagcaatgccagtgaccgggccaagcaccagaacagaacccacagcaatgagaagccctacgtgtgcaagctgcccggctgcaccaagcgctacacagaccccagcagcctgaggaagcacgtgaagacagtgcacggcccagatgcccacgtgaccaagaggcacagaggagatggccccctgccccgggcccccagcatcagcacagtggagcccaagcgggagcgggagggcggccccatccgggaggagagccggctgactgtgcctgagggcgccatgaagccccagcccagccctggggcccagagcagctgcagcagtgaccacagccctgctggcagcgctgccaacacagattctggagtggagatgactggaaatgccggcggcagcacagaggacctgagcagcctggatgagggcccctgcatcgccggcaccggcctgagcaccctgcggcggctggagaacctgcggctggaccagctgcaccagctgcggcccatcggcacccggggcctgaagctgcccagcctgagccacacaggcaccaccgtgtccagaagagtgggcccccctgtgtccctggagaggaggagcagcagcagcagcagcatcagcagcgcctacacagtgtccagaagaagcagcctggccagccccttccccccaggcagccccccagaaaatggagccagcagcctgcccggcctgatgcctgcccagcactacctgctgcgggcccgctatgccagcgcccggggcggcggcaccagccccacagctgccagcagcctggaccgcatcggcggcctgcccatgccaccctggaggagcagagctgagtacccaggctacaaccccaatgctggggtgacccggcgggccagtgaccctgcccaggccgctgacaggcctgccccagcccgggtgcagcgcttcaagagcctgggctgtgtgcacaccccacccaccgtggccggcggcggccagaactttgacccctacctgcccacctctgtgtacagcccccagcccccatccatcacagaaaatgctgccatggatgcccggggcctgcaggaggagcctgaggtgggcacctccatggtgggcagcggcctgaacccctacatggacttccccccaacagacaccctgggctacggcggccctgagggcgctgctgctgagccctatggagcccggggccctggcagcctgcccctgggccctggcccccccaccaactacggccccaacccctgcccccagcaggccagctacccagaccccacccaggagacctggggcgagttccccagccacagcggcctgtacccaggccccaaggccctgggcggcacctacagccagtgcccccggctggagcactacggccaggtgcaggtgaagccagagcagggctgccctgtgggcagtgacagcacaggcctggccccctgcctgaatgcccaccccagcgagggccccccccacccccagcccctcttcagccactacccccagcccagccccccccagtacctgcagagcggcccctacacccagcccccaccagactacctgcccagcgagccccggccctgcctggactttgacagccccacccacagcacaggccagctgaaggcccagctggtgtgcaactacgtgcagagccagcaggagctgctgtgggagggcggcggccgggaggatgccccagcccaggagcccagctaccagagccccaagttcctgggcggcagccaggtgagccccagccgggccaaggcccctgtgaacacctacggccctggcttcggccccaacctgcccaaccacaagagcggcagctaccccacccccagcccctgccacgagaactttgtggtgggcgccaacagagccagccacagagctgctgccccaccccggctgctgccccccctgcccacctgctacggccccctgaaggtgggcggcaccaaccccagctgtggccaccctgaggtgggccgcctgggcggcggccctgccctgtacccacctcctgagggccaggtgtgcaaccccctggacagcctggacctggacaacacccagctggactttgtggccatcctggatgagccccagggcctgagccccccacccagccatgaccagaggggcagcagcggccacaccccaccacccagcggcccccccaacatggctgtgggcaacatgtctgtgctgctgcggagcctgcccggggagacagagttcctgaacagcagcgcctag

SEQ ID NO: 282132 - DNA, 1725 bp, Artificial Sequence
  derived and/or modified sequence
ctgagccccagcctgggcttccccgcccagatgaaccaccagaagggtccctctccgtccttcggggtccagccgtgcgggcctcatgattctgccaggggtggtatgataccacatccacagtctcgcggtccgttcccgacctgtcagctgaagtccgaacttgacatgttagtgggaaagtgtagggaggaacccttagagggggatatgagcagtccgaactccaccgggatccaagaccctctgctgggcatgctcgacggccgcgaggatttggagcgggaagagaaacgtgaacctgaaagcgtttacgaaaccgactgtcggtgggatgggtgttcccaggagtttgactcccaggaacaactggtgcaccatattaattctgagcatattcacggagagagaaaagaattcgtgtgccactggggcggctgctcccgagagttgcggcccttcaaagctcagtacatgctggtagtgcacatgaggcgtcacacaggggagaagcctcacaaatgtactttcgaaggctgcaggaagtcctattcacgccttgagaacttaaagacgcacttgcgatctcatacaggggaaaagccctatatgtgtgagcacgaaggctgctccaaggcgttcagcaatgcctccgaccgcgccaaacaccagaacagaacacattccaacgagaaaccatacgtgtgcaagctcccaggatgcactaagcggtatactgatccaagttccctgaggaaacacgtgaaaactgttcacggccctgacgcccacgtaaccaagcggcatcggggtgacgggcccttaccccgggcaccttccatcagcacggtggaacccaagcgagagagggaaggcgggcctatcagagaggaatcacggctgacggttcccgagggagccatgcccccacatccccagccccttttttctcattatccacagcccagtccaccacagtacctgcaaagcgggccatatactcagccccctcctgattacctcccatccgaaccccgaccatgccttgactttgactcaccaacccatagtaccggacagcttaaggcgcagctcgtctgcaattatgtccaatcccagcaggagttgctgtgggaaggaggagggcgcgaggacgctcccgcccaggaaccaagctaccagagtcccaaattcttagggggatcacaggtttctccatctcgggccaaagcgccagtgaacacatacggacccggattcggtccaaatctgcccaatcacaagtcaggcagctaccccaccccttctccctgccacgagaactttgtggtgggcgcaaatcgagcttcccacagggctgctgcaccacctcgcctgcttccacctcttccaacgtgctacggacccctgaaggtcggcggcacgaacccctcctgcggacatcctgaggtgggccgcctgggcggagggcctgccttatatccaccccctgagggtcaggtgtgtaaccccctggactccctcgatctcgacaacacccaacttgactttgttgccattctcgacgagccacagggcctttcacccccgccctcgcatgatcaacggggatcaagcgggcataccccccccccttccggtccccccaatatggccgtcggcaacatgtccgtcctcttgaggtccctcccaggagaaaccgaattcctgaactcctccgcatag

SEQ ID NO: 282133 - DNA, 528 bp, Artificial Sequence
  derived and/or modified sequence
atgagccccagcctgggcttccccgcccagatgaaccaccagaagggcccttcacccagctttggcgtccagccttgtggaccgcatgatagcgcaagggggggtatgatcccacacccccagtccagaggacccttcccaacatgccaactgaagtctgagctggatatgttggtgggcaaatgccgcgaagaaccgctggagggagacatgagctcaccaaatagtaccggtatccaggacccactacttggtatgttagacggccgggaggatctggaacgcgaagagaagagagaaccagagagcgtctatgaaaccgactgccgttgggacgggtgcagccaggaatttgactcccaggagcagttagtgcaccacatcaatagcgagcacatacatggcgagagaaaggagtttgtgtgccactgggggggctgctccagagagctgcgaccttttaaggctcagtatatgttggttgtgcacatgcgtcggcacacaggcgagaagccgcacaaatgttag

SEQ ID NO: 282134 - DNA, 2937 bp, Artificial Sequence
  derived and/or modified sequence
atgagccccagcctgggcttccccgcccagatgaaccaccagaaggggccctccccttcatttggagtgcagccgtgtggcccccacgactctgcacgaggagggatgattccacatccacagtccaggggcccttttccgacatgtcagctgaagtcagaactcgacatgttggtaggaaagtgccgtgaagagcccttggaaggggatatgagttctcccaacagcactggaatccaggatcccctgcttggaatgctggacggccgagaggacctggagagggaagaaaaacgcgaacccgagagcgtttacgagacagactgcaggtgggatggctgttcgcaggagtttgactctcaggagcaactggtgcaccacattaattctgaacatatccacggcgaaagaaaggagttcgtatgccactggggcgggtgctcacgagaactgcggccttttaaagcacaatatatgctcgtggtccatatgcgtcggcacacaggcgaaaagccgcacaaatgcacatttgagggctgtagaaagagctattctcggctggagaatctgaagacacacttgagaagccacacaggagaaaagccctatatgtgcgagcacgaggggtgtagcaaggcctttagtaacgctagtgatcgcgctaagcaccagaaccgcacacactccaacgagaaaccatacgtgtgtaaactgccgggctgcactaagcgttacacagatccctcctccttgcggaaacatgtgaagacggtgcatggtcctgacgctcatgtaactaagcggcatcggggggacggcccactccctagagccccatccattagcacagtggagcctaaaagggaacgggaaggcgggccaattcgagaagagtcccggctgacagtaccagagggagcgatgaagcctcaaccaagcccgggtgcccagtccagctgttccagtgaccacagcccagccggtagcgcagctaatactgactctggggtagaaatgaccggaaatgcagggggatctacagaagacctctcatcgcttgatgaaggaccctgcatcgccgggactggattgtctacgctaaggcgtctggagaatctccgtttggaccagctccatcagcttcggccgatcggtacccgtgggcttaaactgcctagcctgagccacacaggaacaactgtgtcgcgtcgtgtcgggccacctgtgtccctggaaagacggtccagttcaagctctagtatcagttctgcctacaccgtgagtagaaggagttcccttgcatctccgtttcctcccggatcaccccccgaaaacggtgccagctctttgccaggactcatgcccgctcagcattacttgcttcgggcccggtatgcctcggcaaggggtggcggcacaagccctacggccgcctcttctcttgacaggatcggcggactccccatgccgccatggcggtcacgagctgagtatcctggatacaaccccaatgctggtgtcaccagacgggcgagcgatccagcccaggcggcagatagaccagcccccgcccgggtccagcggttcaagtcactcggctgtgtccatacaccccccacagttgcaggaggaggccagaactttgacccttatctacctacctctgtgtacagcccacaacccccatccatcaccgaaaacgcagcaatggatgcccgaggcttgcaggaagagccagaagtgggcactagcatggtcgggagtggtctcaatccctatatggactttccccccacggataccctagggtacggtggccctgagggcgccgccgcagaaccgtacggcgcacggggccccgggagccttcctctaggtccagggccacctacaaactacgggccaaatccctgcccccaacaggcgtcttacccagatcctacccaggaaacgtggggtgaatttcccagccacagtggactgtacccggggcccaaggccctcggaggaacttattcccagtgcccccgacttgaacattatggccaggtgcaggtcaagccggaacagggctgccccgttgggagcgactcgaccggccttgccccatgtctcaatgcccacccgtccgagggacctccccatcctcagccattgttcagccattaccctcaaccatcaccaccccagtacctgcagtctgggccatacacccaaccacccccagattatttgccctctgaaccccgcccttgtttggatttcgattcacctacccattccaccggacagttaaaggcccagctggtttgcaactacgtccagtcacagcaggaacttctttgggaaggcggtggccgtgaagacgctcctgcccaggagccttcctatcaatctccaaagtttctaggtgggagtcaggtcagcccatctagagccaaggctcccgtgaatacttacggaccaggcttcgggcctaacttgcccaaccacaagtcagggagttaccctacaccttccccatgccacgaaaatttcgtcgttggagctaatagggccagccaccgcgccgccgcacccccgaggcttctgccccccttgccaacttgttacggtccattgaaggtggggggcaccaaccccagctgcgggcatcccgaggtgggcagactgggaggtgggcccgctctgtacccgccacccgaggggcaggtctgtaaccccctggattcacttgacctggacaacactcagctggactttgtggccattctcgatgaaccacagggcctctctccccctccttcacacgaccagcgggggagcagcggccatactccacccccatcaggaccaccaaacatggccgtggggaacatgagtgtgctgctcaggagtctccccggcgaaaccgagttcctgaatagttccgcgtag

SEQ ID NO: 282135 - DNA, 1725 bp, Artificial Sequence
  derived and/or modified sequence
ctgagtccatccttgggatttccggctcagatgaaccaccagaaggggccaagcccttctttcggtgtgcagccttgcgggccacacgatagcgcaagaggtggtatgatcccacacccacagagtcggggtccttttcccacctgccagctcaagagcgagcttgacatgctagttgggaagtgtagggaggagcctctcgaaggggacatgtcgagtccaaattctaccggtatccaggacccgctgctggggatgttggacggccgagaagatttggaaagggaagaaaaaagggagcctgagtccgtgtacgaaacggactgcaggtgggatggatgtagccaggaattcgattcacaggagcaactcgtgcatcacataaactcagaacacatccatggtgaaagaaaagaatttgtttgccactggggaggatgcagccgagaattgcgtccatttaaagcacaatatatgctggtggtgcatatgcgacggcacacaggcgaaaaaccacacaagtgcacattcgaaggttgtagaaaatcctacagcaggcttgagaacttgaagacccatctgcgttcacacacgggcgagaagccatacatgtgtgaacacgagggttgttctaaagcatttagcaatgcatcggacagagcaaagcaccagaaccggacacattctaacgagaagccatatgtctgcaagctcccgggatgtaccaagaggtacacagatccctcttctctacgcaagcatgtcaagactgtccacggcccagatgcccatgtgaccaaacgtcaccgaggtgatggccctctccccagagcccctagtatttctacagtggagccgaagagagaacgcgagggcggaccaatccgagaagaaagcagactgactgtgccagaaggagccatgcctcctcaccctcaaccactgttttcacattacccccagcctagccccccacagtacttgcagagtgggccttacactcagccgccacccgattacttgccctcagagcccaggccttgcctggatttcgattcccctacacatagtactggccagctcaaagcacagctcgtgtgcaactacgttcagagccagcaggagttgctgtgggaaggagggggacgcgaggacgccccagcccaggagccttcttaccaaagccctaagttcctaggcggtagccaggtaagtccgtctcgcgctaaggccccagtcaacacatacggccctggctttggcccaaacctgcctaaccataagagtggtagctatccaacaccctctccttgtcacgaaaatttcgtagtcggtgccaaccgcgcatcgcaccgtgcagcagctccacctcgcttactgccccctttgccaacgtgctatggccctcttaaggttgggggaactaacccaagctgtggtcacccagaggtgggcaggctcggtggagggcctgccctgtacccccctcccgagggccaggtgtgtaaccctctggattcactcgaccttgataacacccagctggattttgtggctatattagacgagccacaggggctaagtccacctccatctcatgatcagcgcggttctagtgggcatactccaccgcctagtggccctcctaatatggctgtgggcaacatgtccgtgctcctacgcagtctgccaggcgagactgagttcttgaattccagtgcctag

SEQ ID NO: 282136 - DNA, 528 bp, Artificial Sequence
  derived and/or modified sequence
atgagccctagtctgggctttccggctcaaatgaaccaccagaagggtccttcccctagtttcggggtgcagccatgtggacctcatgatagcgccagggggggaatgattccccacccccagtcccgtggtccatttcctacctgtcaactgaaatcagagctggacatgcttgtagggaagtgccgggaagaacccctcgaaggcgacatgtcttctccaaattctactggtattcaggacccccttttgggtatgctggatggcagagaggatttggaaagagaggagaaacgcgagcctgaaagcgtgtacgagacggactgtagatgggatggttgcagccaggaatttgattctcaggaacagctcgtacaccacatcaattccgagcatatccatggcgagaggaaggagtttgtttgccactggggtggctgcagcagggagctgcgcccattcaaggcacagtacatgctggtggttcatatgaggcggcacacaggggagaagccccacaaatgttag

SEQ ID NO: 282137 - DNA, 2937 bp, Artificial Sequence
  derived and/or modified sequence
atgagtccttcactcggttttcctgcccagatgaatcatcaaaaggggccttccccaagttttggcgtccagccctgcggtccccatgactctgcccgaggtggcatgatcccccaccctcagagcaggggaccttttccgacttgtcagctgaagagtgagctggatatgttggttgggaagtgccgagaagagcccctagaaggggatatgtcctctccaaactccaccgggattcaagatcccctgctcggaatgctcgatggccgtgaggacttggagcgcgaagaaaagagggaaccagagagcgtctatgagaccgattgccgttgggatggttgtagtcaggagtttgactcgcaggagcagctggtccaccatataaacagcgaacacatacacggagaacgtaaagaatttgtttgccattggggaggttgttcccgggagcttcgaccattcaaggcccaatatatgctggtggtacacatgcgacgccatactggcgaaaagccccataagtgtacctttgaaggatgcaggaagtcatattccagactggagaatttgaagacacacctgaggagtcacacaggggagaaaccgtacatgtgtgaacatgaaggatgctccaaagcgttttcaaacgctagtgatcgagcaaaacaccagaatagaacccactccaatgaaaagccctacgtgtgtaagctgccaggttgcactaaacggtacactgacccttcgtctctgaggaaacatgtcaaaacagtgcacggccctgatgcccatgttacaaagcgacacagaggggatggaccactcccacgggctccttccatttcgacggttgaacccaaaagggagcgggaaggaggccctattcgagaggaaagcaggttgactgtgccagaaggagccatgaaaccccaaccatcccccggtgcacagtcatcctgttcatctgatcatagtccggctgggagcgccgctaacacagacagcggggtcgaaatgactgggaatgctggcggatcaacagaagacttgagcagcctggacgaaggaccctgtattgctgggaccggactaagcacccttagaaggctggagaatctacggcttgaccagctccaccaacttagacctattggaactcggggtctgaagttgcctagcttgtctcacactggcactacagtgagtagacgggtcgggccaccggtctccctggaaagaaggtccagctccagtagctccatatcatctgcatataccgtttctagacgcagctccctcgcttcaccatttcctccgggttcccctcctgaaaatggtgcctctagcctgcccggactgatgcctgctcagcattatttactgcgtgcgagatacgcttctgctcgaggcggaggtacatcacccactgccgcttcatcacttgacagaatcggaggactgcccatgccaccatggagaagcagagccgagtatccaggatataaccctaatgccggtgttacacggcgagccagcgatccggctcaggccgctgaccgacctgcacccgctcgcgtgcagagatttaaatcgctgggctgcgtccacactccacccaccgtcgccggtgggggacaaaacttcgacccctatctgcccacctccgtgtacagtccacagccaccctccatcacggaaaatgccgctatggatgcccgtggcttacaggaggaacctgaagtagggacctctatggtggggtccggcctgaatccctatatggattttcctccgacagacactctggggtacggaggacccgagggcgcagctgctgagccctatggagctcgcggtccaggaagcttacctttgggaccgggtccccctacaaactacggccctaatccttgcccccagcaggctagttaccccgatcctactcaagagacctggggtgagttcccttctcactccgggttataccccggtcccaaagctcttggaggaacctattcacagtgtcctaggctggagcattatggccaggtccaagtgaaaccagaacagggttgccctgtggggagcgattccaccggactggccccttgtctaaatgcccacccttccgaggggcctccacacccacagcccctcttctctcactatccgcagccatcaccgccacaatacctgcagtcgggtccatacacgcagccccctcccgattacctgccatccgaacctaggccttgcctggatttcgactccccaacccactctacgggccagctgaaagcccagttagtctgcaactatgtgcagagtcagcaggaactgctatgggaagggggagggagagaggacgcacctgcccaggaaccatcttatcagagccctaaattcctggggggatcccaggtgagtccttctcgggctaaggcacctgttaacacgtatgggccaggttttggtccaaacctgcctaatcataagtctggatcataccccacaccatcaccctgccatgaaaattttgtcgtgggagccaaccgtgcctcccatcgagccgcagcgccaccacgcctactgcctccactacctacctgctacggcccactcaaagtggggggtactaatcctagctgtggccacccagaagtggggagactcggcggtggcccagcactgtatccacctcctgagggccaggtgtgtaatcccctggattcactggaccttgacaatactcagctcgatttcgtggctattctggatgagccacagggcctctccccccctccctcccacgatcagcgcggatcgagcggacacacaccccctccttcaggacctcctaacatggctgtcggcaacatgtccgtgttactcaggtctctcccaggggagaccgaattcctcaactcttccgcctag

SEQ ID NO: 282138 - DNA, 441 bp, Artificial Sequence
  derived and/or modified sequence
cccggcccccccggccggcccggcaagcccggcttccccaagcccggaggaccgggtggccctgcaatccctggggctccaggccgacccttcgtgccaggaatccctggctggccaggcgcaccagccgctcctgggtttccgatgcccagtggccccaggtctcccggagggccttggggtcctggggggcccattggtcccatctcacctggcccaggcattcctgggggccccggcgggcctcggggccccggtcggccggcgggccccacgtcccccttcggcccctatgggcctctgagcccagggtttccgggctccccaggtactccagggtttccgaccgcggatgggcctggtggaccaggtaatcctggttcgccatggtctccaggactgccctacccaagaggccctgcgggccctggcggcccctag

SEQ ID NO: 282139 - protein, 729 aa, Artificial Sequence
  derived and/or modified sequence
MQSTSNHLWLLSDILGQGATANVFRGRHKKTGDLFAIKVFNNISFLRPVDVQMREFEVLKKLNHKNIVKLFAIEEETTTRHKVLIMEFCPCGSLYTVLEEPSNAYGLPESEFLIVLRDVVGGMNHLRENGIVHRDIKPGNIMRVIGEDGQSVYKLTDFGAARELEDDEQFVSLYGTEEYLHPDMYERAVLRKDHQKKYGATVDLWSIGVTFYHAATGSLPFRPFEGPRRNKEVMYKIITGKPSGAISGVQKAENGPIDWSGDMPVSCSLSRGLQVLLTPVLANILEADQEKCWGFDQFFAETSDILHRMVIHVFSLQQMTAHKIYIHSYNTATIFHELVYKQTKIISSNQELIYEGRRLVLEPGRLAQHFPKTTEENPIFVVSREPLNTIGLIYEKISLPKVHPRYDLDGDASMAKAITGVVCYACRIASTLLLYQELMRKGIRWLIELIKDDYNETVHKKTEVVITLDFCIRNIEKTVKVYEKLMKINLEAAELGEISDIHTKLLRLSSSQGTIETSLQDIDSRLSPGGSLADAWAHQEGTHPKDRNVEKLQVLLNCMTEIYYQFKKDKAERRLAYNEEQIHKFDKQKLYYHATKAMTHFTDECVKKYEAFLNKSEEWIRKMLHLRKQLLSLTNQCFDIEEEVSKYQEYTNELQETLPQKMFTASSGIKHTMTPIYPSSNTLVEMTLGMKKLKEEMEGVVKELAENNHILERFGSLTMDGGLRNVDCL

SEQ ID NO: 282140 - protein, 103 aa, Artificial Sequence
  derived and/or modified sequence
MQSTSNHLWLLSDILGQGATANVFRGRHKKTGDLFAIKVFNNISFLRPVDVQMREFEVLKKLNHKNIVKLFAIEEETTTRHKVLIMEFCPCGSLYTVLEEPSN

SEQ ID NO: 282141 - protein, 98 aa, Artificial Sequence
  derived and/or modified sequence
MQSTSNHLWLLSDILGQGATANVFRGRHKKTGDLFAIKVFNNISFLRPVDVQMREFEVLKKLNHKNIVKLFAIEEETTTRHKVLIMEFCPCGSLYTVL

SEQ ID NO: 282142 - DNA, 2190 bp, Artificial Sequence
  derived and/or modified sequence
atgcagagcaccagcaaccacctgtggctgctgagcgacatcctgggccagggcgccaccgccaacgtgttcagaggcagacacaagaagaccggcgacctgttcgccatcaaggtgttcaacaacatcagcttcctgagacccgtggacgtgcagatgagagagttcgaggtgctgaagaagctgaaccacaagaacatcgtgaagctgttcgccatcgaggaggagaccaccaccagacacaaggtgctgatcatggagttctgcccctgcggcagcctgtacaccgtgctggaggagcccagcaacgcctacggcctgcccgagagcgagttcctgatcgtgctgagagacgtggtgggcggcatgaaccacctgagagagaacggcatcgtgcacagagacatcaagcccggcaacatcatgagagtgatcggcgaggacggccagagcgtgtacaagctgaccgacttcggcgccgccagagagctggaggacgacgagcagttcgtgagcctgtacggcaccgaggagtacctgcaccccgacatgtacgagagagccgtgctgagaaaggaccaccagaagaagtacggcgccaccgtggacctgtggagcatcggcgtgaccttctaccacgccgccaccggcagcctgcccttcagacccttcgagggccccagaagaaacaaggaggtgatgtacaagatcatcaccggcaagcccagcggcgccatcagcggcgtgcagaaggccgagaacggccccatcgactggagcggcgacatgcccgtgagctgcagcctgagcagaggcctgcaggtgctgctgacccccgtgctggccaacatcctggaggccgaccaggagaagtgctggggcttcgaccagttcttcgccgagaccagcgacatcctgcacagaatggtgatccacgtgttcagcctgcagcagatgaccgcccacaagatctacatccacagctacaacaccgccaccatcttccacgagctggtgtacaagcagaccaagatcatcagcagcaaccaggagctgatctacgagggcagaagactggtgctggagcccggcagactggcccagcacttccccaagaccaccgaggagaaccccatcttcgtggtgagcagagagcccctgaacaccatcggcctgatctacgagaagatcagcctgcccaaggtgcaccccagatacgacctggacggcgacgccagcatggccaaggccatcaccggcgtggtgtgctacgcctgcagaatcgccagcaccctgctgctgtaccaggagctgatgagaaagggcatcagatggctgatcgagctgatcaaggacgactacaacgagaccgtgcacaagaagaccgaggtggtgatcaccctggacttctgcatcagaaacatcgagaagaccgtgaaggtgtacgagaagctgatgaagatcaacctggaggccgccgagctgggcgagatcagcgacatccacaccaagctgctgagactgagcagcagccagggcaccatcgagaccagcctgcaggacatcgacagcagactgagccccggcggcagcctggccgacgcctgggcccaccaggagggcacccaccccaaggacagaaacgtggagaagctgcaggtgctgctgaactgcatgaccgagatctactaccagttcaagaaggacaaggccgagagaagactggcctacaacgaggagcagatccacaagttcgacaagcagaagctgtactaccacgccaccaaggccatgacccacttcaccgacgagtgcgtgaagaagtacgaggccttcctgaacaagagcgaggagtggatcagaaagatgctgcacctgagaaagcagctgctgagcctgaccaaccagtgcttcgacatcgaggaggaggtgagcaagtaccaggagtacaccaacgagctgcaggagaccctgccccagaagatgttcaccgccagcagcggcatcaagcacaccatgacccccatctaccccagcagcaacaccctggtggagatgaccctgggcatgaagaagctgaaggaggagatggagggcgtggtgaaggagctggccgagaacaaccacatcctggagagattcggcagcctgaccatggacggcggcctgagaaacgtggactgcctgtag

SEQ ID NO: 282143 - DNA, 312 bp, Artificial Sequence
  derived and/or modified sequence
atgcagagcaccagcaaccacctgtggctgctgagcgacatcctgggccagggcgccaccgccaacgtgttcagaggcagacacaagaagaccggcgacctgttcgccatcaaggtgttcaacaacatcagcttcctgagacccgtggacgtgcagatgagagagttcgaggtgctgaagaagctgaaccacaagaacatcgtgaagctgttcgccatcgaggaggagaccaccaccagacacaaggtgctgatcatggagttctgcccctgcggcagcctgtacaccgtgctggaggagcccagcaactag

SEQ ID NO: 282144 - DNA, 297 bp, Artificial Sequence
  derived and/or modified sequence
atgcagagcaccagcaaccacctgtggctgctgagcgacatcctgggccagggcgccaccgccaacgtgttcagaggcagacacaagaagaccggcgacctgttcgccatcaaggtgttcaacaacatcagcttcctgagacccgtggacgtgcagatgagagagttcgaggtgctgaagaagctgaaccacaagaacatcgtgaagctgttcgccatcgaggaggagaccaccaccagacacaaggtgctgatcatggagttctgcccctgcggcagcctgtacaccgtgctgtag

SEQ ID NO: 282145 - DNA, 2190 bp, Artificial Sequence
  derived and/or modified sequence
atgcagagtacgtcgaatcacttatggctcttgagcgatatcttgggacagggggcgaccgcgaatgttttcaggggtcggcataagaaaacaggtgacctttttgctatcaaagtttttaacaatataagctttttgcggcctgtggatgtgcagatgcgcgaattcgaagtgctgaagaagctgaaccacaagaatatcgtgaaactgtttgctatcgaggaggagactacaaccaggcacaaagtgctgattatggagttctgcccatgcgggtccctttacactgtgctggaagaaccctccaatgcgtacggactgcctgagtctgaattcttgatcgtgctgagagatgttgtggggggcatgaaccacctccgcgaaaacgggatagtgcatcgggacatcaagccgggcaatataatgagggtgatcggcgaagacgggcagagtgtctataaactgacagactttggggctgctcgcgaacttgaggacgacgagcagttcgtttccctatacggtactgaagagtatctgcacccggacatgtacgagcgagccgtgctgcgcaaggaccaccaaaaaaaatatggtgcaactgtcgacttatggtcgattggagtgaccttttaccatgccgctactggaagtctccccttccgcccgttcgaggggccccgccggaataaagaggtgatgtacaagatcatcacagggaaacccagtggagccatctccggcgtccagaaggcagaaaatgggcccatcgactggtccggggacatgccagtgagctgctccctgagcagaggcctgcaggtactactgactcccgtgttggctaatatcttggaagctgatcaggagaaatgttggggctttgatcaattctttgctgagacctctgatatcctgcacaggatggttattcatgtgttctccttgcaacaaatgaccgcccacaagatttacatacacagctataacaccgctaccatctttcatgagttggtgtacaagcaaacaaagatcatcagctcgaaccaggagcttatatatgaagggagaaggcttgtactggagcccggacgcttggctcagcatttccccaagacaaccgaagagaacccgatttttgtggtttctcgagaacctctgaataccattggattgatctatgagaagatctcactcccgaaagtccatcctcgctatgacctggatggagatgcttcgatggcaaaggccatcaccggcgtggtatgctatgcatgcagaattgccagcacattgttgctctatcaagagctgatgcgtaagggaatcagatggttgatcgagctgatcaaggatgattacaacgagacggtccacaaaaaaacagaggtggtaatcacgctggacttctgcatcagaaatatagagaaaaccgtcaaggtgtatgagaaattgatgaagattaacctggaagccgccgagctgggcgagatctcagatatccatacgaaactgctgcggctgtcttcctctcagggtacgattgaaacatcgctacaggacattgattcccggctttccccaggaggttccctggctgacgcttgggctcatcaagagggcacccaccccaaggatcgcaacgtagagaaactacaggtcttgttaaactgtatgactgagatctattaccagtttaaaaaggacaaggcggagaggcggctcgcttataacgaagaacagatacacaaatttgacaaacagaagctctactaccacgcaacaaaagctatgactcactttacagatgagtgcgtgaagaagtatgaagcatttctgaacaagagtgaggaatggatccgaaagatgctgcacttaaggaagcagctgctgagtttgaccaaccagtgtttcgatatcgaggaagaggtttcgaagtatcaagagtacaccaacgaacttcaggagacgttgccacagaagatgtttaccgcgtcctccggcattaagcataccatgacgccaatttacccgagttccaatacattggtggagatgacactgggcatgaaaaagctgaaagaggagatggagggagtggtgaaagagcttgcggagaataatcacattctcgagagatttggcagtctaaccatggacggaggccttagaaacgtcgactgcttgtag

SEQ ID NO: 282146 - DNA, 312 bp, Artificial Sequence
  derived and/or modified sequence
atgcaatctacctctaaccacctttggctcctatcggacatcttggggcagggcgccaccgccaacgtatttagggggcgccacaagaagactggggacctcttcgcaatcaaggtgttcaacaatatatcatttctgaggcccgtggatgtgcagatgcgggagtttgaggttctcaaaaagcttaatcacaaaaacattgtgaagctctttgccatagaagaagagactactaccagacacaaggttctcattatggaattctgtccatgtggctccctgtacaccgtgctcgaagagccttctaactag

SEQ ID NO: 282147 - DNA, 297 bp, Artificial Sequence
  derived and/or modified sequence
atgcagtcgacaagcaatcacctgtggctgttgagtgacattctcggccagggtgccacagccaacgtttttagagggagacataaaaaaactggggacctcttcgccatcaaggtctttaacaacatctctttccttaggccagtagacgtccagatgcgggagttcgaggtactgaaaaagcttaatcacaagaacatcgttaagctgtttgccatagaagaggaaactaccacacgccacaaggttctcatcatggaattctgtccatgtggtagcctgtacactgtgctgtag

SEQ ID NO: 282148 - DNA, 2190 bp, Artificial Sequence
  derived and/or modified sequence
atgcagagcaccagcaaccacctgtggctgctgagtgacatcctgggccagggcgccacagccaacgtgttccggggccgccacaagaagacaggagacctgtttgccatcaaggtgttcaacaacatctccttcctgcggcctgtggatgtgcagatgagggagtttgaggtgctgaagaagctgaaccacaagaacatcgtgaagctgtttgccatcgaggaggagaccaccaccaggcacaaggtgctgatcatggagttctgcccctgtggcagcctgtacacagtgctggaggagcccagcaatgcctacggcctgcctgagagcgagttcctgattgtgctgagagatgtggtgggcggcatgaaccacctgcgggagaatggaattgtgcaccgggacatcaagccaggcaacatcatgagggtgattggagaagatggccagagcgtgtacaagctgacagactttggagctgcccgggagctggaggatgatgagcagtttgtgtccctgtatggaacagaggagtacctgcacccagacatgtatgaaagagctgtgctgaggaaggaccaccagaagaagtacggggccaccgtggacctgtggagcattggagtgaccttctaccacgccgccaccggcagcctgcccttccggccctttgagggccccaggaggaacaaggaggtgatgtacaagatcatcaccgggaagcccagcggggccatctctggagtgcagaaggcagaaaatggccccatcgactggagcggggacatgcctgtgtcctgcagcctgagccggggcctgcaggtgctgctgacccctgtgctggccaacatcctggaggccgaccaggagaagtgctggggctttgaccagttctttgctgagaccagtgacatcctgcacaggatggtgatccacgtgttcagcctgcagcagatgacagcccacaagatctacatccacagctacaacacagccaccatcttccacgagctggtgtacaagcagaccaagatcatcagcagcaaccaggagctgatctatgagggccgccgcctggtgctggagcccggccgcctggcccagcacttccccaagaccacagaggagaaccccatctttgtggtgtcccgggagcccctgaacaccatcggcctcatctatgagaagatcagcctgcccaaggtgcaccccaggtatgacctggatggagatgcctccatggccaaggccatcactggagtggtgtgctacgcctgccgcatcgccagcaccctgctgctgtaccaggagctgatgaggaagggcatccgctggctgattgagctgatcaaggatgactacaatgaaacagtgcacaagaagacagaggtggtgatcaccctggacttctgcatcagaaatattgagaagacagtgaaggtgtatgagaagctgatgaagatcaacctggaggccgctgagctgggggagatcagtgacatccacaccaagctgctgcggctgagcagcagccagggcaccatcgagaccagcctgcaggacatcgacagccggctgagccctgggggcagcctggctgatgcctgggcccaccaggagggcacccaccccaaggacagaaatgtggagaagctgcaggtgctgctgaactgcatgacagagatctactaccagttcaagaaggacaaggccgagcggcggctggcctacaatgaggagcagatccacaagtttgacaagcagaagctgtactaccacgccaccaaggccatgacccacttcacagatgaatgtgtgaagaagtatgaggccttcctgaacaagtctgaggagtggatcaggaagatgctgcacctgaggaagcagctgctgagcctgaccaaccagtgctttgacatcgaggaggaggtgtccaagtaccaggagtacaccaatgagctgcaggagaccctgccccagaagatgttcaccgccagcagcggcatcaagcacaccatgacccccatctaccccagcagcaacaccctggtggagatgaccctgggcatgaagaagctgaaggaggagatggagggcgtggtgaaggagctggccgagaacaaccacatcctggagcgcttcggcagcctgaccatggatggcggcctgagaaatgtggactgcctgtag

SEQ ID NO: 282149 - DNA, 312 bp, Artificial Sequence
  derived and/or modified sequence
atgcagagcaccagcaaccacctgtggctgctgagtgacatcctgggccagggcgccacagccaacgtgttccggggccgccacaagaagacaggagacctgtttgccatcaaggtgttcaacaacatctccttcctgcggcctgtggatgtgcagatgagggagtttgaggtgctgaagaagctgaaccacaagaacatcgtgaagctgtttgccatcgaggaggagaccaccaccaggcacaaggtgctgatcatggagttctgcccctgtggcagcctgtacacagtgctggaggagcccagcaactag

SEQ ID NO: 282150 - DNA, 297 bp, Artificial Sequence
  derived and/or modified sequence
atgcagagcaccagcaaccacctgtggctgctgagtgacatcctgggccagggcgccacagccaacgtgttccggggccgccacaagaagacaggagacctgtttgccatcaaggtgttcaacaacatctccttcctgcggcctgtggatgtgcagatgagggagtttgaggtgctgaagaagctgaaccacaagaacatcgtgaagctgtttgccatcgaggaggagaccaccaccaggcacaaggtgctgatcatggagttctgcccctgtggcagcctgtacacagtgctgtag

SEQ ID NO: 282151 - DNA, 2190 bp, Artificial Sequence
  derived and/or modified sequence
atgcagagcaccagcaaccacctgtggctgctgagcgacatcctgggacagggggctacagccaacgtgtttcgcgggcgacacaagaaaaccggcgatttgttcgccattaaggtgttcaataacatctccttcctgagacctgttgacgtgcagatgcgtgagttcgaagtgcttaagaagctgaaccataagaatatcgtgaagttgtttgccattgaggaggagacgacgacgaggcacaaggtcctcattatggaattttgtccttgtgggtcattatatactgtgctcgaggaaccttctaatgcctacggccttccagagtctgaattcctaatcgtcctgagagatgtcgtcggggggatgaaccacctccgtgaaaatgggatcgttcaccgggatattaaaccgggaaatataatgcgcgtgatcggggaggacggacagagcgtctacaaacttactgatttcggggcagcccgagaacttgaagacgacgaacagtttgtgagcctttacggcacagaagagtacctgcatcctgacatgtatgagcgcgctgttttgcggaaagaccatcaaaagaagtatggtgctacagtggatctctggagtattggcgtgaccttttaccacgctgccacaggttctctgcctttccgaccctttgaaggcccaaggcggaataaggaggtgatgtataaaatcatcaccgggaagcccagtggggccatctcaggcgtacagaaagctgaaaacgggccgatcgattggagtggagacatgcccgtctcgtgctctctcagcagggggctgcaggttctgctgacccccgtgctcgccaacattctggaggcagatcaagaaaagtgttggggattcgaccagttctttgctgagacgtccgatatactccacaggatggtaatccacgtgttctctctgcaacaaatgactgcgcataaaatctacatacacagctacaataccgcaacgatctttcacgagcttgtgtacaagcagacaaagatcatctcgtctaaccaggagcttatttacgagggccgcagactggttctggaacctggacgcctggctcagcactttcccaaaaccacagaggagaatccgatatttgttgtatcacgcgagcccctgaacactatcgggttaatttatgagaaaatctctcttcctaaagtacaccctcggtacgatctggatggggacgcttcaatggccaaggcgattacaggggttgtttgctacgcctgtagaattgcctccacgcttctgctatatcaggaactaatgcgcaagggtataaggtggcttatagagttaatcaaggacgattacaacgagaccgtgcacaagaaaaccgaggtggtcatcaccctggacttttgtatccgcaatatcgaaaagactgtgaaggtgtatgagaaactgatgaagattaatttggaagcagctgaactgggtgaaatttccgacatacataccaagttgttaagactgagttcttcccaggggaccatcgagacaagtctgcaggacattgactcccgcctcagccccgggggatccttagctgatgcttgggcccaccaagaggggacccacccaaaggaccggaatgtcgagaagctgcaggtcctgcttaattgtatgaccgaaatctactatcagtttaaaaaggacaaggcagagcggcggctggcctacaatgaagagcagattcataaatttgacaagcagaagctctactaccacgctacgaaagccatgacgcactttaccgacgagtgcgtgaagaagtatgaggcattcttaaacaagagcgaagagtggatacgaaagatgttgcatttaaggaaacagttgctgtccctgaccaaccaatgtttcgacattgaagaggaggtatcgaaataccaagaatataccaatgaactccaggagacactcccccaaaaaatgtttaccgctagttcaggcatcaagcacacaatgactccaatatacccatcatctaatacgctggtggagatgactttggggatgaagaagctcaaagaagaaatggaaggggtggtgaaagagctggccgagaacaatcatattctggagcggtttggatccctcaccatggatggcgggcttcgtaacgtggattgcttgtag

SEQ ID NO: 282152 - DNA, 312 bp, Artificial Sequence
  derived and/or modified sequence
atgcagagcaccagcaaccacctgtggctgctgagcgacatcctgggccagggggctacagccaatgtttttcggggcagacataagaagacaggcgacttgtttgctattaaggtgtttaataatatttccttcctgagacctgtagacgtacagatgagggaattcgaagtgttaaaaaagttgaaccacaaaaacattgttaagctgtttgctatcgaggaagaaacaactacgcggcacaaggttcttattatggagttttgtccttgcggatcgctgtacactgtcctggaggagccatcgaactag

SEQ ID NO: 282153 - DNA, 297 bp, Artificial Sequence
  derived and/or modified sequence
atgcagagcaccagcaaccacctgtggctgctgagcgacatcctgggacagggtgctaccgccaacgtgttccgtggtcggcacaaaaaaacaggggacctcttcgccattaaagtttttaataatatatcctttctccgccccgtggatgtgcaaatgcgcgagttcgaagtgttgaagaagctcaatcataaaaacatagtgaaactgttcgctatcgaggaagagacaaccacaagacataaggtcctgatcatggagttttgtccgtgtggcagcctatataccgtgctgtag

SEQ ID NO: 282154 - DNA, 2190 bp, Artificial Sequence
  derived and/or modified sequence
atgcagagtacaagcaaccacctgtggctgctgtccgacatcttgggccagggggctacagcaaatgtgttccgaggcaggcacaagaaaaccggagacctgtttgctattaaggtcttcaacaatatctcctttttgcgaccagttgacgtacagatgcgggaattcgaagtgcttaagaaactgaaccacaagaatatcgttaaattgttcgcgatcgaagaggagacaaccacgaggcataaggtgttgatcatggaattctgtccgtgtggctcgctctacactgttctcgaagagccaagtaacgcttacggactccccgagagcgagttcctgattgtccttagggatgtggtgggcggaatgaatcatctcagagaaaacggcattgtccatcgcgacattaagcctggtaacataatgagggtgattggcgaggatggccagtcagtctataagctgaccgattttggagccgctcgcgaactcgaagatgatgaacagtttgtgagcctgtatggcacggaggagtacctccaccctgatatgtacgaacgtgccgtgctgaggaaggatcaccaaaagaagtatggcgcaaccgttgatctctggagtatcggtgttacattttaccacgccgctaccggcagcctgcctttccgccctttcgaaggaccgagaagaaataaggaagttatgtataagatcattacagggaagccctcaggggcaatttccggagtccagaaagccgagaacggacctatcgactggtctggtgacatgcctgtgtcatgctccctgtctcgcggattacaagttttattgacccctgtgcttgccaacatcctggaagcagatcaggagaagtgctggggtttcgatcagttcttcgcagaaacgtctgatatcctgcatcggatggtgattcacgtgttttctcttcagcagatgactgcccataaaatttacattcacagctataatactgctaccatctttcacgagctagtgtacaagcagaccaaaataatctcctctaaccaggagctgatttacgagggcagacgactggtgcttgagcccggaagattggcccagcacttccctaagaccactgaagaaaaccctatattcgtggtcagcagggaacccctcaacactatcggcctgatttatgaaaaaatcagtctgcctaaagtgcatcccagatacgatttagacggcgacgcatccatggccaaggccataactggtgtcgtgtgctatgcctgcaggatcgcgtcaactctgctgctgtatcaggaactgatgagaaaagggatccgatggctgatcgaactgattaaggatgattacaacgagacagtgcacaagaagactgaggtcgtcattacactcgacttctgtattcggaatattgaaaagactgtgaaagtatacgaaaagttgatgaagatcaacctggaggcagcagaactcggcgagatttctgacatacacacaaagctccttagattgtctagtagccaggggacaattgagacttccctgcaggatatagactcccggctgagtccgggtggatcacttgccgacgcctgggcacaccaggaagggacacatcccaaggaccgtaatgtggagaagctccaggtcctgcttaactgcatgaccgaaatctattaccagtttaagaaggacaaggcagagcgcaggttggcctataatgaagaacagatccacaagttcgacaaacaaaagctgtattaccatgccacgaaggccatgactcattttacagatgagtgtgtgaaaaagtatgaggcatttctcaataaatccgaggaatggataaggaagatgctccacttgaggaagcaactgttgagcctgacaaaccagtgtttcgatattgaggaggaagtgtccaaataccaggagtatacgaatgaacttcaagagaccctgccccaaaaaatgttcaccgcctcctcgggcattaagcacacgatgacacctatttacccgtccagtaacaccctggtggaaatgacgctagggatgaaaaagctgaaagaggagatggagggtgtggttaaggaactggcagagaacaatcacatccttgaaaggttcggaagcttgaccatggacgggggactacgtaatgtggactgcctttag

SEQ ID NO: 282155 - DNA, 312 bp, Artificial Sequence
  derived and/or modified sequence
atgcaaagtacgtccaatcatctttggctgctttctgatattcttggccaaggagcaaccgcaaatgtctttaggggacgacacaaaaagacaggggacttatttgccatcaaagtcttcaataatatcagctttttaaggcccgtggatgtccaaatgagggagttcgaagtcctgaagaaacttaatcacaaaaatattgtgaaactctttgccatcgaggaggagaccacgactaggcacaaggtgctcatcatggagttttgcccatgcggctcgctttatacagtcctggaggagccgtccaactag

SEQ ID NO: 282156 - DNA, 297 bp, Artificial Sequence
  derived and/or modified sequence
atgcagtcaaccagcaaccatctgtggttgctcagtgacattctgggacagggcgcaactgctaacgtattcaggggacgccataagaaaaccggagacctcttcgctatcaaagtgtttaataacatcagttttcttcgaccagtagacgtccaaatgagggaatttgaagtgctgaaaaaactcaaccacaagaatatagttaaactctttgctattgaggaagaaactaccactcggcacaaggtgttgatcatggagttttgcccttgtggttccttatataccgtcctttag

SEQ ID NO: 282157 - DNA, 3256 bp, Artificial Sequence
  derived and/or modified sequence
aatcccaattactgtgttcgctgctcagggctcctcattcccctttagagtaaagggcgagggcaacagtggacggggtgtctccagacatccccctcattaccgtggccgcggaagccgactcggcagttgccgccgcggctgtggtgactaccagacgggccataggcgtgcgcacgcgcacccgcaccggcgcgccggccgtcggtcacgtggcctccggccagggcttgcgaagccggaagtgtcctgagtctcgaggaggccgcgggagcccgccggcggtggcgcggcggagacccggctggtataacaagaggattgcctgatccagccaagatgcagagcacttctaatcatctgtggcttttatctgatattttaggccaaggagctactgcaaatgtctttcgtggaagacataagaaaactggtgatttatttgctatcaaagtatttaataacataagcttccttcgtccagtggatgttcaaatgagagaatttgaagtgttgaaaaaactcaatcacaaaaatattgtcaaattatttgctattgaagaggagacaacaacaagacataaagtacttattatggaattttgtccatgtgggagtttatacactgttttagaagaaccttctaatgcctatggactaccagaatctgaattcttaattgttttgcgagatgtggtgggtggaatgaatcatctacgagagaatggtatagtgcaccgtgatatcaagccaggaaatatcatgcgtgttataggggaagatggacagtctgtgtacaaactcacagattttggtgcagctagagaattagaagatgatgagcagtttgtttctctgtatggcacagaagaatatttgcaccctgatatgtatgagagagcagtgctaagaaaagatcatcagaagaaatatggagcaacagttgatctttggagcattggggtaacattttaccatgcagctactggatcactgccatttagaccctttgaagggcctcgtaggaataaagaagtgatgtataaaataattacaggaaagccttctggtgcaatatctggagtacagaaagcagaaaatggaccaattgactggagtggagacatgcctgtttcttgcagtctttctcggggtcttcaggttctacttacccctgttcttgcaaacatccttgaagcagatcaggaaaagtgttggggttttgaccagttttttgcagaaactagtgatatacttcaccgaatggtaattcatgttttttcgctacaacaaatgacagctcataagatttatattcatagctataatactgctactatatttcatgaactggtatataaacaaaccaaaattatttcttcaaatcaagaacttatctacgaagggcgacgcttagtcttagaacctggaaggctggcacaacatttccctaaaactactgaggaaaaccctatatttgtagtaagccgggaacctctgaataccataggattaatatatgaaaaaatttccctccctaaagtacatccacgttatgatttagacggggatgctagcatggctaaggcaataacaggggttgtgtgttatgcctgcagaattgccagtaccttactgctttatcaggaattaatgcgaaaggggatacgatggctgattgaattaattaaagatgattacaatgaaactgttcacaaaaagacagaagttgtgatcacattggatttctgtatcagaaacattgaaaaaactgtgaaagtatatgaaaagttgatgaagatcaacctggaagcggcagagttaggtgaaatttcagacatacacaccaaattgttgagactttccagttctcagggaacaatagaaaccagtcttcaggatatcgacagcagattatctccaggtggatcactggcagacgcatgggcacatcaagaaggcactcatccgaaagacagaaatgtagaaaaactacaagtcctgttaaattgcatgacagagatttactatcagttcaaaaaagacaaagcagaacgtagattagcttataatgaagaacaaatccacaaatttgataagcaaaaactgtattaccatgccacaaaagctatgacgcactttacagatgaatgtgttaaaaagtatgaggcatttttgaataagtcagaagaatggataagaaagatgcttcatcttaggaaacagttattatcgctgactaatcagtgttttgatattgaagaagaagtatcaaaatatcaagaatatactaatgagttacaagaaactctgcctcagaaaatgtttacagcttccagtggaatcaaacataccatgaccccaatttatccaagttctaacacattagtagaaatgactcttggtatgaagaaattaaaggaagagatggaaggggtggttaaagaacttgctgaaaataaccacattttagaaaggtttggctctttaaccatggatggtggccttcgcaacgttgactgtctttagctttctaatagaagtttaagaaaagtttccgtttgcacaagaaaataacgcttgggcattaaatgaatgcctttatagatagtcacttgtttctacaattcagtatttgatgtggtcgtgtaaatatgtacaatattgtaaatacataaaaaatatacaaatttttggctgctgtgaagatgtaattttatcttttaacatttataattatatgaggaaatttgacctcagtgatcacgagaagaaagccatgaccgaccaatatgttgacatactgatcctctactctgagtggggctaaataagttattttctctgaccgcctactggaaatatttttaagtggaaccaaaataggcatccttacaaatcaggaagactgacttgacacgtttgtaaatggtagaacggtggctactgtgagtggggagcagaaccgcaccactgttatactgggataacaatttttttgagaaggataaagtggcattattttattttacaaggtgcccagatcccagttatccttgtatccatgtaatttcagatgaattattaagcaaacattttaaagtgaattcattattaaaaactattcatttttttcctttggccataaatgtgtaattgtcattaaaattctaaggtcatttcaactgttttaagctgtatatttctttaattctgcttactatttcatggaaaaaaataaatttctcaattttaa

SEQ ID NO: 282158 - DNA, 547 bp, Artificial Sequence
  derived and/or modified sequence
aagtgagacggccgcgggctgaggggccaaggcggcgcggggcgcggtcggtcaggcctgcgccgcccggcggggagcgctcccgccccctgtgggaggctgggatgctgagtcagagcgggggcgggggcgggcgcaccgagaagccccggacgacccgaggccaagccatccaggaccccggctgcgtggacactgcctctgggtataacaagaggattgcctgatccagccaagatgcagagcacttctaatcatctgtggcttttatctgatattttaggccaaggagctactgcaaatgtctttcgtggaagacataagaaaactggtgatttatttgctatcaaagtatttaataacataagcttccttcgtccagtggatgttcaaatgagagaatttgaagtgttgaaaaaactcaatcacaaaaatattgtcaaattatttgctattgaagaggagacaacaacaagacataaagtacttattatggaattttgtccatgtgggagtttatacactgttttagaagaaccttctaatg

SEQ ID NO: 282159 - DNA, 513 bp, Artificial Sequence
  derived and/or modified sequence
atccccgctccgcgccgcgcggccggtcctcgacctgcatcccgtccggcggctttgggcataaagaggacgactccgttaccgggcctgggccctggctgcctggggaggcaggggcacctctttcccttagactcgctgttttctaccctctttccgagcgtcgacacaacgggcagtttttaaattataacaagaggattgcctgatccagccaagatgcagagcacttctaatcatctgtggcttttatctgatattttaggccaaggagctactgcaaatgtctttcgtggaagacataagaaaactggtgatttatttgctatcaaagtatttaataacataagcttccttcgtccagtggatgttcaaatgagagaatttgaagtgttgaaaaaactcaatcacaaaaatattgtcaaattatttgctattgaagaggagacaacaacaagacataaagtacttattatggaattttgtccatgtgggagtttatacactgtttta

SEQ ID NO: 282160 - protein, 372 aa, Artificial Sequence
  derived and/or modified sequence
MSKSESPKEPEQLRKLFIGGLSFETTDESLRSHFEQWGTLTDCVVMRDPNTKRSRGFGFVTYATVEEVDAAMNARPHKVDGRVVEPKRAVSREDSQRPGAHLTVKKIFVGGIKEDTEEHHLRDYFEQYGKIEVIEIMTDRGSGKKRGFAFVTFDDHDSVDKIVIQKYHTVNGHNCEVRKALSKQEMASASSSQRGRSGSGNFGGGRGGGFGGNDNFGRGGNFSGRGGFGGSRGGGGYGGSGDGYNGFGNDGGYGGGGPGYSGGSRGYGSGGQGYGNQGSGYGGSGSYDSYNNGGGGGFGGGSGSNFGGGGSYNDFGNYNNQSSNFGPMKGGNFGGRSSGPYGGGGQYFAKPRNQGGYGGSSSSSSYGSGRRF

SEQ ID NO: 282161 - protein, 267 aa, Artificial Sequence
  derived and/or modified sequence
MSKSESPKEPEQLRKLFIGGLSFETTDESLRSHFEQWGTLTDCVVMRDPNTKRSRGFGFVTYATVEEVDAAMNARPHKVDGRVVEPKRAVSREDSQRPGAHLTVKKIFVGGIKEDTEEHHLRDYFEQYGKIEVIEIMTDRGSGKKRGFAFVTFDDHDSVDKIVIQKYHTVNGHNCEVRKALSKQEMASASSSQRGRSGSGNFGGGSYNDFGNYNNQSSNFGPMKGGNFGGRSSGPYGGGGQYFAKPRNQGGYGGSSSSSSYGSGRRF

SEQ ID NO: 282162 - protein, 1181 aa, Artificial Sequence
  derived and/or modified sequence
MAGARSRDPWGASGICYLFGSLLVELLFSRAVAFNLDVMGALRKEGEPGSLFGFSVALHRQLQPRPQSWLLVGAPQALALPGQQANRTGGLFACPLSLEETDCYRVDIDQGADMQKESKENQWLGVSVRSQGPGGKIVTCAHRYEARQRVDQILETRDMIGRCFVLSQDLAIRDELDGGEWKFCEGRPQGHEQFGFCQQGTAAAFSPDSHYLLFGAPGTYNWKGTARVELCAQGSADLAHLDDGPYEAGGEKEQDPRLIPVPANSYFGLLFVTNIDSSDPDQLVYKTLDPADRLPGPAGDLALNSYLGFSIDSGKGLVRAEELSFVAGAPRANHKGAVVILRKDSASRLVPEVMLSGERLTSGFGYSLAVADLNSDGWPDLIVGAPYFFERQEELGGAVYVYLNQGGHWAGISPLRLCGSPDSMFGISLAVLGDLNQDGFPDIAVGAPFDGDGKVFIYHGSSLGVVAKPSQVLEGEAVGIKSFGYSLSGSLDMDGNQYPDLLVGSLADTAVLFRARPILHVSHEVSIAPRSIDLEQPNCAGGHSVCVDLRVCFSYIAVPSSYSPTVALDYVLDADTDRRLRGQVPRVTFLSRNLEEPKHQASGTVWLKHQHDRVCGDAMFQLQENVKDKLRAIVVTLSYSLQTPRLRRQAPGQGLPPVAPILNAHQPSTQRAEIHFLKQGCGEDKICQSNLQLVRARFCTRVSDTEFQPLPMDVDGTTALFALSGQPVIGLELMVTNLPSDPAQPQADGDDAHEAQLLVMLPDSLHYSGVRALDPAEKPLCLSNENASHVECELGNPMKRGAQVTFYLILSTSGISIETTELEVELLLATISEQELHPVSARARVFIELPLSIAGMAIPQQLFFSGVVRGERAMQSERDVGSKVKYEVTVSNQGQSLRTLGSAFLNIMWPHEIANGKWLLYPMQVELEGGQGPGQKGLCSPRPNILHLDVDSRDRRRRELEPPEQQEPGERQEPSMSWWPVSSAEKKKNITLDCARGTANCVVFSCPLYSFDRAAVLHVWGRLWNSTFLEEYSAVKSLEVIVRANITVKSSIKNLMLRDASTVIPVMVYLDPMAVVAEGVPWWVILLAVLAGLLVLALLVLLLWKMGFFKRAKHPEATVPQYHAVKIPREDRQQFKEEKTGTILRNNWGSPRREGPDAHPILAADGHPELGPDGHPGPGTA

SEQ ID NO: 282163 - DNA, 3546 bp, Artificial Sequence
  derived and/or modified sequence
atggccggcgccagaagcagagacccctggggcgccagcggcatctgctacctgttcggcagcctgctggtggagctgctgttcagcagagccgtggccttcaacctggacgtgatgggcgccctgagaaaggagggcgagcccggcagcctgttcggcttcagcgtggccctgcacagacagctgcagcccagaccccagagctggctgctggtgggcgccccccaggccctggccctgcccggccagcaggccaacagaaccggcggcctgttcgcctgccccctgagcctggaggagaccgactgctacagagtggacatcgaccagggcgccgacatgcagaaggagagcaaggagaaccagtggctgggcgtgagcgtgagaagccagggccccggcggcaagatcgtgacctgcgcccacagatacgaggccagacagagagtggaccagatcctggagaccagagacatgatcggcagatgcttcgtgctgagccaggacctggccatcagagacgagctggacggcggcgagtggaagttctgcgagggcagaccccagggccacgagcagttcggcttctgccagcagggcaccgccgccgccttcagccccgacagccactacctgctgttcggcgcccccggcacctacaactggaagggcaccgccagagtggagctgtgcgcccagggcagcgccgacctggcccacctggacgacggcccctacgaggccggcggcgagaaggagcaggaccccagactgatccccgtgcccgccaacagctacttcggcctgctgttcgtgaccaacatcgacagcagcgaccccgaccagctggtgtacaagaccctggaccccgccgacagactgcccggccccgccggcgacctggccctgaacagctacctgggcttcagcatcgacagcggcaagggcctggtgagagccgaggagctgagcttcgtggccggcgcccccagagccaaccacaagggcgccgtggtgatcctgagaaaggacagcgccagcagactggtgcccgaggtgatgctgagcggcgagagactgaccagcggcttcggctacagcctggccgtggccgacctgaacagcgacggctggcccgacctgatcgtgggcgccccctacttcttcgagagacaggaggagctgggcggcgccgtgtacgtgtacctgaaccagggcggccactgggccggcatcagccccctgagactgtgcggcagccccgacagcatgttcggcatcagcctggccgtgctgggcgacctgaaccaggacggcttccccgacatcgccgtgggcgcccccttcgacggcgacggcaaggtgttcatctaccacggcagcagcctgggcgtggtggccaagcccagccaggtgctggagggcgaggccgtgggcatcaagagcttcggctacagcctgagcggcagcctggacatggacggcaaccagtaccccgacctgctggtgggcagcctggccgacaccgccgtgctgttcagagccagacccatcctgcacgtgagccacgaggtgagcatcgcccccagaagcatcgacctggagcagcccaactgcgccggcggccacagcgtgtgcgtggacctgagagtgtgcttcagctacatcgccgtgcccagcagctacagccccaccgtggccctggactacgtgctggacgccgacaccgacagaagactgagaggccaggtgcccagagtgaccttcctgagcagaaacctggaggagcccaagcaccaggccagcggcaccgtgtggctgaagcaccagcacgacagagtgtgcggcgacgccatgttccagctgcaggagaacgtgaaggacaagctgagagccatcgtggtgaccctgagctacagcctgcagacccccagactgagaagacaggcccccggccagggcctgccccccgtggcccccatcctgaacgcccaccagcccagcacccagagagccgagatccacttcctgaagcagggctgcggcgaggacaagatctgccagagcaacctgcagctggtgagagccagattctgcaccagagtgagcgacaccgagttccagcccctgcccatggacgtggacggcaccaccgccctgttcgccctgagcggccagcccgtgatcggcctggagctgatggtgaccaacctgcccagcgaccccgcccagccccaggccgacggcgacgacgcccacgaggcccagctgctggtgatgctgcccgacagcctgcactacagcggcgtgagagccctggaccccgccgagaagcccctgtgcctgagcaacgagaacgccagccacgtggagtgcgagctgggcaaccccatgaagagaggcgcccaggtgaccttctacctgatcctgagcaccagcggcatcagcatcgagaccaccgagctggaggtggagctgctgctggccaccatcagcgagcaggagctgcaccccgtgagcgccagagccagagtgttcatcgagctgcccctgagcatcgccggcatggccatcccccagcagctgttcttcagcggcgtggtgagaggcgagagagccatgcagagcgagagagacgtgggcagcaaggtgaagtacgaggtgaccgtgagcaaccagggccagagcctgagaaccctgggcagcgccttcctgaacatcatgtggccccacgagatcgccaacggcaagtggctgctgtaccccatgcaggtggagctggagggcggccagggccccggccagaagggcctgtgcagccccagacccaacatcctgcacctggacgtggacagcagagacagaagaagaagagagctggagccccccgagcagcaggagcccggcgagagacaggagcccagcatgagctggtggcccgtgagcagcgccgagaagaagaagaacatcaccctggactgcgccagaggcaccgccaactgcgtggtgttcagctgccccctgtacagcttcgacagagccgccgtgctgcacgtgtggggcagactgtggaacagcaccttcctggaggagtacagcgccgtgaagagcctggaggtgatcgtgagagccaacatcaccgtgaagagcagcatcaagaacctgatgctgagagacgccagcaccgtgatccccgtgatggtgtacctggaccccatggccgtggtggccgagggcgtgccctggtgggtgatcctgctggccgtgctggccggcctgctggtgctggccctgctggtgctgctgctgtggaagatgggcttcttcaagagagccaagcaccccgaggccaccgtgccccagtaccacgccgtgaagatccccagagaggacagacagcagttcaaggaggagaagaccggcaccatcctgagaaacaactggggcagccccagaagagagggccccgacgcccaccccatcctggccgccgacggccaccccgagctgggccccgacggccaccccggccccggcaccgcctag

SEQ ID NO: 282164 - DNA, 3546 bp, Artificial Sequence
  derived and/or modified sequence
atggccggggctagatctagggatccttggggggcatcggggatttgctacttgttcgggtctctgctcgtcgagttgttattttcacgtgccgtggctttcaacctagatgtcatgggcgccctgagaaaagagggagagccaggatccctgttcgggttcagtgttgctctgcaccgtcagctccagccaaggccacagagttggcttctggtgggagcaccacaggcactagctttacccggccagcaggctaatcgaacgggcggcctgttcgcctgccccctatccttggaggaaactgattgctaccgcgtggacatagatcagggggccgacatgcagaaagaatccaaggaaaaccagtggttgggtgtgagcgtgcgcagccagggccctggaggtaagattgtgacatgtgctcacaggtatgaagcgcgtcagcgcgttgaccagatattggaaaccagggacatgatcgggaggtgcttcgttttgtcccaggacttagcgataagggatgagctcgatggcggcgagtggaagttctgcgaaggcaggccgcagggccatgagcagtttggcttctgtcagcaggggacagctgcagccttctccccggactctcattatctcctttttggagcccctggtacctataactggaaagggactgccagagtagagctttgcgcccagggatcagctgaccttgcacacctggatgacgggccatatgaagccggaggcgagaaagagcaggatcctagattgatcccagtccccgcaaacagctattttggacttctcttcgtaactaacatagactccagcgacccagatcagttagtttacaagactctagatccggctgacagattgcctggacccgccggcgatttggcgttgaattcctatctgggctttagcattgacagtggcaagggattagttcgcgccgaagagctctccttcgtggccggcgccccacgtgcaaaccacaagggtgctgtggtcattttgaggaaagatagcgcctccaggctggtgcctgaggtcatgctttctggtgagcggctcactagtgggtttggctactctcttgccgtagccgatcttaatagcgacggctggccagacctaatcgtgggtgctccctacttttttgaacggcaggaagaattaggaggagcagtgtatgtgtatctgaatcagggtggacactgggcagggataagccccctgcgcctttgtgggtcccccgattctatgtttgggattagtctggcagtcctcggcgacctgaatcaagacggattccccgacattgctgtcggggcgccttttgatggggacggtaaggtttttatttatcatggatcttctcttggagtggtcgcaaagccttcccaggtcctggagggagaagccgttggtattaagtctttcggatacagtctatccggatcacttgatatggatgggaaccagtatcccgacctactggtagggagtcttgccgacactgccgtgctgtttcgcgctaggcccatcctgcatgttagtcatgaggtgagtatagcacctcgctccatagacctcgagcagccaaactgcgccggtgggcacagcgtatgtgttgacttgcgtgtatgctttagttatatcgcagtgcccagctcatacagtcctacagtcgccctcgactatgtgctcgacgccgatacagatagacggctcaggggccaggtccccagagtcacgttcttgtcgcggaacctggaggagcctaagcaccaggcctcaggaaccgtgtggctaaaacaccagcacgacagggtgtgtggcgatgccatgtttcagctacaggagaacgtaaaggataagctgcgcgccattgtggtcaccctgtcctactccctgcagacacctcgcctccgcagacaggccccgggccaggggctcccccctgttgcacctattcttaacgctcatcagccttccactcagcgagctgagatccacttcctgaagcaaggttgtggggaggataagatctgccagagcaatctgcaactagtcagggcgcgcttctgtacacgagtctctgatacagaatttcagccactgccgatggatgtggacggcacaacggctctgttcgcgctctcgggccaacccgttatcgggctagagctcatggttacaaacctcccttccgaccccgcccagccacaggcggacggggacgatgctcacgaggcccagctgttggtaatgttgcctgatagcctgcattacagcggcgtgagagccttggacccagcagagaagcccttgtgtttgagtaacgagaacgctagtcacgtcgagtgcgaattaggaaatcctatgaagaggggtgcccaggttacattctatttgattctctccacatcaggcattagtattgagacaacagagctcgaagtcgaactcttgctggcgaccattagcgagcaagagttgcacccggtgtcagcacgcgccagagtcttcatcgagctacctctcagcatcgcaggcatggctataccacagcagcttttctttagtggagtcgtgcgaggagaacgggctatgcagtctgagcgagacgtggggagtaaagtgaagtatgaggtgactgtgagtaatcaggggcaaagtctacgcacactaggatctgcgtttctgaatatcatgtggccccatgagattgccaacggaaagtggctgttgtacccgatgcaggtggaacttgagggaggccagggtcctgggcagaagggtctgtgttcacctcgacccaacatccttcacctggatgtggattcccgtgacaggcgcaggcgggaactcgagcccccagaacagcaggagcctggtgagcgacaggagccaagcatgagctggtggccagttagttccgctgagaaaaagaaaaacattaccctggattgtgctcgcggtacagccaactgcgtggttttttcctgtccgctgtacagcttcgaccgggccgcggtgctgcacgtttggggcaggctatggaactcgacctttctggaggagtactcagctgttaagagcctggaggtgatcgtcagagctaacatcacggtgaagtcctccatcaaaaatctgatgttgcgcgacgcttcaaccgtgattccagtgatggtctaccttgatccaatggccgtcgtcgcagagggagtgccctggtgggtgatactcctcgcagtgctggcaggtctcctagttctggcactgctcgtgcttctgttgtggaagatgggattcttcaaacgagctaaacatcccgaagcaaccgtgccccaatatcatgccgtcaaaatcccccgagaggaccgccagcagttcaaggaggaaaaaactggcaccattctgagaaacaattggggctcaccccgccgcgagggccccgacgctcatcccatccttgcagctgacggtcacccagagttgggtcccgacggtcaccctggccctgggacggcatag

SEQ ID NO: 282165 - DNA, 3546 bp, Artificial Sequence
  derived and/or modified sequence
atggccggggcccggagccgggacccctggggcgccagcggcatctgctacctgtttggcagcctgctggtggagctgctcttcagcagagctgtggccttcaacctggatgtgatgggcgccctgaggaaggagggggagcccggcagcctgtttggcttctctgtggccctgcaccggcagctgcagccccggccccagagctggctgctggtgggcgccccccaggccctggccctgcccggccagcaggccaacagaactggaggcctgtttgcctgccccctgagcctggaggagacagactgctacagagtggacatcgaccagggcgctgacatgcagaaggagagcaaggagaaccagtggctgggcgtgtctgtgcgcagccagggccctgggggcaagatcgtgacctgtgcccacagatatgaggcccggcagagggtggaccagatcctggagacccgggacatgattggccgctgctttgtgctgagccaggacctggccatcagagatgagctggatggaggagagtggaagttctgtgagggccggccccagggccacgagcagtttggcttctgccagcagggcacagctgctgccttctccccagacagccactacctgctgtttggagcccctggcacctacaactggaagggcacagcccgggtggagctgtgtgcccagggcagcgctgacctggcccacctggatgatggcccctatgaggccggcggggagaaggagcaggaccccaggctcatccctgtgcctgccaacagctacttcggcctgctgtttgtgaccaacatcgacagcagtgaccctgaccagctggtgtacaagaccctggaccctgctgaccggctgcccggccctgctggggacctggccctgaacagctacctgggcttcagcattgattctgggaagggcctggtgcgggcagaggagctgagctttgtggccggggccccccgggccaaccacaagggagctgtggtgatcctgaggaaggacagcgccagccggctggtgcctgaggtgatgctgagcggggagcggctgaccagcggcttcggctacagcctggccgtggccgacctgaacagtgatggctggccagacctgattgtgggcgccccctacttctttgagcggcaggaggagctgggcggcgctgtgtatgtgtacctgaaccagggcggccactgggccggcatcagccccctgcggctgtgtggcagcccagacagcatgtttggcatcagcctggccgtgctgggggacctgaaccaggacggcttcccagacattgctgtgggcgccccctttgatggagatggcaaggtgttcatctaccacggcagcagcctgggcgtggtggccaagcccagccaggtgctggagggggaggccgtgggcatcaagagctttggctacagcctgagcggcagcctggacatggatggcaaccagtacccagacctgctggtgggcagcctggccgacacagctgtgctcttccgggcccggcccatcctgcacgtgtcccatgaggtgtccatcgcccccaggagcattgacctggagcagcccaactgtgccggcggccacagcgtgtgtgtggacctgcgggtgtgcttctcctacatcgctgtgcccagcagctacagccccaccgtggccctggactatgtgctggatgctgacacagaccggcggctgcggggccaggtgccccgggtgaccttcctgagcaggaacctggaggagcccaagcaccaggccagcggcaccgtgtggctgaagcaccagcacgacagagtgtgtggagatgccatgttccagctgcaggagaatgtgaaggacaagctgcgggccatcgtggtgaccctgagctacagcctgcagaccccccggctgcggcggcaggcccctggccagggcctgccccctgtggcccccatcctgaatgcccaccagcccagcacccagagagctgagatccacttcctgaagcagggctgtggggaggacaagatctgccagagcaacctgcagctggtgcgggcccgcttctgcaccagggtgtctgacacagagttccagcccctgcccatggatgtggatggcaccacagccctgtttgccctgagcggccagcctgtgattggcctggagctgatggtgaccaacctgcccagcgaccctgcccagccccaggctgatggagatgatgcccacgaggcccagctgctggtgatgctgcctgacagcctgcactacagcggcgtgcgggccctggaccctgctgagaagcccctgtgcctgagcaatgaaaatgccagccacgtggagtgtgagctgggcaaccccatgaagagaggagcccaggtgaccttctacctgatcctgagcaccagcggcatcagcattgagaccacagagctggaggtggagctgctgctggccaccatcagcgagcaggagctgcaccctgtgtctgcccgggcccgggtcttcatcgagctgcccctgagcattgctggcatggccatcccccagcagctgttcttctctggagtggtgcggggggagcgggccatgcagagcgagagagatgtgggcagcaaggtgaagtatgaggtgacagtgagcaaccagggccagagcctgcggaccctgggcagcgccttcctgaacatcatgtggccccatgaaattgccaacgggaagtggctgctgtaccccatgcaggtggagctggagggcggccagggccctggccagaagggcctgtgcagcccccggcccaacatcctgcacctggatgtggacagccgggacagaagaagaagagagctggagcccccagagcagcaggagcccggggagcggcaggagcccagcatgtcctggtggcctgtgtcctctgctgagaagaagaagaacatcaccctggactgtgcccggggcacagccaactgtgtggtgttcagctgccccctgtacagctttgacagagctgctgtgctgcacgtgtggggccgcctgtggaacagcaccttcctggaggagtacagcgctgtgaagagcctggaggtgattgtgcgggccaacatcaccgtgaagagcagcatcaagaacctgatgctgagagatgccagcaccgtcatccctgtgatggtgtacctggaccccatggctgtggtggccgagggcgtgccctggtgggtgatcctgctggccgtgctggccggcctgctggtgctggccctgctggtgctgctgctgtggaagatgggcttcttcaagagggccaagcaccctgaggccaccgtgccccagtaccacgctgtgaagatcccccgggaggaccggcagcagttcaaggaggagaagacaggcaccatcctgaggaacaactggggcagcccccggcgggagggcccagatgcccaccccatcctggccgcagatggccaccctgagctgggcccagatggccaccctggccctggaacagcctag

SEQ ID NO: 282166 - DNA, 3930 bp, Artificial Sequence
  derived and/or modified sequence
tcgctgggagctcgcgcagggatcgtcccatggccggggctcggagccgcgacccttggggggcctccgggatttgctacctttttggctccctgctcgtcgaactgctcttctcacgggctgtcgccttcaatctggacgtgatgggtgccttgcgcaaggagggcgagccaggcagcctcttcggcttctctgtggccctgcaccggcagttgcagccccgaccccagagctggctgctggtgggtgctccccaggccctggctcttcctgggcagcaggcgaatcgcactggaggcctcttcgcttgcccgttgagcctggaggagactgactgctacagagtggacatcgaccagggagctgatatgcaaaaggaaagcaaggagaaccagtggttgggagtcagtgttcggagccaggggcctgggggcaagattgttacctgtgcacaccgatatgaggcaaggcagcgagtggaccagatcctggagacgcgggatatgattggtcgctgctttgtgctcagccaggacctggccatccgggatgagttggatggtggggaatggaagttctgtgagggacgcccccaaggccatgaacaatttgggttctgccagcagggcacagctgccgccttctcccctgatagccactacctcctctttggggccccaggaacctataattggaagggcacggccagggtggagctctgtgcacagggctcagcggacctggcacacctggacgacggtccctacgaggcggggggagagaaggagcaggacccccgcctcatcccggtccctgccaacagctactttgggttgctttttgtgaccaacattgatagctcagaccccgaccagctggtgtataaaactttggaccctgctgaccggctcccaggaccagccggagacttggccctcaatagctacttaggcttctctattgactcggggaaaggtctggtgcgtgcagaagagctgagctttgtggctggagccccccgcgccaaccacaagggtgctgtggtcatcctgcgcaaggacagcgccagtcgcctggtgcccgaggttatgctgtctggggagcgcctgacctccggctttggctactcactggctgtggctgacctcaacagtgatggctggccagacctgatagtgggtgccccctacttctttgagcgccaagaagagctggggggtgctgtgtatgtgtacttgaaccaggggggtcactgggctgggatctcccctctccggctctgcggctcccctgactccatgttcgggatcagcctggctgtcctgggggacctcaaccaagatggctttccagatattgcagtgggtgccccctttgatggtgatgggaaagtcttcatctaccatgggagcagcctgggggttgtcgccaaaccttcacaggtgctggagggcgaggctgtgggcatcaagagcttcggctactccctgtcaggcagcttggatatggatgggaaccaataccctgacctgctggtgggctccctggctgacaccgcagtgctcttcagggccagacccatcctccatgtctcccatgaggtctctattgctccacgaagcatcgacctggagcagcccaactgtgctggcggccactcggtctgtgtggacctaagggtctgtttcagctacattgcagtccccagcagctatagccctactgtggccctggactatgtgttagatgcggacacagaccggaggctccggggccaggttccccgtgtgacgttcctgagccgtaacctggaagaacccaagcaccaggcctcgggcaccgtgtggctgaagcaccagcatgaccgagtctgtggagacgccatgttccagctccaggaaaatgtcaaagacaagcttcgggccattgtagtgaccttgtcctacagtctccagacccctcggctccggcgacaggctcctggccaggggctgcctccagtggcccccatcctcaatgcccaccagcccagcacccagcgggcagagatccacttcctgaagcaaggctgtggtgaagacaagatctgccagagcaatctgcagctggtccgcgcccgcttctgtacccgggtcagcgacacggaattccaacctctgcccatggatgtggatggaacaacagccctgtttgcactgagtgggcagccagtcattggcctggagctgatggtcaccaacctgccatcggacccagcccagccccaggctgatggggatgatgcccatgaagcccagctcctggtcatgcttcctgactcactgcactactcaggggtccgggccctggaccctgcggagaagccactctgcctgtccaatgagaatgcctcccatgttgagtgtgagctggggaaccccatgaagagaggtgcccaggtcaccttctacctcatccttagcacctccgggatcagcattgagaccacggaactggaggtagagctgctgttggccacgatcagtgagcaggagctgcatccagtctctgcacgagcccgtgtcttcattgagctgccactgtccattgcaggaatggccattccccagcaactcttcttctctggtgtggtgaggggcgagagagccatgcagtctgagcgggatgtgggcagcaaggtcaagtatgaggtcacggtttccaaccaaggccagtcgctcagaaccctgggctctgccttcctcaacatcatgtggcctcatgagattgccaatgggaagtggttgctgtacccaatgcaggttgagctggagggcgggcaggggcctgggcagaaagggctttgctctcccaggcccaacatcctccacctggatgtggacagtagggataggaggcggcgggagctggagccacctgagcagcaggagcctggtgagcggcaggagcccagcatgtcctggtggccagtgtcctctgctgagaagaagaaaaacatcaccctggactgcgcccggggcacggccaactgtgtggtgttcagctgcccactctacagctttgaccgcgcggctgtgctgcatgtctggggccgtctctggaacagcacctttctggaggagtactcagctgtgaagtccctggaagtgattgtccgggccaacatcacagtgaagtcctccataaagaacttgatgctccgagatgcctccacagtgatcccagtgatggtatacttggaccccatggctgtggtggcagaaggagtgccctggtgggtcatcctcctggctgtactggctgggctgctggtgctagcactgctggtgctgctcctgtggaagatgggattcttcaaacgggcgaagcaccccgaggccaccgtgccccagtaccatgcggtgaagattcctcgggaagaccgacagcagttcaaggaggagaagacgggcaccatcctgaggaacaactggggcagcccccggcgggagggcccggatgcacaccccatcctggctgctgacgggcatcccgagctgggccccgatgggcatccagggccaggcaccgcctaggttcccatgtcccagcctggcctgtggctgccctccatcccttccccagagatggctccttgggatgaagagggtagagtgggctgctggtgtcgcatcaagatttggcaggatcggcttcctcaggggcacagacctctcccacccacaagaactcctcccacccaacttccccttagagtgctgtgagatgagagtgggtaaatcagggacagggccatggggtagggtgagaagggcaggggtgtcctgatgcaaaggtggggagaagggatcctaatcccttcctctcccattcaccctgtgtaacaggaccccaaggacctgcctccccggaagtgccttaacctagagg

SEQ ID NO: 282167 - DNA, 3546 bp, Artificial Sequence
  derived and/or modified sequence
atggccggcgcccggagccgggacccctggggcgccagcggcatctgctatctgttcggcagtcttctggtcgagttgctgtttagccgtgcggtagcctttaacctggacgttatgggcgccttgaggaaggaaggcgagccaggcagcctattcggcttcagcgtcgctctccatcgtcagctgcagcctagacctcagagttggttactggtgggggccccccaggccctggccctgcctggacaacaggctaacagaaccggggggctttttgcctgcccacttagtctggaggaaaccgattgttacagagtggatatcgaccagggggcggatatgcagaaggagagcaaggaaaatcagtggctgggtgtcagtgttaggagccaggggcccggggggaagatcgttacctgtgcacatcgctacgaagctagacagcgggttgaccagattctggagacgcgtgacatgattggtagatgcttcgttctgagtcaagacctggccattcgggacgaattggacggcggtgagtggaagttttgcgaaggacgcccacaaggccatgagcagttcgggttctgtcagcagggaactgctgccgctttttcaccagatagccattatctcttattcggggcccccggcacttacaactggaagggcacggcacgcgttgagttgtgcgctcaaggttccgctgatctggcccatctggatgatggcccctacgaggccggcggagagaaggaacaggacccccggttgatcccagtgcccgcgaactcatattttggactgttgtttgtcactaacattgatagctctgatccggaccaactggtatataagactctggacccggcagaccggctccccggtccagcaggcgatctggcactgaatagctacctgggattcagtatcgattctggaaaaggtctcgtgcgagccgaggaattgagtttcgtcgccggcgctcctcgcgctaaccacaaaggggcagtcgtgatacttcggaaggacagcgccagtcgtctcgtacctgaggtcatgttgtccggcgaacgactgacaagcgggtttggttatagcttggctgtcgccgacctaaactcagatggttggcctgatctgattgttggagctccatattttttcgaaagacaggaagagttaggcggagcagtctatgtgtatttaaatcagggtggacactgggcaggcatttcccctctgcgcctatgtggcagtccggattctatgttcggcatttcccttgccgtcttaggcgacctgaatcaggacggatttccagacatagccgttggagctcccttcgatggggatggaaaagtcttcatctatcatggatctagcctgggagtcgtggcgaagccatcccaagtattagagggggaagctgtcggcataaagagcttcggctacagtctgtccggctccctggacatggacggaaatcagtaccctgatctgctggtagggagccttgccgacaccgcagtcttgttccgagcacggccaatcttgcacgtatcacacgaggtctctattgccccacgatccatcgatttggagcagcccaactgcgctggggggcattctgtgtgcgtggacttgcgggtttgcttcagttacattgccgtgcccagtagctacagccccactgtggctttggactacgtcctagacgccgacacggacagaaggctgcgaggtcaagtaccaagggtgaccttccttagccgcaacctggaagagcccaagcaccaggcctctggaaccgtgtggctgaaacaccagcatgatcgggtgtgtggtgatgcaatgttccagctccaggaaaatgtgaaggacaaattacgggctatcgtagtcaccctttcctactctctgcagacgccacggttgcggcgacaggccccagggcaagggctgccgcctgtggcgcctatccttaacgctcatcagccctctacacagcgcgccgaaattcacttcctaaagcaaggatgcggggaagataaaatttgccagagcaacctgcagctggtccgggcccgtttttgcacgagagtgagtgacacagaattccagcccctgcctatggatgtggatgggacgacagccctgttcgccttgagtggacagccggtgataggactggaactgatggtaaccaatctacccagcgaccccgcgcagccacaagcagacggggacgatgcccacgaagcccagttgttagtgatgttgcccgacagtctgcactattcaggcgtgcgcgcactggacccagctgaaaagcccttgtgcctgtcaaacgagaacgccagtcatgtggagtgcgaactgggtaatcctatgaagcgcggtgcacaggtcacgttctatctgatcctgtctacaagtggcatttccattgaaacgaccgagctcgaggtggagttattactcgccactatcagtgaacaagaactgcaccctgtctccgctcgcgcccgcgtcttcatagaactgcctctttccattgcgggcatggcaatcccacaacagcttttcttcagcggcgtcgtccgcggggagagggcaatgcagtctgagcgggacgtgggatcaaaggtcaaatacgaagtgacggtttcaaaccagggccagagcctgcgtacactagggtccgctttcctgaatattatgtggccacacgagattgctaatggaaaatggctcctgtaccccatgcaggtcgaactggagggcggacaagggcctggacagaaaggcctctgttcacctcggcccaatatactgcacctggacgtggatagtcgtgatagacgccgtagagagctagagccacccgagcagcaggaacccggagagcgtcaggaaccatccatgtcctggtggcctgtgtcttccgctgagaagaaaaagaatatcacattggattgtgccagaggaacagctaattgcgtggtgtttagctgcccactatattcttttgaccgagccgccgtgttgcatgtgtggggccgactgtggaattccacattcctagaggagtatagcgcagtgaaatctctggaggtgatcgtgagagcaaatatcacagtgaaatcgtccatcaagaacctgatgctgagagatgcttccacggttatacctgtgatggtgtatctggatccaatggcggtcgttgctgaaggagtgccttggtgggtgatcctcctagcagttttagctggcttgttagttttagccttacttgtactgttactgtggaaaatgggcttctttaaaagggccaaacaccccgaagccaccgtgcctcagtaccatgctgtcaagattccaagagaggatagacagcagttcaaggaggagaaaactggaaccattctgcgcaataactggggttccccaaggcgggagggacccgacgcccaccccatcctggcagccgacggccaccctgagctgggaccagatggccatccggggcctggcaccgcgtag

SEQ ID NO: 282168 - DNA, 3546 bp, Artificial Sequence
  derived and/or modified sequence
atggccggagctcgaagccgtgatccgtggggtgcgtctgggatttgctatctgttcggctccctgctggtcgaactgcttttctctcgggctgtcgcctttaacctggatgttatgggagccctgcggaaggagggtgagcctgggagcttattcggcttcagtgtggcactgcacaggcagttgcagccaaggcctcagtcttggctgttggtaggtgcgcctcaggctctggctctgcctgggcagcaggcgaataggacagggggactttttgcatgccccctgtctctcgaggagacagactgctatcgggtcgacatcgatcaaggcgctgacatgcaaaaggaatccaaggagaatcaatggctgggtgtgtcagtgaggtcccagggccctggcggaaaaattgtcacctgtgcacaccgctatgaggccaggcagcgggtcgatcagattctcgaaactcgggatatgattgggcgttgctttgttctttctcaagatctggctattcgcgatgaactcgacggaggtgagtggaagttctgtgagggtcggccacagggtcacgaacagtttggtttttgccagcaaggaaccgcggcagctttttctcccgactcacactatctgctgttcggggcacccggaacctacaattggaagggaaccgcacgggttgagctttgtgctcagggttctgccgacctggctcacctggatgacggtccctacgaagccggtggcgagaaagagcaagatcccagacttattcccgtcccagccaattcctacttcgggttgctctttgtgaccaatatagacagctccgacccggatcagttggtctacaagactctagaccctgcggatcggttgccaggacccgcaggggatctcgcactgaactcatatctaggcttcagcatcgatagcggcaaggggctggtgcgagcggaggagttaagcttcgtcgccggtgctcccagggccaaccacaagggcgctgtcgttatcctgcgaaaagatagtgcgtcacgccttgtccctgaggtgatgctatccggtgagaggctcacctccggcttcgggtatagcctggccgttgctgatttaaattctgatggctggccggatctgatcgtgggggcaccatattttttcgaaaggcaggaggaactggggggtgcggtgtatgtgtacctgaatcaggggggtcactgggccggaatctcaccactaaggttgtgtgggtccccagacagtatgtttggaataagtctggccgttctcggagatttgaaccaggacggctttcccgatattgcagttggcgctccatttgacggagatggcaaagtctttatttaccatggttcgagcctcggggtcgtggccaagccaagccaggtgctggagggagaagcagtgggcattaaatcttttggctacagtctctctggatcactcgatatggacgggaatcagtacccggacctcctggttggcagcttggcagacaccgcagtgctcttcagggctcgcccaatactgcatgtatcccacgaggtgagcatagctccgagaagtattgacctggagcagcccaactgtgcgggtggacattcagtgtgtgtggacctgcgcgtgtgtttcagctacatcgccgtgccttctagttattctccaacagtagcacttgattacgtgctggacgcggacacagacaggaggctgagaggccaagtcccgagagtgacctttctctctagaaatctcgaggagcccaagcaccaagcctccgggactgtttggctcaagcatcagcacgacagagtgtgcggagatgccatgtttcaattacaggagaatgtgaaggacaagctgcgggctattgttgtgactctctcctacagtctgcagacgccccgactcaggaggcaggcgcctggacaaggcctgccacccgtggcaccgatattgaatgcacaccaaccatcaacgcaacgcgctgagatccacttcctcaagcagggttgcggcgaagacaagatctgccagagcaacttgcagcttgtccgggctagattctgtacaagagtgtccgatacagaattccaacccttgccgatggacgtcgatggtacgaccgcgttgttcgccttaagcggccaacccgtcatcggactggaactcatggtgacaaatctcccctccgatccggcacagccacaggcggatggggacgatgcacatgaagcccagctccttgtgatgttgccggactccttacactattctggcgttcgagcgctggaccccgctgagaaaccgttgtgtctatcaaatgagaacgcctcgcacgtggagtgtgaactcggaaaccccatgaaacgcggagctcaggttacgttttatctcattttgtcaactagcggaatctctattgaaacgacagagctggaagttgagctcctgctggccaccatcagtgagcaagaactccacccggtgagtgcaagggctcgcgtgttcatcgaacttccgttgagtattgctggtatggctattcctcaacagctgttctttagtggtgtagttcggggagagcgcgctatgcaaagcgaaagagacgtgggaagcaaagtgaaatacgaggtgactgtgagcaatcaggggcagtctctcaggacgctaggctccgcctttttaaatattatgtggccacatgagattgccaatggcaagtggctgctttacccaatgcaagtggagctggagggtgggcagggccctggacaaaaagggctttgcagcccacgccctaacatcttacatctggatgttgactccagagacaggagacgcagggaattggagccccctgagcaacaggagccgggtgagaggcaagagccgtctatgagctggtggcccgtctcatcagctgagaagaaaaaaaatataactttagattgcgccagaggcacagccaactgtgtcgtcttctcttgtcccttgtatagctttgatcgggctgcagtgttgcacgtctggggcagattatggaattcaacttttctagaagagtactctgcagtgaagagcctggaggttatcgtgcgagcaaatatcactgtgaaatccagcattaaaaatctgatgctgcgtgatgccagtactgtaatacccgtgatggtttacctagaccctatggcagtcgttgcggagggagtgccctggtgggtgattctgctcgccgtactggccggactacttgtacttgctctcctcgtcttgcttctgtggaaaatgggttttttcaagagggccaagcacccagaggccaccgtgccgcagtatcacgcagttaagattccacgcgaggaccgacagcagttcaaagaagagaagaccggcacgattcttagaaacaattggggcagtccccgtcgcgaagggccagatgcccaccccatcttggcagctgacggtcatccagagcttggccctgacggtcatccgggacccggtactgcatag

SEQ ID NO: 282169 - protein, 1162 aa, Artificial Sequence
  derived and/or modified sequence
MAGARSRDPWGASGICYLFGSLLVELLFSRAVAFNLDVMGALRKEGEPGSLFGFSVALHRQLQPRPQSWLLVGAPQALALPGQQANRTGGLFACPLSLEETDCYRVDIDQGADMQKESKENQWLGVSVRSQGPGGKIVTCAHRYEARQRVDQILETRDMIGRCFVLSQDLAIRDELDGGEWKFCEGRPQGHEQFGFCQQGTAAAFSPDSHYLLFGAPGTYNWKGTARVELCAQGSADLAHLDDGPYEAGGEKEQDPRLIPVPANSYFGLLFVTNIDSSDPDQLVYKTLDPADRLPGPAGDLALNSYLGFSIDSGKGLVRAEELSFVAGAPRANHKGAVVILRKDSASRLVPEVMLSGERLTSGFGYSLAVADLNSDGWPDLIVGAPYFFERQEELGGAVYVYLNQGGHWAGISPLRLCGSPDSMFGISLAVLGDLNQDGFPDIAVGAPFDGDGKVFIYHGSSLGVVAKPSQVLEGEAVGIKSFGYSLSGSLDMDGNQYPDLLVGSLADTAVLFRARPILHVSHEVSIAPRSIDLEQPNCAGGHSVCVDLRVCFSYIAVPSSYSPTVALDYVLDADTDRRLRGQVPRVTFLSRNLEEPKHQASGTVWLKHQHDRVCGDAMFQLQENVKDKLRAIVVTLSYSLQTPRLRRQAPGQGLPPVAPILNAHQPSTQRAEIHFLKQGCGEDKICQSNLQLVRARFCTRVSDTEFQPLPMDVDGTTALFALSGQPVIGLELMVTNLPSDPAQPQADGDDAHEAQLLVMLPDSLHYSGVRALDPAEKPLCLSNENASHVECELGNPMKRGAQVTFYLILSTSGISIETTELEVELLLATISEQELHPVSARARVFIELPLSIAGMAIPQQLFFSGVVRGERAMQSERDVGSKVKYEVTVSNQGQSLRTLGSAFLNIMWPHEIANGKWLLYPMQVELEGGQGPGQKGLCSPRPNILHLDVDSRDRRRRELEPPEQQEPGERQEPSMSWWPVSSAEKKKNITLDCARGTANCVVFSCPLYSFDRAAVLHVWGRLWNSTFLEEYSAVKSLEVIVRANITVKSSIKNLMLRDASTVIPVMVYLDPMAVVAEGVPWWVILLAVLAGLLVLALLVLLLWKCGFFHRSSQSSSFPTNYHRACLAVQPSAMEVGGPGTVGWDSSNGRSTPRPPCPSTMR

SEQ ID NO: 282170 - protein, 1118 aa, Artificial Sequence
  derived and/or modified sequence
MAGARSRDPWGASGICYLFGSLLVELLFSRAVAFNLDVMGALRKEGEPGSLFGFSVALHRQLQPRPQSWLLVGAPQALALPGQQANRTGGLFACPLSLEETDCYRVDIDQGADMQKESKENQWLGVSVRSQGPGGKIVTCAHRYEARQRVDQILETRDMIGRCFVLSQDLAIRDELDGGEWKFCEGRPQGHEQFGFCQQGTAAAFSPDSHYLLFGAPGTYNWKGLLFVTNIDSSDPDQLVYKTLDPADRLPGPAGDLALNSYLGFSIDSGKGLVRAEELSFVAGAPRANHKGAVVILRKDSASRLVPEVMLSGERLTSGFGYSLAVADLNSDGWPDLIVGAPYFFERQEELGGAVYVYLNQGGHWAGISPLRLCGSPDSMFGISLAVLGDLNQDGFPDIAVGAPFDGDGKVFIYHGSSLGVVAKPSQVLEGEAVGIKSFGYSLSGSLDMDGNQYPDLLVGSLADTAVLFRARPILHVSHEVSIAPRSIDLEQPNCAGGHSVCVDLRVCFSYIAVPSSYSPTVALDYVLDADTDRRLRGQVPRVTFLSRNLEEPKHQASGTVWLKHQHDRVCGDAMFQLQENVKDKLRAIVVTLSYSLQTPRLRRQAPGQGLPPVAPILNAHQPSTQRAEIHFLKQGCGEDKICQSNLQLVRARFCTRVSDTEFQPLPMDVDGTTALFALSGQPVIGLELMVTNLPSDPAQPQADGDDAHEAQLLVMLPDSLHYSGVRALDPAEKPLCLSNENASHVECELGNPMKRGAQVTFYLILSTSGISIETTELEVELLLATISEQELHPVSARARVFIELPLSIAGMAIPQQLFFSGVVRGERAMQSERDVGSKVKYEVTVSNQGQSLRTLGSAFLNIMWPHEIANGKWLLYPMQVELEGGQGPGQKGLCSPRPNILHLDVDSRDRRRRELEPPEQQEPGERQEPSMSWWPVSSAEKKKNITLDCARGTANCVVFSCPLYSFDRAAVLHVWGRLWNSTFLEEYSAVKSLEVIVRANITVKSSIKNLMLRDASTVIPVMVYLDPMAVVAEGVPWWVILLAVLAGLLVLALLVLLLWKCGFFHRSSQSSSFPTNYHRACLAVQPSAMEVGGPGTVGWDSSNGRSTPRPPCPSTMR

SEQ ID NO: 282171 - protein, 1122 aa, Artificial Sequence
  derived and/or modified sequence
MAGARSRDPWGASGICYLFGSLLVELLFSRAVAFNLDVMGALRKEGEPGSLFGFSVALHRQLQPRPQSWLLVGAPQALALPGQQANRTGGLFACPLSLEETDCYRVDIDQGADMQKESKENQWLGVSVRSQGPGGKIVTCAHRYEARQRVDQILETRDMIGRCFVLSQDLAIRDELDGGEWKFCEGRPQGHEQFGFCQQGTAAAFSPDSHYLLFGAPGTYNWKGTARVELCAQGSADLAHLDDGPYEAGGEKEQDPRLIPVPANSYFGFSIDSGKGLVRAEELSFVAGAPRANHKGAVVILRKDSASRLVPEVMLSGERLTSGFGYSLAVADLNSDGWPDLIVGAPYFFERQEELGGAVYVYLNQGGHWAGISPLRLCGSPDSMFGISLAVLGDLNQDGFPDIAVGAPFDGDGKVFIYHGSSLGVVAKPSQVLEGEAVGIKSFGYSLSGSLDMDGNQYPDLLVGSLADTAVLFRARPILHVSHEVSIAPRSIDLEQPNCAGGHSVCVDLRVCFSYIAVPSSYSPTVALDYVLDADTDRRLRGQVPRVTFLSRNLEEPKHQASGTVWLKHQHDRVCGDAMFQLQENVKDKLRAIVVTLSYSLQTPRLRRQAPGQGLPPVAPILNAHQPSTQRAEIHFLKQGCGEDKICQSNLQLVRARFCTRVSDTEFQPLPMDVDGTTALFALSGQPVIGLELMVTNLPSDPAQPQADGDDAHEAQLLVMLPDSLHYSGVRALDPAEKPLCLSNENASHVECELGNPMKRGAQVTFYLILSTSGISIETTELEVELLLATISEQELHPVSARARVFIELPLSIAGMAIPQQLFFSGVVRGERAMQSERDVGSKVKYEVTVSNQGQSLRTLGSAFLNIMWPHEIANGKWLLYPMQVELEGGQGPGQKGLCSPRPNILHLDVDSRDRRRRELEPPEQQEPGERQEPSMSWWPVSSAEKKKNITLDCARGTANCVVFSCPLYSFDRAAVLHVWGRLWNSTFLEEYSAVKSLEVIVRANITVKSSIKNLMLRDASTVIPVMVYLDPMAVVAEGVPWWVILLAVLAGLLVLALLVLLLWKCGFFHRSSQSSSFPTNYHRACLAVQPSAMEVGGPGTVGWDSSNGRSTPRPPCPSTMR

SEQ ID NO: 282172 - DNA, 3489 bp, Artificial Sequence
  derived and/or modified sequence
atggccggcgccagaagcagagacccctggggcgccagcggcatctgctacctgttcggcagcctgctggtggagctgctgttcagcagagccgtggccttcaacctggacgtgatgggcgccctgagaaaggagggcgagcccggcagcctgttcggcttcagcgtggccctgcacagacagctgcagcccagaccccagagctggctgctggtgggcgccccccaggccctggccctgcccggccagcaggccaacagaaccggcggcctgttcgcctgccccctgagcctggaggagaccgactgctacagagtggacatcgaccagggcgccgacatgcagaaggagagcaaggagaaccagtggctgggcgtgagcgtgagaagccagggccccggcggcaagatcgtgacctgcgcccacagatacgaggccagacagagagtggaccagatcctggagaccagagacatgatcggcagatgcttcgtgctgagccaggacctggccatcagagacgagctggacggcggcgagtggaagttctgcgagggcagaccccagggccacgagcagttcggcttctgccagcagggcaccgccgccgccttcagccccgacagccactacctgctgttcggcgcccccggcacctacaactggaagggcaccgccagagtggagctgtgcgcccagggcagcgccgacctggcccacctggacgacggcccctacgaggccggcggcgagaaggagcaggaccccagactgatccccgtgcccgccaacagctacttcggcctgctgttcgtgaccaacatcgacagcagcgaccccgaccagctggtgtacaagaccctggaccccgccgacagactgcccggccccgccggcgacctggccctgaacagctacctgggcttcagcatcgacagcggcaagggcctggtgagagccgaggagctgagcttcgtggccggcgcccccagagccaaccacaagggcgccgtggtgatcctgagaaaggacagcgccagcagactggtgcccgaggtgatgctgagcggcgagagactgaccagcggcttcggctacagcctggccgtggccgacctgaacagcgacggctggcccgacctgatcgtgggcgccccctacttcttcgagagacaggaggagctgggcggcgccgtgtacgtgtacctgaaccagggcggccactgggccggcatcagccccctgagactgtgcggcagccccgacagcatgttcggcatcagcctggccgtgctgggcgacctgaaccaggacggcttccccgacatcgccgtgggcgcccccttcgacggcgacggcaaggtgttcatctaccacggcagcagcctgggcgtggtggccaagcccagccaggtgctggagggcgaggccgtgggcatcaagagcttcggctacagcctgagcggcagcctggacatggacggcaaccagtaccccgacctgctggtgggcagcctggccgacaccgccgtgctgttcagagccagacccatcctgcacgtgagccacgaggtgagcatcgcccccagaagcatcgacctggagcagcccaactgcgccggcggccacagcgtgtgcgtggacctgagagtgtgcttcagctacatcgccgtgcccagcagctacagccccaccgtggccctggactacgtgctggacgccgacaccgacagaagactgagaggccaggtgcccagagtgaccttcctgagcagaaacctggaggagcccaagcaccaggccagcggcaccgtgtggctgaagcaccagcacgacagagtgtgcggcgacgccatgttccagctgcaggagaacgtgaaggacaagctgagagccatcgtggtgaccctgagctacagcctgcagacccccagactgagaagacaggcccccggccagggcctgccccccgtggcccccatcctgaacgcccaccagcccagcacccagagagccgagatccacttcctgaagcagggctgcggcgaggacaagatctgccagagcaacctgcagctggtgagagccagattctgcaccagagtgagcgacaccgagttccagcccctgcccatggacgtggacggcaccaccgccctgttcgccctgagcggccagcccgtgatcggcctggagctgatggtgaccaacctgcccagcgaccccgcccagccccaggccgacggcgacgacgcccacgaggcccagctgctggtgatgctgcccgacagcctgcactacagcggcgtgagagccctggaccccgccgagaagcccctgtgcctgagcaacgagaacgccagccacgtggagtgcgagctgggcaaccccatgaagagaggcgcccaggtgaccttctacctgatcctgagcaccagcggcatcagcatcgagaccaccgagctggaggtggagctgctgctggccaccatcagcgagcaggagctgcaccccgtgagcgccagagccagagtgttcatcgagctgcccctgagcatcgccggcatggccatcccccagcagctgttcttcagcggcgtggtgagaggcgagagagccatgcagagcgagagagacgtgggcagcaaggtgaagtacgaggtgaccgtgagcaaccagggccagagcctgagaaccctgggcagcgccttcctgaacatcatgtggccccacgagatcgccaacggcaagtggctgctgtaccccatgcaggtggagctggagggcggccagggccccggccagaagggcctgtgcagccccagacccaacatcctgcacctggacgtggacagcagagacagaagaagaagagagctggagccccccgagcagcaggagcccggcgagagacaggagcccagcatgagctggtggcccgtgagcagcgccgagaagaagaagaacatcaccctggactgcgccagaggcaccgccaactgcgtggtgttcagctgccccctgtacagcttcgacagagccgccgtgctgcacgtgtggggcagactgtggaacagcaccttcctggaggagtacagcgccgtgaagagcctggaggtgatcgtgagagccaacatcaccgtgaagagcagcatcaagaacctgatgctgagagacgccagcaccgtgatccccgtgatggtgtacctggaccccatggccgtggtggccgagggcgtgccctggtgggtgatcctgctggccgtgctggccggcctgctggtgctggccctgctggtgctgctgctgtggaagtgcggcttcttccacagaagcagccagagcagcagcttccccaccaactaccacagagcctgcctggccgtgcagcccagcgccatggaggtgggcggccccggcaccgtgggctgggacagcagcaacggcagaagcacccccagacccccctgccccagcaccatgagatag

SEQ ID NO: 282173 - DNA, 3357 bp, Artificial Sequence
  derived and/or modified sequence
atggccggcgccagaagcagagacccctggggcgccagcggcatctgctacctgttcggcagcctgctggtggagctgctgttcagcagagccgtggccttcaacctggacgtgatgggcgccctgagaaaggagggcgagcccggcagcctgttcggcttcagcgtggccctgcacagacagctgcagcccagaccccagagctggctgctggtgggcgccccccaggccctggccctgcccggccagcaggccaacagaaccggcggcctgttcgcctgccccctgagcctggaggagaccgactgctacagagtggacatcgaccagggcgccgacatgcagaaggagagcaaggagaaccagtggctgggcgtgagcgtgagaagccagggccccggcggcaagatcgtgacctgcgcccacagatacgaggccagacagagagtggaccagatcctggagaccagagacatgatcggcagatgcttcgtgctgagccaggacctggccatcagagacgagctggacggcggcgagtggaagttctgcgagggcagaccccagggccacgagcagttcggcttctgccagcagggcaccgccgccgccttcagccccgacagccactacctgctgttcggcgcccccggcacctacaactggaagggcctgctgttcgtgaccaacatcgacagcagcgaccccgaccagctggtgtacaagaccctggaccccgccgacagactgcccggccccgccggcgacctggccctgaacagctacctgggcttcagcatcgacagcggcaagggcctggtgagagccgaggagctgagcttcgtggccggcgcccccagagccaaccacaagggcgccgtggtgatcctgagaaaggacagcgccagcagactggtgcccgaggtgatgctgagcggcgagagactgaccagcggcttcggctacagcctggccgtggccgacctgaacagcgacggctggcccgacctgatcgtgggcgccccctacttcttcgagagacaggaggagctgggcggcgccgtgtacgtgtacctgaaccagggcggccactgggccggcatcagccccctgagactgtgcggcagccccgacagcatgttcggcatcagcctggccgtgctgggcgacctgaaccaggacggcttccccgacatcgccgtgggcgcccccttcgacggcgacggcaaggtgttcatctaccacggcagcagcctgggcgtggtggccaagcccagccaggtgctggagggcgaggccgtgggcatcaagagcttcggctacagcctgagcggcagcctggacatggacggcaaccagtaccccgacctgctggtgggcagcctggccgacaccgccgtgctgttcagagccagacccatcctgcacgtgagccacgaggtgagcatcgcccccagaagcatcgacctggagcagcccaactgcgccggcggccacagcgtgtgcgtggacctgagagtgtgcttcagctacatcgccgtgcccagcagctacagccccaccgtggccctggactacgtgctggacgccgacaccgacagaagactgagaggccaggtgcccagagtgaccttcctgagcagaaacctggaggagcccaagcaccaggccagcggcaccgtgtggctgaagcaccagcacgacagagtgtgcggcgacgccatgttccagctgcaggagaacgtgaaggacaagctgagagccatcgtggtgaccctgagctacagcctgcagacccccagactgagaagacaggcccccggccagggcctgccccccgtggcccccatcctgaacgcccaccagcccagcacccagagagccgagatccacttcctgaagcagggctgcggcgaggacaagatctgccagagcaacctgcagctggtgagagccagattctgcaccagagtgagcgacaccgagttccagcccctgcccatggacgtggacggcaccaccgccctgttcgccctgagcggccagcccgtgatcggcctggagctgatggtgaccaacctgcccagcgaccccgcccagccccaggccgacggcgacgacgcccacgaggcccagctgctggtgatgctgcccgacagcctgcactacagcggcgtgagagccctggaccccgccgagaagcccctgtgcctgagcaacgagaacgccagccacgtggagtgcgagctgggcaaccccatgaagagaggcgcccaggtgaccttctacctgatcctgagcaccagcggcatcagcatcgagaccaccgagctggaggtggagctgctgctggccaccatcagcgagcaggagctgcaccccgtgagcgccagagccagagtgttcatcgagctgcccctgagcatcgccggcatggccatcccccagcagctgttcttcagcggcgtggtgagaggcgagagagccatgcagagcgagagagacgtgggcagcaaggtgaagtacgaggtgaccgtgagcaaccagggccagagcctgagaaccctgggcagcgccttcctgaacatcatgtggccccacgagatcgccaacggcaagtggctgctgtaccccatgcaggtggagctggagggcggccagggccccggccagaagggcctgtgcagccccagacccaacatcctgcacctggacgtggacagcagagacagaagaagaagagagctggagccccccgagcagcaggagcccggcgagagacaggagcccagcatgagctggtggcccgtgagcagcgccgagaagaagaagaacatcaccctggactgcgccagaggcaccgccaactgcgtggtgttcagctgccccctgtacagcttcgacagagccgccgtgctgcacgtgtggggcagactgtggaacagcaccttcctggaggagtacagcgccgtgaagagcctggaggtgatcgtgagagccaacatcaccgtgaagagcagcatcaagaacctgatgctgagagacgccagcaccgtgatccccgtgatggtgtacctggaccccatggccgtggtggccgagggcgtgccctggtgggtgatcctgctggccgtgctggccggcctgctggtgctggccctgctggtgctgctgctgtggaagtgcggcttcttccacagaagcagccagagcagcagcttccccaccaactaccacagagcctgcctggccgtgcagcccagcgccatggaggtgggcggccccggcaccgtgggctgggacagcagcaacggcagaagcacccccagacccccctgccccagcaccatgagatag

SEQ ID NO: 282174 - DNA, 3369 bp, Artificial Sequence
  derived and/or modified sequence
atggccggcgccagaagcagagacccctggggcgccagcggcatctgctacctgttcggcagcctgctggtggagctgctgttcagcagagccgtggccttcaacctggacgtgatgggcgccctgagaaaggagggcgagcccggcagcctgttcggcttcagcgtggccctgcacagacagctgcagcccagaccccagagctggctgctggtgggcgccccccaggccctggccctgcccggccagcaggccaacagaaccggcggcctgttcgcctgccccctgagcctggaggagaccgactgctacagagtggacatcgaccagggcgccgacatgcagaaggagagcaaggagaaccagtggctgggcgtgagcgtgagaagccagggccccggcggcaagatcgtgacctgcgcccacagatacgaggccagacagagagtggaccagatcctggagaccagagacatgatcggcagatgcttcgtgctgagccaggacctggccatcagagacgagctggacggcggcgagtggaagttctgcgagggcagaccccagggccacgagcagttcggcttctgccagcagggcaccgccgccgccttcagccccgacagccactacctgctgttcggcgcccccggcacctacaactggaagggcaccgccagagtggagctgtgcgcccagggcagcgccgacctggcccacctggacgacggcccctacgaggccggcggcgagaaggagcaggaccccagactgatccccgtgcccgccaacagctacttcggcttcagcatcgacagcggcaagggcctggtgagagccgaggagctgagcttcgtggccggcgcccccagagccaaccacaagggcgccgtggtgatcctgagaaaggacagcgccagcagactggtgcccgaggtgatgctgagcggcgagagactgaccagcggcttcggctacagcctggccgtggccgacctgaacagcgacggctggcccgacctgatcgtgggcgccccctacttcttcgagagacaggaggagctgggcggcgccgtgtacgtgtacctgaaccagggcggccactgggccggcatcagccccctgagactgtgcggcagccccgacagcatgttcggcatcagcctggccgtgctgggcgacctgaaccaggacggcttccccgacatcgccgtgggcgcccccttcgacggcgacggcaaggtgttcatctaccacggcagcagcctgggcgtggtggccaagcccagccaggtgctggagggcgaggccgtgggcatcaagagcttcggctacagcctgagcggcagcctggacatggacggcaaccagtaccccgacctgctggtgggcagcctggccgacaccgccgtgctgttcagagccagacccatcctgcacgtgagccacgaggtgagcatcgcccccagaagcatcgacctggagcagcccaactgcgccggcggccacagcgtgtgcgtggacctgagagtgtgcttcagctacatcgccgtgcccagcagctacagccccaccgtggccctggactacgtgctggacgccgacaccgacagaagactgagaggccaggtgcccagagtgaccttcctgagcagaaacctggaggagcccaagcaccaggccagcggcaccgtgtggctgaagcaccagcacgacagagtgtgcggcgacgccatgttccagctgcaggagaacgtgaaggacaagctgagagccatcgtggtgaccctgagctacagcctgcagacccccagactgagaagacaggcccccggccagggcctgccccccgtggcccccatcctgaacgcccaccagcccagcacccagagagccgagatccacttcctgaagcagggctgcggcgaggacaagatctgccagagcaacctgcagctggtgagagccagattctgcaccagagtgagcgacaccgagttccagcccctgcccatggacgtggacggcaccaccgccctgttcgccctgagcggccagcccgtgatcggcctggagctgatggtgaccaacctgcccagcgaccccgcccagccccaggccgacggcgacgacgcccacgaggcccagctgctggtgatgctgcccgacagcctgcactacagcggcgtgagagccctggaccccgccgagaagcccctgtgcctgagcaacgagaacgccagccacgtggagtgcgagctgggcaaccccatgaagagaggcgcccaggtgaccttctacctgatcctgagcaccagcggcatcagcatcgagaccaccgagctggaggtggagctgctgctggccaccatcagcgagcaggagctgcaccccgtgagcgccagagccagagtgttcatcgagctgcccctgagcatcgccggcatggccatcccccagcagctgttcttcagcggcgtggtgagaggcgagagagccatgcagagcgagagagacgtgggcagcaaggtgaagtacgaggtgaccgtgagcaaccagggccagagcctgagaaccctgggcagcgccttcctgaacatcatgtggccccacgagatcgccaacggcaagtggctgctgtaccccatgcaggtggagctggagggcggccagggccccggccagaagggcctgtgcagccccagacccaacatcctgcacctggacgtggacagcagagacagaagaagaagagagctggagccccccgagcagcaggagcccggcgagagacaggagcccagcatgagctggtggcccgtgagcagcgccgagaagaagaagaacatcaccctggactgcgccagaggcaccgccaactgcgtggtgttcagctgccccctgtacagcttcgacagagccgccgtgctgcacgtgtggggcagactgtggaacagcaccttcctggaggagtacagcgccgtgaagagcctggaggtgatcgtgagagccaacatcaccgtgaagagcagcatcaagaacctgatgctgagagacgccagcaccgtgatccccgtgatggtgtacctggaccccatggccgtggtggccgagggcgtgccctggtgggtgatcctgctggccgtgctggccggcctgctggtgctggccctgctggtgctgctgctgtggaagtgcggcttcttccacagaagcagccagagcagcagcttccccaccaactaccacagagcctgcctggccgtgcagcccagcgccatggaggtgggcggccccggcaccgtgggctgggacagcagcaacggcagaagcacccccagacccccctgccccagcaccatgagatag

SEQ ID NO: 282175 - DNA, 3489 bp, Artificial Sequence
  derived and/or modified sequence
atggccggtgctcgcagtcgcgatccttggggcgcatctggaatctgctacctcttcggatctctcctggttgaacttctctttagtcgggcagttgcttttaatctggacgtaatgggggccctgaggaaggagggcgagcctggttccctgtttggtttttctgtggcgctccacaggcagctgcagcctcgtccccagtcctggttgctcgtgggagctccccaggccctcgcactgcccggacagcaggcaaatcggacggggggcctatttgcttgtcctctgtccctggaggaaactgactgttatagagtggatatcgaccagggtgccgacatgcagaaggaatctaaagagaaccagtggctgggagtctccgttagaagtcagggcccaggcggcaaaattgtcacgtgtgctcaccggtacgaggcgagacagagagtcgaccaaatactggagactcgggatatgatcggccggtgtttcgtcctctcccaggacctggccattcgggacgaactggacgggggtgagtggaaattttgtgaaggcaggccgcagggccatgagcagtttggcttttgtcaacaggggactgctgccgcttttagccctgattctcattacctgctctttggcgcccctggcacttacaactggaagggaactgccagagtagaactttgtgcccagggctccgcggatctcgcccatctggacgacggtccgtacgaggccggaggggaaaaggaacaggatcctcgactgataccggtgccagctaacagctactttgggctgctctttgtgaccaacattgactctagtgaccctgatcagcttgtgtataagactcttgacccagcagacagactccctggacccgctggcgatttagcgttgaattcctacctggggttcagcatcgattcaggaaagggtttggtgcgggccgaggagctgtcctttgtggctggagcgcctcgggctaatcacaagggcgctgtagtcatattaagaaaggattctgcgtcccggttggtcccagaggttatgctgtctggcgagaggcttaccagcggattcggttactccctcgcagtcgccgacctgaacagcgacggctggcccgacttaatcgtcggagccccttacttttttgagcggcaggaggagctggggggggcagtctacgtttacctgaaccaagggggccactgggccgggatatcacctcttcggctgtgtggttcaccggattccatgtttgggataagccttgcagtgctgggagatttgaatcaggatgggttccccgacatcgccgtgggagccccctttgatggcgatggcaaggtgttcatctaccatggatcttctcttggcgttgtcgccaagccatcccaggtgctcgagggcgaagcagtcggaatcaaatctttcggttatagtctgagcgggtcattagacatggacgggaaccaatatccggatctcctggtagggagcctggccgacaccgccgtgctgtttagagcccgtccaatattgcacgttagtcatgaagtaagcattgccccaagatccattgacctagagcagcccaattgtgcggggggccactctgtatgtgttgacctccgagtgtgctttagttatatcgctgtgccgagttcttactctccaaccgtggcccttgactatgtgttggatgccgacaccgatcgcagactgcgcggccaagtgcctcgcgtgacctttctcagtcgcaacctcgaagaacctaaacaccaggcaagcggaactgtttggctgaagcaccagcacgaccgcgtctgcggggatgccatgtttcaactccaggaaaatgtcaaggataagttgagggcaattgtggtcactctgtcttactcactacaaactccacgactcagacgccaggctccaggtcaaggtctgccacctgtcgcccccattctcaatgctcatcaaccctccacccagcgtgccgagatacatttcctgaagcagggatgcggcgaagataaaatttgccagagtaatctgcaactggttcgggcccgcttttgtacacgggtctccgacacggagtttcagcccttgcccatggacgtagacgggacaaccgcactttttgccctttccggccagcctgtgattggcctcgagttaatggtgacaaaccttcccagcgaccccgctcaaccccaggccgacggggacgatgctcacgaagctcaacttctggtgatgttacccgactccttacactattccggggtccgtgccctcgatccagcagaaaaaccgctctgcctgtccaatgaaaatgcttcccacgtagagtgcgaactgggcaatcccatgaagaggggtgcacaggttaccttttacctgatcctttctacctccgggatttctatcgagaccaccgaactcgaagtggagctgttgctggctacaataagcgagcaggaactccacccagtgagtgccagagccagggtgttcatcgagctcccactgtccattgccgggatggccatcccacagcagctgttctttagtggagtggtgaggggagaaagggctatgcagtccgaaagagatgtaggctctaaggtcaaatatgaggtgacagtttccaatcaggggcagtccctcaggacactaggctccgcgtttctgaacatcatgtggcctcacgagatcgccaatggcaaatggctcttgtatcccatgcaggtggaactcgagggaggtcagggacctgggcagaagggcttgtgcagtccgaggccgaacattctgcacttagatgtggattcgagagaccgaaggcggagggaacttgaacctccggaacagcaagagcccggcgaaaggcaggagccatccatgtcctggtggccagtatcctcggcagagaagaagaagaatatcacgctggattgcgcaagaggcacagcaaattgtgtagtgttttcttgccctttgtatagtttcgatagagctgcagtgctgcacgtatggggccgactatggaacagcacatttctcgaagaatactctgccgtcaaaagcctagaagtaattgtgcgcgcgaacatcactgttaagtcttccatcaagaacctgatgttgagggacgcctcaaccgtgatcccggttatggtgtacctcgaccctatggcggtcgttgcagagggggtaccttggtgggtgatcctcctggcagtgttggctggtctcctggtcctcgccctgctcgtgctcctgctgtggaagtgcgggttctttcatcgcagctcacagtcctcctctttccccactaactaccatagggcatgccttgccgtacaaccttctgctatggaggttggcggtccaggcaccgttggatgggacagctctaatggcaggtcaacaccaagacccccctgtccctctaccatgcgttag

SEQ ID NO: 282176 - DNA, 3357 bp, Artificial Sequence
  derived and/or modified sequence
atggccggagctagatctcgggacccttggggcgcttccggaatttgctatcttttcggaagtctgctggttgaactcctttttagcagggcggtggcatttaatctggatgttatgggagcactcaggaaagagggggaacccgggtctctgtttggcttcagcgtagccctgcaccgccagttacagccccggccccagtcctggcttctggtgggcgccccacaagccttggctttacccggccagcaggcgaacagaaccggaggcctctttgcctgtcccctatctcttgaggagacagactgctaccgcgtcgacatagatcagggtgccgatatgcagaaagaaagcaaagaaaatcagtggctgggtgtttctgtgaggagtcagggtcctggaggtaaaatcgtaacttgtgcccatagatacgaggcccgtcaacgtgtggaccagattttagagacccgggatatgatcggtcgatgctttgtcctctcccaggatttggctatcagagacgagctggatggtggagagtggaaattctgtgagggtcgtccccaggggcacgaacagttcggattctgccagcagggcacggcagctgccttctcaccagattcccattacctcctcttcggcgcgccgggtacgtataactggaagggccttctttttgttaccaatattgatagttcggatcccgaccagttagtttataaaacacttgacccagccgatcgcctgcccggccccgcaggtgacttagccctcaactcctatctgggtttctctatcgactcagggaaggggctggtgcgggctgaggagctttccttcgtggccggcgcaccaagagccaatcataaaggggccgtggttattttgaggaaggattcggcctcacggctcgttcctgaagtgatgctgagtggggagcgcttaacgtcgggctttgggtactccctcgccgtggccgacctgaattctgatggttggcctgacctcatagtgggcgccccttacttctttgagcgacaggaagagttaggtggcgcggtgtacgtgtacttgaaccaggggggccattgggcaggcatttcacccctccgactgtgcgggagccctgatagtatgttcggcatctccctcgccgtcctcggggatctcaatcaggatggatttccagacatcgccgtgggcgcaccgtttgacggggatggcaaggtgtttatttatcacggaagtagcttgggcgtcgtcgccaagccatcccaggtcctggaaggggaggcggttggtatcaaaagttttgggtactcactgtcgggttcactcgatatggacggcaaccaatatcccgacttactggttggctcacttgctgacacggccgttctgttccgggcacgcccaatactccacgtgtctcatgaggtgagcatagcgccccgctcaatcgacctggaacagcccaattgtgcaggcggacattccgtgtgtgtggatctcagagtctgcttcagctacatcgctgtgccaagctcctactccccaacggtggcattggactacgtcctggacgcggacaccgatagaaggcttagaggccaggttcctagagtcacctttttatctcggaatctcgaggaacctaaacaccaggccagcgggacagtctggctgaagcatcagcatgatcgggtgtgtggtgatgccatgttccagctacaggagaatgtaaaggacaagcttcgtgcgattgtagtgacactctcatactcccttcagaccccccggctgcggaggcaggctccgggtcagggccttcctcccgttgcacctatcctgaatgctcaccaaccaagcactcagagggcagaaatccacttcctcaagcagggctgtggtgaggacaaaatatgccagtctaaccttcaactggtcagggcaaggttctgtacgcgagtgagcgacaccgagttccaacctctgcccatggacgttgacggcacaacagcactgttcgccctgtccggccagccggttattggcctggaactaatggtcaccaatctgccttctgacccagcgcagccccaagccgatggtgatgacgctcatgaggctcaactgctcgtcatgctgccggactctcttcactatagcggggtgagggcccttgaccctgccgaaaagccactgtgcctttccaatgagaacgcttctcacgtggagtgcgaactggggaatcctatgaagcgcggcgcccaggtgaccttttatttgatactttcaacctcaggcatctccatcgaaactacggaactggaggtggaattgcttctggcaactatatctgagcaggagctacatcctgtgagcgcgagagctcgggtgttcattgagctgccactgagcattgcaggaatggccatccctcagcagctatttttctccggggtggtcagaggcgaacgcgctatgcagtcagaaagggacgtggggtccaaggtgaagtacgaggttactgttagcaatcagggacagtctttaaggactctgggatcagccttcctgaacatcatgtggccccatgaaatagccaatgggaagtggcttctctatccgatgcaagtggaactggaaggcgggcagggccccggccagaagggtttgtgcagcccacggcctaacatcttgcatctcgacgttgattctagagacaggcggcgaagagagctcgaaccgccagaacagcaggaaccaggggaacggcaagaaccaagtatgtcatggtggcccgtgagctccgcagagaagaagaagaatatcactctcgactgtgctcggggcacagctaactgtgtcgtgttcagctgccccctgtacagctttgaccgcgcagccgtgcttcatgtctgggggagattgtggaactcgacttttctggaggagtactctgcagttaagtccctcgaggtgattgttcgtgctaatattaccgtgaagagttcgatcaaaaacttaatgctgcgtgacgcctctaccgtgattcctgtcatggtgtacctggacccaatggctgttgtggccgaaggagtcccatggtgggttatcctgcttgccgttctggctggccttttggtgctggctctgctggtgctcttactctggaaatgcggatttttccatcggtcatctcagtccagctcattccctacaaactaccaccgcgcctgcctggctgtacaaccttctgctatggaggtggggggaccgggcacagttggctgggacagctctaatgggagaagtaccccccgtccaccctgtccaagcacgatgcgatag

SEQ ID NO: 282177 - DNA, 3369 bp, Artificial Sequence
  derived and/or modified sequence
atggccggtgccaggagtcgcgatccatggggagctagcggcatatgctacctgttcggtagccttcttgtggagttgctgttcagtagagccgtggctttcaatttggacgtgatgggggctctgcggaaggagggcgaacctggatcactctttggtttcagcgtggcgttgcataggcagttacagcccaggcctcaatcttggctactggtcggagctccgcaggcattagcgctcccaggacagcaagccaatcggacgggtggtctgttcgcatgcccactgagcctggaggaaacagattgttacagagttgatatcgatcagggagccgatatgcagaaggagagtaaggaaaaccaatggttgggagtctccgtgcgttcacagggaccaggaggaaagatagtcacctgtgcccaccgctatgaagctagacagcgcgtcgaccaaattctggaaacccgagacatgatcggccgctgctttgtgctgtcccaggatctggcaattagagatgagctagatggcggggagtggaaattctgtgagggccgcccccagggtcatgagcagtttggattttgccagcagggcacagccgccgccttcagcccagacagccactacttgctcttcggcgcacctggaacgtacaactggaaagggactgcccgcgttgaactttgtgcgcaggggtcagccgacctggcacatctcgatgacggaccctacgaggctggaggcgaaaaggagcaggatcctaggttgatccctgtgccggccaacagctacttcgggttttcgattgattcaggaaagggactcgtgcgtgcagaagagttaagcttcgtagcgggagcccctcgggccaaccacaaaggagccgtcgtgattctgagaaaagactcagcttctaggctcgtgccagaagtcatgctatccggagaacgcctcacttccgggttcgggtactcactggctgtagctgatttaaactctgacggctggcccgacctgatcgtaggtgcgccatacttcttcgagagacaggaagagctgggaggagctgtgtacgtttacctcaaccagggcgggcactgggcgggaataagccctctcaggctgtgcggctcccccgacagcatgtttggaatttccctggccgttctcggagatctgaaccaggatggctttcctgacatcgccgtcggcgctccttttgatggggacggcaaggtcttcatttaccatggaagcagccttggggtcgtggcgaagccaagccaggtgttagaaggagaggccgttggtatcaagtcctttggttactccctgagcggctcactcgacatggacggtaaccagtaccccgacctgctcgttggaagtctggctgacactgctgtgctcttccgtgctcgccccattctccacgtgtcgcatgaggtgagcatcgctccccggtctattgatctggaacaacccaattgtgctggaggccattcagtgtgtgtggacctgagggtgtgctttagctacattgccgtaccttcttcatattcccctactgttgcactcgactacgttttagatgctgatactgatcgcagacttcgaggccaagtcccaagggttacctttctgagtcggaatcttgaggagcctaagcatcaggcgtcagggaccgtctggctcaagcaccagcacgacagggtgtgcggcgacgctatgtttcagctgcaggagaacgttaaggataagcttagagcgatagtcgttactctgtcttatagcctgcagactcccaggctgagaaggcaagcccctggtcaggggctgccacctgtggctccaatcctcaacgcccaccaaccatctacccaaagggcagagatccactttttaaagcaggggtgcggcgaggataagatttgccagtctaacttgcagctggtgcgcgccagattttgtacaagagtgagcgacaccgaattccagccactgcctatggacgtcgacggcaccaccgcacttttcgccctgtctgggcagcctgtgatcggtctggagctgatggtgactaacctgcccagcgacccagcacagcctcaggccgacggcgatgatgcacacgaagcgcagcttctcgtcatgctgcctgactcactccattactctggggtacgcgccctggatcccgccgagaaacctctgtgtcttagtaacgaaaatgcttcacacgtggagtgcgagctaggaaacccgatgaagcgaggagcccaagttacattttacttaatcttatccacttctgggatctccatcgaaaccacagagctggaggtggagcttctcctggctacgattagtgagcaggaactacatcctgtgagcgcacgcgccagagtctttattgagctgcccctcagtatcgccgggatggcaatcccccagcagttgttttttagtggagttgttaggggtgaacgtgcaatgcagagcgaacgtgacgttggctcgaaggtgaagtacgaggtaactgtgagcaatcaggggcaatcactccgcacccttgggtctgcctttcttaatattatgtggccccacgaaattgctaacgggaagtggctgctttatcccatgcaagttgagctcgagggaggccagggtcccggacaaaaaggtttatgcagccctagacccaacatcttgcacctggacgtagattcacgcgatcggcgccgcagggagttggaacccccagagcagcaggagcccggcgagaggcaggaaccctccatgagttggtggccggtgtccagtgcggaaaagaagaaaaatataactttagattgcgctaggggtaccgctaattgtgttgttttttcctgtcccctttactcttttgatagggcagctgtgctgcacgtatggggcaggctgtggaactctacctttctggaggagtactctgccgtgaagtctctggaagtcatcgtccgggcaaatatcacagtgaaatccagtattaagaacttaatgcttcgggacgcatctactgtgattcctgttatggtgtatctggatcctatggctgttgtggcagaaggagtcccctggtgggtgatacttctggcagtcctcgctggcctgctcgtgttagcactgctggtgctccttctgtggaaatgcggattcttccaccgatcctcccagtcctcgagttttcccaccaactaccatcgcgcttgcctcgccgtccagcccagcgcaatggaggtcggaggcccaggcaccgtgggatgggatagttccaacgggcgctccaccccacggcctccctgtccatctaccatgcgttag

SEQ ID NO: 282178 - DNA, 3489 bp, Artificial Sequence
  derived and/or modified sequence
atggccggggcccggagccgggacccctggggcgccagcggcatctgctacctgtttggcagcctgctggtggagctgctcttcagcagagctgtggccttcaacctggatgtgatgggcgccctgaggaaggagggggagcccggcagcctgtttggcttctctgtggccctgcaccggcagctgcagccccggccccagagctggctgctggtgggcgccccccaggccctggccctgcccggccagcaggccaacagaactggaggcctgtttgcctgccccctgagcctggaggagacagactgctacagagtggacatcgaccagggcgctgacatgcagaaggagagcaaggagaaccagtggctgggcgtgtctgtgcgcagccagggccctgggggcaagatcgtgacctgtgcccacagatatgaggcccggcagagggtggaccagatcctggagacccgggacatgattggccgctgctttgtgctgagccaggacctggccatcagagatgagctggatggaggagagtggaagttctgtgagggccggccccagggccacgagcagtttggcttctgccagcagggcacagctgctgccttctccccagacagccactacctgctgtttggagcccctggcacctacaactggaagggcacagcccgggtggagctgtgtgcccagggcagcgctgacctggcccacctggatgatggcccctatgaggccggcggggagaaggagcaggaccccaggctcatccctgtgcctgccaacagctacttcggcctgctgtttgtgaccaacatcgacagcagtgaccctgaccagctggtgtacaagaccctggaccctgctgaccggctgcccggccctgctggggacctggccctgaacagctacctgggcttcagcattgattctgggaagggcctggtgcgggcagaggagctgagctttgtggccggggccccccgggccaaccacaagggagctgtggtgatcctgaggaaggacagcgccagccggctggtgcctgaggtgatgctgagcggggagcggctgaccagcggcttcggctacagcctggccgtggccgacctgaacagtgatggctggccagacctgattgtgggcgccccctacttctttgagcggcaggaggagctgggcggcgctgtgtatgtgtacctgaaccagggcggccactgggccggcatcagccccctgcggctgtgtggcagcccagacagcatgtttggcatcagcctggccgtgctgggggacctgaaccaggacggcttcccagacattgctgtgggcgccccctttgatggagatggcaaggtgttcatctaccacggcagcagcctgggcgtggtggccaagcccagccaggtgctggagggggaggccgtgggcatcaagagctttggctacagcctgagcggcagcctggacatggatggcaaccagtacccagacctgctggtgggcagcctggccgacacagctgtgctcttccgggcccggcccatcctgcacgtgtcccatgaggtgtccatcgcccccaggagcattgacctggagcagcccaactgtgccggcggccacagcgtgtgtgtggacctgcgggtgtgcttctcctacatcgctgtgcccagcagctacagccccaccgtggccctggactatgtgctggatgctgacacagaccggcggctgcggggccaggtgccccgggtgaccttcctgagcaggaacctggaggagcccaagcaccaggccagcggcaccgtgtggctgaagcaccagcacgacagagtgtgtggagatgccatgttccagctgcaggagaatgtgaaggacaagctgcgggccatcgtggtgaccctgagctacagcctgcagaccccccggctgcggcggcaggcccctggccagggcctgccccctgtggcccccatcctgaatgcccaccagcccagcacccagagagctgagatccacttcctgaagcagggctgtggggaggacaagatctgccagagcaacctgcagctggtgcgggcccgcttctgcaccagggtgtctgacacagagttccagcccctgcccatggatgtggatggcaccacagccctgtttgccctgagcggccagcctgtgattggcctggagctgatggtgaccaacctgcccagcgaccctgcccagccccaggctgatggagatgatgcccacgaggcccagctgctggtgatgctgcctgacagcctgcactacagcggcgtgcgggccctggaccctgctgagaagcccctgtgcctgagcaatgaaaatgccagccacgtggagtgtgagctgggcaaccccatgaagagaggagcccaggtgaccttctacctgatcctgagcaccagcggcatcagcattgagaccacagagctggaggtggagctgctgctggccaccatcagcgagcaggagctgcaccctgtgtctgcccgggcccgggtcttcatcgagctgcccctgagcattgctggcatggccatcccccagcagctgttcttctctggagtggtgcggggggagcgggccatgcagagcgagagagatgtgggcagcaaggtgaagtatgaggtgacagtgagcaaccagggccagagcctgcggaccctgggcagcgccttcctgaacatcatgtggccccatgaaattgccaacgggaagtggctgctgtaccccatgcaggtggagctggagggcggccagggccctggccagaagggcctgtgcagcccccggcccaacatcctgcacctggatgtggacagccgggacagaagaagaagagagctggagcccccagagcagcaggagcccggggagcggcaggagcccagcatgtcctggtggcctgtgtcctctgctgagaagaagaagaacatcaccctggactgtgcccggggcacagccaactgtgtggtgttcagctgccccctgtacagctttgacagagctgctgtgctgcacgtgtggggccgcctgtggaacagcaccttcctggaggagtacagcgctgtgaagagcctggaggtgattgtgcgggccaacatcaccgtgaagagcagcatcaagaacctgatgctgagagatgccagcaccgtcatccctgtgatggtgtacctggaccccatggctgtggtggccgagggcgtgccctggtgggtgatcctgctggccgtgctggccggcctgctggtgctggccctgctggtgctgctgctgtggaagtgtggcttcttccacaggagcagccagagcagcagcttccccaccaactaccaccgggcctgcctggccgtgcagcccagcgccatggaggtgggcggccctggcaccgtgggctgggacagcagcaatggccgcagcacccccaggcctccctgccccagcaccatgaggtag

SEQ ID NO: 282179 - DNA, 3357 bp, Artificial Sequence
  derived and/or modified sequence
atggccggggcccggagccgggacccctggggcgccagcggcatctgctacctgtttggcagcctgctggtggagctgctcttcagcagagctgtggccttcaacctggatgtgatgggcgccctgaggaaggagggggagcccggcagcctgtttggcttctctgtggccctgcaccggcagctgcagccccggccccagagctggctgctggtgggcgccccccaggccctggccctgcccggccagcaggccaacagaactggaggcctgtttgcctgccccctgagcctggaggagacagactgctacagagtggacatcgaccagggcgctgacatgcagaaggagagcaaggagaaccagtggctgggcgtgtctgtgcgcagccagggccctgggggcaagatcgtgacctgtgcccacagatatgaggcccggcagagggtggaccagatcctggagacccgggacatgattggccgctgctttgtgctgagccaggacctggccatcagagatgagctggatggaggagagtggaagttctgtgagggccggccccagggccacgagcagtttggcttctgccagcagggcacagctgctgccttctccccagacagccactacctgctgtttggagcccctggcacctacaactggaagggcctgctgtttgtgaccaacatcgacagcagtgaccctgaccagctggtgtacaagaccctggaccctgctgaccggctgcccggccctgctggggacctggccctgaacagctacctgggcttcagcattgattctgggaagggcctggtgcgggcagaggagctgagctttgtggccggggccccccgggccaaccacaagggagctgtggtgatcctgaggaaggacagcgccagccggctggtgcctgaggtgatgctgagcggggagcggctgaccagcggcttcggctacagcctggccgtggccgacctgaacagtgatggctggccagacctgattgtgggcgccccctacttctttgagcggcaggaggagctgggcggcgctgtgtatgtgtacctgaaccagggcggccactgggccggcatcagccccctgcggctgtgtggcagcccagacagcatgtttggcatcagcctggccgtgctgggggacctgaaccaggacggcttcccagacattgctgtgggcgccccctttgatggagatggcaaggtgttcatctaccacggcagcagcctgggcgtggtggccaagcccagccaggtgctggagggggaggccgtgggcatcaagagctttggctacagcctgagcggcagcctggacatggatggcaaccagtacccagacctgctggtgggcagcctggccgacacagctgtgctcttccgggcccggcccatcctgcacgtgtcccatgaggtgtccatcgcccccaggagcattgacctggagcagcccaactgtgccggcggccacagcgtgtgtgtggacctgcgggtgtgcttctcctacatcgctgtgcccagcagctacagccccaccgtggccctggactatgtgctggatgctgacacagaccggcggctgcggggccaggtgccccgggtgaccttcctgagcaggaacctggaggagcccaagcaccaggccagcggcaccgtgtggctgaagcaccagcacgacagagtgtgtggagatgccatgttccagctgcaggagaatgtgaaggacaagctgcgggccatcgtggtgaccctgagctacagcctgcagaccccccggctgcggcggcaggcccctggccagggcctgccccctgtggcccccatcctgaatgcccaccagcccagcacccagagagctgagatccacttcctgaagcagggctgtggggaggacaagatctgccagagcaacctgcagctggtgcgggcccgcttctgcaccagggtgtctgacacagagttccagcccctgcccatggatgtggatggcaccacagccctgtttgccctgagcggccagcctgtgattggcctggagctgatggtgaccaacctgcccagcgaccctgcccagccccaggctgatggagatgatgcccacgaggcccagctgctggtgatgctgcctgacagcctgcactacagcggcgtgcgggccctggaccctgctgagaagcccctgtgcctgagcaatgaaaatgccagccacgtggagtgtgagctgggcaaccccatgaagagaggagcccaggtgaccttctacctgatcctgagcaccagcggcatcagcattgagaccacagagctggaggtggagctgctgctggccaccatcagcgagcaggagctgcaccctgtgtctgcccgggcccgggtcttcatcgagctgcccctgagcattgctggcatggccatcccccagcagctgttcttctctggagtggtgcggggggagcgggccatgcagagcgagagagatgtgggcagcaaggtgaagtatgaggtgacagtgagcaaccagggccagagcctgcggaccctgggcagcgccttcctgaacatcatgtggccccatgaaattgccaacgggaagtggctgctgtaccccatgcaggtggagctggagggcggccagggccctggccagaagggcctgtgcagcccccggcccaacatcctgcacctggatgtggacagccgggacagaagaagaagagagctggagcccccagagcagcaggagcccggggagcggcaggagcccagcatgtcctggtggcctgtgtcctctgctgagaagaagaagaacatcaccctggactgtgcccggggcacagccaactgtgtggtgttcagctgccccctgtacagctttgacagagctgctgtgctgcacgtgtggggccgcctgtggaacagcaccttcctggaggagtacagcgctgtgaagagcctggaggtgattgtgcgggccaacatcaccgtgaagagcagcatcaagaacctgatgctgagagatgccagcaccgtcatccctgtgatggtgtacctggaccccatggctgtggtggccgagggcgtgccctggtgggtgatcctgctggccgtgctggccggcctgctggtgctggccctgctggtgctgctgctgtggaagtgtggcttcttccacaggagcagccagagcagcagcttccccaccaactaccaccgggcctgcctggccgtgcagcccagcgccatggaggtgggcggccctggcaccgtgggctgggacagcagcaatggccgcagcacccccaggcctccctgccccagcaccatgaggtag

SEQ ID NO: 282180 - DNA, 3369 bp, Artificial Sequence
  derived and/or modified sequence
atggccggggcccggagccgggacccctggggcgccagcggcatctgctacctgtttggcagcctgctggtggagctgctcttcagcagagctgtggccttcaacctggatgtgatgggcgccctgaggaaggagggggagcccggcagcctgtttggcttctctgtggccctgcaccggcagctgcagccccggccccagagctggctgctggtgggcgccccccaggccctggccctgcccggccagcaggccaacagaactggaggcctgtttgcctgccccctgagcctggaggagacagactgctacagagtggacatcgaccagggcgctgacatgcagaaggagagcaaggagaaccagtggctgggcgtgtctgtgcgcagccagggccctgggggcaagatcgtgacctgtgcccacagatatgaggcccggcagagggtggaccagatcctggagacccgggacatgattggccgctgctttgtgctgagccaggacctggccatcagagatgagctggatggaggagagtggaagttctgtgagggccggccccagggccacgagcagtttggcttctgccagcagggcacagctgctgccttctccccagacagccactacctgctgtttggagcccctggcacctacaactggaagggcacagcccgggtggagctgtgtgcccagggcagcgctgacctggcccacctggatgatggcccctatgaggccggcggggagaaggagcaggaccccaggctcatccctgtgcctgccaacagctacttcggcttcagcattgattctgggaagggcctggtgcgggcagaggagctgagctttgtggccggggccccccgggccaaccacaagggagctgtggtgatcctgaggaaggacagcgccagccggctggtgcctgaggtgatgctgagcggggagcggctgaccagcggcttcggctacagcctggccgtggccgacctgaacagtgatggctggccagacctgattgtgggcgccccctacttctttgagcggcaggaggagctgggcggcgctgtgtatgtgtacctgaaccagggcggccactgggccggcatcagccccctgcggctgtgtggcagcccagacagcatgtttggcatcagcctggccgtgctgggggacctgaaccaggacggcttcccagacattgctgtgggcgccccctttgatggagatggcaaggtgttcatctaccacggcagcagcctgggcgtggtggccaagcccagccaggtgctggagggggaggccgtgggcatcaagagctttggctacagcctgagcggcagcctggacatggatggcaaccagtacccagacctgctggtgggcagcctggccgacacagctgtgctcttccgggcccggcccatcctgcacgtgtcccatgaggtgtccatcgcccccaggagcattgacctggagcagcccaactgtgccggcggccacagcgtgtgtgtggacctgcgggtgtgcttctcctacatcgctgtgcccagcagctacagccccaccgtggccctggactatgtgctggatgctgacacagaccggcggctgcggggccaggtgccccgggtgaccttcctgagcaggaacctggaggagcccaagcaccaggccagcggcaccgtgtggctgaagcaccagcacgacagagtgtgtggagatgccatgttccagctgcaggagaatgtgaaggacaagctgcgggccatcgtggtgaccctgagctacagcctgcagaccccccggctgcggcggcaggcccctggccagggcctgccccctgtggcccccatcctgaatgcccaccagcccagcacccagagagctgagatccacttcctgaagcagggctgtggggaggacaagatctgccagagcaacctgcagctggtgcgggcccgcttctgcaccagggtgtctgacacagagttccagcccctgcccatggatgtggatggcaccacagccctgtttgccctgagcggccagcctgtgattggcctggagctgatggtgaccaacctgcccagcgaccctgcccagccccaggctgatggagatgatgcccacgaggcccagctgctggtgatgctgcctgacagcctgcactacagcggcgtgcgggccctggaccctgctgagaagcccctgtgcctgagcaatgaaaatgccagccacgtggagtgtgagctgggcaaccccatgaagagaggagcccaggtgaccttctacctgatcctgagcaccagcggcatcagcattgagaccacagagctggaggtggagctgctgctggccaccatcagcgagcaggagctgcaccctgtgtctgcccgggcccgggtcttcatcgagctgcccctgagcattgctggcatggccatcccccagcagctgttcttctctggagtggtgcggggggagcgggccatgcagagcgagagagatgtgggcagcaaggtgaagtatgaggtgacagtgagcaaccagggccagagcctgcggaccctgggcagcgccttcctgaacatcatgtggccccatgaaattgccaacgggaagtggctgctgtaccccatgcaggtggagctggagggcggccagggccctggccagaagggcctgtgcagcccccggcccaacatcctgcacctggatgtggacagccgggacagaagaagaagagagctggagcccccagagcagcaggagcccggggagcggcaggagcccagcatgtcctggtggcctgtgtcctctgctgagaagaagaagaacatcaccctggactgtgcccggggcacagccaactgtgtggtgttcagctgccccctgtacagctttgacagagctgctgtgctgcacgtgtggggccgcctgtggaacagcaccttcctggaggagtacagcgctgtgaagagcctggaggtgattgtgcgggccaacatcaccgtgaagagcagcatcaagaacctgatgctgagagatgccagcaccgtcatccctgtgatggtgtacctggaccccatggctgtggtggccgagggcgtgccctggtgggtgatcctgctggccgtgctggccggcctgctggtgctggccctgctggtgctgctgctgtggaagtgtggcttcttccacaggagcagccagagcagcagcttccccaccaactaccaccgggcctgcctggccgtgcagcccagcgccatggaggtgggcggccctggcaccgtgggctgggacagcagcaatggccgcagcacccccaggcctccctgccccagcaccatgaggtag

SEQ ID NO: 282181 - DNA, 4348 bp, Artificial Sequence
  derived and/or modified sequence
gggcgccggagctgcggctgctgtagttgtcctagccggtgctggggcggcggggtggcggagcggcgggcgggcgggagggctggcggggcgaacgtctgggagacgtctgaaagaccaacgagactttggagaccagagacgcgcctggggggacctggggcttggggcgtgcgagatttcccttgcattcgctgggagctcgcgcagggatcgtcccatggccggggctcggagccgcgacccttggggggcctccgggatttgctacctttttggctccctgctcgtcgaactgctcttctcacgggctgtcgccttcaatctggacgtgatgggtgccttgcgcaaggagggcgagccaggcagcctcttcggcttctctgtggccctgcaccggcagttgcagccccgaccccagagctggctgctggtgggtgctccccaggccctggctcttcctgggcagcaggcgaatcgcactggaggcctcttcgcttgcccgttgagcctggaggagactgactgctacagagtggacatcgaccagggagctgatatgcaaaaggaaagcaaggagaaccagtggttgggagtcagtgttcggagccaggggcctgggggcaagattgttacctgtgcacaccgatatgaggcaaggcagcgagtggaccagatcctggagacgcgggatatgattggtcgctgctttgtgctcagccaggacctggccatccgggatgagttggatggtggggaatggaagttctgtgagggacgcccccaaggccatgaacaatttgggttctgccagcagggcacagctgccgccttctcccctgatagccactacctcctctttggggccccaggaacctataattggaagggcacggccagggtggagctctgtgcacagggctcagcggacctggcacacctggacgacggtccctacgaggcggggggagagaaggagcaggacccccgcctcatcccggtccctgccaacagctactttgggttgctttttgtgaccaacattgatagctcagaccccgaccagctggtgtataaaactttggaccctgctgaccggctcccaggaccagccggagacttggccctcaatagctacttaggcttctctattgactcggggaaaggtctggtgcgtgcagaagagctgagctttgtggctggagccccccgcgccaaccacaagggtgctgtggtcatcctgcgcaaggacagcgccagtcgcctggtgcccgaggttatgctgtctggggagcgcctgacctccggctttggctactcactggctgtggctgacctcaacagtgatggctggccagacctgatagtgggtgccccctacttctttgagcgccaagaagagctggggggtgctgtgtatgtgtacttgaaccaggggggtcactgggctgggatctcccctctccggctctgcggctcccctgactccatgttcgggatcagcctggctgtcctgggggacctcaaccaagatggctttccagatattgcagtgggtgccccctttgatggtgatgggaaagtcttcatctaccatgggagcagcctgggggttgtcgccaaaccttcacaggtgctggagggcgaggctgtgggcatcaagagcttcggctactccctgtcaggcagcttggatatggatgggaaccaataccctgacctgctggtgggctccctggctgacaccgcagtgctcttcagggccagacccatcctccatgtctcccatgaggtctctattgctccacgaagcatcgacctggagcagcccaactgtgctggcggccactcggtctgtgtggacctaagggtctgtttcagctacattgcagtccccagcagctatagccctactgtggccctggactatgtgttagatgcggacacagaccggaggctccggggccaggttccccgtgtgacgttcctgagccgtaacctggaagaacccaagcaccaggcctcgggcaccgtgtggctgaagcaccagcatgaccgagtctgtggagacgccatgttccagctccaggaaaatgtcaaagacaagcttcgggccattgtagtgaccttgtcctacagtctccagacccctcggctccggcgacaggctcctggccaggggctgcctccagtggcccccatcctcaatgcccaccagcccagcacccagcgggcagagatccacttcctgaagcaaggctgtggtgaagacaagatctgccagagcaatctgcagctggtccgcgcccgcttctgtacccgggtcagcgacacggaattccaacctctgcccatggatgtggatggaacaacagccctgtttgcactgagtgggcagccagtcattggcctggagctgatggtcaccaacctgccatcggacccagcccagccccaggctgatggggatgatgcccatgaagcccagctcctggtcatgcttcctgactcactgcactactcaggggtccgggccctggaccctgcggagaagccactctgcctgtccaatgagaatgcctcccatgttgagtgtgagctggggaaccccatgaagagaggtgcccaggtcaccttctacctcatccttagcacctccgggatcagcattgagaccacggaactggaggtagagctgctgttggccacgatcagtgagcaggagctgcatccagtctctgcacgagcccgtgtcttcattgagctgccactgtccattgcaggaatggccattccccagcaactcttcttctctggtgtggtgaggggcgagagagccatgcagtctgagcgggatgtgggcagcaaggtcaagtatgaggtcacggtttccaaccaaggccagtcgctcagaaccctgggctctgccttcctcaacatcatgtggcctcatgagattgccaatgggaagtggttgctgtacccaatgcaggttgagctggagggcgggcaggggcctgggcagaaagggctttgctctcccaggcccaacatcctccacctggatgtggacagtagggataggaggcggcgggagctggagccacctgagcagcaggagcctggtgagcggcaggagcccagcatgtcctggtggccagtgtcctctgctgagaagaagaaaaacatcaccctggactgcgcccggggcacggccaactgtgtggtgttcagctgcccactctacagctttgaccgcgcggctgtgctgcatgtctggggccgtctctggaacagcacctttctggaggagtactcagctgtgaagtccctggaagtgattgtccgggccaacatcacagtgaagtcctccataaagaacttgatgctccgagatgcctccacagtgatcccagtgatggtatacttggaccccatggctgtggtggcagaaggagtgccctggtgggtcatcctcctggctgtactggctgggctgctggtgctagcactgctggtgctgctcctgtggaagtgtggcttcttccatcggagcagccagagctcatcttttcccaccaactatcaccgggcctgtctggctgtgcagccttcagccatggaagttgggggtccagggactgtgggatgggattcttcaaacgggcgaagcaccccgaggccaccgtgccccagtaccatgcggtgaagattcctcgggaagaccgacagcagttcaaggaggagaagacgggcaccatcctgaggaacaactggggcagcccccggcgggagggcccggatgcacaccccatcctggctgctgacgggcatcccgagctgggccccgatgggcatccagggccaggcaccgcctaggttcccatgtcccagcctggcctgtggctgccctccatcccttccccagagatggctccttgggatgaagagggtagagtgggctgctggtgtcgcatcaagatttggcaggatcggcttcctcaggggcacagacctctcccacccacaagaactcctcccacccaacttccccttagagtgctgtgagatgagagtgggtaaatcagggacagggccatggggtagggtgagaagggcaggggtgtcctgatgcaaaggtggggagaagggatcctaatcccttcctctcccattcaccctgtgtaacaggaccccaaggacctgcctccccggaagtgccttaacctagagggtcggggaggaggttgtgtcactgactcaggctgctccttctctagtttcccctctcatctgaccttagtttgctgccatcagtctagtggtttcgtggtttcgtctatttatt

SEQ ID NO: 282182 - DNA, 4216 bp, Artificial Sequence
  derived and/or modified sequence
gggcgccggagctgcggctgctgtagttgtcctagccggtgctggggcggcggggtggcggagcggcgggcgggcgggagggctggcggggcgaacgtctgggagacgtctgaaagaccaacgagactttggagaccagagacgcgcctggggggacctggggcttggggcgtgcgagatttcccttgcattcgctgggagctcgcgcagggatcgtcccatggccggggctcggagccgcgacccttggggggcctccgggatttgctacctttttggctccctgctcgtcgaactgctcttctcacgggctgtcgccttcaatctggacgtgatgggtgccttgcgcaaggagggcgagccaggcagcctcttcggcttctctgtggccctgcaccggcagttgcagccccgaccccagagctggctgctggtgggtgctccccaggccctggctcttcctgggcagcaggcgaatcgcactggaggcctcttcgcttgcccgttgagcctggaggagactgactgctacagagtggacatcgaccagggagctgatatgcaaaaggaaagcaaggagaaccagtggttgggagtcagtgttcggagccaggggcctgggggcaagattgttacctgtgcacaccgatatgaggcaaggcagcgagtggaccagatcctggagacgcgggatatgattggtcgctgctttgtgctcagccaggacctggccatccgggatgagttggatggtggggaatggaagttctgtgagggacgcccccaaggccatgaacaatttgggttctgccagcagggcacagctgccgccttctcccctgatagccactacctcctctttggggccccaggaacctataattggaaggggttgctttttgtgaccaacattgatagctcagaccccgaccagctggtgtataaaactttggaccctgctgaccggctcccaggaccagccggagacttggccctcaatagctacttaggcttctctattgactcggggaaaggtctggtgcgtgcagaagagctgagctttgtggctggagccccccgcgccaaccacaagggtgctgtggtcatcctgcgcaaggacagcgccagtcgcctggtgcccgaggttatgctgtctggggagcgcctgacctccggctttggctactcactggctgtggctgacctcaacagtgatggctggccagacctgatagtgggtgccccctacttctttgagcgccaagaagagctggggggtgctgtgtatgtgtacttgaaccaggggggtcactgggctgggatctcccctctccggctctgcggctcccctgactccatgttcgggatcagcctggctgtcctgggggacctcaaccaagatggctttccagatattgcagtgggtgccccctttgatggtgatgggaaagtcttcatctaccatgggagcagcctgggggttgtcgccaaaccttcacaggtgctggagggcgaggctgtgggcatcaagagcttcggctactccctgtcaggcagcttggatatggatgggaaccaataccctgacctgctggtgggctccctggctgacaccgcagtgctcttcagggccagacccatcctccatgtctcccatgaggtctctattgctccacgaagcatcgacctggagcagcccaactgtgctggcggccactcggtctgtgtggacctaagggtctgtttcagctacattgcagtccccagcagctatagccctactgtggccctggactatgtgttagatgcggacacagaccggaggctccggggccaggttccccgtgtgacgttcctgagccgtaacctggaagaacccaagcaccaggcctcgggcaccgtgtggctgaagcaccagcatgaccgagtctgtggagacgccatgttccagctccaggaaaatgtcaaagacaagcttcgggccattgtagtgaccttgtcctacagtctccagacccctcggctccggcgacaggctcctggccaggggctgcctccagtggcccccatcctcaatgcccaccagcccagcacccagcgggcagagatccacttcctgaagcaaggctgtggtgaagacaagatctgccagagcaatctgcagctggtccgcgcccgcttctgtacccgggtcagcgacacggaattccaacctctgcccatggatgtggatggaacaacagccctgtttgcactgagtgggcagccagtcattggcctggagctgatggtcaccaacctgccatcggacccagcccagccccaggctgatggggatgatgcccatgaagcccagctcctggtcatgcttcctgactcactgcactactcaggggtccgggccctggaccctgcggagaagccactctgcctgtccaatgagaatgcctcccatgttgagtgtgagctggggaaccccatgaagagaggtgcccaggtcaccttctacctcatccttagcacctccgggatcagcattgagaccacggaactggaggtagagctgctgttggccacgatcagtgagcaggagctgcatccagtctctgcacgagcccgtgtcttcattgagctgccactgtccattgcaggaatggccattccccagcaactcttcttctctggtgtggtgaggggcgagagagccatgcagtctgagcgggatgtgggcagcaaggtcaagtatgaggtcacggtttccaaccaaggccagtcgctcagaaccctgggctctgccttcctcaacatcatgtggcctcatgagattgccaatgggaagtggttgctgtacccaatgcaggttgagctggagggcgggcaggggcctgggcagaaagggctttgctctcccaggcccaacatcctccacctggatgtggacagtagggataggaggcggcgggagctggagccacctgagcagcaggagcctggtgagcggcaggagcccagcatgtcctggtggccagtgtcctctgctgagaagaagaaaaacatcaccctggactgcgcccggggcacggccaactgtgtggtgttcagctgcccactctacagctttgaccgcgcggctgtgctgcatgtctggggccgtctctggaacagcacctttctggaggagtactcagctgtgaagtccctggaagtgattgtccgggccaacatcacagtgaagtcctccataaagaacttgatgctccgagatgcctccacagtgatcccagtgatggtatacttggaccccatggctgtggtggcagaaggagtgccctggtgggtcatcctcctggctgtactggctgggctgctggtgctagcactgctggtgctgctcctgtggaagtgtggcttcttccatcggagcagccagagctcatcttttcccaccaactatcaccgggcctgtctggctgtgcagccttcagccatggaagttgggggtccagggactgtgggatgggattcttcaaacgggcgaagcaccccgaggccaccgtgccccagtaccatgcggtgaagattcctcgggaagaccgacagcagttcaaggaggagaagacgggcaccatcctgaggaacaactggggcagcccccggcgggagggcccggatgcacaccccatcctggctgctgacgggcatcccgagctgggccccgatgggcatccagggccaggcaccgcctaggttcccatgtcccagcctggcctgtggctgccctccatcccttccccagagatggctccttgggatgaagagggtagagtgggctgctggtgtcgcatcaagatttggcaggatcggcttcctcaggggcacagacctctcccacccacaagaactcctcccacccaacttccccttagagtgctgtgagatgagagtgggtaaatcagggacagggccatggggtagggtgagaagggcaggggtgtcctgatgcaaaggtggggagaagggatcctaatcccttcctctcccattcaccctgtgtaacaggaccccaaggacctgcctccccggaagtgccttaacctagagggtcggggaggaggttgtgtcactgactcaggctgctccttctctagtttcccctctcatctgaccttagtttgctgccatcagtctagtggtttcgtggtttcgtctatttatt

SEQ ID NO: 282183 - DNA, 4228 bp, Artificial Sequence
  derived and/or modified sequence
gggcgccggagctgcggctgctgtagttgtcctagccggtgctggggcggcggggtggcggagcggcgggcgggcgggagggctggcggggcgaacgtctgggagacgtctgaaagaccaacgagactttggagaccagagacgcgcctggggggacctggggcttggggcgtgcgagatttcccttgcattcgctgggagctcgcgcagggatcgtcccatggccggggctcggagccgcgacccttggggggcctccgggatttgctacctttttggctccctgctcgtcgaactgctcttctcacgggctgtcgccttcaatctggacgtgatgggtgccttgcgcaaggagggcgagccaggcagcctcttcggcttctctgtggccctgcaccggcagttgcagccccgaccccagagctggctgctggtgggtgctccccaggccctggctcttcctgggcagcaggcgaatcgcactggaggcctcttcgcttgcccgttgagcctggaggagactgactgctacagagtggacatcgaccagggagctgatatgcaaaaggaaagcaaggagaaccagtggttgggagtcagtgttcggagccaggggcctgggggcaagattgttacctgtgcacaccgatatgaggcaaggcagcgagtggaccagatcctggagacgcgggatatgattggtcgctgctttgtgctcagccaggacctggccatccgggatgagttggatggtggggaatggaagttctgtgagggacgcccccaaggccatgaacaatttgggttctgccagcagggcacagctgccgccttctcccctgatagccactacctcctctttggggccccaggaacctataattggaagggcacggccagggtggagctctgtgcacagggctcagcggacctggcacacctggacgacggtccctacgaggcggggggagagaaggagcaggacccccgcctcatcccggtccctgccaacagctactttggcttctctattgactcggggaaaggtctggtgcgtgcagaagagctgagctttgtggctggagccccccgcgccaaccacaagggtgctgtggtcatcctgcgcaaggacagcgccagtcgcctggtgcccgaggttatgctgtctggggagcgcctgacctccggctttggctactcactggctgtggctgacctcaacagtgatggctggccagacctgatagtgggtgccccctacttctttgagcgccaagaagagctggggggtgctgtgtatgtgtacttgaaccaggggggtcactgggctgggatctcccctctccggctctgcggctcccctgactccatgttcgggatcagcctggctgtcctgggggacctcaaccaagatggctttccagatattgcagtgggtgccccctttgatggtgatgggaaagtcttcatctaccatgggagcagcctgggggttgtcgccaaaccttcacaggtgctggagggcgaggctgtgggcatcaagagcttcggctactccctgtcaggcagcttggatatggatgggaaccaataccctgacctgctggtgggctccctggctgacaccgcagtgctcttcagggccagacccatcctccatgtctcccatgaggtctctattgctccacgaagcatcgacctggagcagcccaactgtgctggcggccactcggtctgtgtggacctaagggtctgtttcagctacattgcagtccccagcagctatagccctactgtggccctggactatgtgttagatgcggacacagaccggaggctccggggccaggttccccgtgtgacgttcctgagccgtaacctggaagaacccaagcaccaggcctcgggcaccgtgtggctgaagcaccagcatgaccgagtctgtggagacgccatgttccagctccaggaaaatgtcaaagacaagcttcgggccattgtagtgaccttgtcctacagtctccagacccctcggctccggcgacaggctcctggccaggggctgcctccagtggcccccatcctcaatgcccaccagcccagcacccagcgggcagagatccacttcctgaagcaaggctgtggtgaagacaagatctgccagagcaatctgcagctggtccgcgcccgcttctgtacccgggtcagcgacacggaattccaacctctgcccatggatgtggatggaacaacagccctgtttgcactgagtgggcagccagtcattggcctggagctgatggtcaccaacctgccatcggacccagcccagccccaggctgatggggatgatgcccatgaagcccagctcctggtcatgcttcctgactcactgcactactcaggggtccgggccctggaccctgcggagaagccactctgcctgtccaatgagaatgcctcccatgttgagtgtgagctggggaaccccatgaagagaggtgcccaggtcaccttctacctcatccttagcacctccgggatcagcattgagaccacggaactggaggtagagctgctgttggccacgatcagtgagcaggagctgcatccagtctctgcacgagcccgtgtcttcattgagctgccactgtccattgcaggaatggccattccccagcaactcttcttctctggtgtggtgaggggcgagagagccatgcagtctgagcgggatgtgggcagcaaggtcaagtatgaggtcacggtttccaaccaaggccagtcgctcagaaccctgggctctgccttcctcaacatcatgtggcctcatgagattgccaatgggaagtggttgctgtacccaatgcaggttgagctggagggcgggcaggggcctgggcagaaagggctttgctctcccaggcccaacatcctccacctggatgtggacagtagggataggaggcggcgggagctggagccacctgagcagcaggagcctggtgagcggcaggagcccagcatgtcctggtggccagtgtcctctgctgagaagaagaaaaacatcaccctggactgcgcccggggcacggccaactgtgtggtgttcagctgcccactctacagctttgaccgcgcggctgtgctgcatgtctggggccgtctctggaacagcacctttctggaggagtactcagctgtgaagtccctggaagtgattgtccgggccaacatcacagtgaagtcctccataaagaacttgatgctccgagatgcctccacagtgatcccagtgatggtatacttggaccccatggctgtggtggcagaaggagtgccctggtgggtcatcctcctggctgtactggctgggctgctggtgctagcactgctggtgctgctcctgtggaagtgtggcttcttccatcggagcagccagagctcatcttttcccaccaactatcaccgggcctgtctggctgtgcagccttcagccatggaagttgggggtccagggactgtgggatgggattcttcaaacgggcgaagcaccccgaggccaccgtgccccagtaccatgcggtgaagattcctcgggaagaccgacagcagttcaaggaggagaagacgggcaccatcctgaggaacaactggggcagcccccggcgggagggcccggatgcacaccccatcctggctgctgacgggcatcccgagctgggccccgatgggcatccagggccaggcaccgcctaggttcccatgtcccagcctggcctgtggctgccctccatcccttccccagagatggctccttgggatgaagagggtagagtgggctgctggtgtcgcatcaagatttggcaggatcggcttcctcaggggcacagacctctcccacccacaagaactcctcccacccaacttccccttagagtgctgtgagatgagagtgggtaaatcagggacagggccatggggtagggtgagaagggcaggggtgtcctgatgcaaaggtggggagaagggatcctaatcccttcctctcccattcaccctgtgtaacaggaccccaaggacctgcctccccggaagtgccttaacctagagggtcggggaggaggttgtgtcactgactcaggctgctccttctctagtttcccctctcatctgaccttagtttgctgccatcagtctagtggtttcgtggtttcgtctatttatt

SEQ ID NO: 282184 - DNA, 3489 bp, Artificial Sequence
  derived and/or modified sequence
atggccggcgcccggagccgggacccctggggcgccagcggcatctgttacctgttcggcagccttctggtggaactgctattctccagggccgtcgcctttaatctggacgttatgggggccttacggaaagaaggagagccaggatccctgttcggcttctctgtggcattgcacaggcagcttcagccaagaccacagagctggctacttgtgggcgcgccgcaggctctagctcttcccggacagcaggccaaccggaccggtggcttgttcgcttgcccgctctctttggaggaaactgattgctatcgcgtggacattgatcagggagccgacatgcaaaaggaatctaaggagaaccagtggctcggcgtgagcgtccgctctcagggccccgggggaaagatcgtaacatgtgcacacagatacgaggcaagacaaagagtcgaccaaatactggagactagagacatgattgggagatgcttcgtgctgtcacaggacttagcaatcagagatgaactggatggaggggagtggaaattttgcgaagggcggccccaggggcatgagcagttcggattttgtcagcagggcaccgcggccgccttctcacccgattctcactacttattattcggtgcacctggcacatataactggaagggcactgctcgtgtcgaactatgcgctcagggcagtgcagacctggcacaccttgacgatggtccatacgaggcaggcggggaaaaagaacaggaccccaggcttatccctgtcccggcaaactcttactttggccttctgtttgtgactaacatcgactccagtgatccggaccagctcgtgtataaaaccctggatcccgccgataggttacctggtcccgctggtgatttggcactgaacagttacctgggcttttccattgactcgggaaaaggccttgtaagggctgaagaattgtcattcgtggccggggcacctcgtgccaatcacaagggggctgtcgttattttgaggaaagacagcgcctccagactggtccccgaggtgatgctgtccggtgagcggttaaccagcgggttcggctattctttggcagtcgccgacctgaacagcgatgggtggcctgatctcatagtcggggctccctatttcttcgagagacaggaggaactgggcggggccgtttatgtttatctcaaccaggggggccactgggccggaatcagcccattgaggctctgcggatcccctgactccatgttcggcatatcactggcagttcttggtgaccttaatcaggacgggttcccggacatcgcagtcggtgcaccgtttgatggggatggcaaggtcttcatctaccacggttcttctctgggggtggttgccaagcctagccaggtgctggaaggggaagcagtgggcatcaagtcctttgggtactcactgagcgggtctcttgacatggatggcaatcagtaccccgacctgttggtagggtcactggcggatactgcagtcctttttagagcccggccgattctgcacgttagccatgaagtgagcatcgctcctcggtcaatagacctggaacaacccaactgtgccggaggccacagtgtctgtgtggacttgagagtctgctttagctacatcgctgtgccatcatcatattcacccactgtggcgctggactatgttctggacgcagataccgataggcgtctgcgcggacaggtgccgagggtgactttcctgagcagaaacttggaggagcctaaacaccaagcttccggcactgtatggctgaaacaccaacacgatcgggtttgtggggacgctatgtttcagctacaggaaaacgtaaaggacaagctgagagcaattgtggtgacactctcctacagtctgcagacgcctcgtctgcgccgacaagccccaggtcagggtctccctcccgttgccccgatccttaacgcacatcagccctccactcagcgggcagaaatccattttctgaaacaggggtgtggagaggataaaatttgccagtccaacctgcagctcgtgcgtgcacggttttgcacacgagtgtcagatacagagtttcagccattgcctatggatgtggacggtacgactgcactgttcgccctgagcggtcagcctgtgatcgggctagagttgatggttacgaacctgccatcggaccccgcccagccccaggctgacggcgacgacgcacatgaagcccaactgttggtcatgctgcctgactctttgcactactcaggcgtccgggctctcgacccggcagagaaacctttgtgtctgagcaatgagaacgcgtcacacgtcgagtgcgaactgggtaaccccatgaagaggggagcacaagtcactttttatcttatcctcagcacatctggtatcagcattgagactactgagctggaagtggagctgcttctggcaactatcagcgaacaagaattgcaccccgtgagtgccagagcacgtgtgttcattgaactgcccctgagcatcgcaggcatggcaattcctcagcagctttttttttcaggagtagtcaggggcgagcgggctatgcagtccgagcgcgacgtagggagcaaagtgaaatatgaagtgaccgtgagtaaccagggccaatctcttcgcacccttgggagcgcctttctcaacatcatgtggcctcacgaaatagcaaacgggaaatggctattgtatcccatgcaggtagagctagaggggggccagggcccaggtcagaaaggtctttgttctccccggcccaatattctgcatcttgatgtggatagcagggataggcgtcggcgcgaactggaaccccccgagcaacaggaacccggagaacgacaggaaccttccatgagttggtggccggtaagttccgcagagaagaagaagaacatcactctggactgcgcccgaggcaccgccaattgcgtagtattctcctgcccgctgtactcattcgaccgggcggccgtattgcatgtgtggggcagactttggaactctacctttctggaagagtacagcgctgtaaaatccctagaggtgattgtacgcgccaacattaccgtcaagtcctccatcaagaatctgatgttgagggatgccagcacagtgatccctgtcatggtgtacctggacccaatggcagtcgtggccgagggcgtcccttggtgggtgatccttttggccgtgctcgccggcctgttggtcttggcacttttagtgctgctcctgtggaagtgtggcttcttccataggagctcacaatccagctcatttcccactaattaccaccgggcctgtctggcggtgcagccgtcggctatggaagtgggcggtcccggcacggtaggttgggattcgtccaacggcagatccaccccccggcctccatgtccctcaactatgcgatag

SEQ ID NO: 282185 - DNA, 3357 bp, Artificial Sequence
  derived and/or modified sequence
atggccggcgcccggagccgggacccctggggcgccagcggcatctgctacctgttcggctctctcttggtcgagcttttattttcacgagctgtggcgtttaacctggatgttatgggtgctttgagaaaagagggcgagcctggttcactattcggattttcggtggcgctccacaggcaactccagccccggccccaatcttggctgcttgttggcgcaccccaggctttggcccttcccggccagcaggcgaataggacaggtggcctgtttgcctgccccctgtcacttgaagagactgactgttacagggtggacatcgatcaaggcgctgacatgcagaaggagtctaaagagaaccagtggctgggggtgagtgtccggagccagggaccgggtggcaaaatcgtcacctgtgcccacaggtatgaagctcgacagcgcgttgatcagatactggaaacaagggacatgattggtagatgttttgtgctctctcaggatctggcaataagggacgagctggacggcggagagtggaagttttgcgagggaagaccacaaggccatgaacagtttggtttttgccagcagggtacggccgccgcgttcagccctgactctcattacctgctgtttggcgcccctggcacttataattggaaggggctgctgtttgtgacaaatattgacagctctgatccggatcagctggtgtataaaaccttagaccccgctgaccgcctgccggggcctgccggggacctggccttaaactcctatctcggatttagcatcgacagtggcaaaggactggtgagagcagaggagctgtcctttgtcgccggcgcgcctagagccaaccataagggggcggtcgtgatcctcagaaaggactcagcctcccggttagtgccagaagtgatgctgagcggtgagaggcttacatccggatttggctatagcctggccgtcgccgatttgaatagcgacggttggcccgacctgatagtgggagcaccatacttcttcgagcgccaggaggagctgggcggtgcagtctatgtttacttgaaccagggtgggcactgggccggtatctctcccctccggctgtgcggctctcctgactccatgttcgggatctccctggcagtcttgggtgacctgaatcaagatggcttcccagatatcgctgtgggagctccgttcgatggagatgggaaagtatttatttatcatggctccagccttggcgtagtggccaaaccatcccaggtcttagaaggcgaggctgtaggcattaagtcgttcggatacagcctgagcggtagcctagacatggacgggaatcaatacccagatttattggtcggctctttagcagacactgcggtgctgttccgagctcgccctatcctgcacgtgagccacgaagtctcaatcgctccccggagcatcgatctagagcagcccaattgcgctggagggcattccgtctgtgtggacctgcgggtgtgtttctcctatatcgcagtgccatccagctattcccccacagtggccctagactatgtgctcgatgctgacacagatagacggctcaggggacaggtgcctagggtcaccttcctgtcccggaatcttgaagagcctaagcatcaagcctccggaaccgtgtggcttaaacaccagcatgatagagtttgcggggacgctatgtttcagttgcaggaaaatgtaaaggataaactgagagctatcgtggtgactctaagctatagtctgcagactcccagactgaggagacaagctccaggccaggggctgcctcccgtggctcctatcctcaacgcacatcagccatccactcagcgggctgaaattcactttctcaagcaagggtgcggggaagacaagatctgtcagagcaacctgcagctggtacgggctcgtttttgtaccagagtctcagatactgaattccagccattgccaatggacgtcgatggaacgactgcactttttgccctgtcagggcaacccgtaatcggcctggaactgatggtgaccaacctcccaagcgaccctgctcaaccccaggctgacggtgacgatgcgcatgaggcccagctgctggtgatgctgccagattccctgcattactctggggtaagggctctggacccagcggaaaaacccctctgcctttccaatgagaatgcgtcacacgtggagtgcgaactgggtaaccctatgaaacgcggcgcacaagtgactttttatctgattctgtccaccagcggtatctccatcgagacaacagaattggaagtggaactcctcttagctaccatttcagaacaagaacttcatcccgtctctgcacgtgcgcgcgttttcatcgaattacccctttcgatcgcaggcatggccatccctcaacaactgtttttctccggagtggtgcggggggagcgggcaatgcagagtgaacgtgacgtgggaagcaaagtgaagtatgaagtcacagtgtcaaatcagggccagtcgctcaggacattggggagcgccttccttaacatcatgtggcctcatgagattgcgaatggcaagtggcttctctaccctatgcaagtagagctcgagggggggcaggggccgggccagaaaggtctgtgctctccacgacccaacatcttacaccttgatgttgattcgcgggatagacgtcgccgggaactcgaaccaccagagcagcaggagcctggcgagcgccaggaaccctcgatgtcttggtggcctgtctctagcgcggagaagaaaaaaaacatcactttagactgtgcaagaggcacggccaactgcgtggtcttctcttgcccactgtacagcttcgacagagctgcagttctccacgtttggggaaggctttggaatagcactttcctggaagagtatagcgcagttaagtctctagaagtgatagtacgggccaatatcactgtcaagtcgagtataaagaacctgatgttgagggatgcgtctacagtcattcctgtaatggtgtatttagatcctatggctgtagtggccgaaggtgtaccctggtgggtgatcctgctcgctgtcttagcgggactgctagtgctggctctgctggtgctgctcctttggaagtgcgggttttttcaccgctcctcacaaagttcctcctttccaactaactatcacagagcttgtctggccgtgcagccatccgcaatggaagtcggcggccctggcactgtggggtgggactctagcaatggccggagtacccctaggcctccttgtccctctacaatgcggtag

SEQ ID NO: 282186 - DNA, 3369 bp, Artificial Sequence
  derived and/or modified sequence
atggccggcgcccggagccgggacccctggggcgccagcggcatctgctacttatttggctccctgctggtggagttgttgttctcaagggctgtggctttcaacctcgacgtcatgggcgccctgaggaaggagggcgaacctggatcgctgttcggatttagcgttgccctgcatcggcaattgcaaccccgcccccagtcttggctgctcgtgggagctcctcaagccctcgcgctgcctgggcaacaggcaaatcgtacagggggactgttcgcgtgccctttgtcccttgaagaaaccgattgctacagagtcgatatagatcagggtgcggatatgcagaaggagtctaaagagaaccaatggctgggggtatcagttagaagtcagggcccaggtggaaaaatcgtgacatgtgcacataggtacgaagctaggcagcgggtggatcagatactggagacgagggatatgattggacggtgctttgtcctctcccaggatctggcaatacgagacgagctcgatggaggtgaatggaagttctgtgaaggacgccctcagggccacgagcaattcggcttctgccagcagggaactgctgcggctttcagcccggactcccactatctgctgttcggcgcacccggcacatacaactggaaaggcacagctcgtgtcgaactgtgcgcccagggctcagctgacctcgcacatttggatgacggaccatacgaagcgggaggggagaaggagcaggatcccaggttgatcccggtccccgcgaattcttattttggcttctccattgattcaggtaaaggactggtccgcgctgaggagctctccttcgtggccggcgcgccacgcgctaatcacaagggcgccgttgtcattctgaggaaagacagcgcatctaggttagtgcccgaggtgatgttgtccggagagagattaacttcaggattcggatattccctggctgtggctgacctgaatagcgacggctggccagatctgatagtgggggcaccctacttcttcgagagacaagaggaattggggggggcagtctatgtctacctgaaccagggcggccattgggccggaatctctccattacgcctgtgcgggtctcctgatagcatgtttggaatttcactagccgtgctcggggacttgaaccaagacgggtttccagacatcgccgtgggggcccctttcgatggggacggaaaggtgtttatttaccacggctcttctctgggcgttgtcgccaaaccgtcacaggtcctggagggggaagctgttggcatcaagtcttttggatacagcttaagtggatccctggatatggatgggaaccagtaccccgatttgcttgtcggaagccttgccgatactgcagtgctgttccgcgccagacctattcttcacgtgtcccatgaggtgagcatcgcgccaagaagcattgatctggagcagccaaactgcgccggcggccattcagtgtgtgttgatctcagggtatgctttagctacatcgccgtgcctagctcatattcccctactgtggcgttggattatgtgctggatgccgatacagaccgtcggttacgcggccaggtgccacgcgtcactttcttgtctaggaacctcgaggagcccaagcaccaggcaagtgggaccgtctggcttaaacatcagcatgaccgtgtgtgtggagatgccatgttccaactgcaggagaacgtgaaagacaaactccgcgccattgttgtgacattgagctattccctgcagacacctcgcctgaggcgacaggcacctggacaggggctcccccctgttgcccccatccttaacgcacaccagccttccacgcagcgagccgagatacactttctaaagcagggttgcggagaagataagatctgccagtctaacctacaattggtcagagcccggttctgtacccgtgtgtccgacactgagtttcagcctcttccaatggacgtagacggcacaactgccctgttcgcattgagtggccagcccgtgatcgggcttgagctgatggtgaccaatcttccttcggatcctgcccagccgcaggctgacggggatgacgcgcatgaagctcagctgctggtgatgctccccgacagcctgcactatagtggggtaagggccttagaccccgctgaaaagccgctttgcctgtccaatgagaacgcctctcacgttgaatgcgagttggggaatcctatgaagagaggagcccaggtgaccttctacctgattctaagcacgtcgggaatttccatcgagacaaccgagttggaagtagagctgttgttggctacaatctccgagcaggagctgcacccggtctctgcccgcgctagggtcttcattgaactgcccttgagtatcgcaggaatggctatccctcagcaactattcttctcaggggtggtacgaggggaacgcgctatgcagtctgaacgggacgttggtagcaaagtcaagtacgaagtgaccgtctcaaaccagggtcagtcgctgagaaccctgggaagtgctttcttaaatatcatgtggccccacgaaatcgccaacgggaagtggttactgtaccctatgcaggtggagctggaaggcggtcaagggccaggccagaaagggctctgcagtccgcgccctaatattcttcatctggacgtcgattcacgcgacagaagacgaagggaactggaacctcccgagcaacaggaacccggagaaagacaggaaccctcaatgtcctggtggcccgtctccagtgccgagaagaagaagaacataaccctagactgcgctcgtgggacagctaactgcgtggttttctcctgtcctctatatagcttcgatagggctgccgtactgcacgtttggggaagattgtggaatagcactttcctcgaagagtactctgccgtgaaatccttagaggtgatagtccgagccaacattacagtcaagtcatctatcaaaaacctgatgctgcgggatgcctccaccgtaattcccgtcatggtctacctagatcctatggctgtagtggccgaaggggtgccatggtgggttatcctgctcgcggtgctcgcaggtctgctcgtgctggccttgttagtgttgttactgtggaaatgcggcttcttccaccgctccagccaatcctcttcattccccacaaattaccaccgcgcttgcctggcagttcagccaagcgcaatggaggtgggaggacccggaacagtgggatgggacagctctaatgggcgttccactcccagacctccatgcccctcaacaatgcgatag

SEQ ID NO: 282187 - DNA, 3489 bp, Artificial Sequence
  derived and/or modified sequence
atggctggagccaggtctagggatccctggggggcatcaggaatctgctacctgtttggcagcctcctggtggaattgttatttagtagggctgtggcctttaacctggacgtgatgggagcgctccggaaggaaggagagcctggcagcttgtttggcttttccgtggctctgcatcgccaattgcagcccagaccacagtcgtggcttctggtgggcgcacctcaagcccttgccctgcctggccagcaggcaaatcggaccggaggcctgtttgcttgcccccttagccttgaggagactgactgctatcgtgttgacattgaccagggtgcagacatgcagaaagagtctaaagagaaccagtggttgggagtcagcgtgaggagtcaagggccaggcggaaagatcgtgacatgcgcccatcgctatgaggcacggcaaagggtcgaccagatcctggagacaagagacatgattggaaggtgcttcgttctgtctcaggacttggccattcgggatgaactcgacgggggtgaatggaagttttgcgaaggaagacctcagggccacgagcaatttggtttttgtcagcaagggaccgctgccgcttttagtcctgattcccactacctactctttggcgcacctggtacttataattggaaaggtacagctcgggtggagctatgcgcacaagggtccgcagatttagcccacctcgatgacgggccttacgaggccggtggggaaaaggaacaggatcctagactcattccagtgccagccaactcctacttcggcctcctgtttgtgaccaacatcgattcatctgatccggatcagctcgtgtataaaactctcgaccccgctgaccgactgcccggacctgccggagatctggcactgaacagctatctgggcttcagcattgacagtggaaaaggactcgtgcgggctgaggaactcagcttcgtagctggcgcaccacgcgcaaatcataaaggtgccgtggtgatccttcggaaagatagcgcttctcgcctggtccccgaggtgatgctgtctggtgaaaggctcacatcaggattcggctactccctggccgtggcagatctcaacagcgatggatggccagacttgatcgttggcgctccttatttctttgaaaggcaggaagaactcggtggggctgtatatgtgtaccttaaccagggtggacactgggcaggtatttctccactcaggttgtgcggatccccggatagcatgttcggaatcagcctcgccgttctgggcgatctgaatcaggatggcttcccagatatcgccgtgggcgctccctttgatggagacggcaaggtgtttatttaccacggcagcagcttaggcgttgtggctaagccaagccaggtactggaaggtgaggcggtcgggattaagagcttcggctacagcctctctggcagcctcgatatggatggcaatcagtaccctgacctgctggtgggtagtctggctgacaccgcggtcctctttcgcgcacgcccaatacttcacgtgtctcatgaagtctctatcgcaccccgatctattgatctcgaacagcccaactgcgcgggtggccatagcgtatgtgttgacctccgcgtctgtttcagctatatcgcagtcccatcaagttactctccaaccgtcgctcttgattatgtgttggacgcggacacagacaggcggttgagaggccaggtgcctcgagttacatttctctctcgaaacctggaagagcccaagcaccaggccagcggcacagtctggctcaagcaccaacacgacagggtgtgtggcgatgctatgttccagctacaggagaacgtgaaggacaaattacgcgctatagtcgtcactttgtcttactccctacaaacccccagactgaggcggcaggctccgggacaaggcttaccgccagtcgctccgattctcaatgctcaccagccgagcacccaaagagccgagattcattttctcaaacaggggtgcggagaggacaagatttgccagagtaatctccagctcgtacgggcacggttctgcactcgcgtgtcagatactgaatttcagcctcttcccatggacgtggacgggacgactgcattgtttgccttgagcgggcaaccagttattggactggaacttatggtcactaatttaccctccgatcctgcccaaccacaggcagatggggacgatgcacatgaggctcagctccttgttatgctgccagatagtttgcactatagcggcgtgcgtgccctcgatcccgctgagaaaccgttatgtttgagcaacgagaatgcttcacacgttgagtgtgagcttgggaaccctatgaagcgtggtgctcaggtgacgttttatcttatcctgtcgactagtggaataagtattgaaaccacagagcttgaggttgaactacttttggccaccatttcagagcaagagctgcaccctgtttcagccagggcccgagtattcatcgaactgccgctgagcatagcaggcatggcaatcccacagcaactctttttctcgggtgtggtccgaggagaaagggcgatgcagtctgaacgagacgtgggtagtaaagtgaaatacgaggttacagtgtccaaccagggacaatccctcagaaccctgggctccgctttcctcaatatcatgtggcctcatgaaatcgctaatgggaaatggctactctacccgatgcaagtggagttagaggggggacaggggccaggtcaaaagggactttgcagcccacgacccaacattcttcatctggatgtggactctcgcgacagacggaggagggagctcgagcctcctgagcaacaggagcctggagagaggcaggagccctctatgtcatggtggccggtttcttctgcagaaaaaaaaaaaaatataaccctagattgtgccagggggaccgccaactgcgtggtgtttagctgtcccctttattcctttgatcgtgccgcagttctccacgtgtggggacgactttggaatagcacctttttggaggaatacagcgcagtgaaaagcttggaggtaatagtgcgcgcaaacatcacagtcaagtcttccatcaagaacctgatgctgcgtgacgctagcacggtgattccggtaatggtatacctcgatccaatggccgtggtggccgagggcgtgccctggtgggtgatcttactggctgttctggccggactgctcgtcctagcgctcctggtacttcttctgtggaaatgcggcttttttcacaggagtagccagtccagctcatttccaactaattatcacagagcctgtcttgcggtccagccatccgcgatggaagttgggggtcccggaactgtggggtgggacagtagtaatgggaggagtacgcctcgtcccccatgtccctcaactatgagatag

SEQ ID NO: 282188 - DNA, 3357 bp, Artificial Sequence
  derived and/or modified sequence
atggccggtgccaggtctcgcgacccttggggagcctccgggatctgttacctgttcgggtccctcctagtcgaactactctttagtagggcagttgccttcaacctcgacgttatgggagcgctccgtaaggaaggtgagcccggatccctgtttggtttcagcgtggcattacatcgacagttgcagcccagacctcagtcctggctgctggttggtgcgccacaagcccttgctctgcccggacagcaagccaatagaaccggcggattgtttgcttgtcctctgagcctggaggaaacagactgttatagagtggacatcgaccagggagctgacatgcagaaagagtcaaaagagaaccaatggctgggggtgagcgtcagatctcaaggcccaggcggtaagatagtcacatgtgcccaccgatacgaggctcgccagcgtgtcgaccagatcttggagacccgcgacatgatcgggcgatgctttgtactttctcaggaccttgctattagggacgagcttgacggaggcgaatggaagttttgtgagggcagaccacaagggcacgagcagtttggcttctgccagcaagggacagccgctgcctttagccccgacagccactacctgctgtttggggctcctggaacttacaattggaagggacttttgttcgtgacaaatatcgattcctcggaccccgatcagctggtttataagacactggacccagccgaccgcctcccgggtccagctggcgatctggcccttaatagctacctcggattcagtatcgattccggcaaagggcttgtgcgcgctgaggagctgagctttgtggctggggcacccagagctaaccataagggtgccgtggtcattcttcgcaaagactctgcctcgagactggtgcctgaagtgatgctctccggagagcgtctgacctccggattcgggtattcccttgccgtcgccgatctcaatagcgacggctggccagacctcatcgtcggcgctccctacttctttgaacgccaagaagaactgggtggagcggtatacgtgtatttgaaccagggaggacattgggcaggcatcagtcctctgcggttatgcgggtcaccagattccatgtttgggattagccttgccgtactgggggacctcaaccaagatggctttcccgacatagctgtcggagcaccgtttgatggagacggcaaagtgttcatctaccatggcagcagcctgggcgtggtcgcgaaaccttcccaggtgcttgaaggagaggcggtcggaattaaaagtttcggttatagcctttctggatctctggatatggatgggaaccagtatcccgatctcctcgtgggatctttagctgacacagccgtactgttcagagctcgtcctatcctgcatgtatcacatgaggtgtcaatcgcgcctcgaagtatcgatctggagcagcctaactgcgctgggggtcacagcgtgtgcgtggacttgagagtctgttttagttacatagccgttccctcctcctacagccctaccgtcgcattagactacgtattggacgccgatacagaccggagactgcgcggacaagtccctcgcgttacattcttatccagaaatcttgaggaacctaagcaccaggcttcagggacagtttggctgaagcaccaacatgaccgggtctgtggagacgccatgttccagttacaggaaaatgtaaaagacaagttgcgtgccatagttgtgacactatcttacagcctccagactcctcgcctgcgccgacaggcaccgggtcagggactaccccctgtggctcccatattgaatgcgcatcaaccgtccacgcaacgggctgaaatccacttcctcaaacagggctgcggtgaagacaagatctgtcagagcaatctccagttagtgagagccaggttttgtacccgtgtctccgacactgagtttcagcccctgccaatggacgtggacggtaccactgcactgtttgctctgtcgggtcagccagttattgggctggagctgatggtgaccaacctcccaagtgaccctgctcagccacaagctgacggcgacgatgctcacgaagcccagctcttggttatgctgcctgactcactccattatagtggagtcagggcgttggacccggctgagaagcccctttgtctgagtaatgaaaatgcctcacacgtggagtgtgaactcggcaatcccatgaaaaggggggcacaggtaacattctatcttatcctgtctacgagtggcatcagtatagagacaacagaactggaagtcgagctgctcctagcaacaatctcagaacaagagctgcatcctgtcagtgcccgagcgagggtgttcattgagttacctcttagcatagctgggatggcgataccccaacagcttttcttttcaggcgtggtgcgtggtgagcgtgcgatgcagtcagaacgggacgtggggagtaaggtaaaatatgaggtgactgtctctaaccagggacagtccctgcgtaccttggggagcgccttcctcaacattatgtggcctcacgaaattgctaatggcaagtggttgctgtatcctatgcaggtcgaactagaaggagggcagggccctggccagaaaggcttatgcagtccacgccctaatattctgcacctcgatgtggactcaagggacagacggagaagagagctggaacctccagaacagcaggagcctggcgagaggcaggagccatccatgtcctggtggcctgtaagttccgccgaaaagaagaagaatattaccctggactgtgcacgaggaactgctaactgtgttgtctttagctgccccctctactcctttgatagagctgcggtgctccacgtttggggcaggttgtggaatagtaccttcttggaagagtactctgccgtgaagtccctcgaagtgatcgtccgcgcaaacatcactgtgaagtcgtcaattaagaatcttatgttgagagacgcaagcaccgtaatccctgttatggtctatctcgatccaatggctgttgtggctgagggcgttccatggtgggtgatcctgctagctgtgctggctgggctgctcgtgctggcattactggtgcttctgctgtggaaatgtggtttctttcatcgctctagccagagcagcagctttcctactaactatcatcgcgcttgcctcgccgtccagccctcggccatggaagtgggaggtccaggaacggtgggttgggactcaagcaacgggagatctactccacgcccaccgtgtcccagtactatgcgctag

SEQ ID NO: 282189 - DNA, 3369 bp, Artificial Sequence
  derived and/or modified sequence
atggcaggtgctcgctcacgagacccgtggggagcctcaggcatttgttatctatttggcagcctgcttgtggagctgcttttttctcgcgcagtggccttcaatctggacgtgatgggagcactgcgcaaagagggcgaacctggatctttgttcggcttttcagtcgctctccaccgccaacttcagccgcgacctcagtcttggttgctcgttggggctccccaggcgctggctcttccaggtcagcaggccaatagaaccggcggactattcgcatgtccactctccctggaagagacagattgctatcgggtcgatatcgaccagggcgctgacatgcagaaagagagcaaggaaaaccagtggctcggggtgagcgtgaggagccagggacccggaggcaagattgtgacttgcgcacacaggtacgaagctcggcagcgcgttgaccagatcctggagacgcgcgatatgattgggagatgctttgtgctttctcaagatttggcaatccgggatgaactggatggaggagaatggaaattctgtgaaggtcgaccccagggacacgagcagtttggcttttgccagcagggtactgccgctgctttttctcccgattcccattacctgctttttggggctcctggaacctacaattggaaaggaaccgccagagttgaattatgcgcacaaggatccgctgatctggctcatctcgatgacggcccttacgaggctggaggagaaaaagagcaggaccctcgtttgatccccgtcccggctaacagttacttcggattttcaatcgacagcggcaaaggccttgtcagagctgaggagttatcatttgtggcaggcgcaccaagggcgaaccacaagggagccgtcgtgatccttagaaaagactcggctagcaggctcgtaccagaagttatgttgtccggggagaggcttacctccggattcgggtatagtctggcggttgctgatctgaactcagatggatggccggatcttattgtgggcgcaccttatttttttgagaggcaggaggaactggggggtgcagtatacgtttacttgaatcagggcggacattgggctggaatcagtcccctccggttatgcggctctccagacagtatgttcggcatatcgctcgctgtgttaggagacctgaaccaggacggcttccctgatatagctgtgggcgcaccttttgacggcgacggcaaagtgttcatctaccacggcagctccctgggcgttgtagcaaaaccctctcaggtgctcgagggggaagcagtagggattaagtccttcgggtactccctctccggcagcctggacatggatgggaaccagtaccccgaccttctcgtaggtagcctcgccgataccgccgtgttgttcagagcaagacctattctgcacgtcagccatgaggtgagcattgcgccacgtagtattgacctggagcagccaaactgtgccggaggacatagtgtgtgcgtggacctcagagtctgtttttcatatatcgcggttccctcctcttattcacccaccgttgccttagactatgttttggatgctgacacagatagaaggctccggggacaggtgccacgcgtcacgtttctctcacgaaatctagaggaaccaaagcaccaagctagcggcactgtgtggctgaaacatcagcacgaccgcgtgtgtggcgatgctatgttccagttgcaggagaacgtaaaagacaaattgcgggctatcgtagtcaccctttcttattccctccagacaccaaggcttcgcagacaggctccaggtcaaggactgcctccggtggccccaatccttaatgctcaccagcctagcactcagcgcgcagagatccactttctgaagcagggctgcggggaggataaaatctgtcagtcaaatttacagctagtgcgagcgcgattctgcacacgagtcagcgataccgagttccaaccactgcccatggatgtagatggcacaacagccctcttcgcgctttcgggacaacccgtgattggcctggaattaatggtgaccaacctgcccagcgaccccgctcagcctcaggccgacggagatgatgctcatgaagcccagctgcttgtgatgctgccagactccctgcactattcgggggtccgggctttagaccccgcagaaaaacctctatgtctgtccaacgagaacgcatctcacgttgaatgcgaactcggaaatcctatgaaacgcggagctcaagtgaccttctatttaatattgagcacgtccggaataagcattgaaacgacagagctggaggttgaactgctgttggccaccatttccgagcaggaactacacccagtctccgcaagggccagagttttcattgagcttcctctgagcatcgccggtatggcgatcccccaacaattgttttttagtggtgtagtgcgtggcgagcgagccatgcaaagtgagcgtgacgtcggtagtaaagtgaagtatgaagtcacagtgagcaaccaggggcagtccctgagaactctcggcagtgccttcttgaacatcatgtggccacacgaaattgctaacggaaagtggctgctctatcctatgcaggtggagctggagggcggtcagggacctggacaaaagggcctttgcagtcctcgacctaatatcttgcatctggacgttgactccagggacaggcgacgaagagagctggagcccccagaacagcaggaacctggcgagaggcaggagcctagtatgtcctggtggcccgtcagcagcgccgaaaagaagaaaaacatcaccctggactgtgcacggggaaccgctaattgcgtagtttttagctgcccactatactcttttgacagggctgcggtgcttcatgtgtggggaagattatggaattcgactttcttggaggagtactccgccgttaaaagtcttgaagttattgtcagggctaacattacagtcaagtcgagcatcaaaaacctgatgcttcgtgacgccagtacagtaattcccgttatggtgtacctggaccctatggccgtggtggcggagggagtcccttggtgggtgatacttctcgccgtactcgcgggattactggtccttgcacttctcgtgcttctgctgtggaagtgtgggtttttccacaggtctagccagagcagctcatttcctacgaattatcatcgtgcttgtctggccgtgcagccttctgccatggaggtcggaggccctgggaccgtcgggtgggattcatcaaatgggagaagtactcccaggcccccttgtcccagcacgatgcgctag

SEQ ID NO: 282190 - protein, 62 aa, Artificial Sequence
  derived and/or modified sequence
QVYKGGYTRPIPRPPPFVRPLPGGPISPYNGCPVSCRGISFSQARSCCSRLGRCCHVGKGYS

SEQ ID NO: 282191 - protein, 82 aa, Artificial Sequence
  derived and/or modified sequence
MRLVVCLVFLASFALVCQGQVYKGGYTRPVPRPPPFVRPLPGGPIGPYNGCPVSCRGISFSQARSCCSRLGRCCHVGKGYSG

SEQ ID NO: 282192 - protein, 81 aa, Artificial Sequence
  derived and/or modified sequence
MRLVVCLVFLASFALVCQGQVYKGGYTRPIPRPPFVRPVPGGPIGPYNGCPVSCRGISFSQARSCCSRLGRCCHVGKGYSG

SEQ ID NO: 282193 - protein, 486 aa, Artificial Sequence
  derived and/or modified sequence
MTCGSYCGGRAFSCISACGPRPGRCCITAAPYRGISCYRGLTGGFGSHSVCGGFRAGSCGRSFGYRSGGVCGPSPPCITTVSVNESLLTPLNLEIDPNAQCVKQEEKEQIKSLNSRFAAFIDKVRFLEQQNKLLETKLQFYQNRECCQSNLEPLFEGYIETLRREAECVEADSGRLASELNHVQEVLEGYKKKYEEEVSLRATAENEFVALKKDVDCAYLRKSDLEANVEALIQEIDFLRRLYEEEIRVLQSHISDTSVVVKLDNSRDLNMDCIIAEIKAQYDDIVTRSRAEAESWYRSKCEEMKATVIRHGETLRRTKEEINELNRMIQRLTAEVENAKCQNSKLEAAVAQSEQQGEAALSDARCKLAELEGALQKAKQDMACLIREYQEVMNSKLGLDIEIATYRRLLEGEEQRLCEGVGSVNVCVSSSRGGVVCGDLCASTTAPVVSTRVSSVPSNSNVVVGTTNACAPSARVGVCGGSCKRC

SEQ ID NO: 282194 - DNA, 1868 bp, Artificial Sequence
  derived and/or modified sequence
tttggtgctcaagagaggcttggaggagaccacagttctttctccatgtgtgaggaattaaaggcaactgtgcagaaacacacgcagagcctgaagcccagcaaggaggatctgaacaggcttaatcaggccatccagtggctgacggtggaggtgggcagtgctgagagtcagcaccatgacttgtggatcttactgtggtggccgcgccttcagctgcatctcggcctgcgggccccggcccggccgctgctgcatcaccgccgccccctaccgtggcatctcctgctaccgcggcctcaccgggggcttcggcagccacagcgtgtgcggaggctttcgggccggctcctgcggacgcagcttcggctaccgctccgggggcgtgtgcgggcccagtcccccatgcatcaccaccgtgtcggtcaacgagagcctcctcacgcccctcaacctggagatcgaccccaacgcgcagtgcgtgaagcaggaggagaaggagcagatcaagtccctcaacagcaggttcgcggccttcatcgacaaggtgcgcttcctggagcagcagaacaaactgctggagacaaagctgcagttctaccagaaccgcgagtgttgccagagcaacctggagcccctgtttgagggctacatcgagactctgcggcgggaggccgagtgcgtggaggccgacagcgggaggctggcctcagagcttaaccacgtgcaggaggtgctggagggctacaagaagaagtatgaggaggaggtttctctgagagcaacagctgagaacgagtttgtggctctgaagaaggatgtggactgcgcctacctccgcaaatcagacctggaggccaatgtggaggccctgatccaggagatcgacttcctgaggcggctgtatgaggaggagatccgcgttctccagtcccacatctcagacacctccgtggttgtcaagctggacaacagccgggacctgaacatggactgcatcattgccgagatcaaggcacagtacgatgacattgtcacccgtagccgggctgaggccgagtcctggtaccgcagcaagtgtgaggagatgaaggccacggtgatcaggcacggggagaccctgcgccgcaccaaggaggagatcaacgagctgaaccgcatgatccagaggctgacggctgaggtggagaatgccaagtgccagaattccaagctggaggctgcggtggctcagtctgagcagcagggtgaggcggccctcagcgatgcccgctgcaagttggccgagctggagggtgccctgcagaaggccaagcaggacatggcctgcctgatcagggagtaccaggaggtgatgaactccaagctgggcctggacatcgagatcgccacctacaggcgcctgctggagggcgaggagcagaggctgtgcgagggcgtcggctcggtgaatgtctgcgtcagcagctcccgcggtggcgttgtctgtggcgatctctgcgcctccactactgcccctgttgtctccaccagagtcagtagcgtccccagcaacagcaacgtggtggtgggcactactaacgcctgcgccccctccgcccgggttggcgtctgcggcggcagctgtaagaggtgctaggaggctgccgcctccgccagcgcctgtcgccgtcactctccacccagccagtacctcgcgccaccagaacgcgccgcccgcgccggcctcccaatagccgccgcccgctgcctgcactctaagcgccctccccaccgctccgctccgggagccatccccggtcgcaggagtccggggagggccgggaggcgccatggtctctctctgtagcctttcctggtagtcaatt

SEQ ID NO: 282195 - DNA, 1892 bp, Artificial Sequence
  derived and/or modified sequence
agtttcgggtggcccagccaactttcatgccagccgtcctcagcccttcctggtgctgggtctgccaggctcatggtcagccaggcctggggccctggagaggtcctctgcatcttgaattctgtggagcaccatgacttgtggatcttactgtggtggccgcgccttcagctgcatctcggcctgcgggccccggcccggccgctgctgcatcaccgccgccccctaccgtggcatctcctgctaccgcggcctcaccgggggcttcggcagccacagcgtgtgcggaggctttcgggccggctcctgcggacgcagcttcggctaccgctccgggggcgtgtgcgggcccagtcccccatgcatcaccaccgtgtcggtcaacgagagcctcctcacgcccctcaacctggagatcgaccccaacgcgcagtgcgtgaagcaggaggagaaggagcagatcaagtccctcaacagcaggttcgcggccttcatcgacaaggtgcgcttcctggagcagcagaacaaactgctggagacaaagctgcagttctaccagaaccgcgagtgttgccagagcaacctggagcccctgtttgagggctacatcgagactctgcggcgggaggccgagtgcgtggaggccgacagcgggaggctggcctcagagcttaaccacgtgcaggaggtgctggagggctacaagaagaagtatgaggaggaggtttctctgagagcaacagctgagaacgagtttgtggctctgaagaaggatgtggactgcgcctacctccgcaaatcagacctggaggccaatgtggaggccctgatccaggagatcgacttcctgaggcggctgtatgaggaggagatccgcgttctccagtcccacatctcagacacctccgtggttgtcaagctggacaacagccgggacctgaacatggactgcatcattgccgagatcaaggcacagtacgatgacattgtcacccgtagccgggctgaggccgagtcctggtaccgcagcaagtgtgaggagatgaaggccacggtgatcaggcacggggagaccctgcgccgcaccaaggaggagatcaacgagctgaaccgcatgatccagaggctgacggctgaggtggagaatgccaagtgccagaattccaagctggaggctgcggtggctcagtctgagcagcagggtgaggcggccctcagcgatgcccgctgcaagttggccgagctggagggtgccctgcagaaggccaagcaggacatggcctgcctgatcagggagtaccaggaggtgatgaactccaagctgggcctggacatcgagatcgccacctacaggcgcctgctggagggcgaggagcagaggctgtgcgagggcgtcggctcggtgaatgtctgcgtcagcagctcccgcggtggcgttgtctgtggcgatctctgcgcctccactactgcccctgttgtctccaccagagtcagtagcgtccccagcaacagcaacgtggtggtgggcactactaacgcctgcgccccctccgcccgggttggcgtctgcggcggcagctgtaagaggtgctaggaggctgccgcctccgccagcgcctgtcgccgtcactctccacccagccagtacctcgcgccaccagaacgcgccgcccgcgccggcctcccaatagccgccgcccgctgcctgcactctaagcgccctccccaccgctccgctccgggagccatccccggtcgcaggagtccggggagggccgggaggcgccatggtctctctctgtagcctttcctggtagtcaatttgttgtcccgaggattcatctttttcttccgcctgccttctgttttttttgctgtatacattggtcttg

SEQ ID NO: 282196 - DNA, 2091 bp, Artificial Sequence
  derived and/or modified sequence
tccattcggacgtctccatcctcagaacctcctctcttccccaaaaagcaccatgacttgtggatcttactgtggtggccgcgccttcagctgcatctcggcctgcgggccccggcccggccgctgctgcatcaccgccgccccctaccgtggcatctcctgctaccgcggcctcaccgggggcttcggcagccacagcgtgtgcggaggctttcgggccggctcctgcggacgcagcttcggctaccgctccgggggcgtgtgcgggcccagtcccccatgcatcaccaccgtgtcggtcaacgagagcctcctcacgcccctcaacctggagatcgaccccaacgcgcagtgcgtgaagcaggaggagaaggagcagatcaagtccctcaacagcaggttcgcggccttcatcgacaaggtgcgcttcctggagcagcagaacaaactgctggagacaaagctgcagttctaccagaaccgcgagtgttgccagagcaacctggagcccctgtttgagggctacatcgagactctgcggcgggaggccgagtgcgtggaggccgacagcgggaggctggcctcagagcttaaccacgtgcaggaggtgctggagggctacaagaagaagtatgaggaggaggtttctctgagagcaacagctgagaacgagtttgtggctctgaagaaggatgtggactgcgcctacctccgcaaatcagacctggaggccaatgtggaggccctgatccaggagatcgacttcctgaggcggctgtatgaggaggagatccgcgttctccagtcccacatctcagacacctccgtggttgtcaagctggacaacagccgggacctgaacatggactgcatcattgccgagatcaaggcacagtacgatgacattgtcacccgtagccgggctgaggccgagtcctggtaccgcagcaagtgtgaggagatgaaggccacggtgatcaggcacggggagaccctgcgccgcaccaaggaggagatcaacgagctgaaccgcatgatccagaggctgacggctgaggtggagaatgccaagtgccagaattccaagctggaggctgcggtggctcagtctgagcagcagggtgaggcggccctcagcgatgcccgctgcaagttggccgagctggagggtgccctgcagaaggccaagcaggacatggcctgcctgatcagggagtaccaggaggtgatgaactccaagctgggcctggacatcgagatcgccacctacaggcgcctgctggagggcgaggagcagaggctgtgcgagggcgtcggctcggtgaatgtctgcgtcagcagctcccgcggtggcgttgtctgtggcgatctctgcgcctccactactgcccctgttgtctccaccagagtcagtagcgtccccagcaacagcaacgtggtggtgggcactactaacgcctgcgccccctccgcccgggttggcgtctgcggcggcagctgtaagaggtgctaggaggctgccgcctccgccagcgcctgtcgccgtcactctccacccagccagtacctcgcgccaccagaacgcgccgcccgcgccggcctcccaatagccgccgcccgctgcctgcactctaagcgccctccccaccgctccgctccgggagccatccccggtcgcaggagtccggggagggccgggaggcgccatggtctctctctgtagcctttcctggtagtcaatttgttgtcccgaggattcatctttttcttccgcctgccttctgttttttttgctgtatacattggtcttgcctgagctcttccccaaagcttggaggaacgggggaggcccgggaatgtccctgtctgcacgacctgggactctgcccatgtgcttttgcctgtggaatggagacgcggaccctggatagtggttctatgactctgcgagggacaggcccacgcgtgtggggagaacatctcccttccggggctgccctcaagagcttctgaaaaactaatgactctgctgccttctcctttgtctttgtttcactctgtgtttccaataaactcattgtagcgaatcaa

SEQ ID NO: 282197 - DNA, 1401 bp, Artificial Sequence
  derived and/or modified sequence
atgtgcaacaccaacatgagcgtgcccaccgacggcgccgtgaccaccagccagatccccgccagcgagcaggagaccctggtgctgttctacctgggccagtacatcatgaccaagagactgtacgacgagaagcagcagcacatcgtgtactgcagcaacgacctgctgggcgacctgttcggcgtgcccagcttcagcgtgaaggagcacagaaagatctacaccatgatctacagaaacctggtggtggtgaaccagcaggagagcagcgacagcggcaccagcgtgagcgagaacagatgccacctggagggcggcagcgaccagaaggacctggtgcaggagctgcaggaggagaagcccagcagcagccacctggtgagcagacccagcaccagcagcagaagaagagccatcagcgagaccgaggagaacagcgacgagctgagcggcgagagacagagaaagagacacaagagcgacagcatcagcctgagcttcgacgagagcctggccctgtgcgtgatcagagagatctgctgcgagagaagcagcagcagcgagagcaccggcacccccagcaaccccgacctggacgccggcgtgagcgagcacagcggcgactggctggaccaggacagcgtgagcgaccagttcagcgtggagttcgaggtggagagcctggacagcgaggactacagcctgagcgaggagggccaggagctgagcgacgaggacgacgaggtgtaccaggtgaccgtgtaccaggccggcgagagcgacaccgacagcttcgaggaggaccccgagatcagcctggccgactactggaagtgcaccagctgcaacgagatgaacccccccctgcccagccactgcaacagatgctgggccctgagagagaactggctgcccgaggacaagggcaaggacaagggcgagatcagcgagaaggccaagctggagaacagcacccaggccgaggagggcttcgacgtgcccgactgcaagaagaccatcgtgaacgacagcagagagagctgcgtggaggagaacgacgacaagatcacccaggccagccagagccaggagagcgaggactacagccagcccagcaccagcagcagcatcatctacagcagccaggaggacgtgaaggagttcgagagagaggagacccaggacaaggaggagagcgtggagagcagcctgcccctgaacgccatcgagccctgcgtgatctgccagggcagacccaagaacggctgcatcgtgcacggcaagaccggccacctgatggcctgcttcacctgcgccaagaagctgaagaagagaaacaagccctgccccgtgtgcagacagcccatccagatgatcgtgctgacctacttcccctag

SEQ ID NO: 282198 - DNA, 774 bp, Artificial Sequence
  derived and/or modified sequence
atgtgcaacaccaacatgagcgtgcccaccgacggcgccgtgaccaccagccagatccccgccagcgagcaggagaccctggtgagacccaagcccctgctgctgaagctgctgaagagcgtgggcgcccagaaggacacctacaccatgaaggaggtgctgttctacctgggccagtacatcatgaccaagagactgtacgacgagaagcagcagcacatcgtgtactgcagcaacgacctgctgggcgacctgttcggcgtgcccagcttcagcgtgaaggagcacagaaagatctacaccatgatctacagaaacctggtggtggtgaaccagcaggagagcagcgacagcggcaccagcgtgagcgagaacagatgccacctggagggcggcagcgaccagaaggacctggtgcaggagctgcaggaggagaagcccagcagcagccacctggtgagcagacccagcaccagcagcagaagaagagccatcagcgagaccgaggagaacagcgacgagctgagcggcgagagacagagaaagagacacaagagcgacagcatcagcctgagcttcgacgagagcctggccctgtgcgtgatcagagagatctgctgcgagagaagcagcagcagcgagagcaccggcacccccagcaaccccgacctggacgccggcgtgagcgagcacagcggcgactggctggaccaggacagcgtgagcgaccagttcagcgtggagttcgaggtggagagcctggacagcgagtag

SEQ ID NO: 282199 - DNA, 1341 bp, Artificial Sequence
  derived and/or modified sequence
atgtgcaacaccaacatgagcgtgcccaccgacggcgccgtgaccaccagccagatccccgccagcgagcaggagaccctggtgagacccaagcccctgctgctgaagctgctgaagagcgtgggcgcccagaaggacacctacaccatgaaggagaagatctacaccatgatctacagaaacctggtggtggtgaaccagcaggagagcagcgacagcggcaccagcgtgagcgagaacagatgccacctggagggcggcagcgaccagaaggacctggtgcaggagctgcaggaggagaagcccagcagcagccacctggtgagcagacccagcaccagcagcagaagaagagccatcagcgagaccgaggagaacagcgacgagctgagcggcgagagacagagaaagagacacaagagcgacagcatcagcctgagcttcgacgagagcctggccctgtgcgtgatcagagagatctgctgcgagagaagcagcagcagcgagagcaccggcacccccagcaaccccgacctggacgccggcgtgagcgagcacagcggcgactggctggaccaggacagcgtgagcgaccagttcagcgtggagttcgaggtggagagcctggacagcgaggactacagcctgagcgaggagggccaggagctgagcgacgaggacgacgaggtgtaccaggtgaccgtgtaccaggccggcgagagcgacaccgacagcttcgaggaggaccccgagatcagcctggccgactactggaagtgcaccagctgcaacgagatgaacccccccctgcccagccactgcaacagatgctgggccctgagagagaactggctgcccgaggacaagggcaaggacaagggcgagatcagcgagaaggccaagctggagaacagcacccaggccgaggagggcttcgacgtgcccgactgcaagaagaccatcgtgaacgacagcagagagagctgcgtggaggagaacgacgacaagatcacccaggccagccagagccaggagagcgaggactacagccagcccagcaccagcagcagcatcatctacagcagccaggaggacgtgaaggagttcgagagagaggagacccaggacaaggaggagagcgtggagagcagcctgcccctgaacgccatcgagccctgcgtgatctgccagggcagacccaagaacggctgcatcgtgcacggcaagaccggccacctgatggcctgcttcacctgcgccaagaagctgaagaagagaaacaagccctgccccgtgtgcagacagcccatccagatgatcgtgctgacctacttcccctag

SEQ ID NO: 282200 - DNA, 1401 bp, Artificial Sequence
  derived and/or modified sequence
atgtgcaatacaaatatgtccgtaccgacggacggagcagtcaccacaagccagattcctgcatctgagcaggaaaccctggtgttgttttatctgggccaatacattatgacaaagcgactgtatgatgagaagcaacagcatattgtttattgttctaatgaccttctaggggatctatttggagtgccctcattctccgtcaaagagcacagaaaaatctataccatgatttataggaatttggttgtcgttaaccagcaggaaagctcagacagtgggacctcagtgagcgaaaaccgttgtcacctcgaaggcggttctgaccagaaggatctggtgcaggagctgcaggaggaaaagccaagctcaagccatctagtctcacgtccttcaacttctagcaggcgtagggcgattagtgagactgaggaaaatagcgatgagctatcaggagagcgccagagaaaaagacacaaatccgattcaatatcactgtcttttgatgagtctctggcactgtgtgtcatccgggaaatatgctgcgagcggtcatcctcgagtgagagcacagggaccccttccaacccagatctcgatgccggcgtgagcgaacactccggcgattggctggaccaggatagcgtgagcgaccagttcagtgttgaattcgaggtagagtccctcgatagcgaggattactccctgtcagaagagggacaggagctgagtgacgaggacgacgaagtgtatcaagttactgtctatcaggcaggcgagtccgataccgactcctttgaggaggacccggagatttccttggccgactactggaagtgtactagctgcaatgagatgaacccgcctctgcctagccattgtaacagatgttgggctcttagagaaaactggctgcctgaggataagggaaaggacaagggagaaatttccgagaaagcaaagcttgaaaactctactcaggccgaggaaggattcgacgttcccgattgtaaaaagacaatagtgaacgactcacgagaaagttgcgtggaggagaacgacgataaaatcacacaggccagccagagtcaggagagcgaagattattctcagccttctactagttcttctatcatctactcctcacaggaagacgtgaaagagttcgaaagagaggagacgcaagataaggaagagagcgtagaaagctcactgcccctgaatgctatcgagccttgtgtcatttgtcagggaagacctaagaacggatgcatcgtgcacgggaagacagggcatctgatggcttgctttacatgcgccaagaaactgaagaaacgtaataagccttgcccagtctgccgccagccaattcaaatgattgtccttacatacttcccctag

SEQ ID NO: 282201 - DNA, 774 bp, Artificial Sequence
  derived and/or modified sequence
atgtgcaacacgaatatgagtgtgcccactgacggcgccgtgactacatcacagatcccggcatcagaacaggaaaccctggttaggccgaaacccttgcttcttaaactgctcaaatcagttggcgcacagaaagacacttatactatgaaggaggtgctattctatttgggccagtacattatgaccaaacgactctatgacgaaaagcagcaacatattgtctattgtagcaacgatcttttgggggacctgttcggagtgccctcattttccgtaaaggagcaccgcaaaatatataccatgatttacagaaatctggtcgtcgtgaaccagcaggaatcttctgactcggggacctccgtgagcgagaatagatgccacctcgagggggggagcgaccagaaggatcttgtgcaggaactgcaggaggaaaagccgagctcttctcacctcgtctcaaggccatcaacaagctcacgccgccgagcaatcagcgagacagaagagaattccgatgaactgagcggcgagcgtcagagaaaacgtcacaaaagcgattccatttcattgagctttgacgaatcactggcattgtgtgttataagggagatctgttgcgagcgctcctccagcagcgagtcaacaggcacccctagcaacccagacctggatgccggtgtcagcgagcactccggagattggctggaccaggatagtgtttctgaccagttctcagttgagttcgaggtcgagagtctcgattccgaatag

SEQ ID NO: 282202 - DNA, 1341 bp, Artificial Sequence
  derived and/or modified sequence
atgtgtaacactaacatgtccgtccctaccgatggggcagtaacaactagtcagatcccagcctccgagcaggagacactcgtgagacctaaaccactcttactcaaactgcttaagagtgtgggtgcccagaaggatacctacaccatgaaggagaaaatctacactatgatctacagaaatctggtcgtggtaaaccagcaagagagctcagacagtggcactagtgtgagtgagaatcgatgccacctggagggtggcagtgaccagaaagacctggtgcaagagcttcaagaggaaaaacctagcagctcacatctagtctccaggccatcaacctcatcgcgccggagagctatttccgagaccgaagagaactccgatgagctgtcgggggagcgccaacgcaaaagacacaagtctgacagcatatcactgagcttcgacgagagcctcgccttgtgcgtgatcagggaaatttgttgcgaacgcagttcgtcatccgagtcaaccggaactccttctaaccccgatctggatgctggagtctcagagcatagtggtgattggctcgatcaggactcggtcagtgaccagttctccgtcgagtttgaagttgagtccctggattcagaggactacagcctgagcgaagagggccaggagctctcagacgaggacgacgaggtgtatcaggtgactgtctatcaggccggagagtcggatactgattcattcgaggaagatcccgagattagcctagccgattactggaagtgtacctcctgcaacgagatgaacccccctctgccatctcactgcaatagatgctgggcactcagggaaaattggctgcccgaggataaggggaaagacaagggcgagatctctgagaaagcaaagcttgagaatagtactcaggctgaagagggctttgacgtgcccgactgcaagaagacgatcgtgaacgacagcagggaatcttgcgtcgaggaaaatgatgacaaaattacgcaagcttcacagagtcaagagtctgaggattattcccagccgtctactagtagttcaatcatctactcaagccaggaggacgtgaaggagtttgagcgagaggagacgcaggacaaagaagaatccgtcgagagttcactccccctgaatgctatcgagccttgcgtcatatgccagggccggcccaagaacggttgcattgtgcacggtaaaacaggacacctcatggcatgcttcacatgcgccaaaaaactcaagaaaagaaacaagccttgtccggtctgtaggcagcctatccagatgatagtcctgacttatttcccctag

SEQ ID NO: 282203 - DNA, 1401 bp, Artificial Sequence
  derived and/or modified sequence
atgtgcaacaccaacatgtctgtgcccacagatggagctgtgaccaccagccagatcccagccagcgagcaggagaccctggtgctcttctacctgggccagtacatcatgaccaagaggctgtatgatgagaagcagcagcacatcgtgtactgcagcaatgacctgctgggggacctgtttggagtgcccagcttctctgtgaaggagcacaggaagatctacaccatgatctacagaaacctggtggtggtgaaccagcaggagagcagtgacagcggcacctctgtgtctgaaaatcgctgccacctggagggcggcagtgaccagaaggacctggtgcaggagctgcaggaggagaagcccagcagcagccacctggtgtcccggcccagcaccagcagcagaagaagagccatcagcgagacagaagaaaattctgatgagctgtctggagagcggcagaggaagaggcacaagagtgacagcatcagcctgagctttgatgagagcctggccctgtgtgtgatccgggagatctgctgtgagaggagcagcagcagcgagagcacaggcacccccagcaacccagacctggatgctggggtgtctgagcacagcggggactggctggaccaggacagcgtgtctgaccagttctctgtggagtttgaggtggagagcctggacagcgaggactacagcctgtctgaggagggccaggagctgagtgatgaagatgatgaggtgtaccaggtgacagtgtaccaggccggggagagtgacacagacagctttgaggaggaccctgagatcagcctggccgactactggaagtgcaccagctgcaatgagatgaacccccccctgcccagccactgcaaccgctgctgggccctgcgggagaactggctgcctgaagataaaggcaaggacaagggggagatcagcgagaaggccaagctggagaacagcacccaggccgaggagggctttgatgtgcctgactgcaagaagaccatcgtgaatgacagccgggagagctgtgtggaggagaatgatgacaagatcacccaggccagccagagccaggagagcgaggactacagccagcccagcaccagcagcagcatcatctacagcagccaggaggatgtgaaggagtttgagcgggaggagacccaggacaaggaggagagcgtggagagcagcctgcccctgaatgccatcgagccctgtgtgatctgccagggccggcccaagaatggctgcatcgtgcacggcaagacaggccacctgatggcctgcttcacctgtgccaagaagctgaagaagaggaacaagccctgccctgtgtgccggcagcccatccagatgattgtgctgacctacttcccctag

SEQ ID NO: 282204 - DNA, 774 bp, Artificial Sequence
  derived and/or modified sequence
atgtgcaacaccaacatgtctgtgcccacagatggagctgtgaccaccagccagatcccagccagcgagcaggagaccctggtgcggcccaagcccctgctgctgaagctgctgaagtctgtgggcgcccagaaggacacctacaccatgaaggaggtgctcttctacctgggccagtacatcatgaccaagaggctgtatgatgagaagcagcagcacatcgtgtactgcagcaatgacctgctgggggacctgtttggagtgcccagcttctctgtgaaggagcacaggaagatctacaccatgatctacagaaacctggtggtggtgaaccagcaggagagcagtgacagcggcacctctgtgtctgagaaccgctgccacctggagggcggcagtgaccagaaggacctggtgcaggagctgcaggaggagaagcccagcagcagccacctggtgtcccggcccagcaccagcagcagaagaagagccatcagcgagacagaggagaacagtgatgagctgagcggggagcggcagaggaagaggcacaagagtgacagcatcagcctgagctttgatgagagcctggccctgtgtgtgatccgggagatctgctgtgagaggagcagcagcagcgagagcacaggcacccccagcaacccagacctggatgctggggtgtctgagcacagcggggactggctggaccaggacagcgtgtctgaccagttctctgtggagtttgaggtggagagcctggacagcgagtag

SEQ ID NO: 282205 - DNA, 1341 bp, Artificial Sequence
  derived and/or modified sequence
atgtgcaacaccaacatgtctgtgcccacagatggagctgtgaccaccagccagatcccagccagcgagcaggagaccctggtgcggcccaagcccctgctgctgaagctgctgaagtctgtgggcgcccagaaggacacctacaccatgaaggagaagatctacaccatgatctacagaaacctggtggtggtgaaccagcaggagagcagtgacagcggcacctctgtgtctgaaaatcgctgccacctggagggcggcagtgaccagaaggacctggtgcaggagctgcaggaggagaagcccagcagcagccacctggtgtcccggcccagcaccagcagcagaagaagagccatcagcgagacagaagaaaattctgatgagctgtctggagagcggcagaggaagaggcacaagagtgacagcatcagcctgagctttgatgagagcctggccctgtgtgtgatccgggagatctgctgtgagaggagcagcagcagcgagagcacaggcacccccagcaacccagacctggatgctggggtgtctgagcacagcggggactggctggaccaggacagcgtgtctgaccagttctctgtggagtttgaggtggagagcctggacagcgaggactacagcctgtctgaggagggccaggagctgagtgatgaagatgatgaggtgtaccaggtgacagtgtaccaggccggggagagtgacacagacagctttgaggaggaccctgagatcagcctggccgactactggaagtgcaccagctgcaatgagatgaacccccccctgcccagccactgcaaccgctgctgggccctgcgggagaactggctgcctgaagataaaggcaaggacaagggggagatcagcgagaaggccaagctggagaacagcacccaggccgaggagggctttgatgtgcctgactgcaagaagaccatcgtgaatgacagccgggagagctgtgtggaggagaatgatgacaagatcacccaggccagccagagccaggagagcgaggactacagccagcccagcaccagcagcagcatcatctacagcagccaggaggatgtgaaggagtttgagcgggaggagacccaggacaaggaggagagcgtggagagcagcctgcccctgaatgccatcgagccctgtgtgatctgccagggccggcccaagaatggctgcatcgtgcacggcaagacaggccacctgatggcctgcttcacctgtgccaagaagctgaagaagaggaacaagccctgccctgtgtgccggcagcccatccagatgattgtgctgacctacttcccctag

SEQ ID NO: 282206 - DNA, 1401 bp, Artificial Sequence
  derived and/or modified sequence
atgtgcaataccaacatgtctgtacctactgatggtgctgtaaccacctcacagattccagcttcggaacaagagaccctggttcttttttatcttggccagtatattatgactaaacgattatatgatgagaagcaacaacatattgtatattgttcaaatgatcttctaggagatttgtttggcgtgccaagcttctctgtgaaagagcacaggaaaatatataccatgatctacaggaacttggtagtagtcaatcagcaggaatcatcggactcaggtacatctgtgagtgagaacaggtgtcaccttgaaggtgggagtgatcaaaaggaccttgtacaagagcttcaggaagagaaaccttcatcttcacatttggtttctagaccatctacctcatctagaaggagagcaattagtgagacagaagaaaattcagatgaattatctggtgaacgacaaagaaaacgccacaaatctgatagtatttccctttcctttgatgaaagcctggctctgtgtgtaataagggagatatgttgtgaaagaagcagtagcagtgaatctacagggacgccatcgaatccggatcttgatgctggtgtaagtgaacattcaggtgattggttggatcaggattcagtttcagatcagtttagtgtagaatttgaagttgaatctctcgactcagaagattatagccttagtgaagaaggacaagaactctcagatgaagatgatgaggtatatcaagttactgtgtatcaggcaggggagagtgatacagattcatttgaagaagatcctgaaatttccttagctgactattggaaatgcacttcatgcaatgaaatgaatcccccccttccatcacattgcaacagatgttgggcccttcgtgagaattggcttcctgaagataaagggaaagataaaggggaaatctctgagaaagccaaactggaaaactcaacacaagctgaagagggctttgatgttcctgattgtaaaaaaactatagtgaatgattccagagagtcatgtgttgaggaaaatgatgataaaattacacaagcttcacaatcacaagaaagtgaagactattctcagccatcaacttctagtagcattatttatagcagccaagaagatgtgaaagagtttgaaagggaagaaacccaagacaaagaagagagtgtggaatctagtttgccccttaatgccattgaaccttgtgtgatttgtcaaggtcgacctaaaaatggttgcattgtccatggcaaaacaggacatcttatggcctgctttacatgtgcaaagaagctaaagaaaaggaataagccctgcccagtatgtagacaaccaattcaaatgattgtgctaacttatttcccctag

SEQ ID NO: 282207 - DNA, 1401 bp, Artificial Sequence
  derived and/or modified sequence
atgtgcaacaccaacatgagcgtgcccaccgacggcgccgtgaccacgtcacaaattccagcaagcgaacaggaaacactcgttcttttctaccttggccagtacataatgactaaacggttgtacgacgagaagcagcaacacattgtgtattgcagtaatgatctgttgggcgatctgtttggtgtccctagcttttctgtaaaggagcataggaaaatatacaccatgatctataggaatctcgtggttgtcaatcaacaagaatcttccgacagcggaactagtgtgagcgaaaacaggtgtcacctggaaggcggcagtgatcaaaaagacctggtgcaagaactccaagaagagaagcctagctcatctcacttagtgtctcgaccttccacgtctagccggagacgggccattagtgagacagaggagaactcagatgagctgtcaggggagcggcagaggaagcgtcacaagagcgatagcatttccttgtcattcgacgagtccctcgccctgtgtgtcattagggagatttgctgcgaaagaagctcctcctccgaaagcacaggaaccccctccaatccagatctggatgctggggtgtcagaacattcaggggactggttagaccaagatagtgtttctgaccagttttcagtcgagtttgaagtagagtccttggattccgaggattattccctcagcgaagaaggacaagaacttagcgacgaggatgacgaagtttaccaagtcaccgtctaccaagcaggtgagtccgatacagattcttttgaggaggacccagaaatcagcttggcggactactggaaatgtacatcatgcaatgagatgaacccgccactacccagtcattgcaacagatgctgggcccttcgagagaattggctgcccgaggataaaggaaaggacaagggcgaaatcagcgaaaaagccaaattggagaattctacacaggccgaggagggcttcgatgtgccagactgtaaaaagaccattgttaatgatagtagggagtcttgtgttgaggaaaatgacgacaaaattactcaggcatctcaatcacaggaaagcgaagattattcacagcccagcacctcaagttccataatttacagttctcaggaggacgtgaaagagttcgagcgggaagaaacgcaagataaagaagagtccgtcgagagctcccttcccttgaatgctatcgagccttgcgttatctgccaaggaaggccaaaaaacggatgtattgtgcacgggaaaacaggacacctaatggcttgttttacctgcgcaaagaaactgaagaagcgcaataaaccatgtcctgtgtgtcgccagccgatccaaatgattgtgctcacgtactttccatag

SEQ ID NO: 282208 - DNA, 774 bp, Artificial Sequence
  derived and/or modified sequence
atgtgcaacaccaacatgagcgtgcccaccgacggcgccgtgaccacatctcaaatccccgctagcgagcaggagactctggtgagacctaaaccgttgctgctgaagctccttaagagtgtcggcgcccaaaaagacacatataccatgaaggaggtgctattctacctgggacaatatattatgacgaaacggctctacgatgagaagcagcagcatatcgtttactgtagcaatgacctcctgggcgatctcttcggcgttcctagcttctcggtcaaggagcaccgaaagatttacactatgatctacagaaatctggtggtggtgaaccaacaggagtcttccgacagcgggactagtgtctctgaaaacagatgccacttagagggcggcagcgatcagaaggatcttgttcaggagctgcaggaagagaaaccttcctcatctcacctggtgtcccgaccatctacaagcagtcgtagacgtgctattagtgagacagaagagaactccgacgagctgtccggcgaaagacaacgcaagagacataaatccgactctatttccctgtcatttgatgaatctctggcgctgtgtgtgattagagaaatctgctgtgaaaggagctctagttctgaaagcaccgggacgccttctaatcctgatctagatgctggggtgagcgaacacagtggagactggttggaccaagactcagtgtcagaccagttctccgtggaatttgaagtcgagtctctggatagtgagtag

SEQ ID NO: 282209 - DNA, 1341 bp, Artificial Sequence
  derived and/or modified sequence
atgtgcaacaccaacatgagcgtgcccaccgacggcgccgtgaccacctcgcagatccctgcttccgagcaggagacactagtgcgccccaaaccactgttgcttaagctgctcaagagcgttggggcccagaaggacacatacacaatgaaagagaagatatataccatgatttaccgaaacctggtggtggtgaatcagcaggagtctagtgacagtggcacatcagtgagtgaaaataggtgccatcttgaggggggcagtgaccagaaggacctagtgcaggagctgcaggaagaaaaaccgtcctcaagccaccttgtgtctaggccaagcacgtcaagcagaagacgggcaattagtgagacggaggaaaactcagacgaattatcgggcgagcggcagcgaaagaggcacaagtctgactccatcagtctgagttttgatgagagcctcgcactgtgtgtgataagagagatctgttgcgagaggagcagctctagcgagtctacaggcactccaagcaaccctgacctggacgctggcgttagtgaacactccggcgattggctcgatcaggattctgtgagtgaccagttcagcgtagagttcgaagttgagagcctggactcagaggactatagcctgtcggaggagggccaggagctgagcgatgaagacgatgaggtctatcaggtgaccgtataccaggctggcgaatccgacactgacagctttgaggaagatcccgaaatatcgctggctgactactggaagtgtacctcatgcaatgagatgaacccgcccctgccgtcacattgcaaccggtgttgggccctgcgagagaactggttgccggaggataaaggtaaagacaagggggagatcagtgagaaggcaaagctcgagaactcaacccaggcagaagaggggttcgacgtccctgactgtaagaaaacaatcgtgaacgactcccgagagagctgcgttgaggagaacgatgacaagatcacccaggcaagtcagtcacaagaatctgaagactactctcagccttctacatcatcaagcatcatatatagtagtcaggaagacgtgaaagagttcgaacgtgaagaaactcaggacaaggaggagtcggttgagagttctctgccactgaatgctatcgagccttgcgtcatctgtcagggacgacccaaaaacggatgcattgtccacggtaaaacaggacatcttatggcctgtttcacctgcgccaagaagctgaagaaaaggaataagccgtgcccagtgtgtcgacagcctatccaaatgattgtgctaacgtatttcccatag

SEQ ID NO: 282210 - DNA, 1401 bp, Artificial Sequence
  derived and/or modified sequence
atgtgtaataccaatatgtcagtgcctactgatggtgccgtgaccacatctcaaatccctgcatcagaacaggaaacacttgttctgttttacctgggacagtatattatgaccaaaagactgtatgatgagaaacagcagcacatagtgtactgttccaatgatcttctcggcgacctttttggggtgccgagctttagtgtgaaggaacatcgcaaaatttataccatgatttaccgcaacttggtggtggtgaaccagcaggagtcatcagattctggaacctccgtttccgagaataggtgccatctcgaaggaggctctgaccaaaaagatcttgtacaggagctccaggaggagaaaccctcttcgtcccacctggtctctaggcccagcacatcgagcaggcggagggccattagtgaaaccgaggaaaactctgacgagctctctggcgagagacagaggaagaggcataagtcggattccatctccttgtcattcgacgaaagtctggcgttatgtgtcattcgcgagatctgttgcgagcggtcttccagctccgagtcgaccggaacaccttctaatccagacttagatgctggtgtttccgaacactcaggggattggcttgaccaagacagtgtctcagaccagttctccgtcgaatttgaggtggagagtctggacagcgaggactactccctgagcgaggagggccaggaactcagcgatgaagatgacgaggtctaccaggtgaccgtgtaccaggccggagagtctgacaccgattcgttcgaagaggacccagaaatcagcctcgctgattactggaagtgtacatcttgtaacgagatgaaccctcctctgccttcccactgcaacaggtgctgggccctacgggagaattggcttccagaggacaagggaaaagacaaaggggaaatctcagagaaggcgaagctggaaaacagcacacaggcagaagaggggtttgatgtacccgattgcaaaaaaactattgtcaacgatagccgcgaaagctgtgtcgaggagaatgacgacaagataacacaggcctctcagagccaggaatctgaggattatagtcaaccctccacgtcatcatctatcatctatagcagtcaagaggatgtaaaggaatttgaacgtgaagaaactcaggataaagaagagtcagtggaatcctctctgcctcttaacgccatagagccctgcgtgatttgccagggtcggccaaaaaacggctgtattgtgcacgggaaaacagggcatctaatggcatgctttacatgcgcaaaaaagttgaagaaacggaacaaaccctgtcccgtctgtaggcagcctatacagatgatcgttcttacgtatttcccctag

SEQ ID NO: 282211 - DNA, 774 bp, Artificial Sequence
  derived and/or modified sequence
atgtgtaataccaatatgagcgtgccaacggacggtgcggtcaccacgagtcagatccccgcatccgaacaggagactctcgtacgtccaaaaccgctgcttttgaaattgcttaaatcggtgggggcacagaaggatacatacaccatgaaggaggtgcttttctatttgggtcagtatatcatgactaaacgtctttatgatgaaaagcaacagcacattgtttattgctcaaatgatttacttggggatctgttcggagtgccaagtttcagcgtaaaagagcatcgcaaaatctacacgatgatctaccgtaatctggtggttgtgaaccagcaggagtcatcagactctggcaccagcgttagcgagaacaggtgccacctggagggcggatcagaccagaaggacttggtgcaggaactccaggaggaaaagcccagctcctcgcacctggtttcacgcccatccacttcctcccgcagacgcgcaatcagtgagacggaggagaactctgatgagttatcaggtgaaaggcagcgaaagaggcataagagtgattctatttcactctcctttgacgaatccttagctttatgtgtgatccgggagatttgttgtgaacgctcctcatccagtgaatctaccggaaccccgagcaaccctgacctcgacgctggagtgagtgaacactctggagattggctggatcaggattctgttagcgatcagttctccgtggagttcgaggtggagtccctggatagtgagtag

SEQ ID NO: 282212 - DNA, 1341 bp, Artificial Sequence
  derived and/or modified sequence
atgtgcaacacaaacatgagcgtgcccactgacggcgctgtcacaacttctcagatcccggcatccgagcaggaaacgctcgtgagacccaagcccttgttgctgaagttgttgaaaagcgtcggcgctcaaaaggacacgtataccatgaaagagaagatttacacaatgatttaccggaacctggtggtggttaaccagcaagaatcaagtgattcagggacatctgtatccgagaatagatgccatctggagggcggttctgatcagaaggatctggtgcaggaactgcaggaagaaaaaccatcttcctcacacctcgtgtcgcgaccctctacgtctagcaggcgtcgcgctatctccgaaacggaagagaacagtgacgagctcagcggagaaaggcagcgcaagcgccacaagagcgacagtatctccctgtctttcgacgagtccctggcgctctgtgttatccgcgagatttgttgtgagaggtcaagttctagcgaatcaaccgggactcctagtaatccggacctcgacgcgggagtgagcgaacactcaggtgactggctggaccaggactctgtgagcgaccaattttctgtggaattcgaggtggaaagcctagactcagaggactactcactgtccgaagagggacaggagctgagcgatgaggacgatgaagtttatcaggtgacggtgtatcaggccggagaaagcgatacggatagcttcgaggaggatcctgagataagcttagcagactattggaaatgtacgagctgtaatgagatgaatcccccacttcctagccattgcaatcggtgttgggccctgcgtgaaaactggctgcccgaggacaaaggcaaagacaagggcgagatcagtgagaaagctaagttggaaaattcaactcaggccgaagaagggttcgacgtaccagattgtaagaagaccatcgtaaacgattcccgagaaagctgtgtggaggaaaacgacgataaaatcacgcaggcgtcacagtctcaagaatcggaggactactcccaaccctccacgtcctccagcatcatctacagctcgcaggaggacgtcaaagagttcgaaagagaggagacacaagacaaagaagaatccgtggaatcatccctgccactgaacgccatagagccctgcgttatttgtcaagggagacccaagaacggctgcattgtccacggaaagacagggcacttaatggcttgtttcacatgtgctaaaaaattgaaaaagcggaacaagccctgtcctgtgtgccgccagccaattcagatgatcgtgttgacctatttcccgtag

SEQ ID NO: 282213 - protein, 461 aa, Artificial Sequence
  derived and/or modified sequence
MHRAPSPTAEQPPGGGDSARRTLQPRLKPSARAMALPRTLGELQLYRVLQRANLLSYYETFIQQGGDDVQQLCEAGEEEFLEIMALVGMATKPLHVRRLQKALREWATNPGLFSQPVPAVPVSSIPLFKISETAGTRKGSMSNGHGSPGEKAGSARSFSPKSPLELGEKLSPLPGGPGAGDPRIWPGRSTPESDVGAGGEEEAGSPPFSPPAGGGVPEGTGAGGLAAGGTGGGPDRLEPEMVRMVVESVERIFRSFPRGDAGEVTSLLKLNKKLARSVGHIFEMDDNDSQKEEEIRKYSIIYGRFDSKRREGKQLSLHELTINEAAAQFCMRDNTLLLRRVELFSLSRQVARESTYLSSLKGSRLHPEELGGPPLKKLKQEVGEQSHPEIQQPPPGPESYVPPYRPSLEEDSASLSGESLDGHLQEFEEGLLDRCPAPGPHPALVEGRRSSVKVEAEASRQ

SEQ ID NO: 282214 - protein, 322 aa, Artificial Sequence
  derived and/or modified sequence
MHRAPSPTAEQPPGGGDSARRTLQPRLKPSARAMALPRTLGELQLYRVLQRANLLSYYETFIQQGGDDVQQLCEAGEEEFLEIMALVGMATKPLHVRRLQKALREWATNPGLFSQPVPAVPVSSIPLFKISETAGTRKGSMSNGHGSPGEKAGSARSFSPKSPLELGEKLSPLPGGPGAGDPRIWPGRSTPESDVGAGGEEEAGSPPFSPPAGGGVPEGTGAGGLAAGGTGGGPDRLEPEMVRMVVESVERIFRSFPRGDAGEVTSLLKLNKKLARSVGHIFEMDDNDSQKEEEIRKYSIIYGRFDSKRREGKQLSLHEASP

SEQ ID NO: 282215 - DNA, 1386 bp, Artificial Sequence
  derived and/or modified sequence
atgcacagggccccctccccgacggcggagcagccgccgggcgggggcgattccgcacgccggacccttcagccaagactcaagcctagtgcccgcgctatggctctacctcggacgctgggcgaactgcagctatatcgagttctgcagagagccaacctcctgtcttactatgaaactttcatccagcagggcggtgacgacgtgcagcagctgtgtgaagctggggaagaagaattcctcgaaattatggccctagttggcatggctaccaagccattgcatgtgaggcggctgcagaaagctctcagggaatgggccacaaacccaggactttttagtcaacccgtgcctgcagtaccagtctctagcatccccctctttaagatttccgaaaccgctggcacaagaaaagggtcaatgagcaatggccacgggtcccccggggaaaaagcaggcagcgcccgcagcttcagcccaaagtcccctctcgaactgggcgaaaagttgagtccactgcccggcggccccggcgctggggacccaaggatatggcccggccgttcaacacccgaatccgatgtgggggccggaggtgaagaggaggctggctccccaccattcagtcccccagccggggggggcgtgcctgaaggtaccggcgcaggaggcctcgcagctggcggcacgggtggtggtccagacagactcgagccggagatggtgagaatggtcgtagagtccgttgaacgcatcttcagaagttttcctaggggcgacgccggcgaggtgactagccttctaaaactcaacaagaaacttgctcggagcgtgggccatattttcgaaatggacgataacgactcccagaaggaggaagagattaggaaatattcaataatctatggacgctttgatagcaaaagaagggagggcaaacagttgtcactgcacgaactgactatcaatgaggctgctgcgcagttctgcatgcgcgacaatactttgcttttgagaagggttgaactctttagcctctcccggcaggtggctagagagtcgacctatctgagttccctcaaaggaagtcgactccatcccgaggaattaggtggtccccccctgaaaaaactgaagcaggaagttggagaacagtctcatcccgagatccaacaaccacctccggggccagagagttacgttccgccataccggccttctcttgaggaagattcagccagcctttcaggtgagtccctcgacggtcatcttcaggagtttgaagaagggctgctggatcgctgtccagcacctggcccccaccctgctctggtggagggccgaagatcatcagtcaaagtggaggcagaggctagccgacagtag

SEQ ID NO: 282216 - DNA, 969 bp, Artificial Sequence
  derived and/or modified sequence
atgcaccgggcccccagccccaccgctgagcaaccccccggcggcggggactccgcgaggcgcaccttgcagcccagactgaaaccatccgcgcgggccatggccctgccaaggacactcggggagttgcagctctaccgggtgctgcaaagggcaaacctgctgtcttactacgagaccttcattcagcaaggcggcgatgacgtgcagcaactgtgtgaagcgggagaagaagaattcctcgaaatcatggccctggtcggaatggctacaaagccactccacgtgaggaggcttcagaaagccctcagggagtgggctactaaccctggactcttcagccaacctgtcccagctgtaccagtgtcgtccattcccttgtttaaaattagcgagaccgctggcacccgtaaagggagtatgagcaatggccacggttcccccggcgagaaagccggcagtgcccgttccttcagtcctaaatctcctttagagttgggggaaaagttatctccactgcccggaggtcccggtgccggagacccacgaatatggcccgggaggtctacacccgaatccgacgtcggggccggcggtgaagaggaagcggggtccccaccattctcgcctcctgccgggggaggggttcctgagggcacaggagcagggggcctggccgcgggagggactgggggcggaccagaccgcttggagcctgagatggtgcgaatggttgttgagtcagtggagcggatattccgcagttttccaagaggagatgcaggggaagtgacctcactcttaaaactgaataagaaattagcccgaagcgtcgggcacatctttgagatggacgataatgactctcagaaagaggaggagatccgcaagtacagtattatctacggccgcttcgactcgaagaggcgtgaaggaaaacagctgagcctccatgaggcatccccgtag

SEQ ID NO: 282217 - DNA, 1386 bp, Artificial Sequence
  derived and/or modified sequence
atgcaccgggcccccagccccacagctgagcagcccccaggcggcggggacagcgcccggaggaccctgcagccccggctgaagcccagcgcccgggccatggccctgcccaggaccctgggggagctgcagctgtacagagtgctgcagagggccaacctgctgagctactatgagaccttcatccagcagggcggagatgatgtgcagcagctgtgtgaggccggggaggaggagttcctggagatcatggccctggtgggcatggccaccaagcccctgcacgtgcggcggctgcagaaggccctgcgggagtgggccaccaaccctggcctcttcagccagcctgtgcctgctgtgcctgtgagcagcatccccctcttcaagatcagcgagacagctggcaccaggaagggctccatgagcaatggacatggcagccctggagagaaggccggcagcgcccgctccttcagccccaagagccccctggagctgggggagaagctgagccccctgcccggcggccctggagctggggacccccgcatctggccaggccgcagcaccccagagagtgatgtgggcgccggcggggaggaggaggccggcagcccccccttcagccccccagctgggggcggcgtgcctgagggcaccggggccggcggcctggccgccggcggcaccggcggcggccctgaccggctggagcctgagatggtgaggatggtggtggagagcgtggagcgcatcttccgctccttccccagaggagatgctggggaggtgaccagcctgctgaagctgaacaagaagctggcccggtctgtgggccacatctttgagatggatgacaatgacagccagaaggaggaggagatcaggaagtacagcatcatctacggccgctttgacagcaagagaagagagggcaagcagctgagcctgcacgagctgaccatcaatgaagctgctgcccagttctgcatgagggacaacaccctgctgctgcggcgggtggagctgttcagcctgagccggcaggtggcccgggagagcacctacctgagcagcctgaagggcagccggctgcaccctgaggagctgggcggcccccccctgaagaagctgaagcaggaggtgggggagcagagccaccctgagatccagcagcccccacctggccctgagagctatgtgcccccctaccggcccagcctggaggaggacagcgccagcctgagcggggagagcctggatggccacctgcaggagtttgaggagggcctgctggaccgctgcccagcccctggcccccacccagccctggtggagggccgccgcagctctgtgaaggtggaggccgaggccagccggcagtag

SEQ ID NO: 282218 - DNA, 969 bp, Artificial Sequence
  derived and/or modified sequence
atgcaccgggcccccagccccacagctgagcagcccccaggcggcggggacagcgcccggaggaccctgcagccccggctgaagcccagcgcccgggccatggccctgcccaggaccctgggggagctgcagctgtacagagtgctgcagagggccaacctgctgagctactatgagaccttcatccagcagggcggagatgatgtgcagcagctgtgtgaggccggggaggaggagttcctggagatcatggccctggtgggcatggccaccaagcccctgcacgtgcggcggctgcagaaggccctgcgggagtgggccaccaaccctggcctcttcagccagcctgtgcctgctgtgcctgtgagcagcatccccctcttcaagatcagcgagacagctggcaccaggaagggctccatgagcaatggacatggcagccctggagagaaggccggcagcgcccgctccttcagccccaagagccccctggagctgggggagaagctgagccccctgcccggcggccctggagctggggacccccgcatctggccaggccgcagcaccccagagagtgatgtgggcgccggcggggaggaggaggccggcagcccccccttcagccccccagctgggggcggcgtgcctgagggcaccggggccggcggcctggccgccggcggcaccggcggcggccctgaccggctggagcctgagatggtgaggatggtggtggagagcgtggagcgcatcttccgctccttccccagaggagatgctggggaggtgaccagcctgctgaagctgaacaagaagctggcccggtctgtgggccacatctttgagatggatgacaatgacagccagaaggaggaggagatcaggaagtacagcatcatctacggccgctttgacagcaagagaagagagggcaagcagctgagcctgcacgaggccagcccctag

SEQ ID NO: 282219 - DNA, 1386 bp, Artificial Sequence
  derived and/or modified sequence
atgcaccgggcccccagccccaccgccgagcagccccccggcggcggtgattctgccaggagaaccctccaacctcgccttaagccttccgcaagggctatggcactgcctcgaacactgggagagctgcagctttacagagttctccagagagcaaacctgctgagttactacgaaacctttattcaacagggcggcgatgacgtccaacagctttgtgaagccggcgaggaagagttcctggagatcatggccttagtgggcatggcaacgaagcctctccatgttaggcgtctgcagaaggcactaagggaatgggcaaccaaccctggcctgttcagtcagcccgtccctgcggttcccgtgtcttccatccctttattcaaaatctcagaaaccgctgggacccggaagggctctatgagtaatgggcacgggagtcctggagagaaggcagggtctgcacggtcattttcccccaagtcacctctcgaattgggggagaaactctcacccctaccaggcggtccaggcgccggcgaccctagaatttggcctgggaggtccacacctgagtcagacgtcggcgccggcggggaggaggaagccggctcccccccctttagtcctccagctggaggcggcgtccctgaaggcaccggcgctggagggcttgcagcaggaggcaccggcggcgggccagaccggctggagcccgaaatggttagaatggtggtcgagtctgtcgagcgtatatttcgatccttccctcgcggcgatgccggtgaagtcacatccctgcttaagctaaacaaaaaactcgcccgctctgtaggacacattttcgagatggatgataatgatagtcagaaggaggaagagatacgcaagtactccataatatacggaaggtttgactctaagcggagagagggaaaacagttgtcgctgcatgagctgactattaacgaggccgctgcccagttctgtatgcgggacaacaccttacttctgagacgggtggaactgtttagcttgtcacgacaggtggcgcgcgagtccacttatctcagtagtttgaaagggtcccggctgcaccccgaggagttaggcggcccccctttgaaaaagctaaaacaggaggtcggcgagcaatcgcaccctgagatccagcagccccctccaggacccgagagttatgtgccaccataccgcccctctttggaagaggacagcgccagtttgtcaggtgaaagcttggacggtcatcttcaggagttcgaggagggtctcctggaccgatgtcctgctccagggccacatccagccctggtggaaggtaggagaagctctgtaaaggtagaggcggaggcctcacggcagtag

SEQ ID NO: 282220 - DNA, 969 bp, Artificial Sequence
  derived and/or modified sequence
atgcaccgggcccccagccccaccgccgagcagccccccggcggcggggacagtgcaagacggactctgcagcctaggctcaaacccagtgcacgggctatggcactccccagaacgcttggagagcttcagctgtatcgagtactccagcgggccaacctgctctcgtattacgagaccttcatacagcagggaggagatgatgtgcagcagttgtgtgaagctggcgaggaagaattcctggaaatcatggccctggtgggtatggcaaccaagcctctccatgtgcgacgcttgcagaaagctttgcgcgagtgggccactaatcctggactcttcagtcaaccagttcctgcagtgcccgtatcatccataccactgttcaagataagcgagacagctggcaccagaaagggatcgatgtcaaatgggcacggttcccccggagaaaaggctgggtctgctcgctcgttcagccctaagagccctctggaactgggggagaaactcagtccgctgccaggggggcccggcgcaggcgacccacgcatttggcccgggagaagcacacccgagtccgatgttggcgctgggggcgaagaggaggccggttcgccacccttcagtcccccagcggggggcggagtaccagagggcacaggcgcaggaggtctcgctgctggaggcaccgggggtgggcctgaccgcctggagccagagatggttcgtatggttgtggaaagcgtggaacgcatctttcggtcctttccgaggggagacgccggtgaggttacttccctgctcaagctgaacaagaagcttgcaagatcagtcggacatatctttgagatggacgataacgattcccagaaagaggaagagatccgcaagtacagcattatatacggccgcttcgactctaaaaggagagaaggaaagcagctgtcactgcatgaggcaagcccttag

SEQ ID NO: 282221 - DNA, 2318 bp, Artificial Sequence
  derived and/or modified sequence
gggtgggggggcagaggcacagacagaggcgcggaggctcggagagagaagacgtggagggagggacagagcctggacagcggtggacacggcatcgtgcgcggggaagagggcagcacgcagcaggcgccgagcgccgggcaccgagaagggcagcccgggtgatctccggccgtccatgcacagagcgccttcccccacagccgagcagccgccgggcggaggggacagcgcccgccggaccctgcagcccagactcaagcccagtgcccgagccatggcactgcctcggacgctgggggagctgcagctgtaccgggtcctgcagcgcgccaacctcctttcctactatgagaccttcatccagcagggaggggacgacgtgcagcagctgtgtgaggcgggtgaggaggagtttctggagatcatggcacttgtgggcatggccaccaagcccctccatgtccggcgcctgcagaaggcactgagagagtgggccaccaatccagggctcttcagtcaaccagtgcctgctgttcccgtctccagcatcccgctcttcaagatctctgagactgcgggtacccggaaagggagcatgagcaatgggcatggcagcccaggggaaaaggcaggcagtgcccgcagttttagccccaagagcccccttgaacttggagagaagctatcaccactgcctgggggacctggggcaggggacccccggatctggccaggccggagcactccagagtcggacgttggggcaggaggagaagaggaggctggctcgccccccttctccccccctgcagggggaggagtccctgaggggactggggctggggggctggcagcaggtgggactgggggtggtccagaccgactggagccagagatggtacgcatggtggtggaaagtgtggagaggatcttccggagcttcccaaggggggatgctggggaggtcacatccctgctaaagctgaataagaagctggcacggagcgttgggcacatctttgagatggatgataatgacagccagaaggaagaggagatccgcaaatacagcatcatctatggccgtttcgactctaagcggcgggagggcaagcagctcagcctgcacgagctcaccatcaacgaggctgctgcccagttctgcatgagggacaacacgctcttattacggagagtggagctcttctctttgtcccgccaagtagcccgagagagcacctacttgtcctccttgaagggctccaggcttcaccctgaagaactgggaggccctccactgaagaagctgaaacaagaggttggagaacagagtcaccctgaaatccagcagcctcccccaggccctgagtcctatgtacccccataccgccccagcctggaggaggacagcgccagcctgtctggggagagtctggatggacatttgcaggagttcgaggaagggctgctggacagatgtcctgccccaggaccccatcccgcgctggtggagggtcgcaggagcagcgtgaaagtggaggctgaggccagccggcagtgagggttggactggtgtcttcagacccaggacctcagacttctggctcacacagacccccacgctctccatccccggaatctagtcacaaccctggatccttcctctgcccttctcctgcctccccacctgctccatgggcataagactgtggggcttcaagcaataacaagcagaggcctggagagaggacacaaggagggtgcgtggtgccctcacccctgcccagagcgagggggcaaggactctgcctccagggcatctggggttttcccctccctcacacaacacactcccattctctttaggtttgcaccagtggtgtgagcagttggactcagtttggacaagggggaaagggggacttccctgggaaggtccagctaaaagtggcaacatttgcccccagaattgggggcctgggaacactggacctgctccttctcccctctccttccccgtttttgtgcttctggtttgtttctttaattaatttaacaagtgctgcagtttgccctcccattcccatctatcccccaagtcctttgcaatttcttccctgccctacataggggcggtgggtgtgggatcccttcactggccccctcgggaggcctgggttggactcagggtctcctccagctgggggctggaccgcagcacctatctgagcagttagagcgtctttcttttcagattgtgtacagtagattatttattttgttattttggaataaaatttattttatggcttagg

SEQ ID NO: 282222 - DNA, 1386 bp, Artificial Sequence
  derived and/or modified sequence
atgcacagggccccttcaccaaccgccgaacagcccccaggtggcggagactcagctcggcgaacactgcagcccagacttaagcccagcgcgcgagcaatggccctgcctagaactctaggcgagcttcagctgtaccgtgtgctgcagcgggcaaatctactgagctattacgaaacttttattcaacaaggaggcgatgacgtgcagcagctctgtgaggccggagaggaggagtttctggaaatcatggctctggtaggtatggcaacaaagccgttgcatgtgcgcagactgcagaaggcgctacgagagtgggcgacaaatccgggtttgttttcccaacccgtgcccgctgttcctgtttcttcaatacctcttttcaaaatcagtgaaacggccggtacccgcaagggttccatgtctaatggtcacggaagtcccggagaaaaagctggcagcgctcgcagtttcagccccaagagcccactggaactgggggaaaagctttccccccttcctgggggacccggagccggtgatccacggatctggcctggccgatctacccctgaaagcgatgttggcgctggcggtgaggaggaggccggatccccccctttttctccccctgcgggaggcggtgtccccgaagggactggcgcagggggactagcagctggcggaaccggaggtggtcccgatcggcttgagccagagatggtcagaatggttgtggagagtgtcgaaaggatcttccgaagcttcccgaggggagacgctggtgaggttacgtctttactgaagctgaacaaaaagctggcacggtcagtaggacatatctttgaaatggacgacaatgacagccaaaaggaggaggaaatccggaagtatagtattatttacggcagattcgactccaagagacgtgaagggaaacagctgagcttgcatgagctgaccatcaatgaggcggctgctcaattttgcatgcgggacaacaccttactgctcagacgcgtagaactgttcagtctctctagacaggtggcacgagagtctacatatctgagcagcctaaaaggctcccgattgcaccccgaggaactgggaggccctccactcaagaaactgaagcaggaggtgggggaacagtcccatcccgagatccagcagccaccaccaggtcctgagagctacgttcccccttacagacctagtctggaggaagacagcgcaagcctcagcggtgagagtctggacggtcaccttcaggagttcgaagaagggctccttgatcgctgccccgctcctggcccacacccggcactagtggagggccgtagaagctcagttaaggtggaggctgaagcttctcggcagtag

SEQ ID NO: 282223 - DNA, 969 bp, Artificial Sequence
  derived and/or modified sequence
atgcacagggccccttctcccacagccgaacagcctccaggtggcggagatagtgcccgaaggactcttcagcctaggctaaagccaagcgctagggcaatggccctgcccaggactctgggagaactacagctctatcgggtgttgcaacgagctaatctcctctcatattacgagacgttcatccagcagggaggggacgacgtgcagcagttatgtgaggctggcgaggaagaattcctagaaataatggccctagtgggtatggcaactaagccacttcatgttcgccgacttcagaaagcgctgagggagtgggccaccaaccccggtttgttctcccaacctgttccagcggttcccgtgagttcgatacctctattcaaaatatctgagacagccggaaccagaaagggctcaatgagtaacgggcacggaagccccggagagaaggcgggttctgcacggagctttagccccaagtctccactggagctgggggaaaagctttcaccacttccaggtgggcctggggcaggggacccaagaatttggcccggacgctctacacccgaaagcgatgtcggcgctgggggtgaggaggaagccggatccccacccttttcaccccctgccggtggcggtgtgcctgagggaaccggggcagggggtttagcggctggcggtacaggcggtgggccagaccgcctggagcccgaaatggtgcgcatggttgtcgagagtgtggaacgaatttttcgctccttcccgaggggagacgctggcgaagtgacaagtttgttgaagctcaataaaaagcttgcacggagtgtcggacacattttcgagatggatgataacgacagtcagaaggaggaagaaatccgaaagtatagcatcatatacggcaggtttgatagtaaaaggagagaaggtaaacagctctcactgcatgaggcctctccctag

SEQ ID NO: 282224 - DNA, 1386 bp, Artificial Sequence
  derived and/or modified sequence
atgcacagagcccccagccccaccgccgagcagccccccggcggcggcgacagcgccagaagaaccctgcagcccagactgaagcccagcgccagagccatggccctgcccagaaccctgggcgagctgcagctgtacagagtgctgcagagagccaacctgctgagctactacgagaccttcatccagcagggcggcgacgacgtgcagcagctgtgcgaggccggcgaggaggagttcctggagatcatggccctggtgggcatggccaccaagcccctgcacgtgagaagactgcagaaggccctgagagagtgggccaccaaccccggcctgttcagccagcccgtgcccgccgtgcccgtgagcagcatccccctgttcaagatcagcgagaccgccggcaccagaaagggcagcatgagcaacggccacggcagccccggcgagaaggccggcagcgccagaagcttcagccccaagagccccctggagctgggcgagaagctgagccccctgcccggcggccccggcgccggcgaccccagaatctggcccggcagaagcacccccgagagcgacgtgggcgccggcggcgaggaggaggccggcagcccccccttcagcccccccgccggcggcggcgtgcccgagggcaccggcgccggcggcctggccgccggcggcaccggcggcggccccgacagactggagcccgagatggtgagaatggtggtggagagcgtggagagaatcttcagaagcttccccagaggcgacgccggcgaggtgaccagcctgctgaagctgaacaagaagctggccagaagcgtgggccacatcttcgagatggacgacaacgacagccagaaggaggaggagatcagaaagtacagcatcatctacggcagattcgacagcaagagaagagagggcaagcagctgagcctgcacgagctgaccatcaacgaggccgccgcccagttctgcatgagagacaacaccctgctgctgagaagagtggagctgttcagcctgagcagacaggtggccagagagagcacctacctgagcagcctgaagggcagcagactgcaccccgaggagctgggcggcccccccctgaagaagctgaagcaggaggtgggcgagcagagccaccccgagatccagcagcccccccccggccccgagagctacgtgcccccctacagacccagcctggaggaggacagcgccagcctgagcggcgagagcctggacggccacctgcaggagttcgaggagggcctgctggacagatgccccgcccccggcccccaccccgccctggtggagggcagaagaagcagcgtgaaggtggaggccgaggccagcagacagtag

SEQ ID NO: 282225 - DNA, 969 bp, Artificial Sequence
  derived and/or modified sequence
atgcacagagcccccagccccaccgccgagcagccccccggcggcggcgacagcgccagaagaaccctgcagcccagactgaagcccagcgccagagccatggccctgcccagaaccctgggcgagctgcagctgtacagagtgctgcagagagccaacctgctgagctactacgagaccttcatccagcagggcggcgacgacgtgcagcagctgtgcgaggccggcgaggaggagttcctggagatcatggccctggtgggcatggccaccaagcccctgcacgtgagaagactgcagaaggccctgagagagtgggccaccaaccccggcctgttcagccagcccgtgcccgccgtgcccgtgagcagcatccccctgttcaagatcagcgagaccgccggcaccagaaagggcagcatgagcaacggccacggcagccccggcgagaaggccggcagcgccagaagcttcagccccaagagccccctggagctgggcgagaagctgagccccctgcccggcggccccggcgccggcgaccccagaatctggcccggcagaagcacccccgagagcgacgtgggcgccggcggcgaggaggaggccggcagcccccccttcagcccccccgccggcggcggcgtgcccgagggcaccggcgccggcggcctggccgccggcggcaccggcggcggccccgacagactggagcccgagatggtgagaatggtggtggagagcgtggagagaatcttcagaagcttccccagaggcgacgccggcgaggtgaccagcctgctgaagctgaacaagaagctggccagaagcgtgggccacatcttcgagatggacgacaacgacagccagaaggaggaggagatcagaaagtacagcatcatctacggcagattcgacagcaagagaagagagggcaagcagctgagcctgcacgaggccagcccctag

SEQ ID NO: 282226 - protein, 373 aa, Artificial Sequence
  derived and/or modified sequence
MSPCPPQQSRNRVIQLSTSELGEMELTWQEIMSITELQGLNAPSEPSFEPQAPAPYLGPPPPTTYCPCSIHPDSGFPLPPPPYELPASTSHVPDPPYSYGNMAIPVSKPLSLSGLLSEPLQDPLALLDIGLPAGPPKPQEDPESDSGLSLNYSDAESLELEGTEAGRRRSEYVEMYPVEYPYSLMPNSLAHSNYTLPAAETPLALEPSSGPVRAKPTARGEAGSRDERRALAMKIPFPTDKIVNLPVDDFNELLARYPLTESQLALVRDIRRRGKNKVAAQNCRKRKLETIVQLERELERLTNERERLLRARGEADRTLEVMRQQLTELYRDIFQHLRDESGNSYSPEEYALQQAADGTIFLVPRGTKMEATD

SEQ ID NO: 282227 - protein, 343 aa, Artificial Sequence
  derived and/or modified sequence
MSPCPPQQSRNRVIQLSTSELGEMELTWQEIMSITELQGLNAPSEPSFEPQAPAPYLGPPPPTTYCPCSIHPDSGFPLPPPPYELPASTSHVPDPPYSYGNMAIPVSKPLSLSGLLSEPLQDPLALLDIGLPAGPPKPQEDPESDSGLSLNYSDAESLELEGTEAGRRRSEYVEMYPVEYPYSLMPNSLAHSNYTLPAAETPLALEPSSGPVRAKPTARGEAGSRDERRALAMKIPFPTDKIVNLPVDDFNELLARYPLTESQLALVRDIRRRGKNKVAAQNCRKRKLETIVQLERELERLTNERERLLRARGEADRTLEVMRQQLTELYRDIFQHLRDESGN

SEQ ID NO: 282228 - DNA, 1678 bp, Artificial Sequence
  derived and/or modified sequence
gcatatactgtcatcatcttggaaagaaaaggctgagaacgtaaaactgaggacagaggaggaaagcagggtgacccctgatgttgccctagaaaatggaaaacaaaacacagcaaaacagaaaaacagaagatctgactctgcctttagccaggaaaacagtttgggggagtaaaaagtattagggaaaagagtgggcattttgcctggaaaaaaggtttctagagccatctgggctttccgggaacctggaccagactctggcccagtaggatgtccccgtgtcctccccagcagagcaggaacagggtgatacagctgtccacttcagagctaggagagatggaactgacttggcaggagatcatgtccatcaccgagctgcagggtctgaatgctccaagtgagccatcatttgagccccaagccccagctccataccttggacctccaccacccacaacttactgcccctgctcaatccacccagattctggcttcccacttcctccaccaccttatgagctcccagcatccacatcccatgtcccagatcccccatactcctatggcaacatggccataccagtctccaagccactgagcctctcaggcctgctcagtgagccgctccaagaccccttagccctcctggacattgggctgccagcagggccacctaagccccaagaagacccagaatccgactcaggattatccctcaactatagcgatgctgaatctcttgagctggaggggacagaggctggtcggcggcgcagcgaatatgtagagatgtacccagtggagtacccctactcactcatgcccaactccttggcccactccaactataccttgccagctgctgagacccccttggccttagagccctcctcaggccctgtgcgggctaagcccactgcacggggggaggcagggagtcgggatgaacgtcgggccttggccatgaagattccttttcctacggacaagattgtcaacttgccggtagatgactttaatgagctattggcaaggtacccgctgacagagagccagctagcgctagtccgggacatccgacgacggggcaaaaacaaggtggcagcccagaactgccgcaagaggaagctggaaaccattgtgcagctggagcgggagctggagcggctgaccaatgaacgggagcggcttctcagggcccgcggggaggcagaccggaccctggaggtcatgcgccaacagctgacagagctgtaccgtgacattttccagcaccttcgggatgaatcaggcaacagctactctcctgaagagtacgcgctgcaacaggctgccgatgggaccatcttccttgtgccccgggggaccaagatggaggccacagactgagctggcccagaggggtggaactgctgatgggatttccttcattcccttctgataaaggtactccccaaccctgagtcccagaaggagctgagttctctagaccagaagaggatgacaatggcaacaagtgtttggaagttccaaggtgtgttcaaagaggcttgccttgagggagggctggaatctgtcttccctgactcggctcctcaggtctttagcctccaccttgtctaagctttggtctataaagtgcgctacagaaaaaaaaaaaaaaaaaaaaaaa

SEQ ID NO: 282229 - DNA, 1122 bp, Artificial Sequence
  derived and/or modified sequence
atgtcaccatgcccaccacagcagtccagaaaccgtgtgatccagctgagcaccagtgagcttggcgagatggagctgacctggcaggagatcatgtccattaccgaactgcagggacttaacgctccttcagaaccatcatttgaaccccaagcaccagctccatatctgggtcccccaccccccacaacctactgtccctgctccatccatcccgatagtggattccccctccctcctcctccatatgagttgcctgcctcaactagccacgttcctgatcccccctattcctacggaaacatggcaatccctgtatcgaagcccctaagtctctctggcctgctgtccgaaccattgcaggacccactggctctgctcgacataggcctcccagctggcccaccaaagcctcaggaagatcctgaaagcgatagtggcctgtcactcaattattcagacgcggagagcctcgaactggagggaaccgaagccgggcgcagacgcagcgagtatgttgaaatgtaccctgttgagtacccatattcactgatgcctaactcgctcgcccattccaactatacattgcctgctgcagaaactcccctggccctcgagccctctagcggacctgtcagggcaaaacccactgcgcgcggggaagctgggagccgcgatgagcgcagggctctggccatgaagattccattccctactgacaaaattgtcaatctgcccgtggacgattttaacgaacttctggctaggtacccactcacggaatcccagttggcgctggtgcgcgatatccgcagacgtggaaagaacaaagtggccgcacaaaattgtcgtaagcgcaagctggagacaatcgtgcagcttgagcgcgaactggagagacttaccaatgaaagagaacgtctgctgcgcgctcggggagaggccgataggaccctagaagtaatgcggcagcagctgactgaactgtatcgagacatttttcagcacctgcgcgacgagagcggaaactcttatagtcccgaagaatacgccctgcaacaagcagccgacggcactatcttccttgtccctagaggtacaaagatggaggccactgattag

SEQ ID NO: 282230 - DNA, 1122 bp, Artificial Sequence
  derived and/or modified sequence
atgagcccatgccccccacagcagtctcggaatagggtgatacagttgtcaacatcagagcttggcgagatggaactgacatggcaggaaatcatgtctatcaccgagctgcagggcctgaatgccccttcagaacctagcttcgagccacaggcccccgcgccttatctgggcccgcctccaccaactacatattgtccatgttccattcatcccgactccggattccctctgccgcctccgccgtacgaactaccggcctccacaagccatgtgcccgaccccccttatagctatggaaatatggctataccagtgagcaaacctctgtctttaagcggcctgctgtctgagccactgcaggatcccctggctctgctcgacatcgggctaccagccggcccacctaaacctcaggaggacccagaatcagactccggtctgagtctgaattacagtgacgcagagtctttggaactcgagggaactgaggctggccgcaggcggtcagagtatgttgagatgtatccagtagagtatccttacagcctcatgccaaacagcctggcccactccaattatactctgcctgcggccgagactcccctcgctttagaacccagctccggccccgtgcgggcaaaacctacagctcggggagaggctggcagccgagacgaaaggagagctcttgccatgaaaattccatttccgactgacaagatcgtgaacctccccgtagacgacttcaatgagctgctagctcgttacccgctgaccgagtctcagttggcccttgtccgtgatattcgccggcgcgggaaaaacaaagttgccgcacagaattgtaggaagcgcaagctggagactatcgtccagctcgagagagagctggaaagactgaccaatgaaagagaacgccttttgagagcgcggggggaggccgaccggacgctggaggtcatgagacagcagcttactgagctttatagggatatcttccaacacctgagagacgagagcggaaattcatattcccctgaagagtacgccttgcagcaggccgccgatgggacaatctttttggttccaagaggcacaaaaatggaagccacagactag

SEQ ID NO: 282231 - DNA, 1122 bp, Artificial Sequence
  derived and/or modified sequence
atgagcccatgtccaccgcagcagtcgcgaaatagagtgatacagctgagcacatcagaactcggtgagatggagctgacctggcaggagatcatgagtatcactgagctgcagggcctcaatgccccttccgaacctagctttgagcctcaggcacctgcaccttatctggggccccccccgcccaccacctactgtccatgttcgatccatcccgattctggatttccactgcctcctccaccatatgagctacccgccagtactagccatgtgccagatcctccttattcttacggtaacatggccatacccgttagtaagcctctgagcctttcagggcttttgtctgagccgctccaggatccgctggcacttttagatatcggactccctgctgggcctccaaaaccccaggaggacccggagagtgattctggcctgagtctaaattatagtgacgcagagagtttagagttggagggcacagaagcaggaagacggcggtcagagtacgtcgaaatgtatcccgttgagtacccatacagtcttatgcctaacagtcttgcacacagcaactacaccctccccgccgcagaaacaccacttgctctcgaaccaagctctggtcccgttagagctaagcctactgcgcggggggaggccggatcaagggatgaacgacgagctcttgcaatgaagattcctttcccgacggataagatagtgaacttgcccgttgacgatttcaacgaactgctcgcccggtaccctctaaccgagagtcagctggcactggtgagggacatcaggaggaggggcaaaaacaaggtggctgcacagaattgtcgcaagcgcaagctcgagacaatcgtgcaactggaacgtgagctggaacgcctgaccaatgaacgtgaaagactcttgcgcgctaggggggaggccgaccggacactcgaggtgatgcgccagcagctgactgagctgtaccgggacatcttccaacatctgagggatgagagtgggaacagctactctcccgaggagtatgcattacagcaagctgcggacggtacaatctttctggtgccaagggggactaagatggaagccaccgattag

SEQ ID NO: 282232 - DNA, 1122 bp, Artificial Sequence
  derived and/or modified sequence
atgagtccctgccctccgcagcagtcccgcaatcgtgtgatacagttgagcacaagtgagctgggggagatggaactcacttggcaggagattatgagcataaccgagctgcaggggcttaatgctccttccgagccttcatttgaacctcaggccccagctccttatctgggtcctccacctcccacaacatactgcccatgctccatccatccggactccggattcccactgccgcctcctccctacgagttgccagcgagtacaagtcacgttccagacccaccttactcatacggcaatatggcaattccagtatcaaagcccctaagcttgtccggcttattgagcgagcccttgcaggacccactggcactgctcgatatcggactgccagcaggcccgccgaagccacaggaagatcccgagtccgactcaggattatcactcaactattcagatgctgagagcctggagcttgaaggtaccgaagccggtagaaggcgtagcgaatatgtcgaaatgtatccagtagagtacccgtacagcttgatgccaaattccttagcgcatagcaactacactctgcccgctgcggagacccccctggccctggagcctagcagtggcccagtgcgagcaaagcccactgccaggggagaagcaggctctagggacgagcggcgtgccctggccatgaaaattccttttcctaccgacaagatagtcaacctgcccgtggatgactttaatgagctactggctaggtaccctctgacggagtcacagctcgccctagtgcgcgatattcgcagacgagggaagaacaaagttgctgcgcaaaactgccgcaagcggaagctggaaacaatcgtgcagcttgagcgcgaacttgaaaggctaactaatgagagggaacgtctgttacgcgctagaggtgaggctgataggaccctggaagtaatgcgccagcagcttaccgaactttatcgcgacatcttccagcacctgcgcgatgagagtgggaacagttacagccctgaagagtacgctctccagcaagcagcagacgggaccattttcctggtgccccgcgggaccaagatggaggccaccgactag

SEQ ID NO: 282233 - DNA, 1032 bp, Artificial Sequence
  derived and/or modified sequence
atgtcaccctgcccaccgcagcagtcacggaatagagtcatccagctttccacatctgagttgggcgagatggaactgacgtggcaagaaatcatgtcaatcaccgagctgcagggtctaaacgccccatccgagccttcttttgaaccacaagcccctgcaccgtacctgggtccccccccgcctacaacttactgcccatgttccattcatccggattccggcttccccctgcccccacccccgtacgaactgcccgccagcacatctcacgtacctgatcctccttactcctacggtaacatggctattccagtgtcgaagccgctcagtctgtctggcctcctaagcgagccacttcaggatcccctagctctcctagacatcgggctgcccgcaggcccccccaaacctcaggaggatcctgagtcggactccgggctgagcctgaactatagtgacgccgagtcactggaactggagggcactgaagctggaagacgtagaagtgagtacgtggagatgtaccccgtggagtatccatatagcttgatgccaaacagcttggctcatagcaactataccttacctgccgccgagacaccactcgcactggagccaagctctggacccgtgcgggcaaaacctacagcccggggagaggccgggtcacgtgacgagcgcagggccctggctatgaagatcccatttcctacggacaagattgtaaacctccccgttgatgactttaacgaactgctagcgcgatacccactcactgagagtcagcttgccctagttcgggatatcagaaggcgtggcaaaaacaaggttgctgctcagaactgtaggaagcgtaagctggaaacaatagtacagcttgagcgtgagctcgaacgcctgaccaatgagagggaaagactgctgcgcgctcggggggaagcagataggacacttgaggtaatgcgacagcagctgaccgaactgtatcgggacattttccaacacctgagggacgaatctggaaactag

SEQ ID NO: 282234 - DNA, 1122 bp, Artificial Sequence
  derived and/or modified sequence
atgagcccctgccccccccagcagagcaggaacagagtcatccagctgagcaccagcgagctgggggagatggagctgacctggcaggagatcatgagcatcacagagctgcagggcctgaatgcccccagcgagcccagctttgagccccaggccccagccccctacctgggccccccaccacccaccacctactgcccctgcagcatccacccagacagcggcttccccctgcccccaccaccctatgagctgcctgccagcaccagccacgtgcctgaccccccctacagctatggcaacatggccatccctgtgtccaagcccctgagcctgagcggcctgctgtctgagcccctgcaggaccccctggccctgctggacatcggcctgcctgctggcccccccaagccccaggaggaccctgagagtgacagcggcctgagcctgaactacagtgatgctgagagcctggagctggagggcacagaagctggaagaagaagaagtgaatatgtggagatgtaccctgtggagtacccctacagcctgatgcccaacagcctggcccacagcaactacaccctgcctgctgctgagacccccctggccctggagcccagcagcggccctgtgcgggccaagcccacagcccggggggaggccggcagcagagatgagcggcgggccctggccatgaagatccccttccccacagacaagatcgtgaacctgcctgtggatgacttcaatgagctgctggcccgctaccccctgacagagagccagctggccctggtgcgggacatcagaagaagaggcaagaacaaggtggccgcccagaactgcaggaagaggaagctggagaccatcgtgcagctggagcgggagctggagcggctgaccaatgaaagagagcggctgctgcgggcccggggggaggccgacaggaccctggaggtgatgaggcagcagctgacagagctgtacagagacatcttccagcacctgagagatgaaagtggcaacagctacagccctgaggagtatgccctgcagcaggccgcagatggcaccatcttcctggtgccccggggcaccaagatggaggccacagactag

SEQ ID NO: 282235 - DNA, 1032 bp, Artificial Sequence
  derived and/or modified sequence
atgagcccctgccccccccagcagagcaggaacagagtcatccagctgagcaccagcgagctgggggagatggagctgacctggcaggagatcatgagcatcacagagctgcagggcctgaatgcccccagcgagcccagctttgagccccaggccccagccccctacctgggccccccaccacccaccacctactgcccctgcagcatccacccagacagcggcttccccctgcccccaccaccctatgagctgcctgccagcaccagccacgtgcctgaccccccctacagctatggcaacatggccatccctgtgtccaagcccctgagcctgagcggcctgctgtctgagcccctgcaggaccccctggccctgctggacatcggcctgcctgctggcccccccaagccccaggaggaccctgagagtgacagcggcctgagcctgaactacagtgatgctgagagcctggagctggagggcacagaagctggaagaagaagaagtgaatatgtggagatgtaccctgtggagtacccctacagcctgatgcccaacagcctggcccacagcaactacaccctgcctgctgctgagacccccctggccctggagcccagcagcggccctgtgcgggccaagcccacagcccggggggaggccggcagcagagatgagcggcgggccctggccatgaagatccccttccccacagacaagatcgtgaacctgcctgtggatgacttcaatgagctgctggcccgctaccccctgacagagagccagctggccctggtgcgggacatcagaagaagaggcaagaacaaggtggccgcccagaactgcaggaagaggaagctggagaccatcgtgcagctggagcgggagctggagcggctgaccaatgaaagagagcggctgctgcgggcccggggggaggccgacaggaccctggaggtgatgaggcagcagctgacagagctgtacagagacatcttccagcacctgagagatgaaagtggcaactag

SEQ ID NO: 282236 - DNA, 1122 bp, Artificial Sequence
  derived and/or modified sequence
atgagcccctgccccccccagcagagccggaaccgggtgatccagttgagcacatccgagttaggtgagatggaactgacctggcaagagataatgagtataaccgaattgcagggtctgaatgcgccctctgaacctagcttcgagccacaggctccggctccgtatctggggcctccacctccaaccacctattgtccttgctcaatacaccctgattcggggtttcctctgcccccccctccatacgaacttccggcgtcaacatctcacgtccctgaccctccatatagttatggaaatatggctatcccagtgtccaaacctctgtcactatccgggcttctgtctgaacccctgcaggaccccctggccctgctggatattgggttacccgccgggcccccaaaacctcaagaggatccagaatccgattcaggactgtcattgaattactcagacgccgagtctctcgagttggaagggactgaggcaggtcggaggcgctccgaatatgttgagatgtaccccgtggagtatccttattctttaatgccgaactcattagcccacagtaactataccctccccgctgccgagactccattggcccttgaaccctctagtggaccagtacgggcgaagcctaccgcccggggagaagcaggctctcgagacgagaggagggctctcgcaatgaagatcccgttccctacagataagatcgtcaacctgcccgtagatgacttcaatgaactgttagcacgctaccccctaaccgagagccagctggctctcgtgcgcgatattcgaaggagggggaagaacaaggtggctgcgcagaattgccgcaagagaaagctggaaaccattgtccagctggagagggagttggagcggctgaccaacgagcgcgagcggctgttgagggcacgcggggaggcggatagaacgctcgaggtgatgagacaacagttgaccgagctgtaccgcgacatttttcagcacctgcgtgacgaatccggcaactcttacagtcccgaagagtatgcactccaacaggccgccgacggcactatattccttgtgcccagggggacgaaaatggaagcaaccgattag

SEQ ID NO: 282237 - DNA, 1122 bp, Artificial Sequence
  derived and/or modified sequence
atgagcccctgccccccccagcagagccggaaccgggtgatccagctgagcacctcggaactaggcgagatggaactgacctggcaggaaattatgtctatcacagagctccaggggcttaacgctcccagcgaaccaagctttgagccgcaggcccctgccccttacttgggccccccacctccaacaacttactgcccttgttctatacaccctgatagcggcttcccccttccgccccctccttatgagctccctgctagcacatcgcatgtccccgatcctccctactcgtacgggaatatggcaatcccggtttcaaaacctctttcgctctctggcctgttaagcgagccattgcaggaccccctggcgctccttgacatcggactgccggccggtccccccaaaccacaggaagacccagagagtgactctggcctgtctctgaactattctgacgcagagagccttgagctggagggcaccgaagccgggagacgaaggtccgaatatgtggagatgtatcctgtcgagtatccatactccctcatgccaaactccctcgctcacagcaactacaccctccctgccgcagaaacccccctggccctggaaccctcgagtgggccggtgcgggccaaacccactgctaggggagaggcgggcagtagagacgagcggagggcattggcaatgaaaataccctttccaactgataaaatcgtgaatctgccagttgatgatttcaacgagctgttagcaagatacccccttaccgaaagccagctcgccctggtgcgagatatccggaggagagggaaaaacaaggtcgccgcccagaactgtagaaagcggaagctcgaaaccattgtgcagctggagcgagagctggaaaggcttactaatgagagagagcgactgcttcgagcccgaggcgaggcagaccggacactcgaagtgatgcgtcagcagcttaccgaactgtatagagacatctttcaacaccttagagatgagagtggcaatagctattctccagaggagtatgcacttcagcaggccgcagatggcaccatcttcctcgttcctcgaggcaccaaaatggaggccacagactag

SEQ ID NO: 282238 - DNA, 1122 bp, Artificial Sequence
  derived and/or modified sequence
atgagcccctgccccccccagcagagccggaaccgggtgatccagctctctaccagcgagctgggggagatggagctgacctggcaggaaatcatgtctatcaccgaacttcaaggactgaacgccccaagcgagccgagctttgagccacaagctcccgcgccttacctcggccccccacctcccacgacgtattgtccatgcagtatccaccctgactcagggtttcccctacctccacccccatatgagctccccgcgagcacttcacatgttccagaccccccttactcctacggcaatatggccattccagtgtccaagccactgtccctgagtggactgttatccgagccactgcaggaccccttggctctgctcgacatcggtctccctgcagggccccctaagcctcaggaagatcctgaatccgattcagggctctcactcaattactccgacgcagaatccctcgagctggaaggtaccgaggccgggcggcgccgctctgaatacgtggagatgtaccccgtggaatacccttatagcctgatgcccaatagcctggcccacagcaactacacactgcccgcagctgagacaccactcgcattggagccttcctccggcccagtaagggctaagcctactgctcggggcgaagctggctcccgggacgaaagaagagcgctggcaatgaagataccattccccaccgataagatcgttaaccttccagtggacgattttaatgaactgttggcccgctatcctttgacagaaagccagctggctctggtgcgcgacatcaggcgtcgtggtaagaataaagttgctgcacagaattgtaggaagcggaaactcgagactatcgttcaactagaaagagagttggagcggctgaccaacgaacgcgagagacttttacgggcacggggcgaggcggaccgcactctggaagtcatgcgtcagcagctcactgagctgtatcgtgatattttccagcatctgcgagacgaatccggcaacagttactcccccgaggaatatgccctccagcaagctgctgacgggactattttccttgtaccaagggggaccaaaatggaggccacagattag

SEQ ID NO: 282239 - DNA, 1122 bp, Artificial Sequence
  derived and/or modified sequence
atgagcccctgccccccccagcagagccggaaccgggtgatccagctctcgaccagcgagcttggcgaaatggagcttacatggcaggaaatcatgtctattaccgagctgcaaggcctcaacgcaccaagtgaaccctctttcgaaccacaggccccagctccatacctcggccctcctccaccaacaacctactgcccttgcagcatacaccccgactccggattccccctcccaccacccccgtacgagctgccagcatcaaccagtcacgtaccagatcccccatattcatatggaaatatggcaattccagtcagtaagccattgagcctgtctgggctgctgagtgagcccttgcaggaccccctcgcattgttagacatcggactcccagcagggccacccaagccccaagaggatcctgaatccgactcaggccttagtctgaattactctgacgctgagagtctggagctcgaaggcactgaggctggccgccgccggtctgagtacgtcgagatgtatccagtcgagtacccttactcgctcatgcctaactccctggcacactcaaattacacactgcctgcagctgagacaccactggccctcgagccttcttccggcccagtccgtgctaaacctaccgccagaggggaggctggaagtagagacgaacgccgagcccttgcgatgaagatccctttccctaccgataagattgtcaatctccccgttgacgactttaacgagcttctggcgagatatcctctgactgaaagtcaactggctctggtccgggacattcgccgacgcggcaagaacaaagttgcggcacagaactgcaggaagcgcaaactggagaccattgtgcagctcgaaagagagcttgaaaggcttacaaacgagagggaacgtctgctgcgtgctcgaggggaggcggaccgcaccctagaggttatgcgccaacagctgacagaactataccgggacatattccagcacttaagagatgagtccggcaacagctactctcctgaagaatacgccctccaacaagcagcggacggcaccatatttctggtgcctcgcggcactaagatggaggcaaccgattag

SEQ ID NO: 282240 - DNA, 1032 bp, Artificial Sequence
  derived and/or modified sequence
atgagcccctgccccccccagcagagccggaaccgggtgatccagctcagcactagtgagctgggggagatggaactcacatggcaagaaatcatgtctatcaccgaactgcaggggctgaatgccccatccgaaccgtcgttcgaaccacaggccccagcgccctacctcggcccacctcccccaacgacctattgtccatgtagcattcacccagatagcggatttcccttgccacctcctccatatgagctgcccgcttcaacctcccacgtgcctgacccaccttactcatatgggaacatggcaattcccgtgtccaaacccctgtctctatcaggtctgctcagcgaacccctacaagacccgcttgcattactggatattggactgcctgcaggccccccaaagccccaggaggacccagagtctgattcaggccttagcctgaattattccgacgcagaaagtctcgaactggagggcacagaggccggcaggcgcaggtctgaatatgttgagatgtaccccgtggaatacccatatagtctaatgcctaactcgctcgctcatagtaattatacactgccagccgccgagacccctttagctctagaaccctctagtgggccagttagggcaaagcccactgcccggggcgaagccggtagccgagacgagaggagagcactcgccatgaagatccctttcccgaccgacaaaatagtgaacctgcccgtggatgatttcaacgagttactcgcacgctaccctctcactgagtcacagctggcgctggtccgcgatatcaggagaagaggaaagaacaaagttgctgcccagaactgccgcaaaagaaagcttgagaccatcgtccagctggagcgcgagctggagcggctgactaacgagagggagcggttgctgagggcacggggagaggccgataggacactggaagtgatgcgacagcagttaacagaactgtaccgtgatatctttcagcacctccgagacgagtccgggaattag

SEQ ID NO: 282241 - DNA, 1658 bp, Artificial Sequence
  derived and/or modified sequence
gcatatactgtcatcatcttggaaagaaaaggctgagaacgtaaaactgaggacagaggaggaaagcagggtgacccctgatgttgccctagaaaatggaaaacaaaacacagcaaaacagaaaaacagaagatctgactctgcctttagccaggaaaacagtttgggggagtaaaaagtattagggaaaagagtgggcattttgcctggaaaaaaggtttctagagccatctgggctttccgggaacctggaccagactctggcccagtaggatgtccccgtgtcctccccagcagagcaggaacagggtgatacagctgtccacttcagagctaggagagatggaactgacttggcaggagatcatgtccatcaccgagctgcagggtctgaatgctccaagtgagccatcatttgagccccaagccccagctccataccttggacctccaccacccacaacttactgcccctgctcaatccacccagattctggcttcccacttcctccaccaccttatgagctcccagcatccacatcccatgtcccagatcccccatactcctatggcaacatggccataccagtctccaagccactgagcctctcaggcctgctcagtgagccgctccaagaccccttagccctcctggacattgggctgccagcagggccacctaagccccaagaagacccagaatccgactcaggattatccctcaactatagcgatgctgaatctcttgagctggaggggacagaggctggtcggcggcgcagcgaatatgtagagatgtacccagtggagtacccctactcactcatgcccaactccttggcccactccaactataccttgccagctgctgagacccccttggccttagagccctcctcaggccctgtgcgggctaagcccactgcacggggggaggcagggagtcgggatgaacgtcgggccttggccatgaagattccttttcctacggacaagattgtcaacttgccggtagatgactttaatgagctattggcaaggtacccgctgacagagagccagctagcgctagtccgggacatccgacgacggggcaaaaacaaggtggcagcccagaactgccgcaagaggaagctggaaaccattgtgcagctggagcgggagctggagcggctgaccaatgaacgggagcggcttctcagggcccgcggggaggcagaccggaccctggaggtcatgcgccaacagctgacagagctgtaccgtgacattttccagcaccttcgggatgaatcaggcaacagctactctcctgaagagtacgcgctgcaacaggctgccgatgggaccatcttccttgtgccccgggggaccaagatggaggccacagactgagctggcccagaggggtggaactgctgatgggatttccttcattcccttctgataaaggtactccccaaccctgagtcccagaaggagctgagttctctagaccagaagaggatgacaatggcaacaagtgtttggaagttccaaggtgtgttcaaagaggcttgccttgagggagggctggaatctgtcttccctgactcggctcctcaggtctttagcctccaccttgtctaagctttggtctataaagtgcgctacagaaa

SEQ ID NO: 282242 - DNA, 1762 bp, Artificial Sequence
  derived and/or modified sequence
atcgggctcaagtttcctctcttggccgaaaggggcaggaggagaggagagccacggggaaaggggagggttggaggaaggactgagaactcaggccgagggcttcagacgctggtgcgcctgcttggggctcctgtgctcagctcagcctgagcttccacactcagcgctcagcaatggcccgggggcggggcgcggtcctcgcagattctcaaaggtagccgggatcctcgtccagcagtgtcagctcaggctcagcctccccagagacaacaccgggagcctcatctctctcctcaccctgctgtgactccaccacaggtttctagagccatctgggctttccgggaacctggaccagactctggcccagtaggatgtccccgtgtcctccccagcagagcaggaacagggtgatacagctgtccacttcagagctaggagagatggaactgacttggcaggagatcatgtccatcaccgagctgcagggtctgaatgctccaagtgagccatcatttgagccccaagccccagctccataccttggacctccaccacccacaacttactgcccctgctcaatccacccagattctggcttcccacttcctccaccaccttatgagctcccagcatccacatcccatgtcccagatcccccatactcctatggcaacatggccataccagtctccaagccactgagcctctcaggcctgctcagtgagccgctccaagaccccttagccctcctggacattgggctgccagcagggccacctaagccccaagaagacccagaatccgactcaggattatccctcaactatagcgatgctgaatctcttgagctggaggggacagaggctggtcggcggcgcagcgaatatgtagagatgtacccagtggagtacccctactcactcatgcccaactccttggcccactccaactataccttgccagctgctgagacccccttggccttagagccctcctcaggccctgtgcgggctaagcccactgcacggggggaggcagggagtcgggatgaacgtcgggccttggccatgaagattccttttcctacggacaagattgtcaacttgccggtagatgactttaatgagctattggcaaggtacccgctgacagagagccagctagcgctagtccgggacatccgacgacggggcaaaaacaaggtggcagcccagaactgccgcaagaggaagctggaaaccattgtgcagctggagcgggagctggagcggctgaccaatgaacgggagcggcttctcagggcccgcggggaggcagaccggaccctggaggtcatgcgccaacagctgacagagctgtaccgtgacattttccagcaccttcgggatgaatcaggcaacagctactctcctgaagagtacgcgctgcaacaggctgccgatgggaccatcttccttgtgccccgggggaccaagatggaggccacagactgagctggcccagaggggtggaactgctgatgggatttccttcattcccttctgataaaggtactccccaaccctgagtcccagaaggagctgagttctctagaccagaagaggatgacaatggcaacaagtgtttggaagttccaaggtgtgttcaaagaggcttgccttgagggagggctggaatctgtcttccctgactcggctcctcaggtctttagcctccaccttgtctaagctttggtctataaagtgcgctacagaaa

SEQ ID NO: 282243 - DNA, 1833 bp, Artificial Sequence
  derived and/or modified sequence
atatactgtcatcatcttggaaagaaaaggctgagaacgtaaaactgaggacagaggaggaaagcagggtgacccctgatgttgccctagaaaatggaaaacaaaacacagcaaaacagaaaaacagaagatctgactctgcctttagccaggaaaacagtttgggggagtaaaaagtattagggaaaagagtgggcattttgcctggaaaaaaggtaaagacctcctgtgctaccaaaggaactgactgtggccatagttggcgaggtggagatcacaacacaggaaaagactttccatcttaagggattgatgaatccagcatgagtgaggatggggaggaggcggtctctccttccctcaggggaagctggagggagcccctccaaggaggtagtgcaaacttgctgaccctagcaggtgtagctctaacacctcttttcctttgacacaggtttctagagccatctgggctttccgggaacctggaccagactctggcccagtaggatgtccccgtgtcctccccagcagagcaggaacagggtgatacagctgtccacttcagagctaggagagatggaactgacttggcaggagatcatgtccatcaccgagctgcagggtctgaatgctccaagtgagccatcatttgagccccaagccccagctccataccttggacctccaccacccacaacttactgcccctgctcaatccacccagattctggcttcccacttcctccaccaccttatgagctcccagcatccacatcccatgtcccagatcccccatactcctatggcaacatggccataccagtctccaagccactgagcctctcaggcctgctcagtgagccgctccaagaccccttagccctcctggacattgggctgccagcagggccacctaagccccaagaagacccagaatccgactcaggattatccctcaactatagcgatgctgaatctcttgagctggaggggacagaggctggtcggcggcgcagcgaatatgtagagatgtacccagtggagtacccctactcactcatgcccaactccttggcccactccaactataccttgccagctgctgagacccccttggccttagagccctcctcaggccctgtgcgggctaagcccactgcacggggggaggcagggagtcgggatgaacgtcgggccttggccatgaagattccttttcctacggacaagattgtcaacttgccggtagatgactttaatgagctattggcaaggtacccgctgacagagagccagctagcgctagtccgggacatccgacgacggggcaaaaacaaggtggcagcccagaactgccgcaagaggaagctggaaaccattgtgcagctggagcgggagctggagcggctgaccaatgaacgggagcggcttctcagggcccgcggggaggcagaccggaccctggaggtcatgcgccaacagctgacagagctgtaccgtgacattttccagcaccttcgggatgaatcaggcaacagctactctcctgaagagtacgcgctgcaacaggctgccgatgggaccatcttccttgtgccccgggggaccaagatggaggccacagactgagctggcccagaggggtggaactgctgatgggatttccttcattcccttctgataaaggtactccccaaccctgagtcccagaaggagctgagttctctagaccagaagaggatgacaatggcaacaagtgtttggaagttccaaggtgtgttcaaagaggcttgccttgagggagggctggaatctgtcttccctgactcg

SEQ ID NO: 282244 - DNA, 1523 bp, Artificial Sequence
  derived and/or modified sequence
agacgctggtgcgcctgcttggggctcctgtgctcagctcagcctgagcttccacactcagcgctcagcaatggcccgggggcggggcgcggtcctcgcagattctcaaaggtagccgggatcctcgtccagcagtgtcagctcaggctcagcctccccagagacaacaccgggagcctcatctctctcctcaccctgctgtgactccaccacaggggcagtagagatcagctggacctggagggagaaggaagacatcccaaccccagcatagttgcttctaactggaactcttggctgcttgggaaataggggcttgggaagcagtggaagagaagagaggaggtttctagagccatctgggctttccgggaacctggaccagactctggcccagtaggatgtccccgtgtcctccccagcagagcaggaacagggtgatacagctgtccacttcagagctaggagagatggaactgacttggcaggagatcatgtccatcaccgagctgcagggtctgaatgctccaagtgagccatcatttgagccccaagccccagctccataccttggacctccaccacccacaacttactgcccctgctcaatccacccagattctggcttcccacttcctccaccaccttatgagctcccagcatccacatcccatgtcccagatcccccatactcctatggcaacatggccataccagtctccaagccactgagcctctcaggcctgctcagtgagccgctccaagaccccttagccctcctggacattgggctgccagcagggccacctaagccccaagaagacccagaatccgactcaggattatccctcaactatagcgatgctgaatctcttgagctggaggggacagaggctggtcggcggcgcagcgaatatgtagagatgtacccagtggagtacccctactcactcatgcccaactccttggcccactccaactataccttgccagctgctgagacccccttggccttagagccctcctcaggccctgtgcgggctaagcccactgcacggggggaggcagggagtcgggatgaacgtcgggccttggccatgaagattccttttcctacggacaagattgtcaacttgccggtagatgactttaatgagctattggcaaggtacccgctgacagagagccagctagcgctagtccgggacatccgacgacggggcaaaaacaaggtggcagcccagaactgccgcaagaggaagctggaaaccattgtgcagctggagcgggagctggagcggctgaccaatgaacgggagcggcttctcagggcccgcggggaggcagaccggaccctggaggtcatgcgccaacagctgacagagctgtaccgtgacattttccagcaccttcgggatgaatcaggcaacagctactctcctgaagagtacgcgctgcaacaggctgccgatgggaccatcttccttgtgccccgggggaccaagatggaggccacagactga

SEQ ID NO: 282245 - DNA, 1208 bp, Artificial Sequence
  derived and/or modified sequence
ggatggaggcaagggctaggggagatactctttcaaaaggatcatttgtagttcctactaattttgtggtaagtcgaagagaagattccatattaaattgctgtgatgggccatccttgtggtttctagagccatctgggctttccgggaacctggaccagactctggcccagtaggatgtccccgtgtcctccccagcagagcaggaacagggtgatacagctgtccacttcagagctaggagagatggaactgacttggcaggagatcatgtccatcaccgagctgcagggtctgaatgctccaagtgagccatcatttgagccccaagccccagctccataccttggacctccaccacccacaacttactgcccctgctcaatccacccagattctggcttcccacttcctccaccaccttatgagctcccagcatccacatcccatgtcccagatcccccatactcctatggcaacatggccataccagtctccaagccactgagcctctcaggcctgctcagtgagccgctccaagaccccttagccctcctggacattgggctgccagcagggccacctaagccccaagaagacccagaatccgactcaggattatccctcaactatagcgatgctgaatctcttgagctggaggggacagaggctggtcggcggcgcagcgaatatgtagagatgtacccagtggagtacccctactcactcatgcccaactccttggcccactccaactataccttgccagctgctgagacccccttggccttagagccctcctcaggccctgtgcgggctaagcccactgcacggggggaggcagggagtcgggatgaacgtcgggccttggccatgaagattccttttcctacggacaagattgtcaacttgccggtagatgactttaatgagctattggcaaggtacccgctgacagagagccagctagcgctagtccgggacatccgacgacggggcaaaaacaaggtggcagcccagaactgccgcaagaggaagctggaaaccattgtgcagctggagcgggagctggagcggctgaccaatgaacgggagcggcttctcagggcccgcggggaggcagaccggaccctggaggtcatgcgccaacagctgacagagctgtaccgtgacattttccagcaccttcgggatgaatcaggcaacag

SEQ ID NO: 282246 - DNA, 1122 bp, Artificial Sequence
  derived and/or modified sequence
atgtccccatgcccgcctcagcagagtagaaaccgcgtgattcagctgtccactagcgagctgggggaaatggaattgacctggcaggagattatgtccataactgagctccagggactgaatgcccctagcgaaccgtcttttgaaccgcaggcgccagccccttacttaggtccaccgcctccgacaacttactgtccatgttctatacacccagattctgggttccccctgcccccacccccatacgaactccccgcatcaacttcccatgtgcctgacccgccttacagctatggtaacatggctatccccgtctctaaacccctcagcctgtccggcttgctgagcgagcctcttcaggatcctctggccctgttggacattggtctccctgccggtccgccaaagccgcaagaggatcctgagtcagactctggactgtcgctcaattactccgatgccgagtcactggagcttgagggtaccgaagccggaagaagacgaagcgagtatgtggagatgtaccctgtggagtatccctattccttgatgcccaactctctagcccactctaattataccctgcccgctgctgagacgccactggcccttgagccaagttcaggcccagtgagggccaagccaaccgccaggggcgaagcgggatcaagagatgagcgcagggcactggccatgaagattccattcccaaccgataagatcgtgaatctcccggtcgacgactttaatgaactgctggcccgatacccactgactgagagccaactggccctagtccgggatatcagacggagaggaaaaaacaaagtcgctgcccaaaattgtcggaaacgcaaactggagaccatcgtgcaactcgagcgcgagctcgaacggttgacgaacgagcgcgagagattgttgcgggctcgcggagaggctgatcgaactttggaagtgatgcggcagcagctaaccgaattgtatagggacatctttcagcacctgcgagatgagtctggcaattcttattcaccggaggagtacgccctgcaacaggctgccgacggtacgattttcctcgtgccgagagggactaaaatggaggccaccgactag

SEQ ID NO: 282247 - DNA, 1122 bp, Artificial Sequence
  derived and/or modified sequence
atgagcccatgccctccccagcagtccagaaaccgcgtcatacagcttagcacttccgagctgggggagatggaacttacttggcaggagatcatgagcattaccgagctgcaaggcctaaacgcaccttcagaaccaagctttgagccccaggctccggctccatacctggggcctcctccaccaacaacatactgtccatgcagcatccaccccgattccgggtttcctctgccgcctcccccttacgagcttcccgcaagtacatcccacgtgcctgaccccccttactcctatgggaatatggccattcccgtgagcaaacccctgtcactgtctggcctcctgagcgagcctctgcaggatcctctagccttactggatatagggcttcccgcaggaccacccaaaccacaggaagaccctgagagcgatagcggcctgagcttaaactattccgatgccgaaagccttgaactggaagggactgaagcaggcagacgacgctctgagtatgttgagatgtaccctgtcgaatatccgtacagtttaatgcctaacagccttgcccacagcaattacactctccctgctgccgaaactcctctcgcccttgagccaagttccggccctgtgcgggctaagccaaccgcgaggggtgaggccggatccagagatgagagaagagccttagctatgaaaattcccttcccaacagacaagatcgtcaacttgcccgtcgatgactttaacgaactccttgctcgctacccactgactgaatcccagttagctctcgtgagagacattagacgaagaggcaagaataaagtcgctgcccagaattgtaggaagcgtaagctggagacaattgtgcagcttgagagggaactggagcgcctgacgaatgagcgggaacggctcctcagggccaggggggaggccgacaggacgctggaggtcatgaggcagcaattgacagagctgtaccgtgatatctttcaacacctccgcgacgaatcagggaacagctattcgccggaggagtacgctctccagcaggctgccgatggaaccatctttctggttccacggggaaccaaaatggaagccactgactag

SEQ ID NO: 282248 - DNA, 1122 bp, Artificial Sequence
  derived and/or modified sequence
atgtcaccttgtcctccccaacagagccgaaatagggtgattcagctgagcacctcagaattaggcgagatggaactcacctggcaggagatcatgtctattaccgagctgcaaggcctaaatgcgcctagcgagccgtctttcgaaccacaggcccctgctccgtacctgggccctcctcctccaactacttattgcccatgttccattcaccccgactctggcttcccactgcctcctccgccttacgagctgcccgctagtacctcacacgttccagacccaccgtattcctacggtaacatggcaataccggtcagtaagccactgagtctctccgggctgctttcagagccgctgcaggatcccctggcactgctggacatcggtttacctgcagggccacccaaaccacaggaggaccccgagagcgacagtggcctgtctttgaattactcggacgccgagtccctcgagttagaaggaaccgaggcaggcagaagaaggtcagaatacgtggagatgtaccctgtagagtatccttactctctgatgcctaattctctcgcacatagcaactatactctgccagccgcagaaacccctctagctcttgaaccatcttccggaccagtacgtgccaagccgacagcacgaggtgaagcaggtagcagggacgagcgtcgcgcactcgctatgaaaatcccctttccgaccgacaaaattgtgaacctgccagtcgacgattttaacgagcttctggctcggtaccctctgactgagtctcaacttgctctggttagggacatcagacgcagaggtaagaataaagtggccgctcagaactgccggaaacgaaagctggaaacaattgtacagctagagcgcgagctggagcggcttaccaatgagcgcgaacgcctgcttcgagctagaggcgaggccgatcggacgctcgaggtgatgcgacagcagttgacggaactttatcgggacatctttcaacatttgagggatgagagcgggaacagttactcccctgaggagtacgccctgcagcaagccgcagacggaactatttttctcgtgcccaggggaaccaaaatggaggcaaccgattag

SEQ ID NO: 282249 - DNA, 1122 bp, Artificial Sequence
  derived and/or modified sequence
atgagcccatgtcctccacagcaatcacggaacagggtgatccaactgagcactagcgagctgggagagatggagctcacatggcaagagatcatgtcgatcactgagttacaggggctgaatgccccatcagagccaagcttcgaaccccaggctcctgccccatatctcggaccccctcctccaacaacctattgtccatgtagtattcatcctgattccgggttccccctgcccccaccaccctacgagcttccagccagcacatcccacgtccctgaccctccttattcctacgggaacatggcaattcctgtgagtaagcccctgtccttaagcggcttgctgtctgaaccactgcaagaccccctcgccttgctggatatcgggctacctgccggaccacctaaaccccaagaggacccagagtccgactcgggcctgtccctcaactacagcgacgctgagtcactggaattggagggaacggaggccggtcgtcgtaggtccgagtatgtcgaaatgtaccccgtagagtatccctactccttgatgccaaactccctcgcccactcaaactatactcttcccgctgcagagacccccctggccttggagccatcttccgggccagtgagggcgaagcctaccgcgaggggcgaagccggatcacgcgacgagagaagagcactggctatgaagattccttttcccaccgataaaattgtaaatctgccggttgacgactttaacgaactgctggcaagataccctctcaccgagtcccagcttgccctcgtgcgggacatccgccgacgcggaaagaataaggtggctgctcagaactgccggaaaagaaagctcgagacaatcgtacagctggaacgagagcttgaaagactgacaaacgagcgcgagaggctgttgagagccagaggagaggccgataggacgctcgaggtgatgcgtcagcagctgacagagctctaccgtgatatctttcagcatctgagagacgagagtggtaatagctactcccccgaggagtacgccttgcagcaggccgcagacgggaccatttttttggtgcccaggggaactaagatggaggcaaccgattag

SEQ ID NO: 282250 - DNA, 1032 bp, Artificial Sequence
  derived and/or modified sequence
atgtcaccgtgtccgcctcagcagagcagaaaccgcgtgattcaactctcaaccagtgaacttggagagatggagcttacatggcaagagattatgtcaatcaccgagttgcagggcttgaatgctccctcagaaccttccttcgaaccgcaggctcctgccccatacctaggaccccctcctccaactacatattgtccctgctccattcacccagattctgggtttcctctccccccacccccatatgaactgcctgcctctactagccatgtgcctgaccctccatattcatacggcaacatggccatccccgtctccaagccattgtcactatctggcctcctgagcgaacccctacaggaccccctcgccttgctggatatcggtctgcctgcagggccaccaaagccccaagaggaccccgaatccgacagtggactgagcctgaactactctgacgcggagagccttgagcttgaaggcacggaggcaggaagaagacgcagtgagtatgtcgagatgtacccagtggaatatccgtacagtctgatgcccaactccctggcacattcgaactatacgttgcccgctgccgagacaccactggctctcgaaccttcttcgggccctgtccgagcaaagcccacagcccgaggggaggctggatctagagacgagcggagagcacttgccatgaaaattcccttccccacagacaagatcgttaatctgcccgtcgatgatttcaacgagttactggccaggtaccctttgacagaaagccaattggctctggtgcgagacattagacgcaggggaaagaacaaggtggctgcccaaaactgcagaaagaggaaactcgagactattgtgcagttggagagggagctcgaacggctgacaaatgaaagagaacgcctcctacgggctcgcggtgaggccgaccggactctggaggtcatgcgccagcagctgacggagctctaccgggacatcttccagcaccttagggatgaaagtgggaactag

SEQ ID NO: 282251 - DNA, 1122 bp, Artificial Sequence
  derived and/or modified sequence
atgagcccctgccccccccagcagagcagaaacagagtgatccagctgagcaccagcgagctgggcgagatggagctgacctggcaggagatcatgagcatcaccgagctgcagggcctgaacgcccccagcgagcccagcttcgagccccaggcccccgccccctacctgggcccccccccccccaccacctactgcccctgcagcatccaccccgacagcggcttccccctgcccccccccccctacgagctgcccgccagcaccagccacgtgcccgaccccccctacagctacggcaacatggccatccccgtgagcaagcccctgagcctgagcggcctgctgagcgagcccctgcaggaccccctggccctgctggacatcggcctgcccgccggcccccccaagccccaggaggaccccgagagcgacagcggcctgagcctgaactacagcgacgccgagagcctggagctggagggcaccgaggccggcagaagaagaagcgagtacgtggagatgtaccccgtggagtacccctacagcctgatgcccaacagcctggcccacagcaactacaccctgcccgccgccgagacccccctggccctggagcccagcagcggccccgtgagagccaagcccaccgccagaggcgaggccggcagcagagacgagagaagagccctggccatgaagatccccttccccaccgacaagatcgtgaacctgcccgtggacgacttcaacgagctgctggccagataccccctgaccgagagccagctggccctggtgagagacatcagaagaagaggcaagaacaaggtggccgcccagaactgcagaaagagaaagctggagaccatcgtgcagctggagagagagctggagagactgaccaacgagagagagagactgctgagagccagaggcgaggccgacagaaccctggaggtgatgagacagcagctgaccgagctgtacagagacatcttccagcacctgagagacgagagcggcaacagctacagccccgaggagtacgccctgcagcaggccgccgacggcaccatcttcctggtgcccagaggcaccaagatggaggccaccgactag

SEQ ID NO: 282252 - DNA, 1032 bp, Artificial Sequence
  derived and/or modified sequence
atgagcccctgccccccccagcagagcagaaacagagtgatccagctgagcaccagcgagctgggcgagatggagctgacctggcaggagatcatgagcatcaccgagctgcagggcctgaacgcccccagcgagcccagcttcgagccccaggcccccgccccctacctgggcccccccccccccaccacctactgcccctgcagcatccaccccgacagcggcttccccctgcccccccccccctacgagctgcccgccagcaccagccacgtgcccgaccccccctacagctacggcaacatggccatccccgtgagcaagcccctgagcctgagcggcctgctgagcgagcccctgcaggaccccctggccctgctggacatcggcctgcccgccggcccccccaagccccaggaggaccccgagagcgacagcggcctgagcctgaactacagcgacgccgagagcctggagctggagggcaccgaggccggcagaagaagaagcgagtacgtggagatgtaccccgtggagtacccctacagcctgatgcccaacagcctggcccacagcaactacaccctgcccgccgccgagacccccctggccctggagcccagcagcggccccgtgagagccaagcccaccgccagaggcgaggccggcagcagagacgagagaagagccctggccatgaagatccccttccccaccgacaagatcgtgaacctgcccgtggacgacttcaacgagctgctggccagataccccctgaccgagagccagctggccctggtgagagacatcagaagaagaggcaagaacaaggtggccgcccagaactgcagaaagagaaagctggagaccatcgtgcagctggagagagagctggagagactgaccaacgagagagagagactgctgagagccagaggcgaggccgacagaaccctggaggtgatgagacagcagctgaccgagctgtacagagacatcttccagcacctgagagacgagagcggcaactag

SEQ ID NO: 282253 - protein, 568 aa, Artificial Sequence
  derived and/or modified sequence
MVLGPEQKMSDDSVSGDHGESASLGNINPAYSNPSLSQSPGDSEEYFATYFNEKISIPEEEYSCFSFRKLWAFTGPGFLMSIAYLDPGNIESDLQSGAVAGFKLLWILLLATLVGLLLQRLAARLGVVTGLHLAEVCHRQYPKVPRVILWLMVELAIIGSDMQEVIGSAIAINLLSVGRIPLWGGVLITIADTFVFLFLDKYGLRKLEAFFGFLITIMALTFGYEYVTVKPSQSQVLKGMFVPSCSGCRTPQIEQAVGIVGAVIMPHNMYLHSALVKSRQVNRNNKQEVREANKYFFIESCIALFVSFIINVFVVSVFAEAFFGKTNEQVVEVCTNTSSPHAGLFPKDNSTLAVDIYKGGVVLGCYFGPAALYIWAVGILAAGQSSTMTGTYSGQFVMEGFLNLKWSRFARVVLTRSIAIIPTLLVAVFQDVEHLTGMNDFLNVLQSLQLPFALIPILTFTSLRPVMSDFANGLGWRIAGGILVLIICSINMYFVVVYVRDLGHVALYVVAAVVSVAYLGFVFYLGWQCLIALGMSFLDCGHTCHLGLTAQPELYLLNTMDADSLVSR

SEQ ID NO: 282254 - DNA, 3986 bp, Artificial Sequence
  derived and/or modified sequence
ggagccctgggcgcgggggcggcgtgtcaggtggttgcggagctggtaagaatcatattctaagaactcagccactcaggtatccaccatggtgctgggtcctgaacagaagatgtcagatgacagtgtttctggagatcatggggagtctgccagtcttggtaacatcaaccctgcctatagtaatccctctctttcacagtcccctggggactcagaggagtacttcgccacttactttaatgagaagatctccattcctgaggaggagtactcttgttttagctttcgtaaactctgggctttcaccggaccaggttttcttatgagcattgcctacctggatccaggaaatattgaatccgatttgcagtctggagcagtggctggatttaagttgctctggatccttctgttggccacccttgtggggctgctgctccagcggcttgcagctagactgggagtggttactgggctgcatcttgctgaagtatgtcaccgtcagtatcccaaggtcccacgagtcatcctgtggctgatggtggagttggctatcatcggctcagacatgcaagaagtcattggctcagccattgctatcaatcttctgtctgtaggaagaattcctctgtggggtggcgttctcatcaccattgcagatacttttgtatttctcttcttggacaaatatggcttgcggaagctagaagcattttttggctttctcatcactattatggccctcacatttggatatgagtatgttacagtgaaacccagccagagccaggtactcaagggcatgttcgtaccatcctgttcaggctgtcgcactccacagattgaacaggctgtgggcatcgtgggagctgtcatcatgccacacaacatgtacctgcattctgccttagtcaagtctagacaggtaaaccggaacaataagcaggaagttcgagaagccaataagtactttttcattgaatcctgcattgcactctttgtttccttcatcatcaatgtctttgttgtctcagtctttgctgaagcattttttgggaaaaccaacgagcaggtggttgaagtctgtacaaataccagcagtcctcatgctggcctctttcctaaagataactcgacactggctgtggacatctacaaagggggtgttgtgctgggatgttactttgggcctgctgcactctacatttgggcagtggggatcctggctgcaggacagagctccaccatgacaggaacctattctggccagtttgtcatggagggattcctgaacctaaagtggtcacgctttgcccgagtggttctgactcgctctattgccatcatccccactctgcttgttgctgtcttccaagatgtagagcatctaacagggatgaatgactttctgaatgttctacagagcttacagcttccctttgctctcatacccatcctcacatttacgagcttgcggccagtaatgagtgactttgccaatggactaggctggcggattgcaggaggaatcttggtccttatcatctgttccatcaatatgtactttgtagtggtttatgtccgggacctagggcatgtggcattatatgtggtggctgctgtggtcagcgtggcttatctgggctttgtgttctacttgggttggcaatgtttgattgcactgggcatgtccttcctggactgtgggcatacgtgccatctgggattgacagctcagcctgaactctatcttctgaacaccatggacgctgactcacttgtgtctagatgactgacagcctgagagactctataagaacatgtttttctaagccctttttgtgccaggtgtcccgttaacgtctctgttagttcagaggtgagttttgttcagacgttttgaacaaaaggcaaagatttcctcatgggaagggtgttcaaaactgacagctataaatgtaggtcagagacccacccacctcataacagtcatacactcccagagttaaacgattggcctctgatggccacacacccctatgggcttgtgtcttggactctgggatttaaaagatatatatgtatatatatttatgtaaacctgagcatctcagtttgggtagagttttaaggttatatgaaactgatagaacttttgtattttttttttaaatattgttttgatatatcagatatttgttttgtctggatcacaagtgagaaagaaaagagaacaatgctctttttcacaatgaactggtcaaattgactatcttgtaaagtgatactttactatgtcagtgaaatttcagtttgattttagtcaaccagattatatcctttgtatctactgatattaacacatcatattaacacatcatttcttaaaaaaacatttcttctgtttggcaatcataattaactctggttatcagcctattttgtaattattgtctttgtcgtcacttttcttgaattgttttctagtcattaaacagatatgaaggcattgccaaagagctttaatatccagtaacaagatccagaaaccacactttaaccagtgatcagttttccgtgctgcattgtaactcagctcattctggcattcaagttttaggcaaaaaaagaggaaacttctaacatttagcttgtaagtcctgacataagatagtgaagatatttatcttctttctaatatttgtatagtccgccaatgtattttcttcccactattcccattaacataccaaacactgtttctaggtccaaagtctatttctaggagtggccaatatttgtattgttgaatctcctagggaatgctaaatgtttcactttaaaatacctatttataccaagtagcatgagattagtactagagtgagatttggaatattagtccacatatcacaaactgcttgcctacatgtatagattttttttttcacccaccttcctaaccaggaatttgtttccttaaatttgttgttgttgttgttgttgtttgttgttatttttttgagaagagtcttgccctgtcgccaaggtgggaatgcattgacgtgatctcagttcactgtaacctctacctccccggtttaatcgattctcctccttcagcctcctgaatagctgggattacaggcaccacatttttagtggagatggggtttcaccatgttggccaggctggtctcaaactcttgacctcaagtgatctacctgcctcagcctcccaaagtgctgggattacaggtgtgagccactgcacccagcgttttttgttgttaagacagggtcttgctctgttgcccaggctggagtgcagtggtgtgatctcagctcactgcaacttctgccacctgggcttaagccatcctcccacttcagcatcccaaatagctgggactgcaggcacacaccaccacacccagctaatttttgtattttttgtagagacgggatttcaccatgttgcccaggctggtgttgaactcatgagctcaagtaatctgctggccttggcctcccaaagtgctgagattataggcgtgagccactgcatccagctcactcctcatttctttctagccccaaaggtgttgagtcagcaaatcctgcagcctttgtgtgactttgagcatcactttcccctttcagcattaaatatatgacctctctgccttattttagaacttactacatttcaataaaactttttaaaaaatccagacattgcctatgttcgtttataatcggcccttaaagaggcagggatttttctaaaatgacactttaaaatttcctcatttctacttcagggcctcttgaaacttcagataatgagagcagccaaccctgcaactcaggctatagagtccttctgatcttaaaactgagactgaattcacatcagttttacgcttttacttgaaaaagagactcttaagtgtttttggtttctttatacaggacaacaa

SEQ ID NO: 282255 - DNA, 2125 bp, Artificial Sequence
  derived and/or modified sequence
ccggaatatggagccctgggcgcgggggcggcgtgtcaggtggttgcggagctgaatcatattctaagaactcagccactcaggtatccaccatggtgctgggtcctgaacagaagatgtcagatgacagtgtttctggagatcatggggagtctgccagtcttggtaacatcaaccctgcctatagtaatccctctctttcacagtcccctggggactcagaggagtacttcgccacttactttaatgagaagatctccattcctgaggaggagtactcttgttttagctttcgtaaactctgggctttcaccggaccaggttttcttatgagcattgcctacctggatccaggaaatattgaatccgatttgcagtctggagcagtggctggatttaagttgctctggatccttctgttggccacccttgtggggctgctgctccagcggcttgcagctagactgggagtggttactgggctgcatcttgctgaagtatgtcaccgtcagtatcccaaggtcccacgagtcatcctgtggctgatggtggagttggctatcatcggctcagacatgcaagaagtcattggctcagccattgctatcaatcttctgtctgtaggaagaattcctctgtggggtggcgttctcatcaccattgcagatacttttgtatttctcttcttggacaaatatggcttgcggaagctagaagcattttttggctttctcatcactattatggccctcacatttggatatgagtatgttacagtgaaacccagccagagccaggtactcaagggcatgttcgtaccatcctgttcaggctgtcgcactccacagattgaacaggctgtgggcatcgtgggagctgtcatcatgccacacaacatgtacctgcattctgccttagtcaagtctagacaggtaaaccggaacaataagcaggaagttcgagaagccaataagtactttttcattgaatcctgcattgcactctttgtttccttcatcatcaatgtctttgttgtctcagtctttgctgaagcattttttgggaaaaccaacgagcaggtggttgaagtctgtacaaataccagcagtcctcatgctggcctctttcctaaagataactcgacactggctgtggacatctacaaagggggtgttgtgctgggatgttactttgggcctgctgcactctacatttgggcagtggggatcctggctgcaggacagagctccaccatgacaggaacctattctggccagtttgtcatggagggattcctgaacctaaagtggtcacgctttgcccgagtggttctgactcgctctattgccatcatccccactctgcttgttgctgtcttccaagatgtagagcatctaacagggatgaatgactttctgaatgttctacagagcttacagcttccctttgctctcatacccatcctcacatttacgagcttgcggccagtaatgagtgactttgccaatggactaggctggcggattgcaggaggaatcttggtccttatcatctgttccatcaatatgtactttgtagtggtttatgtccgggacctagggcatgtggcattatatgtggtggctgctgtggtcagcgtggcttatctgggctttgtgttctacttgggttggcaatgtttgattgcactgggcatgtccttcctggactgtgggcatacgtgccatctgggattgacagctcagcctgaactctatcttctgaacaccatggacgctgactcacttgtgtctagatgactgacagcctgagagactctataagaacatgtttttctaagccctttttgtgccaggtgtcccgttaacgtctctgttagttcagagagacgggatttcaccatgttgcccaggctggtgttgaactcatgagctcaagtaatctgctggccttggcctcccaaagtgctgagattataggcgtgagccactgcatccagctcactcctcatttctttctagccccaaaggtgttgagtcagcaaatcctgcagcctttgtgtgactttgagcatcactttcccctttcagcattaaatatatgacctctctgccttattttagaa

SEQ ID NO: 282256 - DNA, 2486 bp, Artificial Sequence
  derived and/or modified sequence
gcgtgtcaggtggttgcggagctgaatcatattctaagaactcagccactcaggtatccaccatggtgctgggtcctgaacagaagatgtcagatgacagtgtttctggagatcatggggagtctgccagtcttggtaacatcaaccctgcctatagtaatccctctctttcacagtcccctggggactcagaggagtacttcgccacttactttaatgagaagatctccattcctgaggaggagtactcttgttttagctttcgtaaactctgggctttcaccggaccaggttttcttatgagcattgcctacctggatccaggaaatattgaatccgatttgcagtctggagcagtggctggatttaagttgctctggatccttctgttggccacccttgtggggctgctgctccagcggcttgcagctagactgggagtggttactgggctgcatcttgctgaagtatgtcaccgtcagtatcccaaggtcccacgagtcatcctgtggctgatggtggagttggctatcatcggctcagacatgcaagaagtcattggctcagccattgctatcaatcttctgtctgtaggaagaattcctctgtggggtggcgttctcatcaccattgcagatacttttgtatttctcttcttggacaaatatggcttgcggaagctagaagcattttttggctttctcatcactattatggccctcacatttggatatgagtatgttacagtgaaacccagccagagccaggtactcaagggcatgttcgtaccatcctgttcaggctgtcgcactccacagattgaacaggctgtgggcatcgtgggagctgtcatcatgccacacaacatgtacctgcattctgccttagtcaagtctagacaggtaaaccggaacaataagcaggaagttcgagaagccaataagtactttttcattgaatcctgcattgcactctttgtttccttcatcatcaatgtctttgttgtctcagtctttgctgaagcattttttgggaaaaccaacgagcaggtggttgaagtctgtacaaataccagcagtcctcatgctggcctctttcctaaagataactcgacactggctgtggacatctacaaagggggtgttgtgctgggatgttactttgggcctgctgcactctacatttgggcagtggggatcctggctgcaggacagagctccaccatgacaggaacctattctggccagtttgtcatggagggattcctgaacctaaagtggtcacgctttgcccgagtggttctgactcgctctattgccatcatccccactctgcttgttgctgtcttccaagatgtagagcatctaacagggatgaatgactttctgaatgttctacagagcttacagcttccctttgctctcatacccatcctcacatttacgagcttgcggccagtaatgagtgactttgccaatggactaggctggcggattgcaggaggaatcttggtccttatcatctgttccatcaatatgtactttgtagtggtttatgtccgggacctagggcatgtggcattatatgtggtggctgctgtggtcagcgtggcttatctgggctttgtgttctacttgggttggcaatgtttgattgcactgggcatgtccttcctggactgtgggcatacgtgccatctgggattgacagctcagcctgaactctatcttctgaacaccatggacgctgactcacttgtgtctagatgactgacagcctgagagactctataagaacatgtttttctaagccctttttgtgccaggtgtcccgttaacgtctctgttagttcagaggtgagttttgttcagacgttttgaacaaaaggcaaagatttcctcatgggaagggtgttcaaaactgacagctataaatgtaggtcagagacccacccacctcataacagtcatacactcccagagttaaacgattggcctctgatggccacacacccctatgggcttgtgtcttggactctgggatttaaaagatatatatgtatatatatttatgtaaacctgagcatctcagtttgggtagagttttaaggttatatgaaactgatagaacttttgtattttttttttaaatattgttttgatatatcagatatttgttttgtctggatcacaagtgagaaagaaaagagaacaatgctctttttcacaatgaactggtcaaattgactatcttgtaaagtgatactttactatgtcagtgaaatttcagtttgattttagtcaaccagattatatcctttgtatctactgatattaacacatcatattaacacatcatttcttaaaaaaacatttcttctgtttggcaatcataattaactctggttatcagcctattttgtaattattgtctttgtcgtcacttttcttgaattgttttctagtcattaaacagatatgaaggca

SEQ ID NO: 282257 - DNA, 1120 bp, Artificial Sequence
  derived and/or modified sequence
ttgcctcagaagcgtcgcggagaaggggccacctcaggtgaagcgcgcttgtggaggagttgtggaggacgcctgtcgacgaccagtaactggtcctcggccattgcggtgtgtttcaggaagcatctaaatatggtgtcctccggaaaaaagtattccaggaaatctgggaagccgtctgtggaagatcagtttacgagagcctatgactttgagactgaagataagaaagatctgagtggatcagaggaagatgttattgaagggaagactgcagtcattgagaaacgtaggaagaaaaggtcttctgcaggagtagttgaagatatggggggtgaagtgcagaatatgctggaaggagttggagttgacattaacaaggctcttcttgccaagagaaagagactagaaatgtataccaaggcttctctcaaaactagtaaccagaaaattgaacatgtttggaaaacacaacaagatcaaaggcagaagcttaaccaagaatattctcagcagtttctgactttgtttcagcagtgggatttagatatgcagaaagctgaggaacaagaagaaaaaatacttaatatgtttcgacagcaacaaaagattcttcaacaatctagaattgttcagagccagagattgaaaacaattaaacagttatatgagcagttcataaagagtatggaagagttggagaagaatcatgataatctacttactggtgcacaaaatgaatttaaaaaagaaatggctatgttgcaaaaaaaaattatgatggaaactcagcagcaagagatagcaagtgttcggaagtctcttcaatccatgttattctgatgactctttgaagaaagaacttgaacctaagtaatatgatacaattataacgttagctaagaagcatattgtaagtctttagaatagtttaattgtaacatctttaatcataaacctgtttcattgtaagacctccctttctgttaagtcaaatctaaatagttatgagttagttagcaactattcctaaagaatatgtattaagctttcagctctttagtaatgatagtgaatttttctctctaacactgtcaattaaataaagacgatttaattt

SEQ ID NO: 282258 - protein, 780 aa, Artificial Sequence
  derived and/or modified sequence
MTHEEHHAAKTLGIGKAIAVLTSGGDAQGMNAAVRAVVRVGIFTGARVFFVHEGYQGLVDGGDHIKEATWESVSMMLQLGGTVIGSARCKDFREREGRLRAAYNLVKRGITNLCVIGGDGSLTGADTFRSEWSDLLSDLQKAGKITDEEATKSSYLNIVGLVGSIDNDFCGTDMTIGTDSALHRIMEIVDAITTTAQSHQRTFVLEVMGRHCGYLALVTSLSCGADWVFIPECPPDDDWEEHLCRRLSETRTRGSRLNIIIVAEGAIDKNGKPITSEDIKNLVVKRLGYDTRVTVLGHVQRGGTPSAFDRILGSRMGVEAVMALLEGTPDTPACVVSLSGNQAVRLPLMECVQVTKDVTKAMDEKKFDEALKLRGRSFMNNWEVYKLLAHVRPPVSKSGSHTVAVMNVGAPAAGMNAAVRSTVRIGLIQGNRVLVVHDGFEGLAKGQIEEAGWSYVGGWTGQGGSKLGTKRTLPKKSFEQISANITKFNIQGLVIIGGFEAYTGGLELMEGRKQFDELCIPFVVIPATVSNNVPGSDFSVGADTALNTICTTCDRIKQSAAGTKRRVFIIETMGGYCGYLATMAGLAAGADAAYIFEEPFTIRDLQANVEHLVQKMKTTVKRGLVLRNEKCNENYTTDFIFNLYSEEGKGIFDSRKNVLGHMQQGGSPTPFDRNFATKMGAKAMNWMSGKIKESYRNGRIFANTPDSGCVLGMRKRALVFQPVAELKDQTDFEHRIPKEQWWLKLRPILKILAKYEIDLDTSDHAHLEHITRKRSGEAAV

SEQ ID NO: 282259 - protein, 177 aa, Artificial Sequence [sequence omitted]

SEQ ID NO: 282260 - DNA, 2928 bp, Artificial Sequence
  derived and/or modified sequence
aagcaggaggaggcggagccttcttgtcagcatctgttagtggaggttgggaagcctctcctccttccccctccctctttgcctccacctggctcctccccatgttcgtccatcacccctcccccctttcccaaggacaatctgcaagaaagcagcggcggaggagagctaagactaaaagagtggatcatgacccatgaagagcaccatgcagccaaaaccctggggattggcaaagccattgctgtcttaacctctggtggagatgcccaaggtatgaatgctgctgtcagggctgtggttcgagttggtatcttcaccggtgcccgtgtcttctttgtccatgagggttatcaaggcctggtggatggtggagatcacatcaaggaagccacctgggagagcgtttcgatgatgcttcagctgggaggcacggtgattggaagtgcccggtgcaaggactttcgggaacgagaaggacgactccgagctgcctacaacctggtgaagcgtgggatcaccaatctctgtgtcattgggggtgatggcagcctcactggggctgacaccttccgttctgagtggagtgacttgttgagtgacctccagaaagcaggtaagatcacagatgaggaggctacgaagtccagctacctgaacattgtgggcctggttgggtcaattgacaatgacttctgtggcaccgatatgaccattggcactgactctgccctgcatcggatcatggaaattgtagatgccatcactaccactgcccagagccaccagaggacatttgtgttagaagtaatgggccgccactgtggatacctggcccttgtcacctctctgtcctgtggggccgactgggtttttattcctgaatgtccaccagatgacgactgggaggaacacctttgtcgccgactcagcgagacaaggacccgtggttctcgtctcaacatcatcattgtggctgagggtgcaattgacaagaatggaaaaccaatcacctcagaagacatcaagaatctggtggttaagcgtctgggatatgacacccgggttactgtcttggggcatgtgcagaggggtgggacgccatcagcctttgacagaattctgggcagcaggatgggtgtggaagcagtgatggcacttttggaggggaccccagataccccagcctgtgtagtgagcctctctggtaaccaggctgtgcgcctgcccctcatggaatgtgtccaggtgaccaaagatgtgaccaaggccatggatgagaagaaatttgacgaagccctgaagctgagaggccggagcttcatgaacaactgggaggtgtacaagcttctagctcatgtcagacccccggtatctaagagtggttcgcacacagtggctgtgatgaacgtgggggctccggctgcaggcatgaatgctgctgttcgctccactgtgaggattggccttatccagggcaaccgagtgctcgttgtccatgatggtttcgagggcctggccaaggggcagatagaggaagctggctggagctatgttgggggctggactggccaaggtggctctaaacttgggactaaaaggactctacccaagaagagctttgaacagatcagtgccaatataactaagtttaacattcagggccttgtcatcattgggggctttgaggcttacacagggggcctggaactgatggagggcaggaagcagtttgatgagctctgcatcccatttgtggtcattcctgctacagtctccaacaatgtccctggctcagacttcagcgttggggctgacacagcactcaatactatctgcacaacctgtgaccgcatcaagcagtcagcagctggcaccaagcgtcgggtgtttatcattgagactatgggtggctactgtggctacctggctaccatggctggactggcagctggggccgatgctgcctacatttttgaggagcccttcaccattcgagacctgcaggcaaatgttgaacatctggtgcaaaagatgaaaacaactgtgaaaaggggcttggtgttaaggaatgaaaagtgcaatgagaactataccactgacttcattttcaacctgtactctgaggaggggaagggcatcttcgacagcaggaagaatgtgcttggtcacatgcagcagggtgggagcccaaccccatttgataggaattttgccactaagatgggcgccaaggctatgaactggatgtctgggaaaatcaaagagagttaccgtaatgggcggatctttgccaatactccagattcgggctgtgttctggggatgcgtaagagggctctggtcttccaaccagtggctgagctgaaggaccagacagattttgagcatcgaatccccaaggaacagtggtggctgaaactgaggcccatcctcaaaatcctagccaagtacgagattgacttggacacttcagaccatgcccacctggagcacatcacccggaagcggtccggggaagctgccgtctaaacctctctggagtgaggggaatagattacctgatcatggtcagctcacaccctaataagtccacatcttctcagtgttttagctgtttttttcattaggtttccttttattctgtaccttgcagccatgaccagttctggccaggagctggaggagcaggcagtgggtgggagctccttttaggtagaatttaacatgacttctgccccagctttatctgtcacacaaggctgggcacctctagtgctactgctagatatcacttactcagttagaattttcctaaaaataagctttatttatttctttgtgataacaaagagtcttggttcctctactacttttactacagtgacaaattgtaactacactaataaatgccaactggtcactgtg

SEQ ID NO: 282261 - protein, 737 aa, Artificial Sequence
  derived and/or modified sequence
MRCYLSWDRWTSPPLSSIIFISVDYILNVTREIDNFFPGLFAYHNIRVYDEETTDLLAHWNEAYHFINKAKRNHSKCLVHCKMGVSRSASTVIAYAMKEFGWPLEKAYNYVKQKRSITRPNAGFMRQLSEYEGILDASKQRHNKLWRQQTDSSLQQPVDDPAGPGDFLPETPDGTPESQLPFLDDAAQPGLGPPLPCCFRRLSDPLLPSPEDETGSLVHLEDPEREALLEEAAPPAEVHRPARQPQQGSGLCEKDVKKKLEFGSPKGRSGSLLQVEETEREEGLGAGRWGQLPTQLDQNLLNSENLNNNSKRSCPNGMEDDAIFGILNKVKPSYKSCADCMYPTASGAPEASRERCEDPNAPAICTQPAFLPHITSSPVAHLASRSRVPEKPASGPTEPPPFLPPAGSRRADTSGPGAGAALEPPASLLEPSRETPKVLPKSLLLKNSHCDKNPPSTEVVIKEESSPKKDMKPAKDLRLLFSNESEKPTTNSYLMQHQESIIQLQKAGLVRKHTKELERLKSVPADPAPPSRDGPASRLEASIPEESQDPAALHELGPLVMPSQAGSDEKSEAAPASLEGGSLKSPPPFFYRLDHTSSFSKDFLKTICYTPTSSSMSSNLTRSSSSDSIHSVRGKPGLVKQRTQEIETRLRLAGLTVSSPLKRSHSLAKLGSLTFSTEDLSSEADPSTVADSQDTTLSESSFLHEPQGTPRDPAATSKPSGKPAPENLKSPSWMSKS

SEQ ID NO: 282262 - DNA, 2214 bp, Artificial Sequence
  derived and/or modified sequence
atgcggtgttacctttcatgggatcgctggacctccccaccactatctagtattatctttatcagcgtggactacatactgaacgtcaccagagaaatcgacaacttttttcctggcctctttgcgtaccataatattagggtgtatgacgaggaaactactgacctgcttgcacactggaacgaggcctatcactttattaataaagcaaaaagaaatcactccaaatgtctggtgcattgtaagatgggcgtcagccgaagtgccagcaccgtgatcgcctacgctatgaaagaatttgggtggccgctggagaaggcttataattatgtcaaacaaaagcggtccattacgaggccaaatgctggctttatgcgtcagctgtccgaatatgaaggcatcttggatgcaagtaagcagaggcacaataagctgtggcggcagcagaccgattcgtctctgcaacaacccgtggatgaccccgcagggcccggggacttcctcccggagaccccggacggcacgcctgagtcacagctgcctttcctagacgatgcagcccagcccggattgggccctcctctgccctgttgttttagaagactctccgacccacttcttccctcgccagaggacgagaccgggtcgctggtgcacctggaggacccagaacgggaagcgttattggaggaagcagccccaccggctgaggtgcatcgacctgcgagacagccgcaacagggttcagggctttgcgagaaagatgtgaaaaaaaaactggagttcgggagcccgaaaggaaggagtgggagcttgttgcaggtcgaggagacagaacgggaggagggcctgggcgccggacgatggggccaactcccaacacagctggaccagaatttgttaaattcggaaaacttaaacaacaattctaaacgaagttgtcctaatgggatggaagatgacgccatttttggcattctgaataaagttaaacccagttacaaatcttgtgccgactgtatgtatcctactgcaagcggggccccagaggccagccgggaacggtgcgaggaccccaacgccccggctatctgcacccaacctgccttcctccctcatattacgtcgagtcccgttgctcacttggccagcaggagccgcgtcccagagaagcccgcctccgggccaactgagcccccaccctttcttccaccagccgggagccggagagctgatacaagcggacctggcgctggcgccgcattggaaccaccagcttctctgctcgaaccatcaagagaaacacctaaagtgttgcccaagtcattgctgctcaaaaacagccactgtgataagaacccccccagcacagaagtggtcataaaagaggagtcatcccctaagaaggacatgaagccagccaaggacctcaggctgctcttttccaatgagagcgagaaaccaactaccaactcctacctgatgcagcatcaagagagtataattcagcttcagaaagcaggtctggtgaggaagcacaccaaggagttggagcgtctcaagtccgtccctgcagaccccgccccaccttccagggacggccctgcgtcgcgcctggaagcttctatcccagaggagtcccaggatcctgcggctttgcatgaactgggccctctggtgatgcctagtcaggccggctcggacgagaagtccgaagctgcacctgcatctctcgagggcgggtcacttaaaagccccccaccattcttctaccgcctggaccacacatcaagcttttctaaggatttcttgaaaaccatatgctacacccccacgagtagctcaatgtcctcaaatcttacacgctcctccagcagtgatagcatacattctgtgcgtggcaaacctggactagttaagcaacggacccaggagattgaaacgaggttgaggctggcagggctgactgtatcatcaccgctcaaacgcagccattccctggccaagctgggaagcctgacattttccacggaggatctcagcagtgaggccgatcccagtaccgtcgctgatagccaggacactacactgtccgaatcatctttcctgcatgaaccccaggggacgccacgggaccctgcagctacatcaaaaccctctgggaaacctgctcccgaaaacttgaaatcaccttcctggatgtctaagagctag

SEQ ID NO: 282263 - DNA, 2214 bp, Artificial Sequence
  derived and/or modified sequence
atgcgctgctacctgtcctgggaccgctggaccagcccccccctgagcagcatcatcttcatctctgtggactacatcctgaatgtgacccgggagattgacaacttcttccctggcctgtttgcctaccacaacatccgggtgtatgatgaggagaccacagacctgctggcccactggaatgaggcctaccacttcatcaacaaggccaagaggaaccacagcaagtgcctggtgcactgcaagatgggcgtgagccgcagcgccagcacagtgattgcctatgccatgaaggagtttggctggcccctggagaaggcctacaactacgtgaagcagaagaggagcatcacccggcccaatgccggcttcatgaggcagctgtctgaatatgagggcatcctggatgccagcaagcagaggcacaacaagctgtggaggcagcagacagacagcagcctgcagcagcctgtggatgatcctgctggccctggggacttcctgcctgagaccccagatggcaccccagagagccagctgcccttcctggatgatgctgcccagcccggcctgggcccccccctgccctgctgcttccggcggctgagtgaccccctgctgcccagcccagaagatgagaccggcagcctggtgcacctggaggaccctgagcgggaggccctgctggaggaggccgcccccccagctgaggtgcacaggcctgcccggcagccccagcagggcagcggcctgtgtgagaaggatgtgaagaagaagctggagtttggcagccccaagggccgcagcggcagcctgctgcaggtggaggagacagagcgggaggagggcctgggcgccggccgctggggccagctgcccacccagctggaccagaacctgctgaacagcgagaacctgaacaacaacagcaagaggagctgccccaacggcatggaggatgatgccatcttcggcatcctgaacaaggtgaagcccagctacaagagctgtgccgactgcatgtaccccacagccagcggggcccctgaggccagccgggagcgctgtgaggaccccaatgccccagccatctgcacccagcctgccttcctgccccacatcaccagcagccctgtggcccacctggccagccgcagccgggtgcctgagaagccagccagcggccccacagagcccccacccttcctgcccccagctggcagcagaagagctgacaccagcggccctggggccggggccgccctggagcccccagccagcctgctggagcccagccgggagacccccaaggtgctgcccaagagcctgctgctgaagaacagccactgtgacaagaacccccccagcacagaggtggtgatcaaggaggagagcagccccaagaaggacatgaagccagccaaggacctgcggctgctcttcagcaatgaaagtgagaagcccaccaccaacagctacctgatgcagcaccaggagagcatcatccagctgcagaaggccggcctggtgaggaagcacaccaaggagctggagcggctgaagtctgtgcctgctgaccctgccccacccagcagagatggccctgccagccggctggaggccagcatccctgaggagagccaggaccctgctgccctgcacgagctgggccccctggtgatgcccagccaggccggcagtgatgagaagtctgaggccgccccagccagcctggagggcggcagcctgaagagccccccacccttcttctaccgcctggaccacaccagcagcttcagcaaggacttcctgaagaccatctgctacacccccaccagcagctccatgagcagcaacctgaccaggagcagcagcagtgacagcatccacagcgtgcggggcaagccaggcctggtgaagcagaggacccaggagattgagacccggctgcggctggccggcctgactgtgagcagccccctgaagaggagccacagcctggccaagctgggcagcctgaccttcagcacagaggacctgagcagcgaggccgaccccagcacagtggccgacagccaggacaccaccctgtctgagagcagcttcctgcacgagccccagggcaccccccgggaccctgctgccaccagcaagcccagcggcaagccagcccctgagaacctgaagagccccagctggatgagcaagagctag

SEQ ID NO: 282264 - DNA, 2214 bp, Artificial Sequence
  derived and/or modified sequence
atgcggtgctacctgagctgggaccggtggaccagcccccccctgtcaagtattatcttcattagcgtggattacatcctcaacgtcaccagagagatagataacttttttcccggtctatttgcctatcacaacatccgagtgtacgatgaagaaacgactgacctgctggcgcactggaacgaagcataccacttcataaacaaggcaaagcgcaatcattcaaaatgtctcgttcactgtaaaatgggtgtcagcaggagcgcgtccaccgtgatcgcttacgctatgaaagaatttggatggcctctcgagaaagcgtacaattatgtgaaacaaaaacggtctataacaagacctaatgccgggttcatgcgccaactgagcgaatatgaggggatcctggatgcctctaagcagcggcacaacaaattgtggcggcagcagacggacagttcactccaacaacctgtcgatgatcccgccggccctggggactttctgccagagacccctgacgggacccccgaatctcagctgcccttcctggacgacgcagcccagcctggactgggcccaccccttccctgctgtttccggcgacttagtgatccactccttccgtcccccgaggacgaaaccgggagtctcgtgcatttagaggacccagagcgggaggccctgctggaggaggctgccccccccgcagaagtccacagacctgcaagacagccccagcagggctctggtctgtgcgagaaagatgttaagaagaaacttgagtttgggagccccaagggcagatccggttcgcttctgcaagtggaggagacagaacgggaagagggtctgggcgcgggaagatggggccagctcccaacgcagctggaccagaatcttctgaactcagaaaacttgaacaataactcaaaacgttcctgtcctaacggaatggaagatgatgctatctttggcattctgaataaagtgaaacccagctacaagtcctgcgccgactgcatgtacccaacagcctctggagcccccgaggcaagtagggaacgatgtgaagaccctaatgcacccgccatctgcacccaaccagcctttttgccccacatcacaagtagccctgtggctcacctcgcctccaggtcaagagttccagagaaaccagcaagtgggccaactgagccgcccccttttttgccacctgcaggaagtagaagggctgacactagcggtcccggcgccggggccgctttagagcccccagccagcctgttggaacccagcagggagactcccaaagttctcccgaagagtttgttactgaagaattcccactgcgacaaaaatcccccaagcacagaggtcgtcatcaaggaggagtcctctcccaagaaagatatgaaacctgccaaggacctcagactcttgtttagcaacgagagcgagaaacccactaccaattcttatctgatgcaacaccaggaatctatcatacagcttcagaaagctggactggtgcgcaaacacacgaaagaacttgagcggctgaagagtgtgcctgccgacccagccccaccatcgcgggatggaccagcctccaggctcgaagcctctattccggaagaaagccaggacccagcagcccttcacgagctgggcccactggtcatgcctagccaggctggctcagacgagaagtccgaagccgcccccgcatctttagagggcggtagcctgaagtccccacccccttttttctacagactggatcacacaagcagcttttccaaggactttcttaaaacaatttgttacacaccaacgtcttccagtatgagttccaatttaacacggagctcttcttccgactccatccactccgtgagaggcaagcctggactcgtgaaacagagaacacaagagatcgagacccggcttcggctggcaggtttaaccgtgagctcacctctgaaacggtctcactccctggctaagctgggtagtctcacgttctctaccgaggacctctcgtcagaagccgatccatcaaccgtcgctgacagccaggatacaacattgtctgagtcctcttttcttcacgaacctcagggaacaccacgagatcccgccgctacatccaaacctagcgggaagcccgctccagagaatctaaagtccccatcttggatgtcaaagtcgtag

SEQ ID NO: 282265 - DNA, 2214 bp, Artificial Sequence
  derived and/or modified sequence
atgcgctgttatcttagctgggatcggtggacttcacctccactgtcatcaatcatcttcatctctgtggattatatcctgaatgtgacgcgagaaatcgacaattttttccccggtctgttcgcctaccataatattagggtttatgatgaggaaactacggatcttctggcccattggaacgaggcctatcacttcataaacaaggccaagcgaaaccattccaaatgtttggtgcattgcaaaatgggcgtgtctcggtcggcttcaactgtgattgcatatgccatgaaggaatttgggtggccattagagaaagcctacaattatgtcaaacaaaaaaggtctatcacccgtccgaacgcagggttcatgaggcagctcagcgaatatgagggaatcttagacgcttccaagcagagacataacaaactgtggcggcaacaaacggacagctcattgcagcagccagtggatgaccctgctgggcctggagactttctgcccgagacccccgatggtactcctgagtcgcagctccccttcctggacgacgctgcccagcccggactcggaccccctctgccttgttgcttccgaagattgtctgatccattattaccctctcccgaggacgaaacagggtcacttgttcatctggaggacccagagagagaggcactactcgaagaagccgcacccccagccgaagtgcaccgtcctgcaagacagccacagcaagggtcgggtctgtgcgagaaggacgtgaagaaaaagctcgagttcggctcccctaaaggtcggagcggctcactcctccaggttgaggagacagagcgagaggagggcttgggcgcaggaagatgggggcagctacctactcaactggatcagaatctgctcaactccgaaaatctgaacaacaacagtaagcgatcctgtcctaatggaatggaggatgacgccatcttcggcatcctgaataaggtgaagcccagctacaagagctgtgccgattgtatgtaccccacggcctcaggggctccggaagcctccagagagagatgtgaggacccaaatgctccggcaatctgcactcagcccgcttttcttccccacattacttccagcccagtcgcccatctggcaagcaggtctcgggttcctgaaaagcccgctagcggaccaactgagccgcctcctttcctccctccagccggttccaggcgcgcagatacttcggggccaggcgcaggcgctgccctcgagcctccagcgagcctgctggagccaagccgggaaactcctaaggtgctgcctaagtccctgctgctgaagaacagccactgtgacaaaaaccccccaagcaccgaagtggttattaaagaggagtccagtcctaagaaggatatgaaaccggcaaaagatctgcgactgctgttcagcaatgaaagcgagaagcctaccactaatagctatctgatgcaacaccaggagtctattatccaactccagaaggcaggcctggttcggaaacacactaaagaactggaacgactgaaatccgtgccagccgacccggcaccccctagtcgagacgggccagccagcaggctcgaggccagtattccagaggagtcccaagacccggctgcactgcacgaactgggaccactggtgatgccatcccaggcaggatccgacgaaaagtccgaagctgccccagcaagcctggaggggggaagcttaaagagccctccccctttcttttatcggttagatcacacgtcatctttctcgaaggattttctgaagactatctgttacactcccaccagtagcagcatgtcttccaacctcacccgtagcagttcatctgattctatacactcagtgagaggcaaacctggcctcgtgaagcaaaggacacaggaaattgagaccagacttcggctcgcaggccttacagtctccagccctctgaagcggtcccactctctggccaaactgggctctctgaccttctccacagaagatctctcctcagaggcagacccttccaccgttgccgactctcaggacactactcttagcgaatcaagttttctccacgaaccccaaggtactcccagggatcccgctgctacatccaagccttcgggcaagcctgccccagagaacctgaaatcccccagttggatgtctaaatcctag

SEQ ID NO: 282266 - DNA, 8488 bp, Artificial Sequence
  derived and/or modified sequence
aggaggccccgggcccggcccgggcggcggtggcggtggcggctctagctcgagacgtctgtggcgccctcgcaccgcgccgcagccatggccctggtgaccctgcagcgctcgcccacgcccagcgccgcctcctcctcggccagcaacagcgagttggaggctggcagcgaagaagatcgaaaattaaacctcagcttaagtgagagctttttcatggtgaaaggcgcagccctcttcttacaacagggaagcagccctcaaggccagcggagtcttcagcacccccacaagcatgcaggtgatctgcctcaacatcttcaggtgatgatcaaccttctgcgttgcgaagacagaatcaagctggcagtgcgcctggagagcgcctgggcggaccgggtccggtacatggtggtggtgtacagcagcgggcgccaggacaccgaggagaatatcttgctgggagtggacttttccagtaaggaaagtaaaagctgcaccattgggatggttctccgactgtggagcgacacgaaaatccaccttgatggagatggtgggttcagcgtgagcacagcaggaaggatgcacatatttaagcctgtgtctgtccaggccatgtggtctgccctgcaggtgcttcacaaggcctgcgaagtggcccggaggcacaactacttccccgggggtgtagctctcatctgggctacctactatgagagctgcatcagctccgagcagagctgcatcaacgagtggaacgccatgcaggacctggagtctacgcggcccgactcccccgcgctatttgtggacaagcccactgaaggggaaaggaccgagcgcctcatcaaagccaagctccgaagcatcatgatgagccaggatctagaaaatgtgacttccaaagagattcgtaatgaattagagaaacagatgaattgtaacttgaaggaactcaaggaatttatagacaatgagatgctacttatcttgggacagatggacaagccctcccttatcttcgatcatctttatctcggttgattacattttaaatgttaccagagaaatcgataatttttttcctggcttatttgcatatcataacatccgagtctacgatgaagagaccacagacctcctcgcccactggaatgaagcgtatcattttataaacaaagcgaagaggaaccattccaagtgcctggtgcattgcaaaatgggcgtgagtcgctcggcctccacagtcatagcctatgcaatgaaggaattcggctggcctctggaaaaagcatataactatgtaaagcagaagcgcagcatcacgcgccccaacgcgggctttatgaggcagctgtctgagtatgaaggcatcttggatgcaagcaaacagcggcacaacaagctgtggcgtcagcagacagacagcagcctccagcagcctgtggatgaccctgcaggacctggcgacttcttgccagagaccccagatggcaccccggaaagccagctgcccttcttggatgatgccgcccagcccggcttagggccccccctcccctgctgtttccggcgactctcagacccccttctgccttcccctgaggatgaaactggcagcttggtccacctggaggatccggagagggaggctctgttggaggaagctgctccacctgcagaggtgcacaggccggccagacagccccagcaaggttccggactctgtgagaaggatgtgaagaagaaactagagtttgggagtcccaaaggtcggagcggctccttgctgcaggtggaggagacggaaagggaggagggcctgggagcagggaggtgggggcagcttccaacccagctcgatcaaaacctgctcaactcggagaacctaaacaacaacagcaagaggagctgtcccaacggcatggaggatgatgctatatttgggatccttaacaaagtgaagccttcctataaatcctgtgccgactgcatgtaccctacagccagcggggctcctgaggcctccagggagcgatgtgaggaccccaatgctcccgccatctgcacccagccagccttcctaccccacatcacgtcctcccctgtggcccacttggccagcaggtcccgtgttccggagaagccagcctctggcccaaccgaacctcccccgttcctaccaccagcaggctccaggagggcagacaccagtggccctggggctggagctgccctagagccaccagccagccttttggaaccttccagagagaccccaaaagtcctgccaaagtccctccttttgaagaattctcactgtgataagaaccctcccagcacagaagtggtaataaaggaagaatcgtcacccaagaaagatatgaagccagccaaggacctgaggcttctgttcagtaatgaatctgagaagccgacaaccaacagctacctgatgcagcaccaggagtccatcattcagctgcagaaggcaggcttggtccgcaagcacaccaaagagctagagcggctgaagagcgtgcctgcagacccagcacctccctccagggatggccctgccagcaggctggaggccagcatccccgaggagagccaggatccagccgcgctccacgagctgggccccctggttatgcccagccaggccgggagtgatgagaagtcagaggccgcccccgcttcattggaaggaggctcactgaagagcccccctcctttcttctaccgcctggaccacaccagtagtttctcaaaagactttctgaagaccatctgctacacccccacctcctcttccatgagctccaacctgacccggagctccagcagcgatagcatccacagtgtccgtgggaagcccgggctggtgaagcagcggacacaggagattgagacccggctccggctggcgggcctcaccgtctcttccccactgaagcgctcacactctcttgccaagctggggagtctcaccttctcaacggaagacctgtccagtgaggctgacccgtccaccgtcgctgactcccaggacaccactttgagtgaatcttccttcttgcatgagccccagggaaccccgagggacccagctgcaacctccaaaccatcagggaaacccgccccagaaaacttaaagagcccttcgtggatgagcaaaagctgacccgccttttgctgcgtcaggctgggcggatattttcatatgatccctccctcactttcactgtggatttggatcgaccccttacatcttgatttcccttaaacgagtgaagtcatcctaacttttcccctactcttgccatagagaggaggagaagaaactaaccaacatgcagcacaagaaggggagctgtcagtcgtgtggcctgggagaaccaggagccgccggccaggagacacaaaactccgctcccaccgtgtcttcaagaagaaccatgttttaggaagaacgtgcacacataggcgcacacatccagactgttcccttcgcatcctgcagaagagtcctggtggtggcagcctcaccgcggcacacgttctagctcattcttggcctcgcagaaaactctcggatggcaacattaagtcctacctctgttctcgctgcgctttttatttttaaaacacacgaatgaccaaggcttgttccagggaataatgctctgtctgaaagcgtttttccaaaaaaagaatttttcgttttgtgttttggttgggaccccagacgtgtcaagacttttaacccgacagccccaagcactgctgagtaaagtcatcagatgagtagtcccacgctgttgttgagctgactctgtgcccgaatggtggtgcaggcgccctgtcctggttgtgttgttacgtgtttgaccagcacaggggtccggtggggaaaatgtatgggttgttctcagttgttgctaatgctgaagtttaaatctcaaggggaagggcccacctgcattgttgagtgtctgctgctgaaacacatgattgtgtttaggtttgaaattgctcaagtgtctggctcaggtggtggttctgagacacatcgtcctgctgagagcccagatgcttaggtccactagggcccatctagggaagggaaaggagatttcagcggcttccccgaaaggaacgggactgtcgggatgcttcccggatgtctacagttgccccttcctgcagtgagattactgcttcctgtttccctccagctcttcccagcagcagtgagggagtataagagggatctgtagtcgctgcctggctctgtgggcggcccctttaagactcaggtgagctcagccagtcccgctgcgccaggcttgaatcaaaggtgtcagcaagctagatgtcaaaacatttcgagagagaggcagcttgcagaaaagcagaaaggttgaattcaggggtcagcaaactatggcatgtggccccgtgagctaggaatggtttttcctctttaagacagggcctggctctgtcacctaggctggagtacagtagtgcaatcatgactcactgcagcatcaacctccctggctcaagcgatggcttttacctttttaaggagttgtaaaaaaaagaaataatatgtgacagaattcatgtggcccacaaagcctgaggtacttactgtcaggccctttgtagaaaaagttgctgacccctggtttgatttgccacacagggctgctcatggccctgtaggaagaaactgggtaaatgtgaagccctctgcctctctgacacctaaggccagacccttccctcctcccgaccacaagctttgccagccccgcactagcctcacctgtgcaggatggagtaggttgcgtacatgggggaaggcaggtgaacacagttggctgaagctcttccacaattccatcttgccctcagctgggtccgccagattaactcagtgaaaccagaaagccttcaaggaccagctgaattctgaaagtgagtgagtgagccatcatcttaacattggccagaactgtgttccccaaagctattctagaaagcaccccaggagggatctgcaggaacaaggctagttcatattttacctagtgagcacagtttttgcaaaaatcctccctccaggactttgtctccttggagtgatttttaaaaatacatacattactttatagggagctgttttcccactagtgtcaattaaaatcaccttaaaaggtgattatccacttattcctaaacccctgtgggttgttccccctttccctcagccaacaaaagcatagcctcaaaaaatatcaagttcggtatgttttgccaaatcaaatttcatgtggtagatcaatttttgtgtcaaaataatcttttaaatttagtgatgacaggcttttgttggttttttaaccacgtctatgtatgagaatgatatatttttgaaaactttaattttgaaagccataatttttcttatctaaagagttggggggtggggtgtggaatctggagagtacaagttggtctttggcttctggcaaacttacccattcatttttggaagcacagctagcatatcaacatccagacgagagcgctggtcccgtccacagagcagagtgaagcattctggacttgatgcttaatagcctggcctggagaaaagggtaaggtttatttttggaaacccagatcagttgcatgtaaacagatggcacatggctatttaaaatgctgtatgatggggccgggcgcggtggctcacgcctgtaatcctagcactttgggaggccgaggcaggcggatcatctgaggtcaggagttctagaccagcctggccaacatggtgaaaccccgtctctactaaaaatacaaaaacttagctgggtgtggtagtgcgtgcctgtaatcctagctacttaggaggctgaggcaggagaatcgcttgaacctgggtggcggaggttgcaatgagccgagatcgcgccactgcactccagcctgggtgcaatgaaactgggagtgaaactccgtctcaaaaaaataaaatgctgtatgaacaagatgagcattctgtcaggtgtcgggacacctgggcaaagacgaattcatgctgtctgtgaaaaggaagtttgcactgtaacatatgccatagcttggcccttgctttgtatgcaaccttagctgatggggaaaattccaaacataagtggcacaggaaagaggcaggcagaggaggcaggggtctgtgctgtgcaagtcactggttttttatgactatcattttcattgaatgcatttgttgaattgggacaaaaggaacattttctaaatcagcttgatactctttataaaaaacagctgaatcttatcttctgcctcacattaattcatgtggcatgccaaaagttagactgaacttttctacatcttcaccttgcattgatacaggaaagtcttctctttaagtcttgctaagtataagggggatagtggtcacgggaagaggagaaccggggctgctctcggatggtaattgacaatgccgatttccatttctttgtcttacggctacttccgagccttctagcaaggtccctggttgcatgtatttcctaagagcagagtttatttctctttacattccctgcttccttgctctccatgcagggaccccagccaacctctgggctgttgaatagctctctgctgggtggcaagcccttctccttggcaccctgttgcttaagcatacagattgctcaccaggtgcacacagacagctgtactgtccaagcccattctgctccaccctgtcctcttcagctaaagagcattccagtaatctaaagcccttttcccctggagaagtccagagtttgcagcagtgtggagctgagcttgaacagaacagaccctcagcacggccctggactaatgcactcttatctgagggcagtccattctagaaggttgatgaatttccctaccactctcctggggaccttttctctctagtgggaacaaatgctacataatttagtcaagatcctattaagtcatctcacctgaggcatctggagagggagttgccttccattggtgggaaattgttggtgccagaatacattttgcccaaaactcttctcattggctggccacctagcagggctcctctaaacacgcaactcagcgaggggacccccttcacctctggcaagagagctgggtagatcagaaacttggtgacacctggctagcacagagcaggctcacttgtcttggtcccactacccagattcctgcagacattgcaaaccaaatgaaggttgttgaatgacccctgtccccagccacttgttttgttatcatctgctctgcagtggaatgcctgtgtgtttgagttcactctgcatctgtatatttgagtatagaaaccgagtcaagtgatcatgtgcatccagacacactgtgtcacctgagccacagagcaaatcaccttaacgatctggaatgaaactgtgaccagtgccgccctgggtggttctggagagactgccgtcttcttgtttggccataggtgctggggccccggcttcagtcactgtctcagacaggagtcccgataagcagatcaccagtcctccactgtccttcctgtcggccttgctgcatgagaagatagctgcttcctccctcttttcctacactgtaattattgttttacaattgagtgccttaataatagtttacaaatactatgtatttatgcaaaactgttaaagtctcatctgttatgattggatacttggtcttgtcagtagtggtcagcattgggttgtgagcttgtcctactccatacgtgtttatcctgctatgcagttttacattgtgtgttcacatctattccaaggagccttgctagaaacaacactggcggttcctgcaggccaggcaggcattggcccatgctgtgtcccataggagccaatgaaagaacgtagcttggtctgctagccagccgtggggtggcgcaggccaggcagcctctgcaccagagtccagcacctgcccattccccagtcacacaatcatactcttctttcatagagattttattaccacctagaccaccctagttttcctctctgttagtgtcctgagctcttttgcaacaaaatgtaggtacagaccaatccctgtcccttccccaatcaggagctccacaccatgagttgtttggttttccagaagctgccagtgggttcccgtgaattgcgttaagatatcgatgattttttttattgtttttcttcttgtttttttaaataatatatttaaaggcagtatcttttgtactgtgaatttgcagtagaagatgcagaatgcactttttttttacttctgttggtgtgtattgtatatagtgtgtgtgcttcttgtgatgaaaataaactttttctttataaattcctga

SEQ ID NO: 282267 - DNA, 2214 bp, Artificial Sequence
  derived and/or modified sequence
atgagatgctacctgagctgggacagatggaccagcccccccctgagcagcatcatcttcatcagcgtggactacatcctgaacgtgaccagagagatcgacaacttcttccccggcctgttcgcctaccacaacatcagagtgtacgacgaggagaccaccgacctgctggcccactggaacgaggcctaccacttcatcaacaaggccaagagaaaccacagcaagtgcctggtgcactgcaagatgggcgtgagcagaagcgccagcaccgtgatcgcctacgccatgaaggagttcggctggcccctggagaaggcctacaactacgtgaagcagaagagaagcatcaccagacccaacgccggcttcatgagacagctgagcgagtacgagggcatcctggacgccagcaagcagagacacaacaagctgtggagacagcagaccgacagcagcctgcagcagcccgtggacgaccccgccggccccggcgacttcctgcccgagacccccgacggcacccccgagagccagctgcccttcctggacgacgccgcccagcccggcctgggcccccccctgccctgctgcttcagaagactgagcgaccccctgctgcccagccccgaggacgagaccggcagcctggtgcacctggaggaccccgagagagaggccctgctggaggaggccgccccccccgccgaggtgcacagacccgccagacagccccagcagggcagcggcctgtgcgagaaggacgtgaagaagaagctggagttcggcagccccaagggcagaagcggcagcctgctgcaggtggaggagaccgagagagaggagggcctgggcgccggcagatggggccagctgcccacccagctggaccagaacctgctgaacagcgagaacctgaacaacaacagcaagagaagctgccccaacggcatggaggacgacgccatcttcggcatcctgaacaaggtgaagcccagctacaagagctgcgccgactgcatgtaccccaccgccagcggcgcccccgaggccagcagagagagatgcgaggaccccaacgcccccgccatctgcacccagcccgccttcctgccccacatcaccagcagccccgtggcccacctggccagcagaagcagagtgcccgagaagcccgccagcggccccaccgagcccccccccttcctgccccccgccggcagcagaagagccgacaccagcggccccggcgccggcgccgccctggagccccccgccagcctgctggagcccagcagagagacccccaaggtgctgcccaagagcctgctgctgaagaacagccactgcgacaagaacccccccagcaccgaggtggtgatcaaggaggagagcagccccaagaaggacatgaagcccgccaaggacctgagactgctgttcagcaacgagagcgagaagcccaccaccaacagctacctgatgcagcaccaggagagcatcatccagctgcagaaggccggcctggtgagaaagcacaccaaggagctggagagactgaagagcgtgcccgccgaccccgccccccccagcagagacggccccgccagcagactggaggccagcatccccgaggagagccaggaccccgccgccctgcacgagctgggccccctggtgatgcccagccaggccggcagcgacgagaagagcgaggccgcccccgccagcctggagggcggcagcctgaagagccccccccccttcttctacagactggaccacaccagcagcttcagcaaggacttcctgaagaccatctgctacacccccaccagcagcagcatgagcagcaacctgaccagaagcagcagcagcgacagcatccacagcgtgagaggcaagcccggcctggtgaagcagagaacccaggagatcgagaccagactgagactggccggcctgaccgtgagcagccccctgaagagaagccacagcctggccaagctgggcagcctgaccttcagcaccgaggacctgagcagcgaggccgaccccagcaccgtggccgacagccaggacaccaccctgagcgagagcagcttcctgcacgagccccagggcacccccagagaccccgccgccaccagcaagcccagcggcaagcccgcccccgagaacctgaagagccccagctggatgagcaagagctag

SEQ ID NO: 282268 - protein, 418 aa, Artificial Sequence
  derived and/or modified sequence
MRLSAGPDAGPSGNSSPWWPLATGAGNTSREAEALGEGNGPPRDVRNEELAKLEIAVLAVTFAVAVLGNSSVLLALHRTPRKTSRMHLFIRHLSLADLAVAFFQVLPQMCWDITYRFRGPDWLCRVVKHLQVFGMFASAYMLVVMTADRYIAVCHPLKTLQQPARRSRLMIAAAWVLSFVLSTPQYFVFSMIEVNNVTKARDCWATFIQPWGSRAYVTWMTGGIFVAPVVILGTCYGFICYNIWCNVRGKTASRQSKGAEQAGVAFQKGFLLAPCVSSVKSISRAKIRTVKMTFVIVTAYIVCWAPFFIIQMWSVWDPMSVWTESENPTITITALLGSLNSCCNPWIYMFFSGHLLQDCVQSFPCCQNMKEKFNKEDTDSMSRRQTFYSNNRSPTNSTGMWKDSPKSSKSIKFIPVST

SEQ ID NO: 282269 - DNA, 1525 bp, Artificial Sequence
  derived and/or modified sequence
agaccctgcgcttcggacgaggagcccaagtcctccgagacggggagggagcggcccgcgagggctggagctccgaagagggccgagtaggagctgcatggacagcatgcgtctctccgccggtcccgacgcggggccctcgggcaactccagcccatggtggcctctggccaccggcgctggcaacacaagccgggaggccgaagccctcggggagggcaacggcccaccgagggacgtgcgcaacgaggagctggccaaactggagatcgccgtgctggcggtgactttcgcggtggccgtgctgggcaacagcagcgtactgctggctctgcaccggacgccgcgcaagacgtcccgcatgcacctcttcatccgacacctcagcctggccgacctggccgtggcattcttccaggtgctgccgcaaatgtgctgggacatcacctaccgcttccgcggccccgactggctgtgccgcgtggtgaagcacctgcaggtgttcggcatgtttgcgtcggcctacatgctggtagtcatgacagccgaccgctacatcgcggtgtgccacccgctcaagactctgcaacagcccgcgcgccgctcgcgcctcatgatcgcggccgcctgggtgctgagcttcgtgctgagcacgccgcagtacttcgtcttctccatgatcgaggtgaacaatgtcaccaaggcccgcgactgctgggccaccttcatccagccctggggttctcgtgcctacgtgacctggatgacgggcggcatctttgtggcgcccgtggtcatcttgggtacctgctacggcttcatctgctacaacatctggtgcaacgtccgcgggaagacggcgtcgcgccagagcaagggtgcagagcaagcgggtgtggccttccaaaaggggttcctgctcgcaccctgtgtcagcagcgtgaagtccatttcccgggccaagatccgcacggtgaagatgacttttgtgatcgtgacggcttacatcgtctgctgggcgcctttcttcatcatccagatgtggtctgtctgggatcccatgtccgtctggaccgaatcggaaaaccctaccatcaccatcactgcattactgggttccttgaatagctgctgtaatccctggatatacatgttttttagtggccatctccttcaagactgtgttcaaagcttcccatgctgccaaaacatgaaggaaaaattcaacaaagaagatactgacagtatgagcagaagacagactttttattctaacaatcgaagcccaacaaacagtacgggtatgtggaaggactcgcctaaatcttccaagtccatcaaattcattcctgtttcaacttgagccttgcattcatgcaacttgattcttgtgattgactttttggctcattagctgaattgagctagaaatcacaagaacaaatacactttattaatataaccataaatcaattcattgtgtatgagactgtgtttctagttgcattttcatattgctaccaaa

SEQ ID NO: 282270 - protein, 1675 aa, Artificial Sequence
  derived and/or modified sequence
MLGAPDESSVRVAVRIRPQLAKEKIEGCHICTSVTPGEPQVFLGKDKAFTFDYVFDIDSQQEQIYIQCIEKLIEGCFEGYNATVFAYGQTGAGKTYTMGTGFDVNIVEEELGIISRAVKHLFKSIEEKKHIAIKNGLPAPDFKVNAQFLELYNEEVLDLFDTTRDIDAKSKKSNIRIHEDSTGGIYTVGVTTRTVNTESEMMQCLKLGALSRTTASTQMNVQSSRSHAIFTIHVCQTRVCPQIDADNATDNKIISESAQMNEFETLTAKFHFVDLAGSERLKRTGATGERAKEGISINCGLLALGNVISALGDKSKRATHVPYRDSKLTRLLQDSLGGNSQTIMIACVSPSDRDFMETLNTLKYANRARNIKNKVMVNQDRASQQINALRSEITRLQMELMEYKTGKRIIDEEGVESINDMFHENAMLQTENNNLRVRIKAMQETVDALRSRITQLVSDQANHVLARAGEGNEEISNMIHSYIKEIEDLRAKLLESEAVNENLRKNLTRATARAPYFSGSSTFSPTILSSDKETIEIIDLAKKDLEKLKRKEKRKKKRLQKLEESNREERSVAGKEDNTDTDQEKKEEKGVSERENNELEVEESQEVSDHEDEEEEEEEEEDDIDGGESSDESDSESDEKANYQADLANITCEIAIKQKLIDELENSQKRLQTLKKQYEEKLMMLQHKIRDTQLERDQVLQNLGSVESYSEEKAKKVRSEYEKKLQAMNKELQRLQAAQKEHARLLKNQSQYEKQLKKLQQDVMEMKKTKVRLMKQMKEEQEKARLTESRRNREIAQLKKDQRKRDHQLRLLEAQKRNQEVVLRRKTEEVTALRRQVRPMSDKVAGKVTRKLSSSDAPAQDTGSSAAAVETDASRTGAQQKMRIPVARVQALPTPATNGNRKKYQRKGLTGRVFISKTARMKWQLLERRVTDIIMQKMTISNMEADMNRLLKQREELTKRREKLSKRREKIVKENGEGDKNVANINEEMESLTANIDYINDSISDCQANIMQMEEAKEEGETLDVTAVINACTLTEARYLLDHFLSMGINKGLQAAQKEAQIKVLEGRLKQTEITSATQNQLLFHMLKEKAELNPELDALLGHALQDFKHFFVENVEDSTDEDAPLNSPGSEGSTLSSDLMKLCGEVKPKNKARRRTTTQMELLYADSSELASDTSTGDASLPGPLTPVAEGQEIGMNTETSGTSAREKELSPPPGLPSKIGSISRQSSLSEKKIPEPSPVTRRKAYEKAEKSKAKEQKHSDSGTSEASLSPPSSPPSRPRNELNVFNRLTVSQGNTSVQQDKSDESDSSLSEVHRNSNLRGIINPFPASKGIRAFPLQCIHIAEGHTKAVLCVDSTDDLLFTGSKDRTCKVWNLVTGQEIMSLGGHPNNVVSVKYCNYTSLVFTVSTSYIKVWDIRDSAKCIRTLTSSGQVTLGDACSASTSRTVAIPSGENQINQIALNPTGTFLYAASGNAVRMWDLKRFQSTGKLTGHLGPVMCLTVDQISSGQDLIITGSKDHYIKMFDVTEGALGTVSPTHNFEPPHYDGIEALTIQGDNLFSGSRDNGIKKWDLTQKDLLQQVPNAHKDWVCALGVVPDHPVLLSGCRGGILKVWNMDTFMPVGEMKGHDSPINAICVNSTHIFTAADDRTVRIWKARNLQDGQISDTGDLGEDIASN

SEQ ID NO: 282271 - DNA, 5028 bp, Artificial Sequence
  derived and/or modified sequence
atgctcggcgcgccagatgagtcctccgtcagggtggcagtgcgtattcggccgcaattggccaaggaaaaaatcgaagggtgccatatctgcacatccgtaacacccggagaacctcaggtgtttctcggcaaagacaaggcattcactttcgattacgtatttgatatagatagccagcaagagcagatttacatccaatgcattgaaaaacttatagagggctgcttcgagggctataacgccaccgtattcgcatacggacagaccggagctgggaagacatatactatgggcacgggctttgacgtgaacatcgttgaggaggagcttggaattatcagccgcgctgttaagcatctctttaagtctatcgaagagaagaaacatatagcaataaagaatggtctgccagctccagacttcaaagtcaacgcccaatttctggagctgtataacgaggaggtcctggacctgtttgacacgaccagggatatagacgctaagagcaaaaaatccaacatccgtatccatgaagattcgactggcgggatatacaccgtgggagtcaccacaagaactgttaatactgagtccgaaatgatgcagtgccttaaacttggcgccctttcaaggaccacagcgtctactcagatgaatgtccagagcagccgatcccatgccattttcaccatccacgtgtgtcagacccgtgtgtgcccccagattgatgccgataacgccacagataacaagattatctctgagtccgcacaaatgaacgaattcgaaacattaactgctaaattccattttgtcgacttagcaggttcagaaaggttgaagcgcaccggagccactggagagcgcgccaaagagggaattagcattaactgcgggctcctggctcttgggaacgttatcagcgccttgggcgacaagtcgaagcgggctactcacgtcccctaccgggactctaagttaactaggctgttgcaagactcattgggcggaaattctcagactatcatgatagcctgcgtgtctccttctgatcgtgattttatggagacccttaatacactcaagtatgccaacagggcccgcaatatcaaaaacaaggtcatggtgaaccaggatcgggctagccaacagataaatgctctgcgtagcgagattacccggctgcagatggagctgatggaatacaaaactggtaaaagaatcattgacgaagaaggtgttgaaagcatcaacgatatgttccatgaaaatgcaatgctgcagaccgagaataacaatttaagggtgagaatcaaggccatgcaggaaaccgtggatgctttgaggtccaggattacacagttggtctcagatcaggccaatcacgtgctggcacgggccggtgaggggaacgaggaaatttccaatatgatccatagttacataaaggagattgaggacctccgcgccaagctgttggagtccgaggccgtgaatgaaaatctccgaaaaaacctcacccgcgccacagcaagagctccatatttcagtgggtcctcaaccttcagcccgactattctgagcagcgataaggagacaatcgagatcattgacctggccaagaaagacctcgaaaaactgaagagaaaagaaaagagaaaaaaaaaacggctgcagaagcttgaggagtcgaatcgcgaggagaggagtgttgcgggaaaggaagataacactgacacggaccaggagaagaaggaggaaaaaggcgtgtccgagagggagaataacgaactggaagtcgaagagagccaggaagtgtccgaccatgaggatgaagaggaggaggaagaggaagaggaggacgatatcgatggaggcgagagttctgacgaatcagattccgaatccgacgagaaagcaaattatcaggctgacctcgcgaatatcacctgtgaaatcgctataaaacagaagttaatagatgagctagagaattcgcagaagaggctacagaccctaaagaagcagtatgaagagaaactgatgatgctacaacacaaaatcagagatactcagttggaacgcgatcaggttcttcagaatctgggctcagtcgagtcttactcggaggagaaggcaaagaaagttagatctgagtatgaaaaaaaactgcaggctatgaataaagagctgcagcgtctgcaagcagcccagaaggagcacgcacgcctgttaaagaaccagagccagtacgagaagcagttaaagaagctgcagcaagacgtcatggaaatgaagaaaacaaaagtgcggttaatgaagcagatgaaggaagagcaagagaaagcccgcttaactgagagccggcgcaatagggagatcgcccagctgaagaaagaccagcgaaagcgggatcaccagctgaggctgctggaagcacagaagcgcaatcaggaagtggtactccgacgcaaaacggaagaagtaaccgctctgcggagacaggtgaggcctatgagtgataaagtagccgggaaagtgactcggaaacttagcagctccgatgctcccgctcaggatactggtagctcggcagcagccgttgaaacggacgctagccggacaggcgcccaacagaagatgcggatcccagtcgcaagggttcaagcactgcctactcctgccaccaatggcaatagaaagaagtaccaacgcaagggcctcactggccgggtatttatcagcaagaccgctcggatgaaatggcagctgttggagaggcgggtcaccgatattattatgcagaaaatgacaattagtaatatggaagctgatatgaataggctccttaagcaaagggaggagctcacaaaacggcgcgagaagctctccaaaaggcgggagaaaatcgtgaaggaaaacggtgaaggcgataagaatgtggccaatattaatgaagagatggagagcctgactgccaacatcgactacataaatgacagcatctccgattgccaagctaacatcatgcagatggaagaagcaaaagaggaaggggagacattggatgttaccgctgtgataaacgcctgtactctgacagaagcgcgctatttgcttgaccattttctgagtatgggaataaacaaaggccttcaagcagcacagaaggaagcacaaattaaagttctggaggggagactcaagcagacagaaatcactagcgcaacacagaaccagctgctgttccacatgctaaaagagaaggccgaactgaatcccgagctggacgcactactcggccatgccctgcaggactttaagcatttctttgtagagaatgttgaggacagtaccgatgaagatgcaccacttaactcccccggatctgagggctcaactctgtccagtgaccttatgaagctgtgcggggaggtgaaacccaagaacaaagcccggaggcggacgactacccagatggaactcctatacgccgattcatcggagctggcttctgacacgagtacgggagacgcttcgctccccgggcccctcactccagtggctgaaggacaggagatcggtatgaacactgaaacctcaggcaccagcgctcgcgaaaaagaattaagccccccccccggcttgcctagcaaaataggtagcatctcaagacaatcttccctgtcagagaagaagattccagaacccagccctgtaaccaggcgaaaagcatatgagaaagcggagaaaagcaaggcaaaggagcagaagcattctgatagcggtaccagtgaggcttcactgagccctccaagttcccctccaagcaggccacgaaacgaactgaatgttttcaataggctcaccgtgagtcaggggaacacatccgtgcaacaagacaagtctgatgagagcgacagtagcctgagtgaggtccaccgtaattcaaatttgagaggtatcatcaatccatttccagcctccaaaggcatacgggctttccccctgcagtgtatccacatcgccgaggggcacaccaaagccgtgctctgtgtggactccactgacgatttgctgtttaccggctcgaaggatagaacatgtaaagtatggaatctggtcaccggacaggaaatcatgtctctcggagggcaccccaacaacgtggtatctgtcaagtattgtaattacacttccctcgtgttcactgttagcaccagctacattaaggtgtgggatatacgagacagcgcgaaatgtattcgcactctcacttcctccggacaggtcaccttgggggacgcgtgcagcgcatccactagcagaacagtggcaattccaagcggagaaaaccagataaatcagatcgcacttaacccaaccggaaccttcctgtacgcagctagtggaaatgccgtgagaatgtgggacctaaaaaggtttcagtcaaccggcaagttgacaggccatctgggccccgtgatgtgcctgacagtggatcagatcagttctggccaggacttgatcattactggcagtaaagatcactatattaagatgtttgacgtcactgagggagcattaggcacagtctctccaacacataattttgagcccccccattacgatggaatagaagcgctgactatccagggtgacaacctgttctccggaagccgggacaatgggattaagaagtgggatttaacacagaaggatctgctccagcaagtacctaatgctcacaaggattgggtgtgcgctctaggcgtcgttcccgaccaccctgtgctcctttccggatgcaggggcggcattctaaaagtatggaacatggacaccttcatgcccgtaggtgagatgaagggacatgacagccctattaacgccatctgcgtgaattccacacacatcttcactgcagctgacgacagaactgtaaggatttggaaagcccgcaacctacaggatgggcaaatctccgataccggagacttaggagaggacattgcctctaactag

SEQ ID NO: 282272 - DNA, 6643 bp, Artificial Sequence
  derived and/or modified sequence
gaggagcccggagcgccctggcgggcgtggagtccccagcctggccgctgggaggccgcgtccccaccggagggggcagggcgcactcacccggccgccctgaggccgctggcggcctgttggcttctccacaggcgcgctcgccgttcaagcgcgctttgtccccgccccagatcctggggggtgagcggtggagaaggggcgggcgcccgcgagccgtgaatcacctcctcctcttgctgcctcagcgccgccgccacctttccattcagtcgcccaacatggctggagcgcggcggaggtgagccggccgcccgcccgcagacgccccagcctactgcgcccgagtcccgcggccccagtggcgcctcagctctgcggtgccgaggcccaacggctcgatcgctgcccgccgccagcatgttgggcgccccggacgagagctccgtgcgggtggctgtcagaataagaccacagcttgccaaagagaagattgaaggatgccatatttgtacatctgtcacaccaggagagcctcaggtcttcctagggaaagataaggcttttacttttgactatgtatttgacattgactcccagcaagagcagatctacattcaatgtatagaaaaactaattgaaggttgctttgaaggatacaatgctacagtttttgcttatggacaaactggagctggtaaaacatacacaatgggaacaggatttgatgttaacattgttgaggaagaactgggtattatttctcgagctgttaaacacctttttaagagtattgaagaaaaaaaacacatagcaattaaaaatgggcttcctgctccagattttaaagtgaatgcccaattcttagagctctataatgaagaggtccttgacttatttgataccactcgtgatattgatgcaaaaagtaaaaaatcaaatataagaattcatgaagattcaactggaggaatttatactgtgggcgttacaacacgtactgtgaatacagaatcagagatgatgcagtgtttgaagttgggtgctttatcccggacaactgccagtacccagatgaatgttcagagctctcgttcacatgccatttttaccattcatgtgtgtcaaaccagagtgtgtccccaaatagatgctgacaatgcaactgataataaaattatttctgaatcagcacagatgaatgaatttgaaaccctgactgcaaagttccattttgttgatctcgcaggatctgaaagactgaagcgtactggagctacaggcgagagggcaaaagaaggcatttctatcaactgtggacttttggcacttggcaatgtaataagtgccttgggagacaagagcaagagggccacacatgtcccctatagagattccaagctaacaagactactacaggattccctcgggggtaatagccaaacaatcatgatagcatgtgtcagcccttcagacagagactttatggaaacgttaaacaccctgaaatacgccaatcgagctagaaatatcaagaataaggtgatggtcaatcaggacagagctagtcagcaaatcaatgcacttcgtagtgaaatcacacgacttcagatggagctcatggagtacaaaacaggtaaaagaataattgacgaagagggtgtggaaagcatcaatgacatgtttcatgagaatgctatgctacagactgaaaataataacctgcgtgtaagaattaaagccatgcaagagacggttgatgcattgaggtccagaattacacagcttgttagtgatcaggccaaccatgttcttgccagagcaggtgaaggaaatgaggagattagtaatatgattcatagttatataaaagaaatcgaagatctcagggcaaaattattagaaagtgaagcagtgaatgagaaccttcgaaaaaacttgacaagagccacagcaagagcgccatatttcagcggatcatcaactttttctcctaccatactatcctcagacaaagaaaccattgaaattatagacctagcaaaaaaagatttagagaagttgaaaagaaaagaaaagaggaagaaaaaaaggctacagaaacttgaggaaagcaatcgagaagaaagaagtgtggctggtaaagaggataatacagacactgaccaagagaagaaagaagaaaagggtgtttcggaaagagaaaacaatgaattagaagtggaagaaagtcaagaagtgagtgatcatgaggatgaagaagaggaggaggaggaggaggaagatgacattgatgggggtgaaagttctgatgaatcagattctgaatcagatgaaaaagccaattatcaagcagacttggcaaacattacttgtgaaattgcaattaagcaaaagctgattgatgaactagaaaacagccagaaaagactgcagactctgaaaaagcagtatgaagagaagctaatgatgctgcaacataaaattcgggatactcagcttgaaagagaccaggtgcttcaaaacttaggctcggtagaatcttactcagaagaaaaagcaaaaaaagttaggtctgaatatgaaaagaaactccaagccatgaacaaagaactgcagagacttcaagcagctcaaaaagaacatgcaaggttgcttaaaaatcagtctcagtatgaaaagcaattgaagaaattgcagcaggatgtgatggaaatgaaaaaaacaaaggttcgcctaatgaaacaaatgaaagaagaacaagagaaagccagactgactgagtctagaagaaacagagagattgctcagttgaaaaaggatcaacgtaaaagagatcatcaacttagacttctggaagcccaaaaaagaaaccaagaagtggttctacgtcgcaaaactgaagaggttacggctcttcgtcggcaagtaagacccatgtcagataaagtggctgggaaagttactcggaagctgagttcatctgatgcacctgctcaggacacaggttccagtgcagctgctgtcgaaacagatgcatcaaggacaggagcccagcagaaaatgagaattcctgtggcgagagtccaggccttaccaacgccggcaacaaatggaaacaggaaaaaatatcagaggaaaggattgactggccgagtgtttatttccaagacagctcgcatgaagtggcagctccttgagcgcagggtcacagacatcatcatgcagaagatgaccatttccaacatggaggcagatatgaatagactcctcaagcaacgggaggaactcacaaaaagacgagagaaactttcaaaaagaagggagaagatagtcaaggagaatggagagggagataaaaatgtggctaatatcaatgaagagatggagtcactgactgctaatatcgattacatcaatgacagtatttctgattgtcaggccaacataatgcagatggaagaagcaaaggaagaaggtgagacattggatgttactgcagtcattaatgcctgcacccttacagaagcccgatacctgctagatcacttcctgtcaatgggcatcaataagggtcttcaggctgcccagaaagaggctcaaattaaagtactggaaggtcgactcaaacaaacagaaataaccagtgctacccaaaaccagctcttattccatatgttgaaagagaaggcagaattaaatcctgagctagatgctttactaggccatgctttacaagattttaaacatttttttgtagaaaatgtagaggatagtactgatgaggatgctcctttaaacagcccaggatcagaaggaagcacgctgtcttcagatctcatgaagctttgtggtgaagtgaaacctaagaacaaggcccgaaggagaaccaccactcagatggaattgctgtatgcagatagcagtgaactagcttcagacactagtacaggagatgcctccttgcctggccctctcacacctgttgcagaagggcaagagattggaatgaatacagagacaagtggtacttctgctagggaaaaagagctctctcccccacctggcttaccttctaagataggcagcatttccaggcagtcatctctatcagaaaaaaaaattccagagccttctcctgtaacaaggagaaaggcatatgagaaagcagaaaaatcaaaggccaaggaacaaaagcactcagattctggaacttcagaggctagtctttcacctccttcttccccaccaagccggccccgtaatgaactgaatgtttttaatcgtcttactgtttctcagggaaacacatcagttcagcaggataagtctgatgaaagtgactcctctctctcggaggtacacagaaattctaaccttaggggcataatcaacccatttcctgcttcaaaaggaatcagagcttttccacttcagtgtattcacatagctgaagggcatacaaaagctgtgctctgtgtggattctactgatgatctcctcttcactggatcaaaagatcgtacttgtaaagtatggaatctggtgactgggcaggaaataatgtcactggggggtcatcccaacaatgtcgtgtctgtaaaatactgtaattataccagtttggtcttcactgtatcaacatcttatattaaggtgtgggatatcagagattcagcaaagtgcattcgaacactaacgtcttcaggtcaagttactcttggagatgcttgttctgcaagtaccagtcgaacagtagctattccttctggagagaaccagatcaatcaaattgccctaaacccaactggcaccttcctctatgctgcttctggaaatgctgtcaggatgtgggatcttaaaaggtttcagtctacaggaaagttaacaggacacctaggccctgttatgtgccttactgtggatcagatttccagtggacaagatctaatcatcactggctccaaggatcattacatcaaaatgtttgatgttacagaaggagctcttgggactgtgagtcccacccacaattttgaaccccctcattatgatggcatagaagcactaaccattcaaggggataacctatttagtgggtctagagataatggaatcaagaaatgggacttaactcaaaaagaccttcttcagcaagttccaaatgcacataaggattgggtctgtgccctgggagtggtgccagaccacccagttttgctcagtggctgcagagggggcattttgaaagtctggaacatggatacttttatgccagtgggagagatgaagggtcatgatagtcctatcaatgccatatgtgttaattccacccacatttttactgcagctgatgatcgaactgtgagaatttggaaggctcgcaatttgcaagatggtcagatctctgacacaggagatctgggggaagatattgccagtaattaaacatgaatgaagataggttgtaaactgaatgctgtgataatactctgtattctttatggaaaatgttgtcctgtacttactaggcaaaacgtatgaatcggattaactggaaaatatatctgaattcaactgctgactataaatggtattctaataaaattgtgtactatcctgtgtgcttagttttaagatcaaccaatagatatatatcctacaattgatatattgctttattcacacttttattgtggctgaatttttgtgcctatctataaaacacactttcaaattatttgaattaccaagacgtctgcttttgtgacagtcagaaaacacacctggaatacgatgcagcccaccattaactcattcatgtagtttattcaagtgatttatgtatttaaactaaatattgaaaatgttagtcaaattgtggtttgcttgtcaggtatttatatcagtctgtagtggattcccaaatttcaaagctcttttaatgtaatggacaaaaataagatatgagaatattattgatgaattttcataaggtggaattgatcttaatctactaacagagaagggtagacagtttgtgttaaatgttggcatttacttgtattgaccaaagttttgcagctctactatattctgtgctcaggactaaaatgctgttaatttttttttttttttccagtgctgtgcatatattctgtgatgggaaacattgttgatgtcctaacagaaatatattttgatctattttcctatggagttgtttctattatgaccatttaattttgtttttatttaatagtagtatttccttcccttttatctaattttttatatgctgctaaatatattttaaatatactatgtttgcgaaccttggtagctatgatgagagctattatcatctgtggtgggaaaagctatgtaaataggtagattgtatagagagactatcttgtgttgtgcctgtatgaatttttaaaagttgttgactggattttgcaaaaggatgtataatatttctgtctgctcagaatattaatttgtaaattctgcaagtttaatttttatgtagatggtataacatttgaaaatattgtcttatgtgattttttcccctgaaaatatttgcttgtaaatgaaaacttagctagggcttaaataaacatgttgctatgaaatt

SEQ ID NO: 282273 - DNA, 5028 bp, Artificial Sequence
  derived and/or modified sequence
atgctgggcgccccagatgagagctctgtgcgggtggccgtgcgcatccggccccagctggccaaggagaagattgagggctgccacatctgcacctctgtgaccccaggagagccccaggtgttcctgggcaaggacaaggccttcacctttgattatgtgtttgatattgacagccagcaggagcagatctacatccagtgcatcgagaagctgattgagggctgctttgagggctacaatgccaccgtgtttgcctacggccagacaggagctgggaagacctacaccatgggcaccggctttgatgtgaacatcgtggaggaggagctgggcatcatcagcagagctgtgaagcacctgttcaagagcattgaggagaagaagcacatcgccatcaagaatggcctgcctgccccagacttcaaggtgaatgcccagttcctggagctgtacaatgaggaggtgctggacctgtttgacaccacccgggacattgatgccaagagcaagaagagcaacatccgcatccacgaggacagcactggaggcatctacacagtgggcgtgaccaccaggacagtgaacacagaaagtgagatgatgcagtgcctgaagctgggcgccctgagcaggaccacagccagcacccagatgaatgtgcagagcagccgcagccacgccatcttcaccatccacgtgtgccagaccagggtgtgcccccagattgatgctgacaatgccacagacaacaagatcatcagcgagagcgcccagatgaatgaatttgagaccctgacagccaagttccactttgtggacctggccggcagcgagcggctgaagaggactggagccactggagagcgggccaaggagggcatcagcatcaactgtggcctgctggccctgggcaatgtcatcagcgccctgggggacaagagcaagagggccacccacgtgccctacagagacagcaagctgacccggctgctgcaggacagcctgggcggcaacagccagaccatcatgattgcctgtgtgagccccagcgaccgggacttcatggagaccctgaacaccctgaagtatgccaacagagccaggaacatcaagaacaaggtgatggtgaaccaggaccgggccagccagcagatcaatgccctgcggtctgagatcacccggctgcagatggagctgatggagtacaagacaggcaagaggatcattgatgaggagggcgtggagagcatcaatgacatgtttcatgaaaatgccatgctgcagacagagaacaacaacctgcgggtgcgcatcaaggccatgcaggagaccgtggatgccctgcggagccgcatcacccagctggtgtctgaccaggccaaccacgtgctggcccgggccggggagggcaatgaggagatcagcaacatgatccacagctacatcaaggagattgaggacctgcgggccaagctgctggagagcgaggccgtgaatgaaaacctgaggaagaacctgacccgggccacagcccgggccccctacttcagcggcagcagcaccttcagccccaccatcctgagcagtgacaaggagaccatcgagatcatcgacctggccaagaaggacctggagaagctgaagaggaaggagaagaggaagaagaagaggctgcagaagctggaggagagcaaccgggaggagaggtctgtggccggcaaggaggacaacacagacacagaccaggagaagaaggaggagaagggcgtgtctgaaagagaaaataatgagctggaggtggaggagagccaggaggtgtctgaccatgaagatgaggaggaggaggaggaggaggaggaggatgacattgatggaggagagagcagtgatgaaagtgacagcgagagtgatgagaaggccaactaccaggccgacctggccaacatcacctgtgagatcgccatcaagcagaagctgattgatgagctggagaacagccagaagaggctgcagaccctgaagaagcagtatgaggagaagctgatgatgctgcagcacaagatccgggacacccagctggagcgggaccaggtgctgcagaacctgggctctgtggagagctacagcgaggagaaggccaagaaggtgcgctcagaatatgagaagaagctgcaggccatgaacaaggagctgcagaggctgcaggccgcccagaaggagcacgcccggctgctgaagaaccagagccagtatgagaagcagctgaagaagctgcagcaggatgtgatggagatgaagaagaccaaggtgcggctgatgaagcagatgaaggaggagcaggagaaggcccggctgacagagagcagaagaaaccgggagatcgcccagctgaagaaggaccagaggaagagggaccaccagctgcggctgctggaggcccagaagaggaaccaggaggtggtgctgcggaggaagacagaggaggtgacagccctgcggcggcaggtgcggcccatgtctgacaaggtggccggcaaggtgaccaggaagctgagcagcagtgatgccccagcccaggacaccggcagcagcgctgctgctgtggagacagatgccagcaggactggagcccagcagaagatgagaattcctgtggcccgggtgcaggccctgcccaccccagccaccaacggcaacaggaagaagtaccagaggaagggcctgaccggccgggtcttcatcagcaagacagccaggatgaagtggcagctgctggagcggcgggtgacagacatcatcatgcagaagatgaccatcagcaacatggaggccgacatgaaccggctgctgaagcagcgggaggagctgaccaagaggcgggagaagctgagcaagagaagagagaagatcgtgaaggaaaatggagagggggacaagaatgtggccaacatcaatgaggagatggagagcctgacagccaacatcgactacatcaatgacagcatcagtgactgccaggccaacatcatgcagatggaggaggccaaggaggagggggagaccctggatgtgacagctgtgatcaatgcctgcaccctgacagaggcccgctacctgctggaccacttcctgtccatgggcatcaacaagggcctgcaggccgcccagaaggaggcccagatcaaggtgctggagggccgcctgaagcagacagagatcaccagcgccacccagaaccagctgctcttccacatgctgaaggagaaggccgagctgaaccctgagctggatgccctgctgggccacgccctgcaggacttcaagcacttctttgtggagaatgtggaggacagcacagatgaagatgcccccctgaacagccctggcagcgagggcagcaccctgagcagtgacctgatgaagctgtgtggggaggtgaagcccaagaacaaggcccggcggaggaccaccacccagatggagctgctgtatgctgacagcagcgagctggccagtgacaccagcactggagatgccagcctgcccggccccctgacccctgtggccgagggccaggagatcggcatgaacacagagaccagcggcaccagcgcccgggagaaggagctgagccccccacctggcctgcccagcaagattggcagcatcagccggcagagcagcctgtctgagaagaagatccctgagcccagccctgtgaccaggaggaaggcctatgagaaggccgagaagagcaaggccaaggagcagaagcacagcgacagcggcaccagcgaggccagcctgagcccccccagcagcccccccagccggcccagaaatgagctgaatgtgttcaaccggctgactgtgtcccagggcaacacctctgtgcagcaggacaagagtgatgaaagtgacagcagcctgtctgaggtgcacaggaacagcaacctgcggggcatcatcaaccccttccctgccagcaagggcatccgggccttccccctgcagtgcatccacatcgccgagggccacaccaaggctgtgctgtgtgtggacagcacagatgacctgctcttcaccggcagcaaggacaggacctgcaaggtgtggaacctggtgacaggccaggagatcatgagcctgggcggccaccccaacaacgtggtgtctgtgaagtactgcaactacaccagcctggtgttcaccgtgtccaccagctacatcaaggtgtgggacatccgggacagcgccaagtgcatccgcaccctgaccagcagcggccaggtgaccctgggagatgcctgcagcgccagcaccagcaggacagtggccatccccagcggggagaaccagatcaaccagatcgccctgaaccccaccggcaccttcctgtatgctgccagcggaaatgctgtgaggatgtgggacctgaagcgcttccagagcacaggcaagctgaccggccacctgggccctgtgatgtgcctgactgtggaccagatcagcagcggccaggacctgatcatcaccggcagcaaggaccactacatcaagatgtttgatgtgacagagggcgccctgggcaccgtgagccccacccacaactttgagcccccccactatgatggcatcgaggccctgaccatccagggcgacaacctcttcagcggcagccgggacaatggcatcaagaagtgggacctgacccagaaggacctgctgcagcaggtgcccaatgcccacaaggactgggtgtgtgccctgggcgtggtgcctgaccaccctgtgctgctgagcggctgccggggcggcatcctgaaggtgtggaacatggacaccttcatgcctgtgggggagatgaagggccatgacagccccatcaatgccatctgtgtgaacagcacccacatcttcaccgctgctgatgacagaacagtgcgcatctggaaggccaggaacctgcaggacggccagatcagtgacacaggagacctgggggaggacatcgccagcaactag

SEQ ID NO: 282274 - DNA, 5028 bp, Artificial Sequence
  derived and/or modified sequence
atgctgggcgcccccgacgagagcagcgtgcgggtggccgtgcggatccggccccaactcgccaaagaaaaaatcgaagggtgtcacatttgtacgtccgttactccaggcgagccacaggtgttcctgggtaaagacaaggccttcaccttcgactatgttttcgacattgacagtcaacaagagcaaatctatatccaatgcattgagaagcttatcgaaggctgtttcgagggctataacgccaccgtgtttgcctacggacagaccggagccggaaagacatacaccatgggaacaggatttgacgtcaatattgtcgaagaagagctcgggatcattagcagggcagttaagcacctcttcaagtcgatagaggagaagaaacatatcgcgattaaaaacggtcttcctgctccggactttaaggtgaacgctcagttcctcgagctctacaacgaggaggttctcgacctcttcgataccaccagagatatcgatgcaaagtcaaaaaagtccaatatcagaatccatgaggatagtacaggtgggatctacaccgtgggtgtgacgacacggactgtgaataccgagtccgaaatgatgcagtgcctaaagctaggcgccttgtctaggacaactgcctccacacagatgaatgtccaaagttctcggtcccacgcgatcttcaccattcatgtatgtcagacccgagtctgcccccaaatagacgcagataatgcgactgataacaaaattattagcgaatccgcccaaatgaacgaattcgagacactgacagccaaatttcacttcgtggacctggccgggtccgaacggttgaaacgcacaggagcgacgggggagagagccaaagaggggatctctataaattgcggactgctggctctaggaaacgtgatctcagccctcggagacaaatccaaacgggccacgcatgtaccctaccgcgactctaagttgaccaggcttctgcaggacagcttgggagggaattcacagaccattatgatcgcctgtgtgagcccgtccgatagagattttatggaaactctcaatactctgaagtatgctaaccgcgccaggaacatcaagaataaggtgatggtcaatcaggatagagctagtcagcagattaacgccctaaggtccgaaatcaccagactgcagatggaactcatggaatacaagaccggcaaacgcataattgacgaagagggcgtcgagagcatcaacgatatgtttcacgagaatgccatgctccagacagaaaataataatctgagggtgcgtatcaaagcaatgcaggaaaccgtcgatgctctgcgtagccgaataacccagctggtgagtgaccaggcgaatcatgtgctggcacgggctggagagggaaatgaggaaatctctaacatgatacatagttacatcaaagaaattgaggatctccgggccaagctgctggaaagcgaagcggtcaatgaaaacctacgcaaaaatttgacaagagcaactgcccgtgctccgtatttctcgggctcgagcaccttttccccaaccattttgtcttccgataaagaaaccatcgagatcatagacctggccaagaaagatctggagaagttgaaaagaaaagagaaacgaaaaaaaaaacgcttgcagaaacttgaggagtcgaacagagaagagcgttcggttgctggaaaggaagacaacaccgacactgatcaggagaagaaggaagagaaaggtgtgtctgaaagagagaataacgagctcgaggtcgaggaatcacaggaggtgagtgaccatgaagacgaggaagaagaggaggaggaggaggaagatgatatcgacggcggtgagtcgtccgacgaatcggattccgaatcggacgagaaagcgaactatcaagcggatctggcgaatatcacctgtgagattgctatcaaacaaaagctgattgacgaacttgagaattcccaaaagaggctgcaaacattgaaaaagcagtacgaggaaaagcttatgatgctccagcacaagattcgtgacacccagctggaaagggatcaggtgttgcagaacctgggatccgtcgagtcctacagtgaagaaaaggctaagaaagttagaagcgaatacgagaagaagttacaggccatgaataaagagctgcagcggctccaggcagcgcagaaagagcacgctcggctcctcaagaatcagtcacagtacgagaagcagctgaagaaattacaacaagatgtaatggagatgaaaaagaccaaggtgaggctgatgaaacagatgaaagaagaacaggagaaagcacgactgactgagtctcgtcgaaatagggagattgcccagctaaagaaggaccagcggaagcgcgatcaccagctgcggctgttagaggcccagaagagaaatcaggaggtggtccttcgccggaaaaccgaggaagttacagcattgcgcagacaagtgagaccaatgtccgacaaggttgctgggaaggtcaccaggaagctgtcaagcagtgatgcgccggcgcaggacaccggctcctccgctgcagcagtggaaacagacgcctctcggaccggggcccaacaaaagatgcggattcctgtggccagagttcaggctttacccacacccgccaccaacggaaaccggaaaaagtatcagcgaaagggtctgaccgggcgggtgttcatctctaaaactgccaggatgaagtggcagctcctggagaggagagttaccgatatcatcatgcaaaagatgactatttcaaatatggaagctgacatgaaccgattactgaaacagagagaggagctgaccaagcgacgggagaagctgtccaagcgccgggaaaagatcgttaaggagaatggcgaaggagataagaatgtggcaaacatcaacgaagaaatggagagtctcacagctaacattgactacattaatgactccattagcgattgtcaggccaatatcatgcaaatggaagaggcaaaggaagagggggaaacactcgacgtaactgctgtgattaatgcctgcacacttactgaggcccgctatcttctcgaccacttcctgtccatgggaatcaataaaggcctgcaggcagcacagaaagaagcccagatcaaagtacttgaaggacgactgaaacaaaccgagatcacgtcagccacccagaaccaactcctgtttcacatgttgaaagagaaggctgagctgaaccccgagctcgacgctctgcttgggcatgctcttcaggatttcaagcatttcttcgtggagaacgttgaagactccacggacgaggatgccccactgaactctcccgggagcgagggctccactctgtcctctgatctgatgaagctgtgtggagaagtcaagcccaagaataaagcgcggcggcgcaccactacgcagatggagctgctgtatgccgacagtagcgaattagcatccgatacttccacaggcgacgcgagcctccctggccctctgacgccagtagccgagggtcaagaaattggcatgaatacagaaacttctggcactagcgcccgcgagaaagagctgagtcctccgcctggtctgcctagcaaaatcggcagcatttcacggcagtcttcactgtccgagaaaaagataccagaaccttcacctgtcaccagacgaaaggcctacgagaaggccgaaaagagtaaagccaaagagcagaagcactcagatagcggaaccagcgaagcttccctgtctccacccagcagcccaccgtcacggccccggaatgagctcaatgttttcaaccggctgacagtttcccagggaaacacgtccgtgcagcaggataaatctgacgagagcgactccagtctgtccgaggtgcaccggaatagtaatctcagaggtattatcaaccctttccccgcttctaagggaatccgggcgtttccgctccagtgtatccacattgcggaaggacacaccaaggctgtgctgtgtgtggattctacagatgatctgctctttaccggctctaaggacagaacgtgtaaggtgtggaacctggttacgggccaagaaataatgtctttgggaggtcacccaaacaacgtcgtttctgtcaagtactgcaattacacatccctcgtcttcacagtatcaacttcctacataaaggtgtgggatatccgggatagcgccaagtgcatccgtacattaacaagctccggccaggtgaccctcggtgacgcctgctccgcaagcacgtcacggaccgtggcaattccatcaggggaaaaccagattaaccagattgccttaaatccaaccggaacgttcctctacgccgcgagtggaaatgcggtcagaatgtgggatctaaagcgctttcaatccacggggaagctcactggccatctgggcccagtaatgtgtctcactgtagaccagatttcctccgggcaggacttgatcattaccggtagcaaggaccactatattaagatgttcgacgtcacggagggcgcactgggtaccgtctcgcccactcataactttgaaccccctcattacgatggtattgaagccctgacgatccagggggacaacttgtttagcggcagtcgagataacgggatcaaaaaatgggacctaactcagaaggatcttctgcagcaagtacctaacgcacacaaagattgggtgtgtgcgctcggcgtagtgccagatcatccggttctcctcagcgggtgcaggggagggattctcaaggtgtggaatatggacaccttcatgcccgtgggggagatgaaagggcacgatagccctatcaacgcaatttgtgtaaactccacccacatctttactgccgccgatgatcgcacagtgagaatctggaaggcgaggaatcttcaagacgggcaaatctcagatacgggagatttaggagaagatattgctagtaactag

SEQ ID NO: 282275 - DNA, 5027 bp, Artificial Sequence
  derived and/or modified sequence
atgctgggcgcaccagatgagtcttctgtgcgggtagcggtgagaattcgcccacagcttgccaaggagaagattgagggctgtcatatatgtacctcggtgacccctggggagccacaggtgtttcttggtaaagataaagcatttacgttcgactatgtgttcgacatcgactctcagcaggagcagatctacatccagtgtattgagaaactcattgagggatgctttgagggatacaacgccacagtttttgcctacgggcagaccggtgccggtaagacctacaccatgggaaccgggttcgatgtgaatattgtggaagaagagctgggtatcatctcccgtgccgtgaagcacctctttaagagcatcgaggagaaaaaacatatcgccatcaagaatgggctgcccgctcccgactttaaagtcaacgcccagtttttggagttgtacaatgaggaggttctggatctgtttgatacaacaagggacatagacgcgaaaagtaaaaagtcaaatatacggatccacgaggattctactgggggtatctataccgtgggcgttacgacgcgaactgttaatacagaaagcgagatgatgcagtgcttgaagttaggggctctttctagaaccactgcttccacgcaaatgaatgttcaatccagtcgatcccatgccattttcacgatacacgtgtgccaaactcgggtttgtcctcagatcgacgcagacaatgcaaccgacaataaaataatatccgaaagcgcacagatgaacgagtttgaaacactcaccgctaagttccatttcgtggatctagctggcagcgaacggctgaaaaggacaggtgctaccggcgagagagctaaagaaggaatctcgatcaactgcgggttgctggccctgggtaatgtgataagcgcactaggggataagagtaaaagggccacacatgtcccatacagggactccaaacttacgcgtctcctccaagactctcttgggggtaattcccaaaccatcatgatcgcttgcgtcagcccctccgatagagactttatggaaactttgaatactctgaagtatgcgaaccgtgccaggaatattaagaataaggtgatggtgaatcaggacagagcatcccagcaaataaatgccttgcggtctgagataacaagactgcaaatggaactcatggaatataagaccgggaagcgcattatcgatgaggaaggtgtggagtccataaatgacatgttccacgaaaacgctatgctacagacagaaaacaacaatctgcgggtgagaataaaagcaatgcaggagactgtcgatgctctgagatcaaggatcactcaactggtgtcggatcaagctaaccatgtgttggccagggcgggtgagggtaacgaggagatctccaacatgatacatagttacatcaaggagattgaagatttgagggccaagttgcttgagagtgaggccgtcaatgagaacctgcggaagaacctgactagggccactgctcgtgcaccttatttctctggtagtagtacattctcaccgaccatactatcatcagataaggagaccattgagatcattgacttggcgaaaaaggacctcgagaagctgaaacgaaaagagaagaggaagaagaaacggctgcagaaactggaggaaagcaatagggaggagcggagcgtggcagggaaggaggataatacagacaccgatcaagagaaaaaagaagaaaaaggcgtttctgaacgtgagaataacgaacttgaggtcgaagagtcccaagaggtgtcggaccacgaagacgaggaagaggaggaggaagaagaggaggatgatatcgatggcggagaaagttcggatgagtctgattcggaatccgacgagaaggctaactatcaggcagatctcgccaacatcacctgcgagatcgccatcaagcaaaagctcatagacgagctggagaatagtcagaaacgcctccagacgctcaaaaagcagtacgaggaaaaactgatgatgctgcaacacaaaatacgggatacccagttggaaagagatcaggttctacagaacctgggctcggtcgagtcatattctgaagagaaagccaaaaaagtgcgctccgagtacgaaaagaagctccaggccatgaataaagagttgcagagactgcaagcagcacagaaggaacacgcgaggctgctgaagaatcagtctcaatacgaaaaacagttgaagaagttgcagcaggatgtgatggaaatgaaaaaaaccaaagtccgtttgatgaaacagatgaaagaggaacaggaaaaagccaggcttacagagtccagacggaatcgagagattgcacagctcaagaaggaccagcgtaaacgcgatcatcagctcaggctgctagaggctcaaaagcgcaaccaagaagtagtcttgcggagaaagacggaggaggtgaccgcactgagacggcaggtgaggccgatgtccgataaagtcgccggaaaagtcacgaggaagctgagttcttccgacgcccctgctcaggacactggcagctccgctgctgcagtggaaaccgatgctagccggacaggcgctcagcaaaagatgaggatcccggtggccagagtgcaggccctgccaacaccagccaccaatggcaacaggaagaagtatcagagaaaaggcctcaccggcagggtgtttatcagtaagaccgccaggatgaaatggcagctcctagagcgtcgcgtaaccgatattataatgcagaagatgaccatcagcaacatggaagctgacatgaaccgcctcttgaaacagcgcgaagagttgactaaaagacgcgagaaactgagtaaacggagggagaagatagttaaggagaacggcgagggggataaaaacgtggccaatataaacgaggagatggagtcattgacagcgaatattgattacatcaatgattcaatctccgactgtcaggccaacatcatgcagatggaggaggccaaagaagaaggcgaaacactggatgttacagccgtgatcaatgcttgcaccctcacagaagccaggtatctactcgaccacttcctgagtatggggattaataaaggcctgcaagcagcgcagaaagaagcccagattaaggtgctcgagggacggttaaagcagactgagatcactagcgcgactcagaatcagctactctttcatatgctgaaagagaaggcggaacttaacccagagcttgacgcactgctcggccacgctttgcaggatttcaagcatttttttgtggagaacgttgaagactcgactgacgaagatgcacctctgaacagtcccggatctgaggggagcaccctctcatcggatttaatgaagctatgtggtgaagtgaagcctaagaataaggccagacgccgaactaccactcagatggaactcctgtatgcagattcttcagagttggcgtctgatacaagtactggggacgcgtcacttcctggccctctcaccccagttgcggaaggacaagaaattggcatgaacacagaaacgtcaggaaccagtgccagagagaaggaactgtctcccccacccggacttccatcaaagattggctctatctcaaggcaaagttccttgtccgagaagaaaatcccagagccgtcccccgttacaagacgtaaggcctacgagaaggcggagaagagcaaggcgaaggagcagaaacattcagactcggggactagcgaagcaagcttatcccctccttcctctcccccaagcagacccagaaatgagttaaatgtgttcaatagactgacagtgagccagggcaacacttcagtgcagcaggataaaagcgatgaatcagactcatccctcagcgaagtacaccgcaactcaaatctaaggggtatcattaatcccttcccggcatcaaaggggatccgggctttccctctccagtgcattcacatagcggaaggtcacacaaaggccgtgctgtgtgtggactcaaccgacgatctgcttttcacggggtccaaagataggacatgcaaagtttggaatctggtcactggccaggagattatgagcctcggcggacaccctaacaacgtggtgagtgtaaagtattgtaactacacaagtttggtgtttacggtgagtacatcctacatcaaggtgtgggacattagagacagcgctaaatgtatccgtaccctcacttcatccggacaggtcacgctgggtgatgcctgttccgcttctacctcgcggaccgtagcgatcccttctggggagaatcaaattaaccagatcgccttaaacccgaccggtacattcctctatgccgctagtggaaacgctgtccgcatgtgggatttaaagaggttccagtccacaggaaaactaacaggacaccttggcccagtcatgtgtctgaccgtggatcagatcagctctggacaggatttgattatcaccggcagcaaagaccactacatcaagatgttcgacgtgactgaaggagccttggggacagtttctcccactcacaatttcgagcccccacattacgatgggatcgaagcattaacgatacagggggataacctcttttccggctcccgagacaacggcattaagaagtgggatttgacccagaaggaccttctccaacaggttccgaatgcccacaaggattgggtgtgcgcccttggggtggtccctgaccatccagtcctcctatccggatgccgtggcggtatactgaaagtgtggaatatggacacattcatgcctgtcggggagatgaaaggacacgacagcccaatcaatgccatttgcgtcaactccacccacattttcactgccgctgatgacaggaccgtcaggatctggaaggcaaggaatttgcaagatgggcagatcagcgacaccggcgacttaggtgaagatatcgcaagcaatta

SEQ ID NO: 282276 - DNA, 5028 bp, Artificial Sequence
  derived and/or modified sequence
atgctgggcgcccccgacgagagcagcgtgagagtggccgtgagaatcagaccccagctggccaaggagaagatcgagggctgccacatctgcaccagcgtgacccccggcgagccccaggtgttcctgggcaaggacaaggccttcaccttcgactacgtgttcgacatcgacagccagcaggagcagatctacatccagtgcatcgagaagctgatcgagggctgcttcgagggctacaacgccaccgtgttcgcctacggccagaccggcgccggcaagacctacaccatgggcaccggcttcgacgtgaacatcgtggaggaggagctgggcatcatcagcagagccgtgaagcacctgttcaagagcatcgaggagaagaagcacatcgccatcaagaacggcctgcccgcccccgacttcaaggtgaacgcccagttcctggagctgtacaacgaggaggtgctggacctgttcgacaccaccagagacatcgacgccaagagcaagaagagcaacatcagaatccacgaggacagcaccggcggcatctacaccgtgggcgtgaccaccagaaccgtgaacaccgagagcgagatgatgcagtgcctgaagctgggcgccctgagcagaaccaccgccagcacccagatgaacgtgcagagcagcagaagccacgccatcttcaccatccacgtgtgccagaccagagtgtgcccccagatcgacgccgacaacgccaccgacaacaagatcatcagcgagagcgcccagatgaacgagttcgagaccctgaccgccaagttccacttcgtggacctggccggcagcgagagactgaagagaaccggcgccaccggcgagagagccaaggagggcatcagcatcaactgcggcctgctggccctgggcaacgtgatcagcgccctgggcgacaagagcaagagagccacccacgtgccctacagagacagcaagctgaccagactgctgcaggacagcctgggcggcaacagccagaccatcatgatcgcctgcgtgagccccagcgacagagacttcatggagaccctgaacaccctgaagtacgccaacagagccagaaacatcaagaacaaggtgatggtgaaccaggacagagccagccagcagatcaacgccctgagaagcgagatcaccagactgcagatggagctgatggagtacaagaccggcaagagaatcatcgacgaggagggcgtggagagcatcaacgacatgttccacgagaacgccatgctgcagaccgagaacaacaacctgagagtgagaatcaaggccatgcaggagaccgtggacgccctgagaagcagaatcacccagctggtgagcgaccaggccaaccacgtgctggccagagccggcgagggcaacgaggagatcagcaacatgatccacagctacatcaaggagatcgaggacctgagagccaagctgctggagagcgaggccgtgaacgagaacctgagaaagaacctgaccagagccaccgccagagccccctacttcagcggcagcagcaccttcagccccaccatcctgagcagcgacaaggagaccatcgagatcatcgacctggccaagaaggacctggagaagctgaagagaaaggagaagagaaagaagaagagactgcagaagctggaggagagcaacagagaggagagaagcgtggccggcaaggaggacaacaccgacaccgaccaggagaagaaggaggagaagggcgtgagcgagagagagaacaacgagctggaggtggaggagagccaggaggtgagcgaccacgaggacgaggaggaggaggaggaggaggaggaggacgacatcgacggcggcgagagcagcgacgagagcgacagcgagagcgacgagaaggccaactaccaggccgacctggccaacatcacctgcgagatcgccatcaagcagaagctgatcgacgagctggagaacagccagaagagactgcagaccctgaagaagcagtacgaggagaagctgatgatgctgcagcacaagatcagagacacccagctggagagagaccaggtgctgcagaacctgggcagcgtggagagctacagcgaggagaaggccaagaaggtgagaagcgagtacgagaagaagctgcaggccatgaacaaggagctgcagagactgcaggccgcccagaaggagcacgccagactgctgaagaaccagagccagtacgagaagcagctgaagaagctgcagcaggacgtgatggagatgaagaagaccaaggtgagactgatgaagcagatgaaggaggagcaggagaaggccagactgaccgagagcagaagaaacagagagatcgcccagctgaagaaggaccagagaaagagagaccaccagctgagactgctggaggcccagaagagaaaccaggaggtggtgctgagaagaaagaccgaggaggtgaccgccctgagaagacaggtgagacccatgagcgacaaggtggccggcaaggtgaccagaaagctgagcagcagcgacgcccccgcccaggacaccggcagcagcgccgccgccgtggagaccgacgccagcagaaccggcgcccagcagaagatgagaatccccgtggccagagtgcaggccctgcccacccccgccaccaacggcaacagaaagaagtaccagagaaagggcctgaccggcagagtgttcatcagcaagaccgccagaatgaagtggcagctgctggagagaagagtgaccgacatcatcatgcagaagatgaccatcagcaacatggaggccgacatgaacagactgctgaagcagagagaggagctgaccaagagaagagagaagctgagcaagagaagagagaagatcgtgaaggagaacggcgagggcgacaagaacgtggccaacatcaacgaggagatggagagcctgaccgccaacatcgactacatcaacgacagcatcagcgactgccaggccaacatcatgcagatggaggaggccaaggaggagggcgagaccctggacgtgaccgccgtgatcaacgcctgcaccctgaccgaggccagatacctgctggaccacttcctgagcatgggcatcaacaagggcctgcaggccgcccagaaggaggcccagatcaaggtgctggagggcagactgaagcagaccgagatcaccagcgccacccagaaccagctgctgttccacatgctgaaggagaaggccgagctgaaccccgagctggacgccctgctgggccacgccctgcaggacttcaagcacttcttcgtggagaacgtggaggacagcaccgacgaggacgcccccctgaacagccccggcagcgagggcagcaccctgagcagcgacctgatgaagctgtgcggcgaggtgaagcccaagaacaaggccagaagaagaaccaccacccagatggagctgctgtacgccgacagcagcgagctggccagcgacaccagcaccggcgacgccagcctgcccggccccctgacccccgtggccgagggccaggagatcggcatgaacaccgagaccagcggcaccagcgccagagagaaggagctgagccccccccccggcctgcccagcaagatcggcagcatcagcagacagagcagcctgagcgagaagaagatccccgagcccagccccgtgaccagaagaaaggcctacgagaaggccgagaagagcaaggccaaggagcagaagcacagcgacagcggcaccagcgaggccagcctgagcccccccagcagcccccccagcagacccagaaacgagctgaacgtgttcaacagactgaccgtgagccagggcaacaccagcgtgcagcaggacaagagcgacgagagcgacagcagcctgagcgaggtgcacagaaacagcaacctgagaggcatcatcaaccccttccccgccagcaagggcatcagagccttccccctgcagtgcatccacatcgccgagggccacaccaaggccgtgctgtgcgtggacagcaccgacgacctgctgttcaccggcagcaaggacagaacctgcaaggtgtggaacctggtgaccggccaggagatcatgagcctgggcggccaccccaacaacgtggtgagcgtgaagtactgcaactacaccagcctggtgttcaccgtgagcaccagctacatcaaggtgtgggacatcagagacagcgccaagtgcatcagaaccctgaccagcagcggccaggtgaccctgggcgacgcctgcagcgccagcaccagcagaaccgtggccatccccagcggcgagaaccagatcaaccagatcgccctgaaccccaccggcaccttcctgtacgccgccagcggcaacgccgtgagaatgtgggacctgaagagattccagagcaccggcaagctgaccggccacctgggccccgtgatgtgcctgaccgtggaccagatcagcagcggccaggacctgatcatcaccggcagcaaggaccactacatcaagatgttcgacgtgaccgagggcgccctgggcaccgtgagccccacccacaacttcgagcccccccactacgacggcatcgaggccctgaccatccagggcgacaacctgttcagcggcagcagagacaacggcatcaagaagtgggacctgacccagaaggacctgctgcagcaggtgcccaacgcccacaaggactgggtgtgcgccctgggcgtggtgcccgaccaccccgtgctgctgagcggctgcagaggcggcatcctgaaggtgtggaacatggacaccttcatgcccgtgggcgagatgaagggccacgacagccccatcaacgccatctgcgtgaacagcacccacatcttcaccgccgccgacgacagaaccgtgagaatctggaaggccagaaacctgcaggacggccagatcagcgacaccggcgacctgggcgaggacatcgccagcaactag

SEQ ID NO: 282277 - protein, 1627 aa, Artificial Sequence
  derived and/or modified sequence
MLGAPDESSVRVAVRIRPQLAKEKIEGCHICTSVTPGEPQVFLGKDKAFTFDYVFDIDSQQEQIYIQCIEKLIEGCFEGYNATVFAYGQTGAGKTYTMGTGFDVNIVEEELGIISRAVKHLFKSIEEKKHIAIKNGLPAPDFKVNAQFLELYNEEVLDLFDTTRDIDAKSKKSNIRIHEDSTGGIYTVGVTTRTVNTESEMMQCLKLGALSRTTASTQMNVQSSRSHAIFTIHVCQTRVCPQIDADNATDNKIISESAQMNEFETLTAKFHFVDLAGSERLKRTGATGERAKEGISINCGLLALGNVISALGDKSKRATHVPYRDSKLTRLLQDSLGGNSQTIMIACVSPSDRDFMETLNTLKYANRARNIKNKVMVNQDRASQQINALRSEITRLQMELMEYKTGKRIIDEEGVESINDMFHENAMLQTENNNLRVRIKAMQETVDALRSRITQLVSDQANHVLARAGEGNEEISNMIHSYIKEIEDLRAKLLESEAVNENLRKNLTRATARAPYFSGSSTFSPTILSSDKETIEIIDLAKKDLEKLKRKEKRKKKRLQKLEESNREERSVAGKEDNTDTDQEKKEEKGVSERENNELEVEESQEVSDHEDEEEEEEEEEDDIDGGESSDESDSESDEKANYQADLANITCEIAIKQKLIDELENSQKRLQTLKKQYEEKLMMLQHKIRDTQLERDQVLQNLGSVESYSEEKAKKVRSEYEKKLQAMNKELQRLQAAQKEHARLLKNQSQYEKQLKKLQQDVMEMKKTKVRLMKQMKEEQEKARLTESRRNREIAQLKKDQRKRDHQLRLLEAQKRNQEVVLRRKTEEVTALRRQVRPMSDKVAGKVTRKLSSSDAPAQDTGSSAAAVETDASRTGAQQKMRIPVARVQALPTPATNGNRKKYQRKGLTGRVFISKTARMKWQLLERRVTDIIMQKMTISNMEADMNRLLKQREELTKRREKLSKRREKIVKENGEGDKNVANINEEMESLTANIDYINDSISDCQANIMQMEEAKEEGETLDVTAVINACTLTEARYLLDHFLSMGINKGLQAAQKEAQIKVLEGRLKQTEITSATQNQLLFHMLKEKAELNPELDALLGHALQDFKHFFVENVEDSTDEDAPLNSPGSEGSTLSSDLMKLCGEVKPKNKARRRTTTQMELLYADSSELASDTSTGDASLPGPLTPVAEGQEIGMNTETSGTSAREKELSPPPGLPSKIGSISRQSSLSEKKIPEPSPVTRRKAYEKAEKSKAKEQKQSDESDSSLSEVHRGIINPFPASKGIRAFPLQCIHIAEGHTKAVLCVDSTDDLLFTGSKDRTCKVWNLVTGQEIMSLGGHPNNVVSVKYCNYTSLVFTVSTSYIKVWDIRDSAKCIRTLTSSGQVTLGDACSASTSRTVAIPSGENQINQIALNPTGTFLYAASGNAVRMWDLKRFQSTGKLTGHLGPVMCLTVDQISSGQDLIITGSKDHYIKMFDVTEGALGTVSPTHNFEPPHYDGIEALTIQGDNLFSGSRDNGIKKWDLTQKDLLQQVPNAHKDWVCALGVVPDHPVLLSGCRGGILKVWNMDTFMPVGEMKGHDSPINAICVNSTHIFTAADDRTVRIWKARNLQDGQISDTGDLGEDIASN

SEQ ID NO: 282278 - DNA, 4884 bp, Artificial Sequence
  derived and/or modified sequence
atgttgggcgcgccggatgaaagttctgtgagggtcgccgtccgcatccgtccccaattggccaaggagaaaattgagggctgccacatctgcacttcagtgacccctggagaaccccaggtgttcctaggtaaggataaagcatttacgttcgactatgtcttcgacattgactctcagcaggagcagatctacattcaatgcatagaaaagctgatcgagggttgctttgaggggtacaatgccactgtttttgcttatggtcaaacaggcgctggaaagacttacacaatgggaaccgggttcgacgtgaatattgtggaagaagaactgggaatcatctcaagggcagtcaagcacttgtttaagtcaatcgaagaaaagaaacacatcgctatcaaaaacggcctgcctgctccagacttcaaggtgaacgctcagtttctggagctgtataatgaagaggtgttggatctgttcgatacaactcgcgatatagatgcaaagtctaagaagtcaaatattcgaatacatgaggactcaactggaggtatctatactgtcggagttacaaccaggacagtcaacacagagtctgagatgatgcagtgtctgaagctgggggccttgagtcgcacaaccgcctccacccaaatgaatgttcagagttcccggtcccatgccatcttcaccatccatgtgtgccaaacaagagtctgtccccagatcgatgccgacaacgctacggataacaagatcattagcgaatcagctcagatgaacgaatttgagacattgactgccaaatttcattttgtggatctcgcagggagtgaaaggctgaagcgaacaggtgccactggggaacgagctaaagaagggatcagtattaactgcggactgcttgcgctgggtaacgtgatttcagccttgggtgataagtctaaacgcgcgacccacgttccttatagggattctaaattaactaggctgcttcaggatagcctgggtggtaattcccagactatcatgatcgcctgcgtgtccccgagtgatcgtgattttatggagaccctcaataccctgaagtacgcgaaccgagccaggaacatcaaaaacaaagtgatggtcaatcaggatcgagcctcccagcaaatcaacgccctgagatctgaaattacccggctccagatggagctgatggagtataagacgggcaagagaattatcgacgaagaaggcgttgaatctattaacgacatgttccacgaaaacgctatgttgcaaactgagaataataatttgagggtccggataaaggctatgcaagaaactgttgatgctctccgcagcagaataacccagctggtgtctgatcaggctaatcacgtgctggccagagcaggcgagggcaatgaggaaatatctaacatgatacactcttacatcaaggaaatcgaggatcttcgcgccaaactgctggaatcggaggctgtgaatgagaacttgcgtaagaatctgacgagggcaacagcccgcgctccatacttcagcggcagttctacttttagccccacaatcctgtcgtcggacaaagagactatcgagatcattgacctagccaagaaggacttggaaaagctgaaacgtaaggaaaaaaggaagaagaagcgcctgcagaaactggaggaaagcaatagagaagaacgttcagtggccggcaaggaagacaatacggatacagaccaagaaaagaaggaagaaaaaggggtatccgaaagggaaaacaacgaactggaagtcgaagagtcccaggaggtatccgaccatgaagatgaagaagaagaggaggaagaagaggaggacgacatcgacggtggcgagtcctctgacgagagtgatagcgaaagcgacgagaaagccaattatcaagccgacttggcgaacattacttgcgaaattgccattaaacagaagctgatcgatgagctggaaaacagccagaagcgcctgcagaccttgaaaaagcaatatgaggagaagctgatgatgctgcagcataagatcagagacactcaactagaacgggaccaggttttacagaacctgggtagcgttgaatcatacagtgaagagaaagctaaaaaagtccgatctgaatacgagaagaaacttcaggccatgaacaaagagctccaacgattgcaggccgcgcagaaagaacatgcccggctcctgaaaaatcagtcacaatatgaaaaacagctcaagaaattgcagcaggacgttatggaaatgaaaaagaccaaggtccgtctgatgaagcagatgaaggaggagcaggaaaaggctcgtctgaccgagtcacggcggaacagggagatcgcccaattaaaaaaagatcagcggaagcgcgaccaccagttacgattactggaggcccagaaaagaaatcaggaagtcgtgctgcgtcgcaagacggaagaggtgactgcactgcggaggcaggtacgcccaatgagtgataaggtggcaggaaaagtgaccaggaagctgtcctcatccgacgcgcctgctcaagatacagggtccagtgccgctgcggttgaaaccgatgccagtcggaccggcgcccagcagaagatgcggatcccggtggctcgtgtgcaggccctgccaacacctgcgacaaacggcaatcggaagaagtaccagcgcaaagggctcaccggaagagtcttcattagtaagaccgctaggatgaaatggcagcttctcgagaggcgggtgaccgatataattatgcaaaaaatgaccatttccaacatggaagctgatatgaatcgccttttgaagcagcgggaagaactgacgaaaagaagggaaaaactaagtaagagacgcgaaaagattgtaaaggaaaacggggaaggcgacaaaaacgtggcaaacattaacgaggaaatggagtccttaaccgcgaatatcgattatatcaatgactcgattagcgactgtcaagcaaacattatgcagatggaagaggcaaaggaagaaggggaaacccttgatgttaccgcagtgatcaacgcgtgtactcttacggaggcgcggtatttactggatcatttccttagcatgggcattaacaagggactgcaggccgctcagaaggaagctcaaataaaggtgctggaaggccgcctgaagcaaaccgagatcactagtgccacacagaaccagttgctcttccacatgctgaaggaaaaagcggagctcaatcctgagcttgatgccttactcgggcacgccctccaagatttcaaacatttcttcgtggagaatgtcgaggactcaacagacgaagatgctccactcaacagtccgggctccgaagggtccaccctctcctccgacttaatgaagctctgcggcgaggtcaagccaaagaataaagcacggcggcgaacaaccacccaaatggagctgctgtacgcggacagctctgagctcgcaagtgatacctccactggtgatgcatctctgcctggacccctgacaccggtggcggaggggcaagagataggtatgaacacagagacctctggaacttccgcacgtgaaaaggaattgtctcctccccccgggctgccatccaagattgggagtattagccgtcagagctccttatcagagaagaaaataccagagccaagccccgtaaccagacgcaaagcctatgaaaaggcggagaagtccaaggccaaggaacagaaacagagcgatgagtcagacagcagtctttccgaggtgcatagaggaatcatcaacccatttcctgcttctaagggcattcgcgcattcccattacagtgcattcacattgccgaagggcacactaaggccgtgttatgcgtcgattccaccgacgatcttttgttcaccgggtccaaggatcgcacatgcaaggtgtggaatctagttacgggtcaggagattatgtccttaggggggcacccaaataacgttgtcagcgtgaaatattgcaattatacatccctcgtgttcactgtctccacgtcctacattaaagtctgggacattcgggattcagcaaagtgtatacggaccctgacttcttcaggccaggtgaccctcggcgatgcttgttctgcaagcactagccggaccgttgctattccgagcggcgaaaatcaaatcaatcaaatcgcactgaatcccacagggacctttctgtacgccgcctccgggaacgctgtgagaatgtgggatcttaagaggtttcagtctacagggaagctgacaggtcacctgggccccgtgatgtgtttgaccgttgatcagattagcagcggacaggacctcataattacggggtcaaaggatcactatattaaaatgttcgatgttactgaaggagctctgggaaccgtctcccctactcataactttgaaccaccccattatgatggcatcgaggctttgaccatccagggagataatctcttttctggtagccgcgacaacggtatcaaaaagtgggatctgactcaaaaagacctgctgcaacaggttcctaatgcccacaaggactgggtttgtgcgctcggagtagttcctgatcatcccgtccttctttccggctgccgcggcggaattttgaaggtgtggaatatggacacattcatgccagtaggtgagatgaaaggccacgattcaccaattaacgcaatctgcgtgaattctacacacatattcactgctgccgatgatcggactgtgaggatttggaaggctcgcaacctgcaggacggccaaatctcagatacgggggatctgggtgaagacattgcctctaattag

SEQ ID NO: 282279 - DNA, 6499 bp, Artificial Sequence
  derived and/or modified sequence
gaggagcccggagcgccctggcgggcgtggagtccccagcctggccgctgggaggccgcgtccccaccggagggggcagggcgcactcacccggccgccctgaggccgctggcggcctgttggcttctccacaggcgcgctcgccgttcaagcgcgctttgtccccgccccagatcctggggggtgagcggtggagaaggggcgggcgcccgcgagccgtgaatcacctcctcctcttgctgcctcagcgccgccgccacctttccattcagtcgcccaacatggctggagcgcggcggaggtgagccggccgcccgcccgcagacgccccagcctactgcgcccgagtcccgcggccccagtggcgcctcagctctgcggtgccgaggcccaacggctcgatcgctgcccgccgccagcatgttgggcgccccggacgagagctccgtgcgggtggctgtcagaataagaccacagcttgccaaagagaagattgaaggatgccatatttgtacatctgtcacaccaggagagcctcaggtcttcctagggaaagataaggcttttacttttgactatgtatttgacattgactcccagcaagagcagatctacattcaatgtatagaaaaactaattgaaggttgctttgaaggatacaatgctacagtttttgcttatggacaaactggagctggtaaaacatacacaatgggaacaggatttgatgttaacattgttgaggaagaactgggtattatttctcgagctgttaaacacctttttaagagtattgaagaaaaaaaacacatagcaattaaaaatgggcttcctgctccagattttaaagtgaatgcccaattcttagagctctataatgaagaggtccttgacttatttgataccactcgtgatattgatgcaaaaagtaaaaaatcaaatataagaattcatgaagattcaactggaggaatttatactgtgggcgttacaacacgtactgtgaatacagaatcagagatgatgcagtgtttgaagttgggtgctttatcccggacaactgccagtacccagatgaatgttcagagctctcgttcacatgccatttttaccattcatgtgtgtcaaaccagagtgtgtccccaaatagatgctgacaatgcaactgataataaaattatttctgaatcagcacagatgaatgaatttgaaaccctgactgcaaagttccattttgttgatctcgcaggatctgaaagactgaagcgtactggagctacaggcgagagggcaaaagaaggcatttctatcaactgtggacttttggcacttggcaatgtaataagtgccttgggagacaagagcaagagggccacacatgtcccctatagagattccaagctaacaagactactacaggattccctcgggggtaatagccaaacaatcatgatagcatgtgtcagcccttcagacagagactttatggaaacgttaaacaccctgaaatacgccaatcgagctagaaatatcaagaataaggtgatggtcaatcaggacagagctagtcagcaaatcaatgcacttcgtagtgaaatcacacgacttcagatggagctcatggagtacaaaacaggtaaaagaataattgacgaagagggtgtggaaagcatcaatgacatgtttcatgagaatgctatgctacagactgaaaataataacctgcgtgtaagaattaaagccatgcaagagacggttgatgcattgaggtccagaattacacagcttgttagtgatcaggccaaccatgttcttgccagagcaggtgaaggaaatgaggagattagtaatatgattcatagttatataaaagaaatcgaagatctcagggcaaaattattagaaagtgaagcagtgaatgagaaccttcgaaaaaacttgacaagagccacagcaagagcgccatatttcagcggatcatcaactttttctcctaccatactatcctcagacaaagaaaccattgaaattatagacctagcaaaaaaagatttagagaagttgaaaagaaaagaaaagaggaagaaaaaaaggctacagaaacttgaggaaagcaatcgagaagaaagaagtgtggctggtaaagaggataatacagacactgaccaagagaagaaagaagaaaagggtgtttcggaaagagaaaacaatgaattagaagtggaagaaagtcaagaagtgagtgatcatgaggatgaagaagaggaggaggaggaggaggaagatgacattgatgggggtgaaagttctgatgaatcagattctgaatcagatgaaaaagccaattatcaagcagacttggcaaacattacttgtgaaattgcaattaagcaaaagctgattgatgaactagaaaacagccagaaaagactgcagactctgaaaaagcagtatgaagagaagctaatgatgctgcaacataaaattcgggatactcagcttgaaagagaccaggtgcttcaaaacttaggctcggtagaatcttactcagaagaaaaagcaaaaaaagttaggtctgaatatgaaaagaaactccaagccatgaacaaagaactgcagagacttcaagcagctcaaaaagaacatgcaaggttgcttaaaaatcagtctcagtatgaaaagcaattgaagaaattgcagcaggatgtgatggaaatgaaaaaaacaaaggttcgcctaatgaaacaaatgaaagaagaacaagagaaagccagactgactgagtctagaagaaacagagagattgctcagttgaaaaaggatcaacgtaaaagagatcatcaacttagacttctggaagcccaaaaaagaaaccaagaagtggttctacgtcgcaaaactgaagaggttacggctcttcgtcggcaagtaagacccatgtcagataaagtggctgggaaagttactcggaagctgagttcatctgatgcacctgctcaggacacaggttccagtgcagctgctgtcgaaacagatgcatcaaggacaggagcccagcagaaaatgagaattcctgtggcgagagtccaggccttaccaacgccggcaacaaatggaaacaggaaaaaatatcagaggaaaggattgactggccgagtgtttatttccaagacagctcgcatgaagtggcagctccttgagcgcagggtcacagacatcatcatgcagaagatgaccatttccaacatggaggcagatatgaatagactcctcaagcaacgggaggaactcacaaaaagacgagagaaactttcaaaaagaagggagaagatagtcaaggagaatggagagggagataaaaatgtggctaatatcaatgaagagatggagtcactgactgctaatatcgattacatcaatgacagtatttctgattgtcaggccaacataatgcagatggaagaagcaaaggaagaaggtgagacattggatgttactgcagtcattaatgcctgcacccttacagaagcccgatacctgctagatcacttcctgtcaatgggcatcaataagggtcttcaggctgcccagaaagaggctcaaattaaagtactggaaggtcgactcaaacaaacagaaataaccagtgctacccaaaaccagctcttattccatatgttgaaagagaaggcagaattaaatcctgagctagatgctttactaggccatgctttacaagattttaaacatttttttgtagaaaatgtagaggatagtactgatgaggatgctcctttaaacagcccaggatcagaaggaagcacgctgtcttcagatctcatgaagctttgtggtgaagtgaaacctaagaacaaggcccgaaggagaaccaccactcagatggaattgctgtatgcagatagcagtgaactagcttcagacactagtacaggagatgcctccttgcctggccctctcacacctgttgcagaagggcaagagattggaatgaatacagagacaagtggtacttctgctagggaaaaagagctctctcccccacctggcttaccttctaagataggcagcatttccaggcagtcatctctatcagaaaaaaaaattccagagccttctcctgtaacaaggagaaaggcatatgagaaagcagaaaaatcaaaggccaaggaacaaaagcagtctgatgaaagtgactcctctctctcggaggtacacaggggcataatcaacccatttcctgcttcaaaaggaatcagagcttttccacttcagtgtattcacatagctgaagggcatacaaaagctgtgctctgtgtggattctactgatgatctcctcttcactggatcaaaagatcgtacttgtaaagtatggaatctggtgactgggcaggaaataatgtcactggggggtcatcccaacaatgtcgtgtctgtaaaatactgtaattataccagtttggtcttcactgtatcaacatcttatattaaggtgtgggatatcagagattcagcaaagtgcattcgaacactaacgtcttcaggtcaagttactcttggagatgcttgttctgcaagtaccagtcgaacagtagctattccttctggagagaaccagatcaatcaaattgccctaaacccaactggcaccttcctctatgctgcttctggaaatgctgtcaggatgtgggatcttaaaaggtttcagtctacaggaaagttaacaggacacctaggccctgttatgtgccttactgtggatcagatttccagtggacaagatctaatcatcactggctccaaggatcattacatcaaaatgtttgatgttacagaaggagctcttgggactgtgagtcccacccacaattttgaaccccctcattatgatggcatagaagcactaaccattcaaggggataacctatttagtgggtctagagataatggaatcaagaaatgggacttaactcaaaaagaccttcttcagcaagttccaaatgcacataaggattgggtctgtgccctgggagtggtgccagaccacccagttttgctcagtggctgcagagggggcattttgaaagtctggaacatggatacttttatgccagtgggagagatgaagggtcatgatagtcctatcaatgccatatgtgttaattccacccacatttttactgcagctgatgatcgaactgtgagaatttggaaggctcgcaatttgcaagatggtcagatctctgacacaggagatctgggggaagatattgccagtaattaaacatgaatgaagataggttgtaaactgaatgctgtgataatactctgtattctttatggaaaatgttgtcctgtacttactaggcaaaacgtatgaatcggattaactggaaaatatatctgaattcaactgctgactataaatggtattctaataaaattgtgtactatcctgtgtgcttagttttaagatcaaccaatagatatatatcctacaattgatatattgctttattcacacttttattgtggctgaatttttgtgcctatctataaaacacactttcaaattatttgaattaccaagacgtctgcttttgtgacagtcagaaaacacacctggaatacgatgcagcccaccattaactcattcatgtagtttattcaagtgatttatgtatttaaactaaatattgaaaatgttagtcaaattgtggtttgcttgtcaggtatttatatcagtctgtagtggattcccaaatttcaaagctcttttaatgtaatggacaaaaataagatatgagaatattattgatgaattttcataaggtggaattgatcttaatctactaacagagaagggtagacagtttgtgttaaatgttggcatttacttgtattgaccaaagttttgcagctctactatattctgtgctcaggactaaaatgctgttaatttttttttttttttccagtgctgtgcatatattctgtgatgggaaacattgttgatgtcctaacagaaatatattttgatctattttcctatggagttgtttctattatgaccatttaattttgtttttatttaatagtagtatttccttcccttttatctaattttttatatgctgctaaatatattttaaatatactatgtttgcgaaccttggtagctatgatgagagctattatcatctgtggtgggaaaagctatgtaaataggtagattgtatagagagactatcttgtgttgtgcctgtatgaatttttaaaagttgttgactggattttgcaaaaggatgtataatatttctgtctgctcagaatattaatttgtaaattctgcaagtttaatttttatgtagatggtataacatttgaaaatattgtcttatgtgattttttcccctgaaaatatttgcttgtaaatgaaaacttagctagggcttaaataaacatgttgctatgaaatt

SEQ ID NO: 282280 - DNA, 4884 bp, Artificial Sequence
  derived and/or modified sequence
atgctgggcgccccagatgagagctctgtgcgggtggccgtgcgcatccggccccagctggccaaggagaagattgagggctgccacatctgcacctctgtgaccccaggagagccccaggtgttcctgggcaaggacaaggccttcacctttgattatgtgtttgatattgacagccagcaggagcagatctacatccagtgcatcgagaagctgattgagggctgctttgagggctacaatgccaccgtgtttgcctacggccagacaggagctgggaagacctacaccatgggcaccggctttgatgtgaacatcgtggaggaggagctgggcatcatcagcagagctgtgaagcacctgttcaagagcattgaggagaagaagcacatcgccatcaagaatggcctgcctgccccagacttcaaggtgaatgcccagttcctggagctgtacaatgaggaggtgctggacctgtttgacaccacccgggacattgatgccaagagcaagaagagcaacatccgcatccacgaggacagcactggaggcatctacacagtgggcgtgaccaccaggacagtgaacacagaaagtgagatgatgcagtgcctgaagctgggcgccctgagcaggaccacagccagcacccagatgaatgtgcagagcagccgcagccacgccatcttcaccatccacgtgtgccagaccagggtgtgcccccagattgatgctgacaatgccacagacaacaagatcatcagcgagagcgcccagatgaatgaatttgagaccctgacagccaagttccactttgtggacctggccggcagcgagcggctgaagaggactggagccactggagagcgggccaaggagggcatcagcatcaactgtggcctgctggccctgggcaatgtcatcagcgccctgggggacaagagcaagagggccacccacgtgccctacagagacagcaagctgacccggctgctgcaggacagcctgggcggcaacagccagaccatcatgattgcctgtgtgagccccagcgaccgggacttcatggagaccctgaacaccctgaagtatgccaacagagccaggaacatcaagaacaaggtgatggtgaaccaggaccgggccagccagcagatcaatgccctgcggtctgagatcacccggctgcagatggagctgatggagtacaagacaggcaagaggatcattgatgaggagggcgtggagagcatcaatgacatgtttcatgaaaatgccatgctgcagacagagaacaacaacctgcgggtgcgcatcaaggccatgcaggagaccgtggatgccctgcggagccgcatcacccagctggtgtctgaccaggccaaccacgtgctggcccgggccggggagggcaatgaggagatcagcaacatgatccacagctacatcaaggagattgaggacctgcgggccaagctgctggagagcgaggccgtgaatgaaaacctgaggaagaacctgacccgggccacagcccgggccccctacttcagcggcagcagcaccttcagccccaccatcctgagcagtgacaaggagaccatcgagatcatcgacctggccaagaaggacctggagaagctgaagaggaaggagaagaggaagaagaagaggctgcagaagctggaggagagcaaccgggaggagaggtctgtggccggcaaggaggacaacacagacacagaccaggagaagaaggaggagaagggcgtgtctgaaagagaaaataatgagctggaggtggaggagagccaggaggtgtctgaccatgaagatgaggaggaggaggaggaggaggaggaggatgacattgatggaggagagagcagtgatgaaagtgacagcgagagtgatgagaaggccaactaccaggccgacctggccaacatcacctgtgagatcgccatcaagcagaagctgattgatgagctggagaacagccagaagaggctgcagaccctgaagaagcagtatgaggagaagctgatgatgctgcagcacaagatccgggacacccagctggagcgggaccaggtgctgcagaacctgggctctgtggagagctacagcgaggagaaggccaagaaggtgcgctcagaatatgagaagaagctgcaggccatgaacaaggagctgcagaggctgcaggccgcccagaaggagcacgcccggctgctgaagaaccagagccagtatgagaagcagctgaagaagctgcagcaggatgtgatggagatgaagaagaccaaggtgcggctgatgaagcagatgaaggaggagcaggagaaggcccggctgacagagagcagaagaaaccgggagatcgcccagctgaagaaggaccagaggaagagggaccaccagctgcggctgctggaggcccagaagaggaaccaggaggtggtgctgcggaggaagacagaggaggtgacagccctgcggcggcaggtgcggcccatgtctgacaaggtggccggcaaggtgaccaggaagctgagcagcagtgatgccccagcccaggacaccggcagcagcgctgctgctgtggagacagatgccagcaggactggagcccagcagaagatgagaattcctgtggcccgggtgcaggccctgcccaccccagccaccaacggcaacaggaagaagtaccagaggaagggcctgaccggccgggtcttcatcagcaagacagccaggatgaagtggcagctgctggagcggcgggtgacagacatcatcatgcagaagatgaccatcagcaacatggaggccgacatgaaccggctgctgaagcagcgggaggagctgaccaagaggcgggagaagctgagcaagagaagagagaagatcgtgaaggaaaatggagagggggacaagaatgtggccaacatcaatgaggagatggagagcctgacagccaacatcgactacatcaatgacagcatcagtgactgccaggccaacatcatgcagatggaggaggccaaggaggagggggagaccctggatgtgacagctgtgatcaatgcctgcaccctgacagaggcccgctacctgctggaccacttcctgtccatgggcatcaacaagggcctgcaggccgcccagaaggaggcccagatcaaggtgctggagggccgcctgaagcagacagagatcaccagcgccacccagaaccagctgctcttccacatgctgaaggagaaggccgagctgaaccctgagctggatgccctgctgggccacgccctgcaggacttcaagcacttctttgtggagaatgtggaggacagcacagatgaagatgcccccctgaacagccctggcagcgagggcagcaccctgagcagtgacctgatgaagctgtgtggggaggtgaagcccaagaacaaggcccggcggaggaccaccacccagatggagctgctgtatgctgacagcagcgagctggccagtgacaccagcactggagatgccagcctgcccggccccctgacccctgtggccgagggccaggagatcggcatgaacacagagaccagcggcaccagcgcccgggagaaggagctgagccccccacctggcctgcccagcaagattggcagcatcagccggcagagcagcctgtctgagaagaagatccctgagcccagccctgtgaccaggaggaaggcctatgagaaggccgagaagagcaaggccaaggagcagaagcagagtgatgaaagtgacagcagcctgtctgaggtgcaccggggcatcatcaaccccttccctgccagcaagggcatccgggccttccccctgcagtgcatccacatcgccgagggccacaccaaggctgtgctgtgtgtggacagcacagatgacctgctcttcaccggcagcaaggacaggacctgcaaggtgtggaacctggtgacaggccaggagatcatgagcctgggcggccaccccaacaacgtggtgtctgtgaagtactgcaactacaccagcctggtgttcaccgtgtccaccagctacatcaaggtgtgggacatccgggacagcgccaagtgcatccgcaccctgaccagcagcggccaggtgaccctgggagatgcctgcagcgccagcaccagcaggacagtggccatccccagcggggagaaccagatcaaccagatcgccctgaaccccaccggcaccttcctgtatgctgccagcggaaatgctgtgaggatgtgggacctgaagcgcttccagagcacaggcaagctgaccggccacctgggccctgtgatgtgcctgactgtggaccagatcagcagcggccaggacctgatcatcaccggcagcaaggaccactacatcaagatgtttgatgtgacagagggcgccctgggcaccgtgagccccacccacaactttgagcccccccactatgatggcatcgaggccctgaccatccagggcgacaacctcttcagcggcagccgggacaatggcatcaagaagtgggacctgacccagaaggacctgctgcagcaggtgcccaatgcccacaaggactgggtgtgtgccctgggcgtggtgcctgaccaccctgtgctgctgagcggctgccggggcggcatcctgaaggtgtggaacatggacaccttcatgcctgtgggggagatgaagggccatgacagccccatcaatgccatctgtgtgaacagcacccacatcttcaccgctgctgatgacagaacagtgcgcatctggaaggccaggaacctgcaggacggccagatcagtgacacaggagacctgggggaggacatcgccagcaactag

SEQ ID NO: 282281 - DNA, 4884 bp, Artificial Sequence
  derived and/or modified sequence
atgctgggcgcccccgacgagagcagcgtgcgggtggccgtgcggatccggccacagcttgctaaagagaagatagagggttgccacatatgtacttcagtgacacccggcgagccgcaagtgtttcttgggaaagataaagcattcacattcgactacgtctttgacatcgattctcagcaagaacagatctatatacaatgcattgaaaaattgatagagggctgctttgaaggatacaatgcaacagttttcgcatatggacagaccggtgccggaaagacttacaccatgggtacggggttcgacgtgaacattgtcgaagaagaactcggtattatctcgagagcagtgaaacacctcttcaaatcaattgaggagaagaaacacatcgccattaaaaacggcttgcctgccccagacttcaaggtcaatgcgcagtttttggagctgtataacgaggaggttctggatttgttcgatacaacacgcgatatcgacgcaaaatccaagaagtcaaacattcgtatccacgaggacagcaccggcggaatttatacggtaggtgtgaccacaaggactgtaaacaccgagtctgaaatgatgcagtgtctgaagttgggagctctgagcaggacaaccgcctcaacgcagatgaacgtgcagagttcgagaagtcacgcgatcttcacaatacatgtttgtcagactcgggtctgcccacagattgacgctgacaacgcaactgataataagatcatttctgagtccgcccagatgaatgagtttgaaaccctgactgccaaatttcacttcgtagaccttgctggctctgaaaggttaaaaagaacgggtgccaccggcgaacgcgctaaagagggaatttctatcaattgcgggttgcttgccctgggcaatgtgatttctgcactaggcgacaaatcaaagcgcgccacacacgtgccctaccgggatagcaagctgaccagactgctccaggactccctgggcggaaacagtcagacaatcatgattgcatgtgtctccccttccgaccgcgatttcatggagaccctcaacacccttaagtacgcgaaccgagcacggaatattaagaacaaggtgatggtcaaccaggacagagctagtcaacagataaacgctctgcgcagcgagatcacccgacttcaaatggaattgatggaatataaaaccgggaagagaatcattgatgaggaaggagtcgaaagtattaacgacatgtttcacgagaatgccatgctgcagacagaaaataataatctgagggtaagaattaaagccatgcaagagacggtcgatgccctcaggtctcgcatcacacagctggtcagtgaccaggcgaaccatgtactggcgcgcgcgggggaagggaacgaagagatctccaacatgattcactcgtatatcaaggaaatcgaggacctcagagcgaaactgttagagtccgaggcagtcaacgagaacctgcgcaaaaatctgactagggctactgcgcgtgcaccatacttttctgggtcctctacatttagccctacaatcctgtcctctgacaaggaaaccatcgagatcattgacctggccaagaaggacctcgaaaaactcaaacggaaggaaaagcggaagaagaagcggttacagaagcttgaggaaagtaatcgagaggagcggtccgtcgccggcaaagaggacaacacagacactgatcaagagaagaaagaagagaagggcgtctccgagcgcgaaaacaatgagcttgaagtggaagagagccaagaggtctcagaccacgaagatgaggaagaggaggaggaggaagaagaagacgacattgatgggggggagtcctcagatgagtctgattccgagagcgacgagaaggcgaattaccaggcagacttggccaatattacctgcgaaattgccatcaagcagaagctcattgatgagctggagaacagccaaaagcgactgcagaccctgaaaaagcagtatgaggagaaactgatgatgctgcagcataaaattcgtgatacgcagttggaaagggatcaggtattacaaaacctcggctccgtcgaatcctattctgaagaaaaggctaagaaggtaagatccgagtacgaaaaaaaactgcaggctatgaacaaggagctccagcggctgcaggccgcacagaaggaacacgccaggttgctcaaaaatcaaagccagtatgagaaacagctcaaaaaattgcagcaggatgtgatggagatgaaaaagacaaaggtacgcctcatgaagcagatgaaggaggagcaggagaaggcacgactgacagaaagccgtcggaacagggaaattgcccagctaaagaaggatcagcgcaaaagagaccaccagctccggcttcttgaggcccagaaaaggaaccaggaggttgtcttgagacgtaagactgaagaggtgaccgctcttcgccgacaggtcagaccaatgtctgacaaggtcgcggggaaggtgacacgaaaactgtcttcttccgacgctcctgctcaggataccggcagttcagctgcagcagtggaaactgatgcgagcaggaccggcgcacagcagaaaatgcgcatccctgtggcccgtgtccaggccctgcccacccccgctacgaacgggaataggaagaagtaccaacggaaaggcctgaccggtagagtgttcatttctaaaaccgctcgaatgaagtggcaactgctcgaacgacgtgtaaccgatattataatgcagaagatgactatcagcaatatggaggcagatatgaatcggctgttaaagcagcgggaggaactgactaaacgtagagagaaactgtcaaaacggagggagaagattgtgaaagaaaacggtgaaggggataagaacgtggctaacattaacgaggagatggaatctctaacggccaatattgattacattaacgatagcatatctgactgtcaagccaacattatgcagatggaagaggccaaagaagaaggggagaccctggatgtgacagctgtcattaacgcttgcaccctcactgaggctaggtatctacttgaccactttctgagcatgggaatcaacaaggggttgcaggctgcacagaaagaagcacagatcaaggttctggagggcaggctcaaacagaccgagatcacttctgctacacagaatcagcttctgttccatatgcttaaagagaaggccgagctaaacccagagctcgatgcgctacttggacatgctctccaagacttcaagcacttcttcgtagaaaatgtggaggactcaacggatgaagacgcacctttgaattctcccgggtctgagggcagcaccctgagttccgatctaatgaaactgtgtggggaagtgaagccaaaaaataaggcccggcggaggacgactacacagatggagcttctgtacgccgatagttccgagcttgcttcagatacttccaccggcgacgcctctctccccggcccactgacccccgtagccgaggggcaagaaatcggaatgaacaccgaaacctctggtacctccgccagagaaaaagagctgtcaccgcccccagggctcccctccaagatcggtagtatctccaggcagtctagtctcagcgaaaaaaaaattcccgaacccagccctgtgacgaggcgcaaagcttatgagaaggccgagaaaagcaaggccaaggaacaaaaacagtcagatgaatccgattcaagcctttcagaggtacaccggggcatcattaaccccttccctgcaagcaaggggattcgggcatttcctttacaatgcatacatatcgcagaaggtcacactaaagctgttctgtgcgtggactctacagacgaccttctcttcacgggctccaaagatcggacatgcaaggtctggaacctggtgacaggtcaggaaatcatgtctcttggtgggcatccaaacaatgtcgtgtcggtcaaatactgtaattacacaagccttgtttttacagtgtcaacctcatatattaaggtgtgggacataagggacagtgccaagtgcattcgaacactgacaagcagcggtcaggtgaccttgggggatgcatgttccgcaagtacctcaaggacagttgctatcccttcaggagagaaccaaattaaccagattgctctcaatcctaccggcacattcctatacgctgcctccggcaatgctgttcgcatgtgggatctgaagcgtttccagagcacaggcaagctgacaggccacctggggcccgttatgtgcctgaccgtggatcagatcagttcgggacaggatctgattataaccggcagcaaggaccattatatcaaaatgtttgacgtgacagagggggccctggggacagtgtcccccactcacaacttcgagccaccccactacgacggaattgaagccctgacgattcagggagacaatctattttcagggtcacgtgataacggcatcaaaaaatgggacttaacacaaaaggatctcctgcaacaggtgcctaatgcccataaagattgggtgtgcgctctcggagtcgtgccagaccatcctgtgctgctctcaggttgccggggcggcatcttaaaagtatggaatatggacacatttatgccagtgggggaaatgaaaggccatgactccccaatcaacgccatctgcgttaacagcactcacatctttactgccgcagatgatcgtactgtgcgtatctggaaagcccgcaacttgcaggatggtcagatctctgatactggggaccttggcgaagacatagcctccaactag

SEQ ID NO: 282282 - DNA, 4884 bp, Artificial Sequence
  derived and/or modified sequence
atgctcggtgcccctgacgagtcctcagtccgcgtggctgtcaggattagacctcaattggcaaaagaaaagattgaaggctgtcatatctgcacgtcagtgacccccggagagccccaggttttcctgggcaaagacaaggccttcacatttgattatgtgtttgacattgatagtcagcaagagcagatctatatccagtgcatcgagaaactgatagaggggtgcttcgagggatataatgccactgtgtttgcctatggtcaaactggcgctgggaaaacctataccatgggaacagggtttgacgtgaatatcgtggaggaagagctaggcatcatttcacgagctgtcaagcaccttttcaaatccattgaagaaaaaaaacacatcgccatcaagaatggactccccgctcctgacttcaaggtgaatgctcagttcctcgagctgtacaatgaggaggtcttggacttgtttgacaccaccagagatattgatgctaagtctaaaaagtccaacattcggatccatgaggactccaccggaggaatctacactgtgggcgtcacgacccgtaccgttaatacggaatcggagatgatgcagtgcctgaaactgggcgcactgtctaggacgacagcctcaacccagatgaacgtgcaatccagcagatcccacgcgattttcactattcacgtgtgtcagacgcgtgtgtgccctcaaatagatgccgataatgcgacggataacaaaatcatttcagagagcgctcaaatgaacgagttcgagaccctcaccgcaaagtttcattttgtggacctcgctggcagcgaacgccttaagcgcactggggcaacaggggagagggccaaggagggcatcagcatcaactgcgggctgctcgcccttggtaacgttatcagcgcgctaggcgataagagcaagagggccacccacgtaccttatcgagacagcaagcttaccaggctactgcaagattccctgggtggaaactcccaaactataatgattgcatgcgtcagtccgtcagaccgagactttatggagactttgaacacgcttaaatacgccaacagagccaggaatattaaaaacaaagtgatggtgaatcaggatagagccagccagcaaattaatgccctgcggtcagagataaccagattacagatggaactcatggaatacaagactgggaagcgcataattgatgaggagggggtagaatcaatcaatgatatgttccacgagaatgctatgcttcagaccgaaaacaacaacctgcgggtgcggatcaaggccatgcaagaaaccgttgatgcactgcggtccaggataacacagcttgtttccgatcaagccaatcatgtccttgccagggcaggcgaaggaaacgaggaaatttccaatatgatccactcctatatcaaggaaatagaagatctcagggccaagttgctggagtcggaagccgtaaatgaaaatctgagaaagaacctgaccagagctaccgcgagagccccttactttagcggctccagcacgttctcgccaaccattttatcctcagacaaggaaaccatcgagattatagatctggccaagaaggatctggagaagctcaagcgaaaggagaaacggaagaagaagcgcttgcaaaaactagaggaatctaacagggaagagagatccgtcgcaggtaaagaggacaacacagatacagaccaggagaagaaagaggaaaagggagtaagcgaaagggagaataacgagctcgaggtggaagagagtcaggaggtatccgaccatgaagatgaagaagaagaggaagaggaagaggaggacgacattgatggtggcgaatcaagcgatgagtcagattccgaaagcgacgagaaggcgaattatcaagccgaccttgctaacattacctgtgagatcgcgattaaacaaaaactgatagatgagcttgagaatagccagaagaggctgcaaaccctgaagaagcagtatgaagagaagctcatgatgctgcagcataaaattcgagacactcagttagagagggatcaagtgctccagaatctgggatccgtggagtcgtattccgaagaaaaggccaaaaaggttagaagcgaatatgagaaaaagctccaggctatgaacaaagaattacagaggttgcaggccgctcaaaaagagcatgccagactactaaaaaaccagtcccagtacgagaaacagttgaagaagctccagcaggatgtgatggagatgaaaaagactaaggttcgtcttatgaagcaaatgaaggaggaacaagagaaggcacgactgaccgagagccgcaggaatcgagaaattgctcaactgaaaaaagatcagcggaaacgcgatcaccagctgagactgctggaggctcagaaacgcaatcaggaggtggtgctccgaagaaaaacagaggaggtgacggccctgaggaggcaggtccgtcctatgtctgataaagttgccggaaaggtgactcggaaactcagttcaagcgacgcccctgcccaggacacaggctcatccgccgcagcagtggagacggacgcctctcgaacaggcgctcaacaaaaaatgcgaattcccgttgcaagagtgcaagccttgcccacaccagcaactaatgggaaccgtaagaaataccagagaaagggtttaacgggaagagtgttcatatcaaagacagctcggatgaagtggcagctgctggagaggagagttactgacattataatgcagaagatgactattagtaatatggaagccgatatgaatagactgctcaagcagcgagaggagctgactaaaaggagggagaagttgtccaaacggcgtgagaaaattgtgaaagagaacggagagggcgacaaaaacgtggccaacataaatgaggagatggaaagcttgaccgcaaacattgactatataaacgactctatctctgattgccaggccaacataatgcaaatggaagaggctaaagaggaaggggaaacgctggatgtaacagccgtgattaacgcatgcaccctgactgaggcacgctatctgctcgatcattttctgtccatgggaattaataaaggtctccaggccgctcagaaagaggcacagatcaaggttctcgaaggcaggctgaaacaaactgagattacatcggcaacacaaaaccaattactgttccacatgctgaaagaaaaggccgagctgaacccggagctcgacgccttgcttgggcatgcactccaggattttaaacactttttcgtggagaatgtagaagatagcactgatgaggatgcaccccttaacagtcccggtagcgagggttcgacccttagttccgacctcatgaagctttgcggtgaggtgaaacctaaaaacaaggcacggagacggactacaactcagatggagctgttatatgcggactccagtgagcttgcatctgacactagcaccggtgacgcatctctgcccggacctctgactcccgtggctgaggggcaggaaatcggtatgaacactgaaactagcggaacatcggcacgtgagaaggaattgagccctccgccaggcctgccctctaagatcgggtcaatctctcgccagagttccctaagtgaaaaaaagatccccgagccctcccccgtcaccaggcgcaaggcatatgagaaagccgaaaaaagcaaagcaaaggagcagaaacaatctgatgagagcgactcttccctgtcggaggtgcaccgcggaatcattaaccccttccccgcttccaaggggatccgcgcatttcctctacagtgcatccacatcgccgaggggcatactaaggcagtgctgtgcgtggattcaacagatgatctcttgttcacggggtctaaagatagaacttgcaaagtttggaatttggttactggccaggagatcatgtccttgggcggacatccgaataacgtggtctcagttaaatactgtaactacacttccttagtctttaccgtttcaacctcctatatcaaggtatgggacatccgcgatagcgcaaaatgcataagaaccctcacaagctcgggtcaggtaacattaggagacgcttgttccgcttccacctccaggaccgtggccatcccgtccggagaaaatcagatcaaccagattgccttaaaccccacaggcacgttcctatatgccgctagcggaaatgcagtgaggatgtgggatctaaaaaggtttcagagcacaggcaaactaaccggacatctcggccctgtcatgtgcttaaccgtagaccagatttcctctggacaggacctgataatcacaggcagcaaagaccactacatcaaaatgttcgatgtgaccgagggggctctcggaaccgtgagccctactcacaacttcgaaccaccccactacgatggaattgaagccttgaccatccaaggagacaatctcttcagtggtagtcgcgacaatgggattaagaaatgggacttaactcagaaggacctcctgcagcaagtcccaaatgcccacaaggactgggtgtgcgctctgggcgtcgtccccgaccatcctgtgctgctgagcggatgtcgcggaggaattttgaaggtgtggaacatggacacatttatgccggtgggagaaatgaaagggcacgattcacctatcaacgctatttgtgttaactctacccacatattcacagcagcggacgatcggaccgtcagaatctggaaagcccgtaatctacaggacggacagatttctgacacaggagatcttggagaggatatcgcctctaattag

SEQ ID NO: 282283 - DNA, 4884 bp, Artificial Sequence
  derived and/or modified sequence
atgctgggcgcccccgacgagagcagcgtgagagtggccgtgagaatcagaccccagctggccaaggagaagatcgagggctgccacatctgcaccagcgtgacccccggcgagccccaggtgttcctgggcaaggacaaggccttcaccttcgactacgtgttcgacatcgacagccagcaggagcagatctacatccagtgcatcgagaagctgatcgagggctgcttcgagggctacaacgccaccgtgttcgcctacggccagaccggcgccggcaagacctacaccatgggcaccggcttcgacgtgaacatcgtggaggaggagctgggcatcatcagcagagccgtgaagcacctgttcaagagcatcgaggagaagaagcacatcgccatcaagaacggcctgcccgcccccgacttcaaggtgaacgcccagttcctggagctgtacaacgaggaggtgctggacctgttcgacaccaccagagacatcgacgccaagagcaagaagagcaacatcagaatccacgaggacagcaccggcggcatctacaccgtgggcgtgaccaccagaaccgtgaacaccgagagcgagatgatgcagtgcctgaagctgggcgccctgagcagaaccaccgccagcacccagatgaacgtgcagagcagcagaagccacgccatcttcaccatccacgtgtgccagaccagagtgtgcccccagatcgacgccgacaacgccaccgacaacaagatcatcagcgagagcgcccagatgaacgagttcgagaccctgaccgccaagttccacttcgtggacctggccggcagcgagagactgaagagaaccggcgccaccggcgagagagccaaggagggcatcagcatcaactgcggcctgctggccctgggcaacgtgatcagcgccctgggcgacaagagcaagagagccacccacgtgccctacagagacagcaagctgaccagactgctgcaggacagcctgggcggcaacagccagaccatcatgatcgcctgcgtgagccccagcgacagagacttcatggagaccctgaacaccctgaagtacgccaacagagccagaaacatcaagaacaaggtgatggtgaaccaggacagagccagccagcagatcaacgccctgagaagcgagatcaccagactgcagatggagctgatggagtacaagaccggcaagagaatcatcgacgaggagggcgtggagagcatcaacgacatgttccacgagaacgccatgctgcagaccgagaacaacaacctgagagtgagaatcaaggccatgcaggagaccgtggacgccctgagaagcagaatcacccagctggtgagcgaccaggccaaccacgtgctggccagagccggcgagggcaacgaggagatcagcaacatgatccacagctacatcaaggagatcgaggacctgagagccaagctgctggagagcgaggccgtgaacgagaacctgagaaagaacctgaccagagccaccgccagagccccctacttcagcggcagcagcaccttcagccccaccatcctgagcagcgacaaggagaccatcgagatcatcgacctggccaagaaggacctggagaagctgaagagaaaggagaagagaaagaagaagagactgcagaagctggaggagagcaacagagaggagagaagcgtggccggcaaggaggacaacaccgacaccgaccaggagaagaaggaggagaagggcgtgagcgagagagagaacaacgagctggaggtggaggagagccaggaggtgagcgaccacgaggacgaggaggaggaggaggaggaggaggaggacgacatcgacggcggcgagagcagcgacgagagcgacagcgagagcgacgagaaggccaactaccaggccgacctggccaacatcacctgcgagatcgccatcaagcagaagctgatcgacgagctggagaacagccagaagagactgcagaccctgaagaagcagtacgaggagaagctgatgatgctgcagcacaagatcagagacacccagctggagagagaccaggtgctgcagaacctgggcagcgtggagagctacagcgaggagaaggccaagaaggtgagaagcgagtacgagaagaagctgcaggccatgaacaaggagctgcagagactgcaggccgcccagaaggagcacgccagactgctgaagaaccagagccagtacgagaagcagctgaagaagctgcagcaggacgtgatggagatgaagaagaccaaggtgagactgatgaagcagatgaaggaggagcaggagaaggccagactgaccgagagcagaagaaacagagagatcgcccagctgaagaaggaccagagaaagagagaccaccagctgagactgctggaggcccagaagagaaaccaggaggtggtgctgagaagaaagaccgaggaggtgaccgccctgagaagacaggtgagacccatgagcgacaaggtggccggcaaggtgaccagaaagctgagcagcagcgacgcccccgcccaggacaccggcagcagcgccgccgccgtggagaccgacgccagcagaaccggcgcccagcagaagatgagaatccccgtggccagagtgcaggccctgcccacccccgccaccaacggcaacagaaagaagtaccagagaaagggcctgaccggcagagtgttcatcagcaagaccgccagaatgaagtggcagctgctggagagaagagtgaccgacatcatcatgcagaagatgaccatcagcaacatggaggccgacatgaacagactgctgaagcagagagaggagctgaccaagagaagagagaagctgagcaagagaagagagaagatcgtgaaggagaacggcgagggcgacaagaacgtggccaacatcaacgaggagatggagagcctgaccgccaacatcgactacatcaacgacagcatcagcgactgccaggccaacatcatgcagatggaggaggccaaggaggagggcgagaccctggacgtgaccgccgtgatcaacgcctgcaccctgaccgaggccagatacctgctggaccacttcctgagcatgggcatcaacaagggcctgcaggccgcccagaaggaggcccagatcaaggtgctggagggcagactgaagcagaccgagatcaccagcgccacccagaaccagctgctgttccacatgctgaaggagaaggccgagctgaaccccgagctggacgccctgctgggccacgccctgcaggacttcaagcacttcttcgtggagaacgtggaggacagcaccgacgaggacgcccccctgaacagccccggcagcgagggcagcaccctgagcagcgacctgatgaagctgtgcggcgaggtgaagcccaagaacaaggccagaagaagaaccaccacccagatggagctgctgtacgccgacagcagcgagctggccagcgacaccagcaccggcgacgccagcctgcccggccccctgacccccgtggccgagggccaggagatcggcatgaacaccgagaccagcggcaccagcgccagagagaaggagctgagccccccccccggcctgcccagcaagatcggcagcatcagcagacagagcagcctgagcgagaagaagatccccgagcccagccccgtgaccagaagaaaggcctacgagaaggccgagaagagcaaggccaaggagcagaagcagagcgacgagagcgacagcagcctgagcgaggtgcacagaggcatcatcaaccccttccccgccagcaagggcatcagagccttccccctgcagtgcatccacatcgccgagggccacaccaaggccgtgctgtgcgtggacagcaccgacgacctgctgttcaccggcagcaaggacagaacctgcaaggtgtggaacctggtgaccggccaggagatcatgagcctgggcggccaccccaacaacgtggtgagcgtgaagtactgcaactacaccagcctggtgttcaccgtgagcaccagctacatcaaggtgtgggacatcagagacagcgccaagtgcatcagaaccctgaccagcagcggccaggtgaccctgggcgacgcctgcagcgccagcaccagcagaaccgtggccatccccagcggcgagaaccagatcaaccagatcgccctgaaccccaccggcaccttcctgtacgccgccagcggcaacgccgtgagaatgtgggacctgaagagattccagagcaccggcaagctgaccggccacctgggccccgtgatgtgcctgaccgtggaccagatcagcagcggccaggacctgatcatcaccggcagcaaggaccactacatcaagatgttcgacgtgaccgagggcgccctgggcaccgtgagccccacccacaacttcgagcccccccactacgacggcatcgaggccctgaccatccagggcgacaacctgttcagcggcagcagagacaacggcatcaagaagtgggacctgacccagaaggacctgctgcagcaggtgcccaacgcccacaaggactgggtgtgcgccctgggcgtggtgcccgaccaccccgtgctgctgagcggctgcagaggcggcatcctgaaggtgtggaacatggacaccttcatgcccgtgggcgagatgaagggccacgacagccccatcaacgccatctgcgtgaacagcacccacatcttcaccgccgccgacgacagaaccgtgagaatctggaaggccagaaacctgcaggacggccagatcagcgacaccggcgacctgggcgaggacatcgccagcaactag

SEQ ID NO: 282284 - protein, 661 aa, Artificial Sequence
  derived and/or modified sequence
MNRLLKQREELTKRREKLSKRREKIVKENGEGDKNVANINEEMESLTANIDYINDSISDCQANIMQMEEAKEEGETLDVTAVINACTLTEARYLLDHFLSMGINKGLQAAQKEAQIKVLEGRLKQTEITSATQNQLLFHMLKEKAELNPELDALLGHALQENVEDSTDEDAPLNSPGSEGSTLSSDLMKLCGEVKPKNKARRRTTTQMELLYADSSELASDTSTGDASLPGPLTPVAEGQEIGMNTETSGTSAREKELSPPPGLPSKIGSISRQSSLSEKKIPEPSPVTRRKAYEKAEKSKAKEQKQGIINPFPASKGIRAFPLQCIHIAEGHTKAVLCVDSTDDLLFTGSKDRTCKVWNLVTGQEIMSLGGHPNNVVSVKYCNYTSLVFTVSTSYIKVWDIRDSAKCIRTLTSSGQVTLGDACSASTSRTVAIPSGENQINQIALNPTGTFLYAASGNAVRMWDLKRFQSTGKLTGHLGPVMCLTVDQISSGQDLIITGSKDHYIKMFDVTEGALGTVSPTHNFEPPHYDGIEALTIQGDNLFSGSRDNGIKKWDLTQKDLLQQVPNAHKDWVCALGVVPDHPVLLSGCRGGILKVWNMDTFMPVGEMKGHDSPINAICVNSTHIFTAADDRTVRIWKARNLQDGQISDTGDLGEDIASN

SEQ ID NO: 282285 - DNA, 285 bp, Artificial Sequence
  derived and/or modified sequence
atgcagcacagtctggtcttcttcttcgccgtgatccttcatctgtcacacctcctccaccttgatgcttctattcatcccttccggttgcccttttctagcaagcctttcctactgattcccatgtctaacacaaccctaccccacacagcttggcctctgagttttctacaccagaccgtgagcaccttgaaagctgtggccgttacccacagcctgtggcacctccaaattccagtcgactgtcaggcctgtaatagaaagtcgaaaaagatctactgttag

SEQ ID NO: 282286 - DNA, 1986 bp, Artificial Sequence
  derived and/or modified sequence
atgaaccgcctcctaaaacagcgcgaggaacttaccaaacgaagggagaaactctctaagcgaagggaaaaaatcgtgaaggagaacggtgagggggacaaaaatgtggccaacatcaacgaggaaatggagtcactcaccgcaaatattgactacattaatgactcaatatcggactgccaggccaatattatgcaaatggaggaggctaaggaagagggggagactctggacgttacggcagttatcaacgcttgcacgctcacggaggccaggtatttattggaccattttctctcaatgggcataaacaaggggcttcaggcagcgcagaaagaagctcaaatcaaggtgttggagggccgcctgaaacagacggagatcacttctgccacgcagaatcagctactcttccatatgctaaaagagaaggccgaactcaaccccgagctggatgccctgttgggacatgcgttacaggagaatgtagaggattcaactgatgaagacgccccgctgaatagtccgggatccgaagggtctacattatctagtgacttaatgaaactctgtggggaggtaaaaccaaaaaataaggcccgccgccgcaccacaacgcagatggaactgctgtacgccgatagctctgagttggcttccgatactagcaccggcgacgccagtctgccaggaccgttgacccctgtggcagagggacaggaaataggaatgaacaccgagacctcagggacctccgcccgcgaaaaggagctgagcccccctcccggactgccgagcaaaattggatctataagtcgtcagagctccctcagtgaaaaaaagatccctgagccctcccccgtgacgagaaggaaggcgtatgagaaggccgagaaaagcaaggccaaggagcagaagcagggaatcatcaatccattccctgctagcaaaggaatccgcgcatttcctctgcaatgtattcatatcgcagaagggcataccaaagccgtgctctgcgtggatagcaccgacgatctcctattcaccggcagtaaagatcgaacctgcaaagtgtggaatctggttaccggacaggagattatgtccctgggcggtcacccgaacaacgtggtcagtgtgaagtattgtaattatacttcgcttgtgttcaccgtgagtacctcctatatcaaggtgtgggatatacgcgactcagccaaatgcatccgcacacttacctcctccggccaggtaaccctaggagacgcatgcagcgcctctacttctagaacagtggcaattcccagcggcgagaaccagatcaatcagattgctctgaatcctacaggaacttttctgtatgctgccagcgggaatgcggtcaggatgtgggatctgaaaaggttccaatccacgggaaagctgacaggtcatctgggccctgttatgtgtctgaccgtggatcagatctcctctggtcaagacctcattattacagggtcaaaggatcactatataaaaatgtttgatgttactgagggggccctgggcaccgttagccctacacacaatttcgagccaccacattatgacggcatagaagctcttacgattcagggcgacaatctcttcagtggcagccgtgataatgggataaagaagtgggacctgacccaaaaagatctgttgcagcaggtgcctaacgcccataaggactgggtgtgcgcattgggagtcgtccccgaccatcccgttctactgtccgggtgcagggggggcattcttaaagtatggaacatggatacctttatgcctgtgggggagatgaagggccatgacagtcctatcaatgctatatgtgtgaatagtactcacatctttaccgccgcggacgacaggactgttcgaatttggaaagcccggaatttacaggatgggcagatatccgataccggcgatttgggcgaggacatcgccagtaattag

SEQ ID NO: 282287 - DNA, 6400 bp, Artificial Sequence
  derived and/or modified sequence
gaggagcccggagcgccctggcgggcgtggagtccccagcctggccgctgggaggccgcgtccccaccggagggggcagggcgcactcacccggccgccctgaggccgctggcggcctgttggcttctccacaggcgcgctcgccgttcaagcgcgctttgtccccgccccagatcctggggggtgagcggtggagaaggggcgggcgcccgcgagccgtgaatcacctcctcctcttgctgcctcagcgccgccgccacctttccattcagtcgcccaacatggctggagcgcggcggaggtgagccggccgcccgcccgcagacgccccagcctactgcgcccgagtcccgcggccccagtggcgcctcagctctgcggtgccgaggcccaacggctcgatcgctgcccgccgccagcatgttgggcgccccggacgagagctccgtgcgggtggctgtcagaataagaccacagcttgccaaagagaagattgaaggatgccatatttgtacatctgtcacaccaggagagcctcaggtcttcctagggaaagataaggcttttacttttgactatgtatttgacattgactcccagcaagagcagatctacattcaatgtatagaaaaactaattgaaggttgctttgaaggatacaatgctacagtttttgcttatggacaaactggagctggtaaaacatacacaatgggaacaggatttgatgttaacattgttgaggaagaactgggtattatttctcgagctgttaaacacctttttaagagtattgaagaaaaaaaacacatagcaattaaaaatgggcttcctgctccagattttaaagtgaatgcccaattcttagagctctataatgaagaggtccttgacttatttgataccactcgtgatattgatgcaaaaagtaaaaaatcaaatataagaattcatgaagattcaactggaggaatttatactgtgggcgttacaacacgtactgtgaatacagaatcagagatgatgcagtgtttgaagttgggtgctttatcccggacaactgccagtacccagatgaatgttcagagctctcgttcacatgccatttttaccattcatgtgtgtcaaaccagagtgtgtccccaaatagatgctgacaatgcaactgataataaaattatttctgaatcagcacagatgaatgaatttgaaaccctgactgcaaagttccattttgttgatctcgcaggatctgaaagactgaagcgtactggagctacaggcgagagggcaaaagaaggcatttctatcaactgtggacttttggcacttggcaatgtaataagtgccttgggagacaagagcaagagggccacacatgtcccctatagagattccaagctaacaagactactacaggattccctcgggggtaatagccaaacaatcatgatagcatgtgtcagcccttcagacagagactttatggaaacgttaaacaccctgaaatacgccaatcgagctagaaatatcaagaataaggtgatggtcaatcaggacagagctagtcagcaaatcaatgcacttcgtagtgaaatcacacgacttcagatggagctcatggagtacaaaacaggtaaaagaataattgacgaagagggtgtggaaagcatcaatgacatgtttcatgagaatgctatgctacagactgaaaataataacctgcgtgtaagaattaaagccatgcaagagacggttgatgcattgaggtccagaattacacagcttgttagtgatcaggccaaccatgttcttgccagagcaggtgaaggaaatgaggagattagtaatatgattcatagttatataaaagaaatcgaagatctcagggcaaaattattagaaagtgaagcagtgaatgagaaccttcgaaaaaacttgacaagagccacagcaagagcgccatatttcagcggatcatcaactttttctcctaccatactatcctcagacaaagaaaccattgaaattatagacctagcaaaaaaagatttagagaagttgaaaagaaaagaaaagaggaagaaaaaaagtgtggctggtaaagaggataatacagacactgaccaagagaagaaagaagaaaagggtgtttcggaaagagaaaacaatgaattagaagtggaagaaagtcaagaagtgagtgatcatgaggatgaagaagaggaggaggaggaggaggaagatgacattgatgggggtgaaagttctgatgaatcagattctgaatcagatgaaaaagccaattatcaagcagacttggcaaacattacttgtgaaattgcaattaagcaaaagctgattgatgaactagaaaacagccagaaaagactgcagactctgaaaaagcagtatgaagagaagctaatgatgctgcaacataaaattcgggatactcagcttgaaagagaccaggtgcttcaaaacttaggctcggtagaatcttactcagaagaaaaagcaaaaaaagttaggtctgaatatgaaaagaaactccaagccatgaacaaagaactgcagagacttcaagcagctcaaaaagaacatgcaaggttgcttaaaaatcagtctcagtatgaaaagcaattgaagaaattgcagcaggatgtgatggaaatgaaaaaaacaaaggttcgcctaatgaaacaaatgaaagaagaacaagagaaagccagactgactgagtctagaagaaacagagagattgctcagttgaaaaaggatcaacgtaaaagagatcatcaacttagacttctggaagcccaaaaaagaaaccaagaagtggttctacgtcgcaaaactgaagaggttacggctcttcgtcggcaagtaagacccatgtcagataaagtggctgggaaagttactcggaagctgagttcatctgatgcacctgctcaggacacaggttccagtgcagctgctgtcgaaacagatgcatcaaggacaggagcccagcagaaaatgagaattcctgtggcgagagtccaggccttaccaacgccggcaacaaatggaaacaggaaaaaatatcagaggaaaggattgactggccgagtgtttatttccaagacagctcgcatgaagtggcagctccttgagcgcagggtcacagacatcatcatgcagaagatgaccatttccaacatggaggcagatatgaatagactcctcaagcaacgggaggaactcacaaaaagacgagagaaactttcaaaaagaagggagaagatagtcaaggagaatggagagggagataaaaatgtggctaatatcaatgaagagatggagtcactgactgctaatatcgattacatcaatgacagtatttctgattgtcaggccaacataatgcagatggaagaagcaaaggaagaaggtgagacattggatgttactgcagtcattaatgcctgcacccttacagaagcccgatacctgctagatcacttcctgtcaatgggcatcaataagggtcttcaggctgcccagaaagaggctcaaattaaagtactggaaggtcgactcaaacaaacagaaataaccagtgctacccaaaaccagctcttattccatatgttgaaagagaaggcagaattaaatcctgagctagatgctttactaggccatgctttacaagaaaatgtagaggatagtactgatgaggatgctcctttaaacagcccaggatcagaaggaagcacgctgtcttcagatctcatgaagctttgtggtgaagtgaaacctaagaacaaggcccgaaggagaaccaccactcagatggaattgctgtatgcagatagcagtgaactagcttcagacactagtacaggagatgcctccttgcctggccctctcacacctgttgcagaagggcaagagattggaatgaatacagagacaagtggtacttctgctagggaaaaagagctctctcccccacctggcttaccttctaagataggcagcatttccaggcagtcatctctatcagaaaaaaaaattccagagccttctcctgtaacaaggagaaaggcatatgagaaagcagaaaaatcaaaggccaaggaacaaaagcagggcataatcaacccatttcctgcttcaaaaggaatcagagcttttccacttcagtgtattcacatagctgaagggcatacaaaagctgtgctctgtgtggattctactgatgatctcctcttcactggatcaaaagatcgtacttgtaaagtatggaatctggtgactgggcaggaaataatgtcactggggggtcatcccaacaatgtcgtgtctgtaaaatactgtaattataccagtttggtcttcactgtatcaacatcttatattaaggtgtgggatatcagagattcagcaaagtgcattcgaacactaacgtcttcaggtcaagttactcttggagatgcttgttctgcaagtaccagtcgaacagtagctattccttctggagagaaccagatcaatcaaattgccctaaacccaactggcaccttcctctatgctgcttctggaaatgctgtcaggatgtgggatcttaaaaggtttcagtctacaggaaagttaacaggacacctaggccctgttatgtgccttactgtggatcagatttccagtggacaagatctaatcatcactggctccaaggatcattacatcaaaatgtttgatgttacagaaggagctcttgggactgtgagtcccacccacaattttgaaccccctcattatgatggcatagaagcactaaccattcaaggggataacctatttagtgggtctagagataatggaatcaagaaatgggacttaactcaaaaagaccttcttcagcaagttccaaatgcacataaggattgggtctgtgccctgggagtggtgccagaccacccagttttgctcagtggctgcagagggggcattttgaaagtctggaacatggatacttttatgccagtgggagagatgaagggtcatgatagtcctatcaatgccatatgtgttaattccacccacatttttactgcagctgatgatcgaactgtgagaatttggaaggctcgcaatttgcaagatggtcagatctctgacacaggagatctgggggaagatattgccagtaattaaacatgaatgaagataggttgtaaactgaatgctgtgataatactctgtattctttatggaaaatgttgtcctgtacttactaggcaaaacgtatgaatcggattaactggaaaatatatctgaattcaactgctgactataaatggtattctaataaaattgtgtactatcctgtgtgcttagttttaagatcaaccaatagatatatatcctacaattgatatattgctttattcacacttttattgtggctgaatttttgtgcctatctataaaacacactttcaaattatttgaattaccaagacgtctgcttttgtgacagtcagaaaacacacctggaatacgatgcagcccaccattaactcattcatgtagtttattcaagtgatttatgtatttaaactaaatattgaaaatgttagtcaaattgtggtttgcttgtcaggtatttatatcagtctgtagtggattcccaaatttcaaagctcttttaatgtaatggacaaaaataagatatgagaatattattgatgaattttcataaggtggaattgatcttaatctactaacagagaagggtagacagtttgtgttaaatgttggcatttacttgtattgaccaaagttttgcagctctactatattctgtgctcaggactaaaatgctgttaatttttttttttttttccagtgctgtgcatatattctgtgatgggaaacattgttgatgtcctaacagaaatatattttgatctattttcctatggagttgtttctattatgaccatttaattttgtttttatttaatagtagtatttccttcccttttatctaattttttatatgctgctaaatatattttaaatatactatgtttgcgaaccttggtagctatgatgagagctattatcatctgtggtgggaaaagctatgtaaataggtagattgtatagagagactatcttgtgttgtgcctgtatgaatttttaaaagttgttgactggattttgcaaaaggatgtataatatttctgtctgctcagaatattaatttgtaaattctgcaagtttaatttttatgtagatggtataacatttgaaaatattgtcttatgtgattttttcccctgaaaatatttgcttgtaaatgaaaacttagctagggcttaaataaacatgttgctatgaaatt

SEQ ID NO: 282288 - DNA, 1986 bp, Artificial Sequence
  derived and/or modified sequence
atgaaccggctgctgaagcagcgggaggagctgaccaagaggcgggagaagctgagcaagagaagagagaagatcgtgaaggaaaatggagagggggacaagaatgtggccaacatcaatgaggagatggagagcctgacagccaacatcgactacatcaatgacagcatcagtgactgccaggccaacatcatgcagatggaggaggccaaggaggagggggagaccctggatgtgacagctgtgatcaatgcctgcaccctgacagaggcccgctacctgctggaccacttcctgtccatgggcatcaacaagggcctgcaggccgcccagaaggaggcccagatcaaggtgctggagggccgcctgaagcagacagagatcaccagcgccacccagaaccagctgctcttccacatgctgaaggagaaggccgagctgaaccctgagctggatgccctgctgggccacgccctgcaggagaatgtggaggacagcacagatgaagatgcccccctgaacagccctggcagcgagggcagcaccctgagcagtgacctgatgaagctgtgtggggaggtgaagcccaagaacaaggcccggcggaggaccaccacccagatggagctgctgtatgctgacagcagcgagctggccagtgacaccagcactggagatgccagcctgcccggccccctgacccctgtggccgagggccaggagatcggcatgaacacagagaccagcggcaccagcgcccgggagaaggagctgagccccccacctggcctgcccagcaagattggcagcatcagccggcagagcagcctgtctgagaagaagatccctgagcccagccctgtgaccaggaggaaggcctatgagaaggccgagaagagcaaggccaaggagcagaagcagggcatcatcaaccccttccctgccagcaagggcatccgggccttccccctgcagtgcatccacatcgccgagggccacaccaaggctgtgctgtgtgtggacagcacagatgacctgctcttcaccggcagcaaggacaggacctgcaaggtgtggaacctggtgacaggccaggagatcatgagcctgggcggccaccccaacaacgtggtgtctgtgaagtactgcaactacaccagcctggtgttcaccgtgtccaccagctacatcaaggtgtgggacatccgggacagcgccaagtgcatccgcaccctgaccagcagcggccaggtgaccctgggagatgcctgcagcgccagcaccagcaggacagtggccatccccagcggggagaaccagatcaaccagatcgccctgaaccccaccggcaccttcctgtatgctgccagcggaaatgctgtgaggatgtgggacctgaagcgcttccagagcacaggcaagctgaccggccacctgggccctgtgatgtgcctgactgtggaccagatcagcagcggccaggacctgatcatcaccggcagcaaggaccactacatcaagatgtttgatgtgacagagggcgccctgggcaccgtgagccccacccacaactttgagcccccccactatgatggcatcgaggccctgaccatccagggcgacaacctcttcagcggcagccgggacaatggcatcaagaagtgggacctgacccagaaggacctgctgcagcaggtgcccaatgcccacaaggactgggtgtgtgccctgggcgtggtgcctgaccaccctgtgctgctgagcggctgccggggcggcatcctgaaggtgtggaacatggacaccttcatgcctgtgggggagatgaagggccatgacagccccatcaatgccatctgtgtgaacagcacccacatcttcaccgctgctgatgacagaacagtgcgcatctggaaggccaggaacctgcaggacggccagatcagtgacacaggagacctgggggaggacatcgccagcaactag

SEQ ID NO: 282289 - DNA, 1986 bp, Artificial Sequence
  derived and/or modified sequence
atgaaccggctgctgaagcagcgggaggagctgaccaagcggcgggaaaagctgtcaaagcgccgggaaaagattgtgaaggagaatggtgagggggacaaaaacgtggcaaatatcaacgaggaaatggaatctcttaccgccaacattgattacataaatgattctatctccgattgccaggccaacatcatgcagatggaggaagcaaaggaggagggggaaactctggacgtcaccgctgtcataaacgcctgtaccctgacagaggcccggtatctccttgatcactttctgagcatgggcattaataaaggcctccaggcagctcagaaggaggctcagatcaaggtgctcgaggggcgcctgaaacagaccgagataacttctgccacccagaaccagctgctctttcacatgttaaaggaaaaggccgaacttaatcctgagctagacgctctgcttggccacgccttgcaagagaacgtcgaagatagtacggatgaggatgctcccctgaactctcctggttccgaagggtcgaccttgagcagcgatctgatgaagctgtgtggggaggttaaaccaaagaacaaggctaggcggcgcaccactacccagatggaacttctctatgcagacagctcagaactggcgtctgacacctccacaggggacgcttctttacctggcccgcttacccccgtcgccgaagggcaagaaatcggaatgaatactgagacatccgggacctccgcaagagaaaaggagctctccccccctcccggcctgccatctaaaatcggtagtatttcacggcagagtagtttgagtgaaaagaagatccctgaaccaagccctgtgactaggcgaaaagcatatgagaaggcagaaaaaagcaaggccaaggaacaaaagcaagggatcatcaaccccttccccgcctctaaaggaatccgcgcctttccactccagtgcattcacatcgcagaaggacacaccaaggcagttttatgcgtcgacagcacagacgacctgttattcaccggatcaaaagacaggacctgtaaggtgtggaacctcgtcaccgggcaagagatcatgagtcttggcgggcatcccaacaatgttgtgagcgtgaaatactgcaattatacgtctctggtcttcacggtgtcgaccagttacatcaaggtgtgggacattcgtgatagcgccaagtgtattcgaacattgacatcttccggacaggtgaccctaggggatgcctgttcagctagcacgtctaggaccgtcgccatcccctccggtgagaaccaaatcaatcagattgctctcaatcctactggaacgttcctgtacgctgccagtggaaacgccgtgcggatgtgggatctaaagagattccagagcaccggaaagctaacaggtcatctcgggcccgtgatgtgtctcaccgtcgatcagataagctctggtcaggacctgataattaccggtagcaaggaccactatatcaaaatgttcgatgtcaccgaaggcgcactgggaactgtgtcaccaactcataacttcgagcctccccattacgatggcatcgaagcattaaccatccagggggataatctattcagtggctcacgcgacaacggcattaaaaagtgggacctgacacagaaagaccttctccagcaagtgccgaatgctcataaagattgggtgtgtgccctgggtgtggtccctgatcacccggtgttactgtcaggatgtcggggaggcatactcaaggtgtggaacatggatactttcatgccagtcggagaaatgaaaggccacgatagcccaatcaacgcaatttgcgtgaattcgacccatatctttactgccgcagatgatcggacagtgaggatctggaaagctagaaatctgcaggacgggcagatcagcgacaccggtgacttgggagaggatatcgcttctaactag

SEQ ID NO: 282290 - DNA, 1986 bp, Artificial Sequence
  derived and/or modified sequence
atgaatcgcctgttgaaacagagagaggagctgacaaagcggagagaaaaactgtccaagcggagggaaaagatagtgaaagaaaacggcgagggggacaaaaacgttgcgaacataaacgaggaaatggagagtctaacagctaatatcgattatatcaacgattctatttccgattgccaggccaacataatgcagatggaggaggcaaaggaagagggtgagacactagatgtgacggcagtcataaacgcctgtactcttacagaggcacgctacctcctcgaccatttcctttccatgggaattaataaaggactgcaggcagcccagaaggaggcgcagataaaggtattggaaggtcgattaaaacaaacagaaatcacctccgcaacccaaaaccagttgctgttccatatgcttaaggaaaaagccgagttgaaccccgagctggacgccttactgggtcacgccctccaggaaaatgtggaggactctactgacgaggatgctccccttaacagccccggttccgaggggagcactttgtcttcagatttgatgaagttgtgtggagaagtgaaaccgaagaacaaagcacgtcgccgaacaacaacacagatggaattgttgtatgcagactcatccgagttagcaagtgacacctccactggcgatgcctccctgcctgggcctctgacacccgtggctgaagggcaggagattggcatgaacaccgaaacctcagggacctctgcaagagagaaggaactgagcccacccccagggcttccctcaaagattggatcgatttcaaggcaatcatctctgtcagaaaagaaaattccagaacccagccctgtcactcggcgaaaagcctacgagaaggctgaaaaatctaaggccaaggaacagaagcaagggattattaatccattccccgcttctaaaggtattagggcttttcccttgcagtgtattcacatagccgaagggcatactaaagctgtgctgtgcgtggattcaactgacgacttgctgtttaccggctccaaagatcgaacatgcaaggtgtggaatttggttactggacaagagatcatgtcccttggcggacatcctaacaacgtcgtgtcggtgaagtactgtaactacacctccctcgtgttcacagtgtctacgtcctacattaaggtatgggacatccgagactccgcaaaatgtatacgtaccctgacttcttctgggcaggtgactcttggcgacgcctgtagtgcgagtacttctagaacagtcgcaattccgtctggtgaaaatcaaatcaatcagattgcgctcaacccaaccggcacctttctctatgccgctagtggcaacgcggtgagaatgtgggatcttaagcgatttcagtcaaccggaaagctgacaggccacctgggcccagttatgtgtctgactgtggaccagatcagcagtggtcaggacctgatcattaccgggtcgaaggaccattatattaaaatgttcgacgtgactgagggtgctttaggcacagtgtcccctacccacaatttcgagcctccccactatgacggtatagaagctcttacaattcaaggcgacaacttattttcgggctcaagagataacggcatcaagaaatgggatctcacccagaaggacctgcttcagcaggtgccaaacgcccacaaagactgggtgtgcgctctcggggtggtgccagatcaccctgtgctgctgtcggggtgtcgcggtgggatcctgaaggtgtggaatatggatactttcatgcccgtgggcgagatgaaggggcacgactcgcccatcaatgcaatctgtgtcaactccacacacattttcaccgctgcagacgaccggaccgtgcggatctggaaagcccgaaacctgcaggacggacagatttctgacacaggagacctcggcgaggacattgcaagcaattag

SEQ ID NO: 282291 - DNA, 1986 bp, Artificial Sequence
  derived and/or modified sequence
atgaacagactgctgaagcagagagaggagctgaccaagagaagagagaagctgagcaagagaagagagaagatcgtgaaggagaacggcgagggcgacaagaacgtggccaacatcaacgaggagatggagagcctgaccgccaacatcgactacatcaacgacagcatcagcgactgccaggccaacatcatgcagatggaggaggccaaggaggagggcgagaccctggacgtgaccgccgtgatcaacgcctgcaccctgaccgaggccagatacctgctggaccacttcctgagcatgggcatcaacaagggcctgcaggccgcccagaaggaggcccagatcaaggtgctggagggcagactgaagcagaccgagatcaccagcgccacccagaaccagctgctgttccacatgctgaaggagaaggccgagctgaaccccgagctggacgccctgctgggccacgccctgcaggagaacgtggaggacagcaccgacgaggacgcccccctgaacagccccggcagcgagggcagcaccctgagcagcgacctgatgaagctgtgcggcgaggtgaagcccaagaacaaggccagaagaagaaccaccacccagatggagctgctgtacgccgacagcagcgagctggccagcgacaccagcaccggcgacgccagcctgcccggccccctgacccccgtggccgagggccaggagatcggcatgaacaccgagaccagcggcaccagcgccagagagaaggagctgagccccccccccggcctgcccagcaagatcggcagcatcagcagacagagcagcctgagcgagaagaagatccccgagcccagccccgtgaccagaagaaaggcctacgagaaggccgagaagagcaaggccaaggagcagaagcagggcatcatcaaccccttccccgccagcaagggcatcagagccttccccctgcagtgcatccacatcgccgagggccacaccaaggccgtgctgtgcgtggacagcaccgacgacctgctgttcaccggcagcaaggacagaacctgcaaggtgtggaacctggtgaccggccaggagatcatgagcctgggcggccaccccaacaacgtggtgagcgtgaagtactgcaactacaccagcctggtgttcaccgtgagcaccagctacatcaaggtgtgggacatcagagacagcgccaagtgcatcagaaccctgaccagcagcggccaggtgaccctgggcgacgcctgcagcgccagcaccagcagaaccgtggccatccccagcggcgagaaccagatcaaccagatcgccctgaaccccaccggcaccttcctgtacgccgccagcggcaacgccgtgagaatgtgggacctgaagagattccagagcaccggcaagctgaccggccacctgggccccgtgatgtgcctgaccgtggaccagatcagcagcggccaggacctgatcatcaccggcagcaaggaccactacatcaagatgttcgacgtgaccgagggcgccctgggcaccgtgagccccacccacaacttcgagcccccccactacgacggcatcgaggccctgaccatccagggcgacaacctgttcagcggcagcagagacaacggcatcaagaagtgggacctgacccagaaggacctgctgcagcaggtgcccaacgcccacaaggactgggtgtgcgccctgggcgtggtgcccgaccaccccgtgctgctgagcggctgcagaggcggcatcctgaaggtgtggaacatggacaccttcatgcccgtgggcgagatgaagggccacgacagccccatcaacgccatctgcgtgaacagcacccacatcttcaccgccgccgacgacagaaccgtgagaatctggaaggccagaaacctgcaggacggccagatcagcgacaccggcgacctgggcgaggacatcgccagcaactag

SEQ ID NO: 282292 - protein, 16 aa, Artificial Sequence
  derived and/or modified sequence
MYMQDYWRTWLKGLRG

SEQ ID NO: 282293 - DNA, 1738 bp, Artificial Sequence
  derived and/or modified sequence
ggatgtggggcggggcctgccccaagagagtttcctaaagcgaggaaaccaagccgggcgcctcttgcaatggagacggtcatttcttcagatagctccccagctgtggaaaatgagcatcctcaagagaccccagaatccaacaatagcgtgtatacttccttcatgaagtctcatcgctgctatgacctgattcccacaagctccaaattggttgtatttgatacgtccctgcagtcctgcccctgtggatttgcctttatgattattactgtcttggctacaggtgaagaaagctttttttgctttggtgactaacggtgtacgagctgcccctttatgggatagtaagaagcaaagttttgtgggcatgctgaccatcactgatttcatcaatatcctgcaccgctactataaatcagccttggtacagatctatgagctagaagaacacaagatagaaacttggagagaggtgtatctccaggactcctttaaaccgcttgtctgcatttctcctaatgccagcttgtttgatgctgtctcttcattaattcggaacaagatccacaggctgccagttattgacccagaatcaggcaatactttgtacatcctcacccacaagcgcattctgaagttcctcaaattgtttatcactgagttccccaagccagagttcatgtccaagtctctggaagagctacagattggcacctatgccaatattgctatggttcgcactaccacccccgtctatgtggctctggggatttttgtacagcatcgagtctcagccctgccagtggtggatgagaaggggcgtgtggtggacatctactccaagtttgatgttatcaatctggcagcagaaaagacctacaacaacctagatgtatctgtgactaaagccttgcaacatcgatcacattactttgagggtgttctcaagtgctacctgcatgagactctggagaccatcatcaacaggctagtggaagcagaggttcaccgacttgtagtggtggatgaaaatgatgtggtcaagggaattgtatcactgtctgacatcctgcaggccctggtgctcacaggtggagagaagaagccctgagctgggggaaggggtcatgcagcaccaggggatatgcccaactcactgcctgctggaagctctgtgggaatcagatgaaacttgagggaattgtgactctgttccctgttcagggtcccctgcccttctatctgggagctagggaaggtatgggggaggaaagagaatggatttatagctacccttaccctcacacatacacttgaaaaaactttcagcctagccagttctagcccctgtcctcttagatatatccccctttctgggtgaactataggctctgtgcctctcagacaaattctgatctctaagagatccccagacctcacttgcctctgcctccatcttggccctgattcaaccctaagataatagcacaacaaaattcttcataaagatatttttattcacctgttccgtgctatatggaggaggccaagtccatttagtgacatttcttcccataatgtgagtggggaggattgtggggaggaggggctttgggttcctgtgtttgtgcatatgaagggagatgggggttaggtggaggaggagagcagcgtggttagctaaggttattgctttttgtggcaaatctaattaaatgacaggaatctcttcacg

SEQ ID NO: 282294 - DNA, 744 bp, Artificial Sequence
  derived and/or modified sequence
atgttgactattacggactttattaacatcctccacaggtactacaagtctgccctggtccagatttacgagttggaagaacacaagatcgaaacctggagggaagtgtatctgcaggatagcttcaagccgctcgtgtgtatctccccgaatgcctcgctgtttgatgcagtgagctctctgattaggaacaaaattcacaggctccctgtgatcgatcccgagtccgggaatacgttgtacatcttgactcataagaggatcctgaagtttcttaaactctttatcacagaatttcccaaacctgagttcatgagtaagtctctagaagaattacagatcggaacttatgccaacatcgctatggtgagaacaacgactcccgtctatgtggccctaggcatatttgtccagcaccgagtgagcgcgctgccagttgttgatgaaaaaggacgggttgtcgacatttattcgaagttcgatgtgataaacctggccgctgaaaagacgtataataatctcgacgtgtccgtcaccaaggcattgcagcatagatcccactactttgagggggtgttgaagtgctaccttcacgagacgttggaaactatcataaatcggttggtggaagctgaggtgcaccgactggttgttgtggacgaaaacgatgttgtgaaaggcatagttagcctatcagatattctgcaggccctggtgctaactggtggcgaaaagaaaccttag

SEQ ID NO: 282295 - DNA, 744 bp, Artificial Sequence
  derived and/or modified sequence
atgctgaccatcacagacttcatcaacatcctgcaccgctactacaagagcgccctggtgcagatctatgagctggaggagcacaagattgagacctggagggaggtgtacctgcaggacagcttcaagcccctggtgtgcatcagccccaatgccagcctgtttgatgctgtgagcagcctcatccggaacaagatccaccggctgcccgtcatcgaccctgagagcggcaacaccctgtacatcctgacccacaagaggatcctgaagttcctgaagctgttcatcacagagttccccaagccagagttcatgagcaagagcctggaggagctgcagatcggcacctacgccaacatcgccatggtgaggaccaccacccctgtgtatgtggccctgggcatctttgtgcagcaccgggtgtctgccctgcctgtggtggatgagaagggccgggtggtggacatctacagcaagtttgatgtgatcaacctggccgctgagaagacctacaacaacctggatgtgtctgtgaccaaggccctgcagcacaggagccactactttgaaggagtgctgaagtgctacctgcacgagaccctggagaccatcatcaaccggctggtggaggccgaggtgcaccggctggtggtggtggatgaaaatgatgtggtgaagggcatcgtgtccctgagtgacatcctgcaggccctggtgctgactggaggagagaagaagccctag

SEQ ID NO: 282296 - DNA, 744 bp, Artificial Sequence
  derived and/or modified sequence
atgctgaccatcaccgacttcatcaacatcctgcaccggtactacaaaagtgctttggtgcagatctacgaacttgaagaacacaagattgaaacgtggcgtgaagtgtacttacaagattcatttaaacctctggtgtgcatttcacccaacgcgtcactattcgacgccgtcagcagcctaattagaaataagattcacagactcccggtaattgaccctgagagcggcaacaccctttatatcctcacccataagcgcatcttgaaatttctgaaactcttcatcactgaatttcctaagccagagtttatgagcaagagcctggaagagctgcaaatcgggacctacgcaaatatagccatggtaagaaccactacgccggtgtatgtagccctgggcatcttcgtgcaacatcgggtgtccgcactgccggttgtcgacgaaaaagggagagttgttgacatatactccaaattcgacgtgattaacctggccgccgagaagacatataacaaccttgacgtgtcagtgactaaggcactgcagcatcggtcccattattttgaaggagtcctgaagtgttacttgcacgagaccctcgaaactattatcaatcggctcgttgaggcggaagttcaccgcttagtcgtggttgacgaaaacgatgttgtgaaaggcatcgtgtcactcagcgatatcctgcaggcccttgtgctcacaggcggagagaaaaaaccctag

SEQ ID NO: 282297 - DNA, 744 bp, Artificial Sequence
  derived and/or modified sequence
atgctcaccattaccgatttcatcaacatacttcacagatattataagtctgcgctggttcagatctacgaactggaagaacataagatagagacctggagggaggtataccttcaggattcattcaagcccctggtatgtatcagccccaacgcatcactttttgatgcagtgtcaagccttatcagaaataagatccaccgactcccagtaatcgatcccgagtctggaaatactctttatattttgacccacaagcgcatccttaagtttctaaaactcttcattacagagtttccaaaacccgaatttatgagcaagtccttagaagaactacagatcggcacctatgcaaacattgccatggtccggacgaccaccccggtgtatgttgccctgggcatcttcgtgcagcatagggttagcgctttgccagtggtggacgagaaagggagagttgtcgacatttactcaaaattcgacgtcattaacctcgccgctgaaaagacttacaacaatctggacgtgtcagtcactaaggcccttcagcatcgaagccattatttcgagggggtactgaagtgttacttacatgaaacgttggagaccattattaatcgactagtggaggcagaggtgcacaggctcgtggtggtggacgaaaatgacgttgtgaaagggattgtgagcctgtctgatattttgcaggccttggtactgacgggtggcgaaaagaaaccatag

SEQ ID NO: 282298 - DNA, 744 bp, Artificial Sequence
  derived and/or modified sequence
atgctgaccatcaccgacttcatcaacatcctgcacagatactacaagagcgccctggtgcagatctacgagctggaggagcacaagatcgagacctggagagaggtgtacctgcaggacagcttcaagcccctggtgtgcatcagccccaacgccagcctgttcgacgccgtgagcagcctgatcagaaacaagatccacagactgcccgtgatcgaccccgagagcggcaacaccctgtacatcctgacccacaagagaatcctgaagttcctgaagctgttcatcaccgagttccccaagcccgagttcatgagcaagagcctggaggagctgcagatcggcacctacgccaacatcgccatggtgagaaccaccacccccgtgtacgtggccctgggcatcttcgtgcagcacagagtgagcgccctgcccgtggtggacgagaagggcagagtggtggacatctacagcaagttcgacgtgatcaacctggccgccgagaagacctacaacaacctggacgtgagcgtgaccaaggccctgcagcacagaagccactacttcgagggcgtgctgaagtgctacctgcacgagaccctggagaccatcatcaacagactggtggaggccgaggtgcacagactggtggtggtggacgagaacgacgtggtgaagggcatcgtgagcctgagcgacatcctgcaggccctggtgctgaccggcggcgagaagaagccctag

SEQ ID NO: 282299 - protein, 1062 aa, Artificial Sequence
  derived and/or modified sequence
MSTPSRFKKDKEIIAEYESQVKEIRAQLVEQQKCLEQQTEMRVQLLQDLQDFFRKKAEIETEYSRNLEKLAERFMAKTRSTKDHQQYKKDQNLLSPVNCWYLLLNQVRRESKDHATLSDIYLNNVIMRFMQISEDSTRMFKKSKEIAFQLHEDLMKVLNELYTVMKTYHMYHAESISAESKLKEAEKQEEKQIGRSGDPVFHIRLEERHQRRSSVKKIEKMKEKRQAKYSENKLKSIKARNEYLLTLEATNASVFKYYIHDLSDLIDCCDLGYHASLNRALRTYLSAEYNLETSRHEGLDIIENAVDNLEPRSDKQRFMEMYPAAFCPPMKFEFQSHMGDEVCQVSAQQPVQAELMLRYQQLQSRLATLKIENEEVKKTTEATLQTIQDMVTIEDYDVSECFQHSRSTESVKSTVSETYLSKPSIAKRRANQQETEQFYFMKLREYLEGSNLITKLQAKHDLLQRTLGEGHRAEYMTTSRGRRNSHTRHQDSGQVIPLIVESCIRFINLYGLQHQGIFRVSGSQVEVNDIKNSFERGENPLADDQSNHDINSVAGVLKLYFRGLENPLFPKERFNDLISCIRIDNLYERALHIRKLLLTLPRSVLIVMRYLFAFLNHLSQYSDENMMDPYNLAICFGPTLMPVPEIQDQVSCQAHVNEIIKTIIIHHETIFPDAKELDGPVYEKCMAGDDYCDSPYSEHGTLEEVDQDAGTEPHTSEDECEPIEAIAKFDYVGRSARELSFKKGASLLLYHRASEDWWEGRHNGIDGLVPHQYIVVQDMDDTFSDTLSQKADSEASSGPVTEDKSSSKDMNSPTDRHPDGYLARQRKRGEPPPPVRRPGRTSDGHCPLHPPHALSNSSVDLGSPSLASHPRGLLQNRGLNNDSPERRRRPGHGSLTNISRHDSLKKIDSPPIRRSTSSGQYTGFNDHKPLDPETIAQDIEETMNTALNELRELERQSTAKHAPDVVLDTLEQVKNSPTPATSTESLSPLHNVALRSSEPQIRRSTSSSSDTMSTFKPMVAPRMGVQLKPPALRPKPAVLPKTNPTIGPAPPPQGPTDKSCTM

SEQ ID NO: 282300 - DNA, 3189 bp, Artificial Sequence
  derived and/or modified sequence
atgagcacacccagtcgtttcaaaaaagacaaggagattatagccgagtacgagagccaggtcaaagaaatccgtgctcagctggtggagcaacaaaaatgtctggagcagcagacagaaatgcgcgttcaacttttgcaggatcttcaggattttttcaggaaaaaagctgagattgagactgagtattcacgtaacctcgaaaaactcgctgagagatttatggctaagactaggtccactaaggatcaccagcaatacaagaaggatcagaacctactgtcgcccgtgaattgttggtatttgcttcttaaccaagtccgcagagaaagtaaggatcacgccactctgtctgatatctacttaaacaacgtcattatgcggttcatgcagatctccgaggattctactcgaatgtttaagaaatctaaagaaattgctttccagctacacgaagacttaatgaaagtgctcaacgagctgtataccgttatgaaaacataccacatgtaccacgcggagtccattagtgccgaaagcaaacttaaagaggcagagaagcaggaagaaaaacagattgggcggtccggcgaccctgtattccatatccggctcgaagaaagacatcagcgcaggagcagcgtgaagaagatagagaaaatgaaggaaaaacggcaggctaagtacagcgaaaacaagctgaaatctataaaagctcgtaatgagtatctcctgacactggaggccactaatgcgtctgtgtttaaatactacattcacgacctgagcgatctgatagattgttgcgatctggggtaccacgctagcttaaacagggcactgagaacttatctttcagctgagtacaatctcgagactagccgtcacgagggccttgatatcatcgagaatgcagttgacaatcttgaaccccgaagcgacaagcaacgcttcatggagatgtaccccgctgccttttgtcccccaatgaagttcgagttccagtcacatatgggcgatgaggtttgccaggtgagtgcacagcagcctgttcaggccgagctcatgctcagatatcagcagctccaatccagacttgctactctcaaaatcgaaaacgaagaggtgaaaaaaacaaccgaagccaccctgcagaccatacaggacatggtcaccatcgaagactacgatgtgtccgagtgtttccagcactccagatccacagagtccgtgaagtccacggtgagtgaaacatacctgagcaagccatcaattgcaaagcgcagggctaatcagcaggagaccgagcagttttactttatgaaattgagggaatacctggagggaagtaatctgattacaaaattgcaggctaagcatgacctcttgcagaggacgctgggggagggccaccgcgcagaatatatgactacctcccgcggacggaggaattcccacaccaggcaccaggattccggacaggtcatccctcttatagtggagtcttgcattcggtttattaatctttacggcctccagcaccagggtatctttagggtgtccgggagccaggttgaggtgaatgacataaagaatagcttcgaacgcggcgagaaccctttggcagacgatcaaagcaaccatgatatcaactcagtcgctggtgtactcaagctctatttccgtggcctggaaaatcccctgttccctaaagagcggtttaatgatctgatcagctgcataaggatcgacaatttatacgaacgcgctctgcacatccgaaagctgctgctcaccctgcctcggtccgtcctcattgttatgaggtaccttttcgcgttcctaaaccacctatctcagtatagtgacgaaaatatgatggatccatataatctcgcgatttgcttcggacctaccttgatgccagtcccggagatccaggatcaggtttcctgtcaggcccatgttaatgagatcatcaaaaccattattatccaccatgaaaccattttcccggacgcaaaggagctggatggacccgtttacgaaaaatgcatggccggtgatgactattgcgattctccctattccgagcacgggaccctggaagaggtagatcaggacgccggcacggagccccatacatccgaggacgaatgtgaacccatcgaagccatagcaaaattcgactacgtaggtaggagcgctcgggagctgagtttcaaaaaaggcgccagcttactgctgtaccaccgggcctctgaagactggtgggaggggcgccataatgggatcgacggtttggttccacatcaatatatcgtggttcaggacatggacgacaccttctccgacaccctttcccagaaagcggactctgaagcgtccagtgggcctgtgacagaagataaatcttccagtaaggatatgaacagtcccacggacaggcaccccgacggttatctggcccgccagagaaagcgtggcgaacccccaccacctgtgagacgaccaggacggacctccgatggtcattgccctctccaccctccccatgcactaagcaatagctccgtagatctggggagccctagcttggccagccaccctagaggcctgcttcaaaaccgcggcctgaataatgattcccccgaacggcgtaggcggcctgggcacgggagtctgactaacattagccggcacgattccctcaagaaaatagactctccccctatccggaggtcaacatcctccgggcagtacaccgggttcaacgaccacaagcctctggacccagagactattgcccaagacatcgaggaaaccatgaatactgccctgaatgagctgcgggaactggaacgtcagtctaccgcaaagcatgcacctgacgtagtgctggacactctcgaacaggtgaagaacagtcccacaccggctacttctacagagtctctcagccctctccacaacgtggcattgcgaagctctgagcctcagatccggaggtccacatcgagttcttccgacacaatgagtacttttaaaccaatggtcgccccgaggatgggggtacaactgaagcccccagccctcagacccaagccggccgtcctgcctaaaaccaaccctaccatcggaccagctccgcccccacaaggtccaacagacaagtcatgtactatgtag

SEQ ID NO: 282301 - DNA, 3189 bp, Artificial Sequence
  derived and/or modified sequence
atgagcacccccagccgcttcaagaaggacaaggagatcatcgccgagtatgagagccaggtgaaggagatccgggcccagctggtggagcagcagaagtgcctggagcagcagacagagatgagggtgcagctgctgcaggacctgcaggacttcttcaggaagaaggccgagattgaaacagagtacagcaggaacctggagaagctggccgagcgcttcatggccaagaccaggagcaccaaggaccaccagcagtacaagaaggaccagaacctgctgagccctgtgaactgctggtacctgctgctgaaccaggtgcggcgggagagcaaggaccacgccaccctgagtgacatctacctgaacaacgtcatcatgaggttcatgcagatcagcgaggacagcaccaggatgttcaagaagagcaaggagatcgccttccagctgcacgaggacctgatgaaggtgctgaatgagctgtacacagtgatgaagacctaccacatgtaccacgccgagagcatctctgctgagagcaagctgaaggaggccgagaagcaggaggagaagcagatcggccgcagcggggaccctgtgttccacatccggctggaggagcggcaccagaggaggagctctgtgaagaagattgagaagatgaaggagaagaggcaggccaagtacagcgagaacaagctgaagagcatcaaggccagaaatgagtacctgctgaccctggaggccaccaatgcctctgtgttcaagtactacatccatgacctgagtgacctgattgactgctgtgacctgggctaccacgccagcctgaacagagccctgcggacctacctgtctgctgagtacaacctggagaccagcagacatgagggcctggacatcattgaaaatgctgtggacaacctggagcccaggagtgacaagcagcgcttcatggagatgtacccagctgccttctgcccccccatgaagtttgagttccagagccacatgggagatgaggtgtgccaggtgtctgcccagcagcctgtgcaggccgagctgatgctgcgctaccagcagctgcagagccggctggccaccctgaagattgaaaatgaggaggtgaagaagaccacagaggccaccctgcagaccatccaggacatggtgaccatcgaggactatgatgtgtctgagtgcttccagcacagccgcagcacagagagcgtgaagagcacagtgtctgagacctacctgagcaagcccagcatcgccaagaggcgggccaaccagcaggagacagagcagttctacttcatgaagctgcgggagtacctggagggcagcaacctgatcaccaagctgcaggccaagcatgacctgctgcagaggaccctgggggagggccacagagctgagtacatgaccaccagccggggcagaagaaacagccacaccaggcaccaggacagcggccaggtgatccccctgattgtggagagctgcatccgcttcatcaacctgtatggcctgcagcaccagggcatcttccgggtgtctggcagccaggtggaggtgaatgacatcaagaacagctttgagcggggggagaaccccctggctgatgaccagagcaaccacgacatcaacagcgtggccggcgtgctgaagctgtacttccggggcctggagaaccccctcttccccaaggagcgcttcaatgacctgatcagctgcatcagaattgacaacctgtatgagcgggccctgcacatcaggaagctgctgctgaccctgcccaggtctgtgctgattgtgatgagatacctgtttgccttcctgaaccacctgagccagtacagtgatgagaacatgatggacccctacaacctggccatctgcttcggccccaccctgatgcctgtgcctgagatccaggaccaggtgtcctgccaggcccacgtgaatgagatcatcaagaccatcatcatccaccacgagaccatcttcccagatgccaaggagctggatggccctgtgtatgagaagtgcatggctggagatgactactgtgacagcccctacagcgagcacggcaccctggaggaggtggaccaggatgctggaacagagccccacaccagtgaagatgaatgtgagcccatcgaggccatcgccaagtttgattatgtgggccgcagcgcccgggagctgtccttcaagaagggggccagcctgctgctgtaccaccgggccagcgaggactggtgggagggccgccacaatggaattgatggcctggtgccccaccagtacatcgtggtgcaggacatggatgacaccttcagtgacaccctgagccagaaggctgacagcgaggccagcagcggccctgtgacagaggacaagagcagcagcaaggacatgaacagccccacagacagacacccagatggctacctggcccggcagaggaagagaggagagcccccacctcctgtgcggcggcccggccgcaccagtgatggccactgccccctgcaccccccccacgccctgagcaacagctctgtggacctgggcagccccagcctggccagccacccccggggcctgctgcagaacagaggcctgaacaatgacagccctgagaggagaagaagacctggccacggcagcctgaccaacatcagcagacatgacagcctgaagaagattgacagcccccccatcagaagaagcaccagcagcggccagtacacaggcttcaatgaccacaagcccctggaccctgagaccatcgcccaggacatcgaggagaccatgaacacagccctgaatgagctgcgggagctggagcggcagagcacagccaagcacgccccagatgtggtgctggacaccctggagcaggtgaagaacagccccaccccagccaccagcacagagagcctgagccccctgcacaacgtggccctgcggagcagcgagccccagatccgccgcagcaccagcagcagcagtgacaccatgagcaccttcaagcccatggtggcccccaggatgggcgtgcagctgaagcccccagccctgcggcccaagccagctgtgctgcccaagaccaaccccaccatcggccctgcccccccaccccagggccccacagacaagagctgcaccatgtag

SEQ ID NO: 282302 - DNA, 3189 bp, Artificial Sequence
  derived and/or modified sequence
atgagcacccccagccggttcaagaaggacaaggagatcatcgccgaatacgaatcacaggttaaggagatacgggcccagttagtggagcaacaaaagtgtctcgagcaacagaccgagatgagggtgcagctgctgcaggacctgcaggatttctttcgcaagaaggcagagatcgaaaccgagtattcccggaacctcgaaaagctggctgaaaggtttatggcgaagacaagatctacgaaagatcatcagcaatacaaaaaggatcaaaacctgctgagccccgtaaattgttggtacctcctgctgaaccaagtgcgccgggagtccaaggaccatgctaccttaagcgacatataccttaataatgtgatcatgcgatttatgcagatcagtgaggactctacacgcatgtttaagaaatctaaggagattgcttttcagctccatgaggatctgatgaaggttcttaacgaattatacactgtaatgaaaacataccatatgtatcacgcagagtccatctctgccgaatcaaaactgaaagaggctgaaaaacaggaggagaaacagatagggagatcaggcgaccctgtgtttcatattaggctcgaggagcgacatcagaggcgaagttcggtaaaaaaaatagagaaaatgaaagaaaagaggcaagccaagtattcagagaataaattaaaaagcattaaagcccgaaacgagtacttgcttacccttgaggccaccaatgccagtgtgtttaaatactacatccacgacctgtccgatttaatcgactgttgcgatctcggttatcacgcatcccttaatagagccctgagaacatacctctctgcagaatacaacctagaaacctctcggcacgagggcctagatattattgaaaacgctgtcgacaacctggaacccagaagtgataagcagaggttcatggagatgtacccagccgcattttgtcctccaatgaagttcgagttccagagtcatatgggcgatgaggtgtgccaagtttcagcccagcagccagtgcaggccgagttaatgctaaggtaccaacagctccagagtagacttgctaccctgaaaattgagaacgaggaggtgaagaaaacaaccgaggctacactgcaaacaatccaagatatggtaacgattgaggattatgacgttagcgagtgcttccagcattcaaggtctacagagtccgtgaagagtaccgtgtctgagacttacctgtcgaagccgtctatcgctaagcgcagagcgaaccaacaagaaaccgaacagttctactttatgaaactcagggagtatctggaaggttccaatcttattaccaagttacaagcaaaacacgatttgctgcagcgtacgctgggggagggacacagggctgagtatatgaccactagcaggggcagacgcaatagccacactcggcaccaagactctggccaagtgatacccctcatcgtggagtcgtgtatcagatttatcaatctttacggccttcagcaccaggggatttttagggtatcaggaagtcaagtggaagtgaatgacatcaaaaactcattcgagagaggtgaaaaccctctggccgatgatcagagcaatcatgatatcaacagcgtcgcgggagtgctcaagctttattttagagggctggagaatccactattccccaaggaacggttcaacgacttgatcagctgtatacggatagataacctttatgagcgcgccctgcatatccgtaagctccttcttacactgccaaggtccgttttgattgtgatgcgctacctgtttgccttcctgaatcacctgtcgcagtattccgacgagaacatgatggatccttacaacctggctatttgtttcggtcccaccttgatgccagtgcccgaaatccaggatcaggtgagttgtcaagcccacgttaatgaaataataaaaaccatcattatccaccacgaaaccattttccctgacgctaaagagctggatgggccagtgtatgagaagtgtatggcaggcgatgattactgtgactccccctattcagaacacgggactcttgaagaggtcgatcaggacgctggcactgaacctcacacaagcgaagatgaatgtgaaccaatcgaagctattgctaaatttgattacgtgggcagaagtgctagggaactcagtttcaaaaaaggagcgagcctactgttataccaccgcgccagcgaagattggtgggaaggacgccataatgggatcgacggcctagtaccacatcagtatattgtggtgcaagatatggatgacaccttcagcgacacactgtcgcagaaagccgatagcgaggcaagttccggccccgtgaccgaagacaagtcttcctctaaagacatgaacagccctaccgacagacatccagacgggtatcttgcacggcagcgcaaacgtggcgagccacctccaccagtgagaaggcccggcagaaccagtgatggccactgccctctccatccacctcacgcactgtcgaactctagtgtggacttaggaagcccgagtttggcaagtcatcctagagggctgcttcagaaccgcggtcttaataatgactcaccggagcggcggagaaggccaggccatggctctctgacaaatatcagcaggcacgactcacttaaaaagatcgactctccacccatccgccgctctacctcgagcggccagtacaccggcttcaacgaccacaaaccactggaccctgagacaatagcacaggacatagaagagacaatgaacacagccctgaatgagttgcgcgagctggagaggcaaagcactgccaaacacgcaccggatgtggtgctggatacccttgagcaagtgaagaactcccccaccccagccacaagtaccgagtcccttagccctctacataatgtggccctgagaagcagcgaaccccagatacggcggagtacttcctcctcatccgacacaatgagtaccttcaagccgatggttgcacccagaatgggtgttcagctgaagcctcccgcgctcaggcctaagcccgccgtcttaccaaaaactaaccccaccattgggcctgctccacccccccaaggccccactgacaagagttgtactatgtag

SEQ ID NO: 282303 - DNA, 3189 bp, Artificial Sequence
  derived and/or modified sequence
atgtcaacaccaagtcgattcaagaaggacaaagagataatcgcagaatatgaatcgcaggtgaaagaaattcgagcccaattggtggaacagcagaaatgccttgaacagcaaaccgagatgagggtacagttactgcaggacttacaggacttctttcggaaaaaagcagaaattgaaacagagtatagccgtaacctggagaagcttgcagagcgcttcatggctaaaacccggagtacgaaggaccaccagcaatataaaaaggatcagaacctgctgtcacctgtgaattgttggtaccttcttctcaatcaggtcaggagagagagcaaggatcatgcaaccctgtccgacatctatctaaacaatgtcatcatgcgattcatgcagatcagcgaagacagcactcgcatgttcaagaagtcaaaggagatcgcctttcagctgcacgaagatctgatgaaggtcctgaatgagctgtatactgtgatgaagacatatcacatgtaccatgccgagtccatttccgccgaaagtaagctgaaggaagccgaaaaacaggaggagaaacagataggcagaagcggggacccagtatttcatatcaggttagaagaacgtcaccagcgaagatcatccgtgaagaaaatagaaaagatgaaagaaaaaagacaggcaaaatattcagaaaataagttaaagtccatcaaagcacgcaacgagtatctgctgaccctagaagccactaatgccagtgtttttaagtattatatccatgacctgtccgatttaatcgactgctgtgacctgggctaccacgcgagcctgaacagagccttgcggacctatcttagcgccgagtacaacctcgaaacctccagacacgagggattagacatcattgagaacgctgtagacaacttagagccccgatctgacaaacagcgatttatggagatgtatcccgcagccttctgccccccaatgaaattcgaatttcagtcccacatgggtgatgaggtttgtcaagtatcagcccaacagccggtgcaggccgagctaatgctccgttaccagcagctccaaagtagactcgctacattgaaaattgagaacgaagaggtcaagaagaccaccgaggcaaccctccagacaatccaagacatggtgaccatcgaggactacgatgtgagtgaatgttttcagcactctaggagcaccgaatctgtgaaatccaccgtgtctgaaacctatctttccaaaccaagcatcgccaagcggcgtgccaatcagcaagagacagagcagttctacttcatgaagctacgcgaatacttggaggggtctaatctgatcaccaaactccaagccaaacatgatctgttacagcggactctcggggaaggccacagggccgagtatatgacgacctcccgaggaagacgaaatagccacaccagacaccaggactcggggcaggtgatccctttaatcgtggagtcatgtatcagatttattaacttgtatggcctccagcatcagggcattttccgcgtgtctggctcccaggtggaggtgaacgatattaagaattcattcgagagaggcgaaaatccgttagccgacgatcagtctaatcatgatataaattctgtggcaggcgtgctcaaactctatttcaggggcctcgaaaatccattgttccccaaggaacgatttaatgatctgatcagttgtatcagaattgataacctctacgagcgcgcattgcacatcagaaagctcctgctgacgctcccaaggagcgtccttatcgtaatgcgctacctgtttgctttccttaaccatctgtcacagtacagtgatgaaaatatgatggatccctacaatctcgcaatttgtttcggccctacgctcatgcccgtccccgaaatccaggaccaggtgtcctgtcaggcccatgtaaacgaaattatcaagactattatcatccatcatgaaactattttcccagacgcaaaagaactggacggccctgtttatgagaaatgcatggcaggcgacgattactgtgactctccctatagcgagcacgggactctggaggaggtcgaccaagacgccggaacagaaccacatacctcagaagacgagtgcgagccaattgaggcaatcgccaagtttgactacgtcggaaggagcgcacgtgagttgtcgtttaaaaagggggcatccctactcttgtaccacagggcctcagaggactggtgggaaggcaggcataatgggatcgacgggctagtgccccaccagtatatcgtagtccaggacatggatgataccttctccgatacattatcccaaaaggccgattcagaagcatccagcggcccagtgaccgaagacaaaagctcttctaaagatatgaattctcccactgaccgacatcctgacggttatttggctcgtcaaagaaagagaggcgaaccccctcccccagtgaggagacctggaaggacctccgacggccattgtccactgcacccgccacatgccctcagtaacagctccgtagacctgggctcccccagcttagcatcccaccccagaggactgctgcaaaatcgcggtcttaacaacgatagcccagagaggaggagacgcccagggcacggctccctcacaaatatatctcggcacgattcacttaagaaaatagacagccctcccatcaggcgcagtacatctagtggacagtacaccggtttcaacgatcataaaccgttggaccctgaaacaatcgctcaggacatcgaggagacaatgaatacggccctgaatgagcttagagaacttgagcgacagtcaacagccaaacacgcacctgatgtggtcttggataccttagagcaggtcaagaattccccgacccccgctacctctaccgagagtctctcaccactccacaatgtggctctgaggtctagcgaaccccaaatcagaaggtccacaagttcttcttccgatactatgtctacatttaagccaatggtcgctcctcggatgggcgtccagctgaagccacctgcactgaggccaaagcctgctgtattgcctaagacaaatccaacaattggacccgctccgccaccgcaaggccctactgacaagtcatgcaccatgtag

SEQ ID NO: 282304 - DNA, 8406 bp, Artificial Sequence
  derived and/or modified sequence
gttgtgaccactgaacaaaacttgcccattgaaagcaaacccggaacagctggataatgtccaccccgagccgattcaagaaggacaaagagatcatagccgagtatgaaagtcaagtcaaagaaattcgagctcaactggtagaacaacaaaaatgcctggagcagcaaacggagatgcgagttcagcttctccaggatctgcaagatttcttccgaaaaaaagctgaaattgagacggaatattcccggaatctagagaagttagcagaaaggttcatggcaaaaacaagaagcactaaggatcatcaacaatacaagaaagaccagaacctgttgtctccagtgaactgctggtatttgctcctgaaccaagtaaggagagaaagcaaagaccatgcaaccttgagtgacatctatctgaacaatgtgattatgcggttcatgcagataagtgaggattctaccaggatgtttaaaaagagcaaagagattgcattccaacttcatgaggatttaatgaaggttcttaatgagctttatacggtgatgaaaacataccatatgtatcatgcagagagcatcagtgcagagagcaagctgaaagaggccgaaaaacaagaggaaaagcaaattgggagatctggtgatccagtcttccatattcgactagaggagagacatcaacggcgaagctctgtaaagaaaattgaaaaaatgaaagaaaaaagacaagcaaaatattcagaaaataagctaaaatcaattaaggcacggaacgaatatctcctaacacttgaagccaccaatgcctcagttttcaagtactatattcatgatctttctgatttaattgattgctgtgatcttggctaccatgcaagtctgaacagagccctaagaacatatctgtctgcggagtacaaccttgaaacctccagacatgagggcttagacattattgagaatgcagttgataatttagagcccaggagcgataagcagagattcatggagatgtaccctgctgcgttctgtccaccaatgaagtttgagtttcagtctcacatgggtgatgaggtgtgccaggtcagtgcccagcagccagtccaggcagagctcatgctcaggtaccaacagttgcagtcccgccttgccacgctcaaaatcgagaatgaagaggttaagaaaacgactgaagccaccttgcagacgatacaagatatggtcaccatcgaggactatgatgtttctgaatgcttccagcacagtcgttccacagaatcagtgaagtccactgtctctgaaacctacctgagtaaacccagcatcgccaagagaagagccaaccagcaggaaactgaacagttctacttcatgaaactcagagaatatttggaaggcagtaatctcatcacaaaacttcaagccaaacatgacttgctgcagaggaccctgggagaaggtcatagagctgaatatatgactacaagccgaggacgaagaaactcgcacacaagacatcaggactcaggacaggttattcccctcattgtggaaagctgtattcggttcatcaatctctatggtcttcagcatcaggggattttcagagtgtctggttcccaggtggaagtcaatgatattaaaaattcatttgagagaggtgaaaatcctttggctgatgaccagagtaaccatgatattaactcagttgctggcgttctgaagctctatttccgtgggctggaaaaccccctctttcctaaggaaagatttaacgatctgatttcttgtatcagaatagataatctctatgagagggcgcttcacatccgcaaactcctcctgactttgcccaggtcggtccttatagtgatgaggtacctctttgccttcctcaatcatctatcacagtacagcgatgagaatatgatggacccttataacctggccatttgctttggcccaacattgatgcctgtcccagaaatacaggatcaagtgtcttgccaggcacatgtgaatgaaattatcaaaaccatcatcatccaccatgagactattttcccagatgctaaagagctggatggccctgtttatgagaaatgtatggctggagatgactattgcgacagcccatacagtgagcacggtacattggaggaagtggaccaagatgctggtacagagccccacacaagtgaagatgaatgtgagccaatagaagcaatagccaagtttgactatgttgggcggtctgccagagaactatccttcaagaagggtgcctccctgctgctgtatcaccgtgcatctgaggactggtgggaaggcaggcacaacgggattgacgggctggtgcctcaccagtatatagtggtgcaggatatggatgatacgttttcagacactctgagccaaaaagccgacagtgaggccagcagtgggccagtcacggaagacaagtcctcatccaaggacatgaactccccgacagaccgtcatcctgacggctatttagccaggcaacgaaaaagaggagagccaccccctccagtaaggcgtcctggcaggaccagtgatggccattgcccgctccaccctccacatgccctttctaactcctcagttgacctagggtccccaagccttgccagtcacccccggggcctgctgcagaaccgtggcctcaacaatgacagtcctgagcggaggcgcaggcctggccatggcagcctgaccaacatcagccggcacgactccctcaagaagatcgacagccctcccattagaaggtccacgtcatcagggcaatacacgggcttcaatgaccacaagccactggacccagagacaattgctcaggatattgaagaaacgatgaacacagctttgaatgaactccgagaactggagagacagagcacagcaaagcatgcccctgatgtggtgctggataccctggagcaagtgaaaaactctcccacccctgccacttccacggaatctctcagccctttgcacaacgttgccctcaggagctccgagcctcagattcgacgtagcacgagctcctccagtgacacaatgagtactttcaagcctatggtggcacccagaatgggcgtgcagctgaagcctccagcccttaggccaaaacctgctgttcttccaaaaacaaatcctaccataggacctgccccacctccccagggtccaacagacaagtcatgcacaatgtaaaaaccagccaagcaaggccataaagggaggtgacttaaaaaagaaaatggattagtgacaaaagtcactgatccataactttccttagttttgtgcttataactggagatcttttggcttttctatgttgtcgaatgtaatgtctgagactagctaaattaacacgggcatttgtattttgtaatttttttaaataactggacatatgtcattttaaggacaatagaaacacttagacttacttgaaaatccaatgctgcaccacttgtaatgaaggcaacaccgctctccacattgtacagagcttcaggtttaatgtagcccagctgagtcagaaaggttgtgacctgaaggcagaagaacccgaatgccacacctcattggagtatagccagtgttggtctgtggcacttgggctgaaaggtgataatggcattgcgtggtagctgacaatgagcaccttcggttccatgtggagcggggtttagctcatgcaaaagacttgcaattgtctccatgggacgatcccagtgggactgtcagcccacagctcgagtgggttggatgcttgcctctttcctaacagttatttccccgggtccagcttaaagactcgatggaaggaggtagaacctctgctgttactgcttgaacttaacctgggaaaggagaggaagacaccatctccaaagctattaatgtcactccttttgcgagcatgattaggccccggagatttccaagtccccccatctacacttacaaacgattagaagggtttaattttaaagactttctggttacactactccacgaactcctccaaagatccgttattcaataactgcctagaaaatgtttccatctcctctaaatccctgtgttctcctctgtggaaatgaaggcagcaagaagcacctgaggccttggttcatgcagtgttctcttttgactaaatcacctaggttcctttaaacatgctacaaagcccaggcatggtggtgcacacctgtactcccagctactcgggtggtttacacaggaggatggctttgggcctagtagttcgagtccagcctgggcagcatagtgtgagaccctgtctcttaaaaaaaaaaaaaatgctacaaagtcctgatgatcctaaatttgaaatcccaactgtcctctccatttgtctttgagccaaccctgaactggccctggtacctgagtaagagccatgcagggccatcagcagaacatggccttgtggttctcacccagttgtgtacctcacaaccacaacttctttttctttgtcccttttcccctttttggttttggttttgtatgtgggctctatgtaactcccatagtcagctgaactctcaattggagaccctctttctctggcatcctagcacacaggcaattttttaagcctatatttatgctacattttcccccatcttaagaaaatttgctttgatttccattctcctactagcagcagctgatatcacctgtagacctatgagcattttatctattctatcattgaagttactgataaagatttttgttgttgttgttgttgttgggagaaatggatttcccacaactaatccctctggcccaccattaatttccttcttggtttcatttcaaactggcagccaattgcacgcccatctaagagctacacagtgtagattttacttcatcagcccattggtgaatgcatcgtgcagaaaagaactgggatctgtactaaaatcaagatcattactttgatctctacctcagtttgccagtgtagtcattctattgcaggaagagattaaattgatgagatattgttactttcagagtcacactgctgattgcttgcctggggcctaatttcacaaatgaatagtgacttttttcccatgtatttctaggtatggtaaacttttaaacctccaaattttcagagccatactttttgcccattttgaaaaagaagcccaggacagcaccttgtctagcccctccccatttctcctgagcttttggggtccttcagcacccttggacaccgtggagatccagccaagactgagctttgaatagcactagcccttttaaacaatcctcacaaattccttaggaatttaaactttccaaaataatcccccacttttttttttttttttttttttttttgagttggagtcttgctctgtcgcccaggccagagtacagtggtgcaatctcggctccctgcaacctccatctcccgggttcaagcaattctcctgagtagctgggattacaggcgccaccaccacgcccagctaatttttgtatttttagtagagatggggtgtcaccatgttggccaggctggtctcaaactcctgacctcaggtgacccaccagcctcagcctcccaaagtgctgggattacagatgtgagccaccatgcccggccattccaccacttctttaaaatagtaagaattcttaaaaaccatattccttgtttgatggaagagtaagatgttaacagagggcatcaaagggccagaggtgtctttgaatttattttttttcaatgtcttttctgagcttcagccttagcttttcagatcttcctcctacctgttcatttattcagccttctatctggtcatcctccccagcggctcctctctctgatgtgtccacctacggtggaacgaggattgcctttctgtgctccccatcaggactttgctgtcttggccggcaggagtcgtgctgctgcagagcctcacaggctgtgccttgtttcaggaaacagctcctaatactctcccatcactcactttacctgtctccatcttatttccctatactcctattgtcagcttgagactttttttttttttcaattccaaatgaagggtatgacctcagagtgagtgaggactcagtaaagactcacctctccttacttggtttattaaatgtcttcagattccagagataagacaaggtggccacttcacaaagaatccagaatcatgctcagtaaagctcattaaaagccactgcagctgagaaggttcacagcccttctttatagccacagaggcagcacacaggggaggtgggaagacacagggaaacgagagaagaaggataatgaggccttgaggtgttctgcccccaatttcaaggagcttatcaggcttcatgtgcaatttggggaggggagctttttgatggtgggtaaataatggctctacaaagattacctgactccactgacacaagaatatgtattctcagctgatataactgtgtgttcacatcccatccatagaactcactgaaggagattcatcaagtcagccttttggactgggttggggtttggggagtggatttggggatagagagaaaggtgtacttagtacacattttctaatgggcgttacgtgaactgtttgaacctgctgagtggcgctttgtagagctccatgttcacgttcagtgtcaacaccattcaacagctttgcacatcttcgtacaacataatctggctttggtgccccttgagccacctgtagaataatttatagcagggtcccacaatctactgcaatgatcgtgaacagttatcagtggatatagtgctccaagagtcaaattgtatccgttaagggttttctaacttttgctatcccccccgcgaccaaaaaaagggggggtttataatttaaagaaaaggaaaagaggcgtgggttggtagttgtgtccttaacatttaggaatgacatagcctctggagtctacaaactgaagaaactttcatctgatcagccttggaaatccaaagttaaagagcctatgtgtctcttgaggcgggggttagaggattcaaatttgggatgatgctcattgattcctgaccatagcagtgagaggccattttttgtgcaggaaatgtgcttaggactcagtcttgttttcgattatccaccacagaaaccctgagacacagagcagcttagaagtctctacccaggcgtaaatagagctccctactccagaccacctgccacccacctcccaagttgagaacacaagctccagctgggctggagagtcaggcttggtgcagggtgactttggcgaagttttgtcagatccataaagcaaactggaatttgagctttcacttaccctagtatacgttcttaaaaaaaaaaaaaagtctatgtggtataatcgagatggatacctgtgtctttaaattacgtagggaattttgtatgtttaaataattgtactgggttccataatgcttatcttagaaactttagtaaaagaaaatatatgaaccgtgcatttgtgaatgccccccttagagcattcatccaagttcagtgtgtagtgtgatggttattatagatatttaaagtatagtaagtggctgtgtaacaggagagactgctgtttacctacgtactgaagggtaactgctgcccgcgtaattaaatcagtattgtcctttcctgtcggtttgatcaattgcggtaccggtagcttcctgcttgtgactgttacctaattgtgtcaatgtacatctgtagtatgtacatgtgaaagtgcctttctattttagaggagttttagccttgctcttgtaccgttgccccgctctgtgccccacccccacctcctcctcccaattcctgctgcccactcgagtgtttcgaagcttcctccctgtcccccaccttccccatccccgccttcctgtgcctcggtgctcagtaatgtcccatctcacctccctgtcggtcctcagactgtctcgttttccttgtagacgtgattgtgcctttctcacccctgtgtcctcccatcccaccgcatcagtcccccgctcatgtgctgctgacagcatcgcattcgcccgtgctctgtactgcctctcaccatttcattccctcctctctgaggtgaaaataaagggggatgcttttacagtctggaaagaaaaaaaatgttttgttaatctgttgtgacaatgcacttttatgtatagtactgtacatttttggcatgtaccattacaggcttcagtatacagtcaggtttgttcttcacggtgtatctttataataaataagatagttctggc

SEQ ID NO: 282305 - DNA, 3189 bp, Artificial Sequence
  derived and/or modified sequence
atgagcacccccagcagattcaagaaggacaaggagatcatcgccgagtacgagagccaggtgaaggagatcagagcccagctggtggagcagcagaagtgcctggagcagcagaccgagatgagagtgcagctgctgcaggacctgcaggacttcttcagaaagaaggccgagatcgagaccgagtacagcagaaacctggagaagctggccgagagattcatggccaagaccagaagcaccaaggaccaccagcagtacaagaaggaccagaacctgctgagccccgtgaactgctggtacctgctgctgaaccaggtgagaagagagagcaaggaccacgccaccctgagcgacatctacctgaacaacgtgatcatgagattcatgcagatcagcgaggacagcaccagaatgttcaagaagagcaaggagatcgccttccagctgcacgaggacctgatgaaggtgctgaacgagctgtacaccgtgatgaagacctaccacatgtaccacgccgagagcatcagcgccgagagcaagctgaaggaggccgagaagcaggaggagaagcagatcggcagaagcggcgaccccgtgttccacatcagactggaggagagacaccagagaagaagcagcgtgaagaagatcgagaagatgaaggagaagagacaggccaagtacagcgagaacaagctgaagagcatcaaggccagaaacgagtacctgctgaccctggaggccaccaacgccagcgtgttcaagtactacatccacgacctgagcgacctgatcgactgctgcgacctgggctaccacgccagcctgaacagagccctgagaacctacctgagcgccgagtacaacctggagaccagcagacacgagggcctggacatcatcgagaacgccgtggacaacctggagcccagaagcgacaagcagagattcatggagatgtaccccgccgccttctgcccccccatgaagttcgagttccagagccacatgggcgacgaggtgtgccaggtgagcgcccagcagcccgtgcaggccgagctgatgctgagataccagcagctgcagagcagactggccaccctgaagatcgagaacgaggaggtgaagaagaccaccgaggccaccctgcagaccatccaggacatggtgaccatcgaggactacgacgtgagcgagtgcttccagcacagcagaagcaccgagagcgtgaagagcaccgtgagcgagacctacctgagcaagcccagcatcgccaagagaagagccaaccagcaggagaccgagcagttctacttcatgaagctgagagagtacctggagggcagcaacctgatcaccaagctgcaggccaagcacgacctgctgcagagaaccctgggcgagggccacagagccgagtacatgaccaccagcagaggcagaagaaacagccacaccagacaccaggacagcggccaggtgatccccctgatcgtggagagctgcatcagattcatcaacctgtacggcctgcagcaccagggcatcttcagagtgagcggcagccaggtggaggtgaacgacatcaagaacagcttcgagagaggcgagaaccccctggccgacgaccagagcaaccacgacatcaacagcgtggccggcgtgctgaagctgtacttcagaggcctggagaaccccctgttccccaaggagagattcaacgacctgatcagctgcatcagaatcgacaacctgtacgagagagccctgcacatcagaaagctgctgctgaccctgcccagaagcgtgctgatcgtgatgagatacctgttcgccttcctgaaccacctgagccagtacagcgacgagaacatgatggacccctacaacctggccatctgcttcggccccaccctgatgcccgtgcccgagatccaggaccaggtgagctgccaggcccacgtgaacgagatcatcaagaccatcatcatccaccacgagaccatcttccccgacgccaaggagctggacggccccgtgtacgagaagtgcatggccggcgacgactactgcgacagcccctacagcgagcacggcaccctggaggaggtggaccaggacgccggcaccgagccccacaccagcgaggacgagtgcgagcccatcgaggccatcgccaagttcgactacgtgggcagaagcgccagagagctgagcttcaagaagggcgccagcctgctgctgtaccacagagccagcgaggactggtgggagggcagacacaacggcatcgacggcctggtgccccaccagtacatcgtggtgcaggacatggacgacaccttcagcgacaccctgagccagaaggccgacagcgaggccagcagcggccccgtgaccgaggacaagagcagcagcaaggacatgaacagccccaccgacagacaccccgacggctacctggccagacagagaaagagaggcgagccccccccccccgtgagaagacccggcagaaccagcgacggccactgccccctgcaccccccccacgccctgagcaacagcagcgtggacctgggcagccccagcctggccagccaccccagaggcctgctgcagaacagaggcctgaacaacgacagccccgagagaagaagaagacccggccacggcagcctgaccaacatcagcagacacgacagcctgaagaagatcgacagcccccccatcagaagaagcaccagcagcggccagtacaccggcttcaacgaccacaagcccctggaccccgagaccatcgcccaggacatcgaggagaccatgaacaccgccctgaacgagctgagagagctggagagacagagcaccgccaagcacgcccccgacgtggtgctggacaccctggagcaggtgaagaacagccccacccccgccaccagcaccgagagcctgagccccctgcacaacgtggccctgagaagcagcgagccccagatcagaagaagcaccagcagcagcagcgacaccatgagcaccttcaagcccatggtggcccccagaatgggcgtgcagctgaagccccccgccctgagacccaagcccgccgtgctgcccaagaccaaccccaccatcggccccgccccccccccccagggccccaccgacaagagctgcaccatgtag

SEQ ID NO: 282306 - protein, 215 aa, Artificial Sequence
  derived and/or modified sequence
MTSRSTARPNGQPQASKICQFKLVLLGESAVGKSSLVLRFVKGQFHEYQESTIGAAFLTQSVCLDDTTVKFEIWDTAGQERYHSLAPMYYRGAQAAIVVYDITNQETFARAKTWVKELQRQASPSIVIALAGNKADLANKRMVEYEEAQAYADDNSLLFMETSAKTAMNVNDLFLAIAKKLPKSEPQNLGGAAGRSRGVDLHEQSQQNKSQCCSN

SEQ ID NO: 282307 - protein, 115 aa, Artificial Sequence
  derived and/or modified sequence
MTSRSTARPNGQPQASKICQFKLVLLGESAVGKSSLVLRFVKGQFHEYQESTIGAAFLTQSVCLDDTTVKFEIWDTAGQERYHSLAPMYYRGAQAAIVVYDITNQETFARAKTWV

SEQ ID NO: 282308 - protein, 100 aa, Artificial Sequence
  derived and/or modified sequence
MTSRSTARPNGQPQASKICQFKLVLLGESAVGKSSLVLRFVKGQFHEYQESTIGAAFLTQSVCLDDTTVKFEIWDTAGQERYHSLAPMYYRGAQAAIVVY

SEQ ID NO: 282309 - DNA, 648 bp, Artificial Sequence
  derived and/or modified sequence
atgacctcaagatcaacagcgcgtcccaatggtcagccccaagccagtaagatctgccagttcaaattagtgctcttgggcgaatcagctgtgggaaaaagcagcctagttttgcgattcgttaaaggtcaattccatgaataccaggagagtaccataggcgctgcatttcttacccaaagcgtttgtctggacgacactactgtcaagtttgaaatctgggacaccgcaggccaggaacgctatcattccctcgccccgatgtactaccggggagcccaggcagccattgttgtgtatgacattacaaaccaagaaacattcgcaagggccaagacttgggttaaagagctgcaaaggcaggcttctccctccattgtcattgctcttgctgggaacaaggccgacctagctaacaagaggatggtcgaatacgaggaggctcaggcgtatgctgacgataactcccttttgttcatggaaacctccgccaagactgctatgaacgtcaatgatctcttccttgctattgctaaaaagctccctaagtccgagccccagaaccttgggggcgccgcgggacgcagtcggggcgtggacttacacgagcagtctcagcagaataagagtcaatgctgctcaaattag

SEQ ID NO: 282310 - DNA, 348 bp, Artificial Sequence
  derived and/or modified sequence
atgacctctcgtagtaccgcgagacctaacggccagccacaggccagcaaaatttgccagttcaagttagtactgcttggggaatctgccgtgggcaagagcagcttggtcctccggtttgtgaaagggcagtttcatgagtaccaggagtctacaattggcgctgcatttctgactcagtctgtgtgcttagatgacactactgtgaagttcgaaatttgggataccgcgggtcaagagcgctaccactccttggccccgatgtactatcgtggggcacaggccgcaatcgttgtgtatgacattaccaaccaggagacctttgcacgcgcaaaaacctgggtctag

SEQ ID NO: 282311 - DNA, 648 bp, Artificial Sequence
  derived and/or modified sequence
atgacttcccgcagtactgcgaggcccaacgggcagccgcaggctagcaagatctgtcagttcaagcttgtgctgctgggggagtctgccgtcgggaagagctcactggtccttaggtttgttaaaggacagtttcacgagtatcaggagagtaccattggggctgccttcctgacccaatcagtgtgcctagatgataccaccgtaaaatttgaaatctgggatactgccggtcaggaaagatatcattcactggcaccaatgtactaccggggtgcccaggctgctatcgttgtctacgatatcactaatcaggaaacatttgcgagagctaagacttgggtgaaggagcttcagaggcaagcctctcctagcatagtgattgccctcgctggaaacaaggctgatctcgccaacaagaggatggtggaatatgaggaggcacaggcatacgcggacgataactctttgctgttcatggagaccagtgccaagactgctatgaacgttaacgatctttttctggcaatcgcaaaaaagctgccaaagagtgaaccgcagaacctgggtggagcagcgggtcggtccagaggtgtggatttacacgagcaaagtcagcagaacaagtctcaatgctgtagcaattag

SEQ ID NO: 282312 - DNA, 648 bp, Artificial Sequence
  derived and/or modified sequence
atgaccagccgcagcacagcccggcccaacggccagccccaggccagcaagatctgccagttcaagctggtgctgctgggggagagcgctgtgggcaagagcagcctggtgctgcgctttgtgaagggccagttccacgagtaccaggagagcaccatcggggccgccttcctgacccagagcgtgtgcctggatgacaccaccgtgaagtttgagatctgggacacagctggccaggagcgctaccacagcctggcccccatgtactacagaggagcccaggccgccatcgtggtgtatgacatcaccaaccaggagacctttgcccgggccaagacctgggtgaaggagctgcagaggcaggccagccccagcatcgtcatcgccctggccggcaacaaggctgacctggccaacaagaggatggtggagtatgaggaggcccaggcctatgcagatgacaacagcctgctcttcatggagaccagcgccaagacagccatgaatgtgaatgacctcttcctggccatcgccaagaagctgcccaagtctgagccccagaacctgggcggcgctgctggccgcagccggggcgtggacctgcacgagcagagccagcagaacaagagccagtgctgcagcaactag

SEQ ID NO: 282313 - DNA, 348 bp, Artificial Sequence
  derived and/or modified sequence
atgaccagccgcagcacagcccggcccaacggccagccccaggccagcaagatctgccagttcaagctggtgctgctgggggagagcgctgtgggcaagagcagcctggtgctgcgctttgtgaagggccagttccacgagtaccaggagagcaccatcggggccgccttcctgacccagagcgtgtgcctggatgacaccaccgtgaagtttgagatctgggacacagctggccaggagcgctaccacagcctggcccccatgtactacagaggagcccaggccgccatcgtggtgtatgacatcaccaaccaggagacctttgcccgggccaagacctgggtgtag

SEQ ID NO: 282314 - DNA, 648 bp, Artificial Sequence
  derived and/or modified sequence
atgaccagccggagcaccgcccggcccaacggccagccccaggcctccaagatctgtcagttcaaactggttctgctgggcgagtcagcagtgggtaaaagcagcctggtgctgcgctttgtaaagggtcagttccatgaataccaggagagtacgattggagcagccttcctgacacaaagcgtgtgcctggatgataccacagtcaagtttgagatatgggacacagccggtcaggaacgctaccacagcctggctcccatgtactatcggggcgcccaggccgcaatcgtcgtctacgacattaccaatcaggaaacatttgcccgggccaagacctgggtgaaggagctccaaagacaggccagcccgagtatcgtgatcgcattagcaggcaataaagccgacttagccaataaaagaatggtggagtacgaagaggcacaggcctacgctgatgataacagtctgcttttcatggaaacgtcggccaagacagccatgaatgtgaacgacttatttctggccatcgctaagaagctgccaaagagtgagcctcagaacctcgggggagcagccggtcggtcccgaggagtagacctgcacgaacaatcgcaacagaacaaaagccagtgttgctctaattag

SEQ ID NO: 282315 - DNA, 348 bp, Artificial Sequence
  derived and/or modified sequence
atgaccagccggagcaccgcccggcccaacggccagccccaggcctctaaaatttgtcagtttaagctggttttgctgggagaaagcgctgtggggaagagttccctggtgctgcggttcgtgaagggtcagtttcacgaatatcaggaatccaccattggtgccgccttcctcacgcagagtgtgtgcctcgatgataccacggtgaaattcgagatttgggataccgcagggcaggagaggtaccacagtttggctccgatgtattaccggggtgcccaagctgccatcgtggtctatgatattactaaccaggagacctttgccagggccaagacatgggtgtag

SEQ ID NO: 282316 - DNA, 648 bp, Artificial Sequence
  derived and/or modified sequence
atgaccagccggagcaccgcccggcccaacggccagccccaggccagcaaaatctgtcagttcaaactggtgctgctgggagaatctgcagtggggaaaagctccctcgtcctgaggttcgtgaaaggccagttccatgagtatcaggaatcaaccataggagccgcattccttacccagtcggtttgcctggacgatactacagttaagttcgaaatctgggacactgcaggtcaggagaggtaccattctctggcacctatgtattacaggggggcacaggccgcaattgttgtgtatgacatcacaaaccaggaaacctttgcacgcgcaaagacatgggtgaaagaactacaacgccaggcttctcctagcatagtgatcgcactggctggaaataaggctgaccttgctaataaacgaatggtggagtatgaggaagcgcaggcatatgccgacgataacagtctccttttcatggaaacatcagccaagaccgccatgaacgtaaacgacctcttcctggccattgccaagaaacttccaaaatcggagcctcaaaatcttggaggcgccgctgggcggtctcggggcgtggatctgcacgaacagtcacagcagaataaaagccagtgctgctccaactag

SEQ ID NO: 282317 - DNA, 648 bp, Artificial Sequence
  derived and/or modified sequence
atgaccagcaggtcaactgccaggcctaatgggcagcctcaagcctcaaagatttgccagttcaagctggtgctgctgggagaatccgccgtcggaaagtcgtctctggtcctgcggtttgtgaaaggccagttccatgagtatcaggaaagcaccatcggcgcagccttcctgacgcagtccgtatgtttggatgacactactgtaaagtttgagatatgggacactgctggccaagagcgctatcactcattagctccgatgtattatcgcggagcgcaggccgcaatcgtggtatatgatattaccaaccaggagacattcgctagagccaagacgtgggtcaaagagcttcagcgacaagcctccccttcaatcgtcattgcacttgccggtaacaaagccgacttggctaacaagaggatggtggagtacgaggaggcacaggcttacgcagatgacaattcactgctgttcatggagaccagcgcaaaaactgctatgaacgtgaatgacctcttcctagcaatcgcaaagaaactgcctaagagtgagccccaaaatctggggggtgccgcaggtcgcagtaggggggtcgatctccatgagcagagccagcagaacaagagccaatgctgctccaattag

SEQ ID NO: 282318 - DNA, 348 bp, Artificial Sequence
  derived and/or modified sequence
atgacctctagaagcaccgctagaccaaacggccagccccaggcgtcgaaaatctgccagttcaaactggttcttctaggcgaatccgctgttggcaaatcctctctggtgctgagattcgtcaaggggcaattccacgaataccaggagagtacaatcggagccgctttcttgacccagagcgtctgtctggatgataccaccgttaaatttgagatatgggatacagccggtcaggagcgctaccactctctagcccctatgtattatcgcggagcacaggctgcaatagtcgtgtatgacatcactaatcaggaaacctttgccagagccaagacctgggtttag

SEQ ID NO: 282319 - DNA, 648 bp, Artificial Sequence
  derived and/or modified sequence
atgactagccgcagcacagcgagacccaacggacaaccccaggcttcaaagatctgccaattcaaactcgtcctcctgggtgaaagcgctgttggcaagtcttcactagtcttacggttcgtgaagggccagtttcacgaataccaggagtccacaatcggtgcggcattcctcacacagtcagtatgtctggacgatacaaccgtaaagttcgaaatttgggatactgctggccaagaacggtatcactccctggcacccatgtactaccggggagctcaggctgctatcgtcgtttatgacatcaccaatcaggaaacattcgctagagctaaaacttgggtgaaggagctgcagcgccaggcttcaccctctatcgtgatagcactcgccggtaacaaggcggatctcgcaaacaaaagaatggtggagtacgaggaggctcaggcatatgccgacgacaatagtctattattcatggaaaccagcgcgaagaccgcaatgaatgtcaacgatctgttccttgctattgccaaaaaacttcctaagagcgagcctcagaacctggggggagccgctggacgatccagaggcgtggacttacacgagcagagtcagcagaacaagagtcagtgctgctccaattag

SEQ ID NO: 282320 - DNA, 3362 bp, Artificial Sequence
  derived and/or modified sequence
aatcgagctattggctggagccccgccccagggcgaggaggagaaggaggggcaggagggtttggttgagctgcagctgtttgtctgttcgacacaggcttggggccgacgggggagacggagccccaggagtgttgaagcctggaaatcccctccccttccccctcccccctttacagtatccccctccctccaccctttcccattctgataatctggccatgactagcagaagcacagctaggcccaatgggcaaccccaggccagcaaaatttgccagttcaaattggtcctgctgggagaatctgcagtgggaaagtcaagcctggtattacgttttgtcaaagggcagttccatgagtaccaggagagcaccattggagcggccttcctcacccagtccgtttgtctagatgacacaacagtgaagtttgagatctgggacacagctgggcaggagcgatatcacagcttagcccccatgtactacaggggtgcccaagctgcaatcgtggtttacgacattactaatcaggaaacctttgcccgagcaaagacatgggtgaaggaactacagcgacaggccagtcctagcatcgttattgccctggcagggaacaaagctgacctggccaacaaacgtatggtggagtatgaagaggcccaggcatatgcagatgacaacagcttattgttcatggagacttcagccaagacagctatgaacgtgaatgatctcttcctggcaatagctaagaagttgccaaagagtgaaccccagaatctgggaggtgcagcaggccgaagccggggtgtggatctccatgaacagtcccagcagaacaagagccagtgttgtagcaactgagggggtggctagcagcaaacaagtatggagctagcacaagagctaagaaataacctccatccctacccctcagcacacaacccctacggtaacagcacactgagccctggctcccaagggctgcctcctgacagctccgtcatggcactttttaacgcttcagcaacaaacaccaggcagctgttgccactggcctcctaccccctactctggggcttgggggtcaactccccccaggacttaccttccaaaacaaactttcttcactttgtattataggtacaagacagcgacttacgtatcttttctcctcctccctagtgttcctccccattttttcagaaaacacttctgactcctgtcccttccccttctgcttttggtcagtccctgttcttgagcctcttttctcctctccccaggatgcagaaagtggtgaacccaggaactgaggaaggaggtttccagttcatttacattaagggccctgggggagaataaagctcagagcaggagggagtaaggaaacatttcctttttgtttttatttggttggagtttctcatatttgaaaacattgcggtatccatgatttggccttgtggagggtgttcctaggtagaggtgagaatggggaggcaagatctcaggcaccaggcaggaggtgccttgtaagctaactgggcggaggtggaggtgcagtgtcaactgtggctctgtaactcttcaaaggcccagtttcccctcacgcagcctcttaggtagcgtttcccctaatcgtgggggttggaccccagagtcttccaaagaattttcactggttgcctgcatctttggctctgctgtgatctgattggaggagggacagtttctggtacccatcctctgatttatacatatgcattttttcccctctggcctttagatggcctcagccccagccaccatatacccctgcagtttgcactttaattgatggtagttcagttggggtacttgttttatggaagttttgattgatttacttgccctcccaccttctttttaattcaatgaaatctgaggttaatgcgaggttcgaggagaggttatagataaaactaccagtggcagctactcaagtcctatctccactgttagcttcctccaactctaattattaacctatattcttgccaagctaactattgactataggtttgcctttcctggagaattaattgagcaattgaggagtgtctcaggatagcacaggccaaggtaggggagtaaaaaggaggtcaggcaaaagggaggagttttctgtcctttcccaggtttcacactcaatttgatatccattaccatgtcttttctacttccttgtaaataggtatgatctttattcccactgtacagtctgttctatcctctgcctcccatcaggccctgtttctttgttcctttgttaatatcttgaatttagtccctccatccttaatccccccatccctccccatcatgcaaccagtggtttaatccatgtaccaataggggctagtaccacagaggcctcctgtggtgccctcgtatcataccacctgttcctgtggagagggaatgaccggcactgaaggtaccttacaactggctcatattatcagaggaccttggtcctttctaaatctctagtctctcttcatatccttcatcaggtgttttaagatgtctctgagaagccatcaaggcaaaagagaactttaagttccttgttccagcccggagttttgggaaagaaagaaaggaaaggtcacagtgacctaggattggaaccttcctgcccttttggcttgcagactgccttctatcccagaacagctgagaaatctatgaagctgagattctgaaggacccagcttaggttcttccacttaggcctcaattcccttccttttccaggggcagccttagttcccatggccctgaaacacacacatttcccccttcctttcccagaagccactggccccccatagcacccagtgcatcctttttacaagtggaagaactaggatggctttccaaagtcttctagaaatgaagttctttctctgtgcagctttcccccttggagcaggagtgaagatgtttcattatcttgggcctgggaaaccacttccccaggcttctccctccccccacccccataggaacaggatttggccttagcttctgggcctatcggctgccttccctctacttcctaccacctcttctgccttcctttgagctctgttgggcttggggatcttagttttcttttgtttatttcccagctcatttttttcttctggtcagtttttttaagggggggtgttgtggttttttgtttttgttttgcttctgagaaagcatttgcctttcttcctctcccaacataacaatcgtggtaacagaatgcgactgctgatttaccgatgtatttaatgtaagtaaaaaaaggaaaaaaagaaa

SEQ ID NO: 282321 - DNA, 596 bp, Artificial Sequence
  derived and/or modified sequence
cagctgtttgtctgttcgacacaggcttggggccgacgggggagacggagccccaggtaacactggatcaacaaaatgaagagctgagccaagtggtagaactctcatttcaagattttggtgacttgggtttaaacagagttggagagggagatgaaggagtgttgaagcctggaaatcccctccccttccccctcccccctttacagtatccccctccctccaccctttcccattctgataatctggccatgactagcagaagcacagctaggcccaatgggcaaccccaggccagcaaaatttgccagttcaaattggtcctgctgggagaatctgcagtgggaaagtcaagcctggtattacgttttgtcaaagggcagttccatgagtaccaggagagcaccattggagcggccttcctcacccagtccgtttgtctagatgacacaacagtgaagtttgagatctgggacacagctgggcaggagcgatatcacagcttagcccccatgtactacaggggtgcccaagctgcaatcgtggtttacgacattactaatcaggaaacctttgcccgagcaaagacatgggtg

SEQ ID NO: 282322 - DNA, 3322 bp, Artificial Sequence
  derived and/or modified sequence
gctcgtacttgttggtgacagcgcccaaagagactcgcctttctccagaggattggtggatgagtgcacatatagcccaccctcgaaggagtgttgaagcctggaaatcccctccccttccccctcccccctttacagtatccccctccctccaccctttcccattctgataatctggccatgactagcagaagcacagctaggcccaatgggcaaccccaggccagcaaaatttgccagttcaaattggtcctgctgggagaatctgcagtgggaaagtcaagcctggtattacgttttgtcaaagggcagttccatgagtaccaggagagcaccattggagcggccttcctcacccagtccgtttgtctagatgacacaacagtgaagtttgagatctgggacacagctgggcaggagcgatatcacagcttagcccccatgtactacaggggtgcccaagctgcaatcgtggtttacgacattactaatcaggaaacctttgcccgagcaaagacatgggtgaaggaactacagcgacaggccagtcctagcatcgttattgccctggcagggaacaaagctgacctggccaacaaacgtatggtggagtatgaagaggcccaggcatatgcagatgacaacagcttattgttcatggagacttcagccaagacagctatgaacgtgaatgatctcttcctggcaatagctaagaagttgccaaagagtgaaccccagaatctgggaggtgcagcaggccgaagccggggtgtggatctccatgaacagtcccagcagaacaagagccagtgttgtagcaactgagggggtggctagcagcaaacaagtatggagctagcacaagagctaagaaataacctccatccctacccctcagcacacaacccctacggtaacagcacactgagccctggctcccaagggctgcctcctgacagctccgtcatggcactttttaacgcttcagcaacaaacaccaggcagctgttgccactggcctcctaccccctactctggggcttgggggtcaactccccccaggacttaccttccaaaacaaactttcttcactttgtattataggtacaagacagcgacttacgtatcttttctcctcctccctagtgttcctccccattttttcagaaaacacttctgactcctgtcccttccccttctgcttttggtcagtccctgttcttgagcctcttttctcctctccccaggatgcagaaagtggtgaacccaggaactgaggaaggaggtttccagttcatttacattaagggccctgggggagaataaagctcagagcaggagggagtaaggaaacatttcctttttgtttttatttggttggagtttctcatatttgaaaacattgcggtatccatgatttggccttgtggagggtgttcctaggtagaggtgagaatggggaggcaagatctcaggcaccaggcaggaggtgccttgtaagctaactgggcggaggtggaggtgcagtgtcaactgtggctctgtaactcttcaaaggcccagtttcccctcacgcagcctcttaggtagcgtttcccctaatcgtgggggttggaccccagagtcttccaaagaattttcactggttgcctgcatctttggctctgctgtgatctgattggaggagggacagtttctggtacccatcctctgatttatacatatgcattttttcccctctggcctttagatggcctcagccccagccaccatatacccctgcagtttgcactttaattgatggtagttcagttggggtacttgttttatggaagttttgattgatttacttgccctcccaccttctttttaattcaatgaaatctgaggttaatgcgaggttcgaggagaggttatagataaaactaccagtggcagctactcaagtcctatctccactgttagcttcctccaactctaattattaacctatattcttgccaagctaactattgactataggtttgcctttcctggagaattaattgagcaattgaggagtgtctcaggatagcacaggccaaggtaggggagtaaaaaggaggtcaggcaaaagggaggagttttctgtcctttcccaggtttcacactcaatttgatatccattaccatgtcttttctacttccttgtaaataggtatgatctttattcccactgtacagtctgttctatcctctgcctcccatcaggccctgtttctttgttcctttgttaatatcttgaatttagtccctccatccttaatccccccatccctccccatcatgcaaccagtggtttaatccatgtaccaataggggctagtaccacagaggcctcctgtggtgccctcgtatcataccacctgttcctgtggagagggaatgaccggcactgaaggtaccttacaactggctcatattatcagaggaccttggtcctttctaaatctctagtctctcttcatatccttcatcaggtgttttaagatgtctctgagaagccatcaaggcaaaagagaactttaagttccttgttccagcccggagttttgggaaagaaagaaaggaaaggtcacagtgacctaggattggaaccttcctgcccttttggcttgcagactgccttctatcccagaacagctgagaaatctatgaagctgagattctgaaggacccagcttaggttcttccacttaggcctcaattcccttccttttccaggggcagccttagttcccatggccctgaaacacacacatttcccccttcctttcccagaagccactggccccccatagcacccagtgcatcctttttacaagtggaagaactaggatggctttccaaagtcttctagaaatgaagttctttctctgtgcagctttcccccttggagcaggagtgaagatgtttcattatcttgggcctgggaaaccacttccccaggcttctccctccccccacccccataggaacaggatttggccttagcttctgggcctatcggctgccttccctctacttcctaccacctcttctgccttcctttgagctctgttgggcttggggatcttagttttcttttgtttatttcccagctcatttttttcttctggtcagtttttttaagggggggtgttgtggttttttgtttttgttttgcttctgagaaagcatttgcctttcttcctctcccaacataacaatcgtggtaacagaatgcgactgctgatttaccgatgtatttaatgtaagtaaaaaaaggaaaaaaagaaaa

SEQ ID NO: 282323 - DNA, 648 bp, Artificial Sequence
  derived and/or modified sequence
atgaccagcagaagcaccgccagacccaacggccagccccaggccagcaagatctgccagttcaagctggtgctgctgggcgagagcgccgtgggcaagagcagcctggtgctgagattcgtgaagggccagttccacgagtaccaggagagcaccatcggcgccgccttcctgacccagagcgtgtgcctggacgacaccaccgtgaagttcgagatctgggacaccgccggccaggagagataccacagcctggcccccatgtactacagaggcgcccaggccgccatcgtggtgtacgacatcaccaaccaggagaccttcgccagagccaagacctgggtgaaggagctgcagagacaggccagccccagcatcgtgatcgccctggccggcaacaaggccgacctggccaacaagagaatggtggagtacgaggaggcccaggcctacgccgacgacaacagcctgctgttcatggagaccagcgccaagaccgccatgaacgtgaacgacctgttcctggccatcgccaagaagctgcccaagagcgagccccagaacctgggcggcgccgccggcagaagcagaggcgtggacctgcacgagcagagccagcagaacaagagccagtgctgcagcaactag

SEQ ID NO: 282324 - DNA, 348 bp, Artificial Sequence
  derived and/or modified sequence
atgaccagcagaagcaccgccagacccaacggccagccccaggccagcaagatctgccagttcaagctggtgctgctgggcgagagcgccgtgggcaagagcagcctggtgctgagattcgtgaagggccagttccacgagtaccaggagagcaccatcggcgccgccttcctgacccagagcgtgtgcctggacgacaccaccgtgaagttcgagatctgggacaccgccggccaggagagataccacagcctggcccccatgtactacagaggcgcccaggccgccatcgtggtgtacgacatcaccaaccaggagaccttcgccagagccaagacctgggtgtag

SEQ ID NO: 282325 - protein, 382 aa, Artificial Sequence
  derived and/or modified sequence
MVPSSPSPPPPPRVYKPCFVCNDKSSGYHYGVSSCEGCKGFFRRSIQKNMVYTCHRDKNCIINKVTRNRCQYCRLQKCFEVGMSKEAVRNDRNKKKKEVKEEGSPDSYELSPQLEELITKVSKAHQETFPSLCQLGKYTTNSSADHRVQLDLGLWDKFSELATKCIIKIVEFAKRLPGFTGLSIADQITLLKAACLDILMLRICTRYTPEQDTMTFSDGLTLNRTQMHNAGFGPLTDLVFAFAGQLLPLEMDDTETGLLSAICLICGDRMDLEEPEKVDKLQEPLLEALRLYARRRRPSQPYMFPRMLMKITDLRGISTKGAERAITLKMEIPGPMPPLIREMLENPEMFEDDSSQPGPHPNASSEDEVPGGQGKGGLKSPA

SEQ ID NO: 282326 - protein, 454 aa, Artificial Sequence
  derived and/or modified sequence
MATNKERLFAAGALGPGSGYPGAGFPFAFPGALRGSPPFEMLSPSFRGLGQPDLPKEMASLSVETQSTSSEEMVPSSPSPPPPPRVYKPCFVCNDKSSGYHYGVSSCEGCKGFFRRSIQKNMVYTCHRDKNCIINKVTRNRCQYCRLQKCFEVGMSKEAVRNDRNKKKKEVKEEGSPDSYELSPQLEELITKVSKAHQETFPSLCQLGKYTTNSSADHRVQLDLGLWDKFSELATKCIIKIVEFAKRLPGFTGLSIADQITLLKAACLDILMLRICTRYTPEQDTMTFSDGLTLNRTQMHNAGFGPLTDLVFAFAGQLLPLEMDDTETGLLSAICLICGDRMDLEEPEKVDKLQEPLLEALRLYARRRRPSQPYMFPRMLMKITDLRGISTKGAERAITLKMEIPGPMPPLIREMLENPEMFEDDSSQPGPHPNASSEDEVPGGQGKGGLKSPA

SEQ ID NO: 282327 - protein, 101 aa, Artificial Sequence
  derived and/or modified sequence
HHQDEFAKRLPGFTGLSIADQITLLKAACLDILMLRICTRYTPEQDTMTFSDGLTLNRTQMHNAGFGPLTDLVFAFAGQLLPLEMDDTETGLLSAICLICG

SEQ ID NO: 282328 - DNA, 2992 bp, Artificial Sequence
  derived and/or modified sequence
tggggggggggtggggagggagaaaaagaaagaaaatattttccgtgtccccgcctgcagagtcagtgtgcggtttgggagaaaatgtgtcggatattttggggcggtcacgtgggcgggcgggctccgagaggccccgggacagtcccagcctagagccgtgcccccccaggagccccccagtacggcgagccccggacattgcgacgctccatccaagagactgcccgacgccgggacctcggggctccgccgcctcccttccccctcccactccagctacggcccagttccctcaacctgacccagtatgtagaagccagtctctgcaggcggccagcgggacttttggaggcccagtgggcaggccaggcagggcgggtacggagcctcccaggctggggcagtgggcatgggcaggggctgtggctgaagacctcgcccgcccactgcagaccccaggggactctcacaccgcagctgccatggccaccaataaggagcgactctttgcggctggtgccctggggcctggatctggctacccaggggcaggtttccccttcgccttcccaggggcactcagggggtctccgcctttcgagatgctgagccctagcttccggggcctgggccagcctgacctccccaaggagatggcctctctgtcggtggagacacagagcaccagctcagaggagatggtgcccagctcgccctcgccccctccgcctcctcgggtctacaagccatgcttcgtgtgcaatgacaagtcctctggctaccactatggggtcagctcttgtgaaggctgcaagggcttctttcgccgaagcatccagaagaacatggtgtacacgtgtcaccgcgacaaaaactgtatcatcaacaaggtgaccaggaatcgctgccagtactgccggctacagaagtgcttcgaagtgggcatgtccaaggaagctgtgcgaaatgaccggaacaagaagaagaaagaggtgaaggaagaagggtcacctgacagctatgagctgagccctcagttagaagagctcatcaccaaggtcagcaaagcccatcaggagactttcccctcgctctgccagctgggcaagtataccacgaactccagtgcagaccaccgcgtgcagctggatctggggctgtgggacaagttcagtgagctggctaccaagtgcatcatcaagatcgtggagtttgccaagcggttgcctggctttacagggctcagcattgctgaccagatcactctgctcaaagctgcctgcctagatatcctgatgctgcgtatctgcacaaggtacaccccagagcaggacaccatgaccttctccgacgggctgaccctgaaccggacccagatgcacaatgccggcttcgggcccctcacagaccttgtctttgcctttgctgggcagctcctgcccctggagatggatgacaccgagacagggctgctcagcgccatctgcctcatctgcggagaccgcatggacctggaggagcccgaaaaagtggacaagctgcaggagccactgctggaagccctgaggctgtacgcccggcgccggcggcccagccagccctacatgttcccaaggatgctaatgaaaatcaccgacctccggggcatcagcactaagggagctgaaagggccattactctgaagatggagattccaggcccgatgcctcccttaatccgagagatgctggagaaccctgaaatgtttgaggatgactcctcgcagcctggtccccaccccaatgcctctagcgaggatgaggttcctgggggccagggcaaagggggcctgaagtccccagcctgaccagggcccctgacctccccgctgtgggggttggggcttcaggcagcagactgaccatctcccagaccgccagtgactgggggaggacctgctctgccctctccccaccccttccaatgagctccttgtttttgccaaagtttctaggggtgcctctgtgttcatccccttcctgatctaaccggctccctcgccagtcccgggggcctgccctgctcccaccaggagagagggcaaagggatgagcctgggtttggactctaaaatctcagcactgccccatgggtcctagacttcccagggcaagaggaagaccctgccattccacagccccttcctctgccaggtgcttggctctctgagagcaaacaggaacactagagaccaaaaaggggacaaaggagaagggctgagcccaccttcttgctcctacccttggtgcctaatgctgtgtgatgcacctgcagggtgtgtgctagcctctgtgccccgtccttgtgccaggtcaaggtgggggcaggctgggccctgcatttctggggcaggaacagagggtgaaagggacagatagatgcaggtccattctgcacctcttggctcgggtgcagagttcaccctgtgccctccgttataagtccctcccccagccctgtcatgtgccttgggctcctcctgccctccatctcagccattggggcagggaccctcctacactacagaggggccaggggatccctctctccctagtgccttccaccctttactccccagagcagcttggcccagggaggggggatgctgcttagctgatcccgccctgacccagaggaagcctctatttatttattagcttttgtttacaccgtggaattgaccccttcctccaggggtcttgggtgggggagcccagggcccctgtgacccctcctttcttcctccaatccccagtttgtatttagctgccaaataagattcccattggctccctgtgttctcttggggggtcagggtgctgtcccctcccctctgtttacatctcccctctaccccgctgtatcgcatattgctgagttttctatttttgcaaaataaagtgatggaaactcaaaaaaaaaaaaaaaaaaaaaaaaaaaaaaaaaaaa

SEQ ID NO: 282329 - DNA, 2956 bp, Artificial Sequence
  derived and/or modified sequence
tggggggggggtggggagggagaaaaagaaagaaaatattttccgtgtccccgcctgcagagtcagtgtgcggtttgggagaaaatgtgtcggatattttggggcggtcacgtgggcgggcgggctccgagaggccccgggacagtcccagcctagagccgtgcccccccaggagccccccagtacggcgagccccggacattgcgacgctccatccaagagactgcccgacgccgggacctcggggctccgccgcctcccttccccctcccactccagctacggcccagttccctcaacctgacccagtatgtagaagccagtctctgcaggcggccagcgggacttttggaggcccagtgggcaggccaggcagggcgggtacggagcctcccaggctggggcagtgggcatgggcaggggctgtggctgaagacctcgcccgcccactgcagaccccaggggactctcacaccgcagctgccatggccaccaataaggagcgactctttgcggctggtgccctggggcctggatctggctacccaggggcaggtttccccttcgccttcccaggggcactcagggggtctccgcctttcgagatgctgagccctagcttccggggcctgggccagcctgacctccccaaggagatggcctctctgtcggtggagacacagagcaccagctcagaggagatggtgcccagctcgccctcgccccctccgcctcctcgggtctacaagccatgcttcgtgtgcaatgacaagtcctctggctaccactatggggtcagctcttgtgaaggctgcaagggcttctttcgccgaagcatccagaagaacatggtgtacacgtgtcaccgcgacaaaaactgtatcatcaacaaggtgaccaggaatcgctgccagtactgccggctacagaagtgcttcgaagtgggcatgtccaaggaagctgtgcgaaatgaccggaacaagaagaagaaagaggtgaaggaagaagggtcacctgacagctatgagctgagccctcagttagaagagctcatcaccaaggtcagcaaagcccatcaggagactttcccctcgctctgccagctgggcaagtataccacgaactccagtgcagaccaccgcgtgcagctggatctggggctgtgggacaagttcagtgagctggctaccaagtgcatcatcaagatcgtggagtttgccaagcggttgcctggctttacagggctcagcattgctgaccagatcactctgctcaaagctgcctgcctagatatcctgatgctgcgtatctgcacaaggtacaccccagagcaggacaccatgaccttctccgacgggctgaccctgaaccggacccagatgcacaatgccggcttcgggcccctcacagaccttgtctttgcctttgctgggcagctcctgcccctggagatggatgacaccgagacagggctgctcagcgccatctgcctcatctgcggagaccgcatggacctggaggagcccgaaaaagtggacaagctgcaggagccactgctggaagccctgaggctgtacgcccggcgccggcggcccagccagccctacatgttcccaaggatgctaatgaaaatcaccgacctccggggcatcagcactaagggagctgaaagggccattactctgaagatggagattccaggcccgatgcctcccttaatccgagagatgctggagaaccctgaaatgtttgaggatgactcctcgcagcctggtccccaccccaatgcctctagcgaggatgaggttcctgggggccagggcaaagggggcctgaagtccccagcctgaccagggcccctgacctccccgctgtgggggttggggcttcaggcagcagactgaccatctcccagaccgccagtgactgggggaggacctgctctgccctctccccaccccttccaatgagctccttgtttttgccaaagtttctaggggtgcctctgtgttcatccccttcctgatctaaccggctccctcgccagtcccgggggcctgccctgctcccaccaggagagagggcaaagggatgagcctgggtttggactctaaaatctcagcactgccccatgggtcctagacttcccagggcaagaggaagaccctgccattccacagccccttcctctgccaggtgcttggctctctgagagcaaacaggaacactagagaccaaaaaggggacaaaggagaagggctgagcccaccttcttgctcctacccttggtgcctaatgctgtgtgatgcacctgcagggtgtgtgctagcctctgtgccccgtccttgtgccaggtcaaggtgggggcaggctgggccctgcatttctggggcaggaacagagggtgaaagggacagatagatgcaggtccattctgcacctcttggctcgggtgcagagttcaccctgtgccctccgttataagtccctcccccagccctgtcatgtgccttgggctcctcctgccctccatctcagccattggggcagggaccctcctacactacagaggggccaggggatccctctctccctagtgccttccaccctttactccccagagcagcttggcccagggaggggggatgctgcttagctgatcccgccctgacccagaggaagcctctatttatttattagcttttgtttacaccgtggaattgaccccttcctccaggggtcttgggtgggggagcccagggcccctgtgacccctcctttcttcctccaatccccagtttgtatttagctgccaaataagattcccattggctccctgtgttctcttggggggtcagggtgctgtcccctcccctctgtttacatctcccctctaccccgctgtatcgcatattgctgagttttctatttttgcaaaataaagtgatggaaactc

SEQ ID NO: 282330 - DNA, 2959 bp, Artificial Sequence
  derived and/or modified sequence
tggggggggggtggggagggagaaaaagaaagaaaatattttccgtgtccccgcctgcagagtcagtgtgcggtttgggagaaaatgtgtcggatattttggggcggtcacgtgggcgggcgggctccgagaggccccgggacagtcccagcctagagccgtgcccccccaggagccccccagtacggcgagccccggacattgcgacgctccatccaagagactgcccgacgccgggacctcggggctccgccgcctcccttccccctcccactccagcagctacggcccagttccctcaacctgacccagtatgtagaagccagtctctgcaggcggccagcgggacttttggaggcccagtgggcaggccaggcagggcgggtacggagcctcccaggctggggcagtgggcatgggcaggggctgtggctgaagacctcgcccgcccactgcagaccccaggggactctcacaccgcagctgccatggccaccaataaggagcgactctttgcggctggtgccctggggcctggatctggctacccaggggcaggtttccccttcgccttcccaggggcactcagggggtctccgcctttcgagatgctgagccctagcttccggggcctgggccagcctgacctccccaaggagatggcctctctgtcggtggagacacagagcaccagctcagaggagatggtgcccagctcgccctcgccccctccgcctcctcgggtctacaagccatgcttcgtgtgcaatgacaagtcctctggctaccactatggggtcagctcttgtgaaggctgcaagggcttctttcgccgaagcatccagaagaacatggtgtacacgtgtcaccgcgacaaaaactgtatcatcaacaaggtgaccaggaatcgctgccagtactgccggctacagaagtgcttcgaagtgggcatgtccaaggaagctgtgcgaaatgaccggaacaagaagaagaaagaggtgaaggaagaagggtcacctgacagctatgagctgagccctcagttagaagagctcatcaccaaggtcagcaaagcccatcaggagactttcccctcgctctgccagctgggcaagtataccacgaactccagtgcagaccaccgcgtgcagctggatctggggctgtgggacaagttcagtgagctggctaccaagtgcatcatcaagatcgtggagtttgccaagcggttgcctggctttacagggctcagcattgctgaccagatcactctgctcaaagctgcctgcctagatatcctgatgctgcgtatctgcacaaggtacaccccagagcaggacaccatgaccttctccgacgggctgaccctgaaccggacccagatgcacaatgccggcttcgggcccctcacagaccttgtctttgcctttgctgggcagctcctgcccctggagatggatgacaccgagacagggctgctcagcgccatctgcctcatctgcggagaccgcatggacctggaggagcccgaaaaagtggacaagctgcaggagccactgctggaagccctgaggctgtacgcccggcgccggcggcccagccagccctacatgttcccaaggatgctaatgaaaatcaccgacctccggggcatcagcactaagggagctgaaagggccattactctgaagatggagattccaggcccgatgcctcccttaatccgagagatgctggagaaccctgaaatgtttgaggatgactcctcgcagcctggtccccaccccaatgcctctagcgaggatgaggttcctgggggccagggcaaagggggcctgaagtccccagcctgaccagggcccctgacctccccgctgtgggggttggggcttcaggcagcagactgaccatctcccagaccgccagtgactgggggaggacctgctctgccctctccccaccccttccaatgagctccttgtttttgccaaagtttctaggggtgcctctgtgttcatccccttcctgatctaaccggctccctcgccagtcccgggggcctgccctgctcccaccaggagagagggcaaagggatgagcctgggtttggactctaaaatctcagcactgccccatgggtcctagacttcccagggcaagaggaagaccctgccattccacagccccttcctctgccaggtgcttggctctctgagagcaaacaggaacactagagaccaaaaaggggacaaaggagaagggctgagcccaccttcttgctcctacccttggtgcctaatgctgtgtgatgcacctgcagggtgtgtgctagcctctgtgccccgtccttgtgccaggtcaaggtgggggcaggctgggccctgcatttctggggcaggaacagagggtgaaagggacagatagatgcaggtccattctgcacctcttggctcgggtgcagagttcaccctgtgccctccgttataagtccctcccccagccctgtcatgtgccttgggctcctcctgccctccatctcagccattggggcagggaccctcctacactacagaggggccaggggatccctctctccctagtgccttccaccctttactccccagagcagcttggcccagggaggggggatgctgcttagctgatcccgccctgacccagaggaagcctctatttatttattagcttttgtttacaccgtggaattgaccccttcctccaggggtcttgggtgggggagcccagggcccctgtgacccctcctttcttcctccaatccccagtttgtatttagctgccaaataagattcccattggctccctgtgttctcttggggggtcagggtgctgtcccctcccctctgtttacatctcccctctaccccgctgtatcgcatattgctgagttttctatttttgcaaaataaagtgatggaaactc

SEQ ID NO: 282331 - DNA, 1365 bp, Artificial Sequence
  derived and/or modified sequence
atggcaacaaacaaggagaggctgtttgcggcaggagcgctcggccctggctcaggttaccccggcgccggtttcccatttgctttcccaggcgctttaagaggttctcctccattcgaaatgctgtcccctagtttcagaggacttggccaaccagatttgccaaaggaaatggcgtctcttagcgtcgagactcagagcacatccagtgaagaaatggtcccttccagcccatcacctcctcctccacccagggtctacaagccctgcttcgtctgtaatgataagtcctccgggtaccactacggtgtgtcgtcctgcgagggctgcaagggattctttagaagaagcattcaaaaaaacatggtgtacacctgtcacagagacaagaattgcattataaacaaggtcactcgaaacaggtgccagtattgtaggctgcagaaatgcttcgaagttggaatgagtaaggaagccgttcgtaacgacaggaacaagaaaaagaaagaagtaaaagaggagggatcacccgatagctatgagctcagcccccagttagaagaattgattacaaaagtttctaaggcccatcaggagacattccccagcttgtgtcagttgggaaaatacactacaaattcaagcgcagatcaccgagtgcagctggatctggggctgtgggataagttttccgagctggccactaaatgtatcatcaaaattgtggagtttgctaagcgactgcccgggtttacggggctgtctatcgccgaccaaatcaccttactgaaagccgcgtgtctggatatactgatgctgcgtatatgcacccgctacaccccggagcaggacacaatgactttctccgatggactcactttaaacaggacccaaatgcacaacgcaggatttggtccactcacggaccttgtgtttgcattcgcaggacagctgttacccttggaaatggacgataccgaaactgggctgctctccgcgatatgtctgatttgtggagaccgcatggacctggaggagccagaaaaagttgataaactccaggagcccctgctggaagctcttcggctctacgccaggcgacgtcgtccaagtcagccttacatgttcccgcgcatgctcatgaagattactgatctgcggggtatctccaccaagggagcagagcgcgccattactctgaagatggagatccctggccccatgccccccctgatccgggagatgcttgaaaatcccgagatgttcgaggatgactcctctcagcccgggcctcacccaaatgcctcatcagaagatgaagtgcccggtggacaagggaaagggggtctgaagtctccagcttag

SEQ ID NO: 282332 - DNA, 1365 bp, Artificial Sequence
  derived and/or modified sequence
atggctaccaacaaggaacgcctctttgccgctggtgctctggggcctggcagcggctatcctggggccggcttcccctttgcattccccggggccttgaggggcagccccccatttgagatgttatcaccttcttttagaggtctgggccagcctgacttacccaaagaaatggcctcactctccgttgagactcagagcacctcaagcgaggagatggtacctagttcacctagcccaccccctcctcccagggtgtacaaaccatgttttgtctgcaatgacaagtcatccgggtaccactacggggtgagcagttgtgagggatgcaagggatttttccggcgttctatacagaaaaatatggtgtatacctgtcatagagacaaaaactgcatcatcaacaaggtcacaaggaaccgctgccagtactgccggctgcagaagtgctttgaagttgggatgtctaaagaagccgtgcgcaatgataggaacaaaaaaaaaaaagaagtgaaagaagagggatcgcccgacagctacgagttgtctccccagcttgaagagctaattactaaagtatcaaaggcccaccaggaaactttccccagcctatgccagctcggtaagtacacaactaactcatctgctgaccaccgggtgcagttggatctcggattgtgggataaattcagtgaattggccactaagtgtattattaagatcgttgaatttgctaagagactcccaggcttcacagggctttcgattgcagatcagattactctgttaaaggccgcgtgtcttgacatcttgatgttgaggatatgcactcgctataccccagagcaggacaccatgaccttttccgatgggctgacccttaataggactcagatgcacaacgccggattcggccctctgaccgatctagtatttgcgttcgctggacagctgctcccactggaaatggatgatactgaaacgggcctactgagtgctatctgcctcatttgtggcgataggatggacctggaggaaccggaaaaagtggacaagttacaagagccattgctggaagctctgaggctgtacgccaggcggagaaggccttcccagccctatatgtttccccgaatgctcatgaagatcactgacctcagaggcatctccaccaaaggtgccgaacgtgccatcacgctaaaaatggagatcccaggccctatgcctcctctgatccgggaaatgctggaaaacccagaaatgtttgaagacgattcctcacagcccggaccgcatccaaacgcatcatctgaggatgaggtgccaggcggtcagggaaaggggggactgaaaagcccagcgtag

SEQ ID NO: 282333 - DNA, 1365 bp, Artificial Sequence
  derived and/or modified sequence
atggccaccaacaaggagcggctgtttgctgctggggccctgggccctggcagcggctacccaggagctggcttcccctttgccttccctggggccctgcggggcagccccccatttgagatgctgagccccagcttccggggcctgggccagcctgacctgcccaaggagatggccagcctgtctgtggagacccagagcaccagcagcgaggagatggtgcccagcagccccagccccccacctccaccccgggtgtacaagccctgctttgtgtgcaatgacaagagcagcggctaccactacggcgtgagcagctgtgagggctgcaagggcttcttcagaagaagcatccagaagaacatggtgtacacctgccaccgggacaagaactgcatcatcaacaaggtgaccaggaaccgctgccagtactgccgcctgcagaagtgctttgaggtgggcatgagcaaggaggccgtgagaaatgacaggaacaagaagaagaaggaggtgaaggaggagggcagcccagacagctatgagctgagcccccagctggaggagctgatcaccaaggtgtccaaggcccaccaggagaccttccccagcctgtgccagctgggcaagtacaccaccaacagcagcgctgaccaccgggtgcagctggacctgggcctgtgggacaagttcagcgagctggccaccaagtgcatcatcaagatcgtggagtttgccaagaggctgcccggcttcaccggcctgagcattgctgaccagatcaccctgctgaaggccgcctgcctggacatcctgatgctgcgcatctgcacccgctacaccccagagcaggacaccatgaccttcagtgatggcctgaccctgaacagaacccagatgcacaatgccggcttcggccccctgacagacctggtgtttgcctttgctggccagctgctgcccctggagatggatgacacagagaccggcctgctgagcgccatctgcctgatctgtggggacaggatggacctggaggagcctgagaaggtggacaagctgcaggagcccctgctggaggccctgcggctgtatgccaggagaagaagacccagccagccctacatgttccccaggatgctgatgaagatcacagacctgcggggcatcagcaccaagggagctgagcgggccatcaccctgaagatggagatccctggccccatgcctcctctcatccgggagatgctggagaaccctgagatgtttgaagatgacagcagccagcccggcccccaccccaatgccagcagtgaagatgaggtgcctgggggccagggcaaaggaggcctgaagagccctgcctag

SEQ ID NO: 282334 - DNA, 1365 bp, Artificial Sequence
  derived and/or modified sequence
atggccaccaacaaggagcggctgttcgccgccggcgccctgggccctggatctgggtatccaggagccggcttcccattcgctttccctggagccctaaggggaagtcctccatttgagatgctgtctcctagtttccgtggcctgggacaaccagatctgcccaaagagatggcgtctctgagcgtcgagacacagagcactagttctgaggagatggtgccctcaagcccctctcctcctccaccaccacgggtgtacaaaccatgtttcgtttgtaatgataagagtagtggataccattatggggtgtctagttgcgaaggctgcaagggttttttccgacggagcattcaaaaaaatatggtgtatacttgccaccgcgataaaaattgcattataaacaaggtcactaggaatagatgtcagtactgtagactgcaaaaatgttttgaagtggggatgagcaaggaggcagtgcgtaacgatagaaataaaaagaagaaggaggtcaaagaggagggctcgcccgatagctacgaactgagcccacagctggaggagctgattacaaaagtgtcaaaagcccaccaggagactttcccatccctgtgtcagctgggcaagtacaccacaaatagcagtgcggatcatcgtgtgcaacttgaccttgggctgtgggacaagttcagtgagctggccacgaagtgcatcattaagatcgtagagtttgccaagcggctgcccggttttacagggctgtctattgccgaccagattaccctgctgaaggcagcctgccttgacatcctgatgctgaggatatgtacccgctacacgcccgaacaggatactatgaccttctccgacgggttgacactcaatcgtactcaaatgcacaatgctgggttcggtccacttaccgatctcgtttttgcatttgccggtcagctgttacccctggaaatggacgacacagagactggtcttttatccgcgatctgccttatctgtggcgatcggatggacctggaggagcctgaaaaagtggacaaacttcaagaaccattattagaagccctgcggttatatgcgagaaggcgacgtcctagccagccctatatgttccctcgaatgctcatgaagatcacagatctcaggggaatttctacaaaaggtgcagaaagggcaatcacactaaagatggagatccctgggcctatgcctccgctgattagagagatgctggaaaaccccgaaatgttcgaggatgactcgtcacagcctggccctcatcctaatgcctcttccgaagacgaggtgcccggaggacaggggaaaggaggcttaaagagcccagcttag

SEQ ID NO: 282335 - DNA, 1365 bp, Artificial Sequence
  derived and/or modified sequence
atggccaccaacaaggagcggctgttcgccgccggcgccctgggcccaggatccgggtatccgggcgccgggttcccctttgcattccctggggctctcagggggagccctccttttgaaatgctgtctccctcgttccgtggtctggggcagcccgatctacctaaggagatggcatcactgtccgtggaaactcagtcaactagtagcgaggaaatggtgccctccagcccttctcctcccccccctccacgggtttataagccgtgttttgtctgtaacgacaaaagttctggatatcattacggcgtgtcgtcctgtgagggctgtaaaggattctttcgccgctcaattcaaaaaaatatggtctacacctgtcacagagacaaaaactgtatcataaacaaggtgacacgaaatcgctgtcagtactgtaggctccaaaaatgtttcgaggtgggcatgtccaaggaagccgtgagaaatgaccgcaacaagaagaaaaaagaagtaaaagaggaagggagcccagactcctatgaactgtccccccaattagaagaacttattactaaggtaagtaaagcccatcaggagaccttcccttccttatgccagttggggaagtacacaactaactcctccgcagaccaccgcgttcagctcgacctgggattgtgggataagttcagtgaactggcaaccaaatgtattatcaagattgttgaatttgccaagcgcttgcccggtttcacggggctgtccatagcggaccaaattactttgttgaaagctgcctgcttggatatcctgatgctacgcatttgcacgcggtacacccccgaacaggacaccatgacatttagcgatgggctaaccttgaatcggacccaaatgcacaacgccggcttcggcccccttacagacctggttttcgctttcgccggtcagttactgcctcttgagatggatgatacggaaaccggccttctttctgcaatctgccttatctgcggtgatcgcatggacctcgaggagccggaaaaagtggacaagctgcaggagccgctgctcgaggcactgagactgtacgcgcggagacgaaggcctagccagccctacatgttcccccgtatgcttatgaaaataactgatcttagaggaatttccacgaagggggccgaaagagccattacactgaagatggagatccccggccctatgcccccgttaatacgggagatgcttgagaatcctgaaatgttcgaggatgattcaagccagccaggcccgcaccccaatgcttcttccgaggacgaagtacctgggggtcaggggaaagggggtctgaaaagccctgcctag

SEQ ID NO: 282336 - DNA, 1365 bp, Artificial Sequence
  derived and/or modified sequence
atggctacgaacaaggaaagactgttcgctgcaggcgcactgggcccagggtcaggttatccaggagctgggttcccgtttgcgtttccaggcgcactaaggggatcccctccatttgaaatgctgagcccatcttttagaggtcttggccagcccgatctccctaaagagatggcgtccctatccgtggaaacacagtctacgtcaagcgaggaaatggtccccagctccccatcacctccgcctcccccaagggtttataagccttgcttcgtatgcaatgataagagttctggctaccactacggggtgagttcctgtgaaggctgtaaaggcttcttccgacggtctatccagaaaaacatggtttacacttgccatcgtgacaaaaactgtatcattaataaggtgaccagaaacagatgccagtactgccggctacagaagtgcttcgaggtgggaatgtccaaggaagccgttaggaacgacaggaacaagaaaaaaaaagaagtgaaagaggaaggcagccctgattcatatgagctgtccccacagctggaggagttaatcactaaagtaagcaaagctcatcaggagacattccctagcctctgtcagctgggcaagtatacaaccaatagcagtgccgaccatcgagttcagttggacttgggcttgtgggataaatttagcgagctggctacaaagtgcatcataaaaatcgtggagttcgcgaagcgcctgcctgggtttacaggtctttccatcgcagatcagatcacactgctgaaggccgcttgcttggacattctgatgctcagaatctgtacacgatatacccctgaacaggacactatgaccttttcagacggtcttactcttaatagaacccagatgcataatgcaggctttggcccactaacagaccttgtatttgctttcgcaggacagctcctccctttggagatggatgacaccgagactgggctgttgtccgccatctgcttaatctgcggcgataggatggatctggaagaacccgagaaggttgacaagcttcaagaacccctgctggaagctcttcgcctgtatgctagacgcaggcgaccatctcagccctacatgtttcccaggatgttgatgaagatcacagacctgcggggaatttctacaaaaggggcagagcgtgcaattacgttaaaaatggaaattcccggacctatgccacccctgattagggaaatgctggagaatccagaaatgtttgaggatgactcatcccagccagggcctcatcctaacgcatcaagcgaggatgaggtgcctggaggccaggggaaaggaggtttaaaatcccccgcatag

SEQ ID NO: 282337 - DNA, 1365 bp, Artificial Sequence
  derived and/or modified sequence
atggcaacaaataaagagcgactcttcgccgctggcgctctggggccaggaagcggatatcctggtgctggcttcccatttgccttccctggggctctcagaggatccccaccattcgaaatgctgagccccagtttccgaggattgggccagcctgatcttcctaaagaaatggcttccctgtctgtagagactcagtcaacatcgtctgaagagatggtgccatcatctcccagcccaccacctcctcccagggtgtacaagccctgcttcgtctgcaacgacaaatcctctggctaccactatggcgtttcttcctgtgaggggtgtaagggcttttttagacggagcatccagaaaaacatggtctatacctgccacagagacaagaactgtatcattaataaagttacgagaaatcgctgccagtactgcagacttcagaaatgctttgaggtagggatgtccaaagaggctgtcaggaacgaccgtaacaaaaagaaaaaggaggtgaaggaagaagggagtcccgactcttatgagctctcgccccaactggaggagctcataactaaagtcagcaaagcacaccaggagacatttccaagcttgtgtcagctcggaaagtataccaccaactctagtgcggatcatcgggtgcagctggacctcgggctatgggacaagtttagtgagttagcaacaaagtgcatcataaagattgtcgaatttgcgaaacggctcccagggttcacaggccttagtatagcagaccaaattactctcctgaaggcagcatgccttgacatactcatgctaaggatatgtactcggtacaccccagagcaagacaccatgacgttttccgatgggctaacattgaaccggacgcagatgcacaacgctggcttcgggccactgaccgatctagttttcgcgttcgctggccagcttctgccactggaaatggatgacaccgaaaccgggttactgagcgccatctgtcttatatgcggtgatagaatggacctggaagaaccagagaaagtagataagctgcaagagcctctgctggaagctctgcggctctacgctaggaggaggcgacctagtcagccctatatgttcccaagaatgctaatgaagatcactgacctgcgcggtatatctaccaaaggagctgaacgggctatcacattaaaaatggaaattcctggccctatgccgcctctcatacgcgaaatgctggagaacccagagatgttcgaagacgattctagccagcccggaccccatccaaatgccagttcagaggacgaagtgcctgggggacagggtaagggcggacttaagagccccgcttag

SEQ ID NO: 282338 - DNA, 1365 bp, Artificial Sequence
  derived and/or modified sequence
atggccaccaacaaggagagactgttcgccgccggcgccctgggccccggcagcggctaccccggcgccggcttccccttcgccttccccggcgccctgagaggcagcccccccttcgagatgctgagccccagcttcagaggcctgggccagcccgacctgcccaaggagatggccagcctgagcgtggagacccagagcaccagcagcgaggagatggtgcccagcagccccagccccccccccccccccagagtgtacaagccctgcttcgtgtgcaacgacaagagcagcggctaccactacggcgtgagcagctgcgagggctgcaagggcttcttcagaagaagcatccagaagaacatggtgtacacctgccacagagacaagaactgcatcatcaacaaggtgaccagaaacagatgccagtactgcagactgcagaagtgcttcgaggtgggcatgagcaaggaggccgtgagaaacgacagaaacaagaagaagaaggaggtgaaggaggagggcagccccgacagctacgagctgagcccccagctggaggagctgatcaccaaggtgagcaaggcccaccaggagaccttccccagcctgtgccagctgggcaagtacaccaccaacagcagcgccgaccacagagtgcagctggacctgggcctgtgggacaagttcagcgagctggccaccaagtgcatcatcaagatcgtggagttcgccaagagactgcccggcttcaccggcctgagcatcgccgaccagatcaccctgctgaaggccgcctgcctggacatcctgatgctgagaatctgcaccagatacacccccgagcaggacaccatgaccttcagcgacggcctgaccctgaacagaacccagatgcacaacgccggcttcggccccctgaccgacctggtgttcgccttcgccggccagctgctgcccctggagatggacgacaccgagaccggcctgctgagcgccatctgcctgatctgcggcgacagaatggacctggaggagcccgagaaggtggacaagctgcaggagcccctgctggaggccctgagactgtacgccagaagaagaagacccagccagccctacatgttccccagaatgctgatgaagatcaccgacctgagaggcatcagcaccaagggcgccgagagagccatcaccctgaagatggagatccccggccccatgccccccctgatcagagagatgctggagaaccccgagatgttcgaggacgacagcagccagcccggcccccaccccaacgccagcagcgaggacgaggtgcccggcggccagggcaagggcggcctgaagagccccgcctag

SEQ ID NO: 282339 - protein, 402 aa, Artificial Sequence
  derived and/or modified sequence
MPLQLLLLLILLGPGNSLQLWDTWADEAEKALGPLLARDRRQATEYEYLDYDFLPETEPPEMLRNSTDTTPLTGPGTPESTTVEPAARRSTGLDAGGAVTELTTELANMGNLSTDSAAMEIQTTQPAATEAQTTPLAATEAQTTRLTATEAQTTPLAATEAQTTPPAATEAQTTQPTGLEAQTTAPAAMEAQTTAPAAMEAQTTPPAAMEAQTTQTTAMEAQTTAPEATEAQTTQPTATEAQTTPLAAMEALSTEPSATEALSMEPTTKRGLFIPFSVSSVTHKGIPMAASNLSVNYPVGAPDHISVKQCLLAILILALVATIFFVCTVVLAVRLSRKGHMYPVRNYSPTEMVCISSLLPDGGEGPSATANGGLSKAKSPGLTPEPREDREGDDLTLHSFLP

SEQ ID NO: 282340 - DNA, 1287 bp, Artificial Sequence
  derived and/or modified sequence
atggcggttggggcaagtggccttgagggcgataaaatggccggagctatgccgctacagctgctactcctgttaatccttctgggtcccggaaatagcctgcagctgtgggatacatgggcggacgaagccgagaaggcgttagggcctctgttagccagggatcgtcggcaggcgaccgagtacgagtatctggactatgatttcctcccagagactgaacctccagagatgttgaggaattcaaccgacacaactccattaacaggacccgggacccccgagagcacaacggtagagccagcagcccggcgcagtacaggacttgatgccggaggggccgtgactgagctgacaactgaactggccaatatgggaaatctgtcaaccgattctgcagcaatggagatccagacaacccagccagccgccacggaggcacaaacgactcagcctgtgccaacagaggcccaaaccaccccgcttgcggccactgaggcacagaccaccaggctcacagcaacagaggcgcaaaccactccgctcgccgccaccgaggcacagacgacaccacccgccgccacagaggcccagacaactcagcccaccggcctagaggcacaaaccactgccccggccgccatggaggcacagactactgcgcctgctgcgatggaagcccaaacaacaccccctgctgccatggaggctcagacaacccagacaaccgctatggaagctcaaaccaccgctccagaggctacagaagctcagacaacgcagccaaccgcaacggaagcccagaccacccctcttgccgctatggaggccctatccacggagccctcagcaactgaagccctctctatggaacccaccaccaagaggggacttttcattcccttttccgtttcaagtgttacccacaagggaatcccaatggccgcctccaatctgagcgtgaattacccagtcggagccccagatcacatctctgtcaaacaatgcctgcttgctatactaatcttggctctggtggcgacaattttttttgtgtgtacagtggtactggcagtgcggctgtcccgcaaggggcacatgtatccagtgagaaactattcccctaccgagatggtctgcatcagctccctattacctgacggaggagaagggccttcagcgacagccaacggcggactctcaaaggcaaagtctcctgggttgactccggagcccagggaggaccgcgaaggcgacgacctcacattgcactcctttttgccctag

SEQ ID NO: 282341 - DNA, 1209 bp, Artificial Sequence
  derived and/or modified sequence
atgcccctgcaactcttgcttctgctcatactcttgggaccaggcaactcgttacagctgtgggacacctgggccgatgaggcggaaaaagctctaggccccctcctggcccgcgatcggaggcaggccactgagtacgaatacttagactacgacttcttgccagagaccgaacctcctgagatgttgagaaatagcactgatacaacaccgctcacgggaccagggacccctgagagcacaaccgtagaaccagctgcccggaggtccaccgggctggacgctggaggcgctgtcacggaactgactacagaacttgcgaacatggggaatctgagcactgatagcgctgcaatggagatccagaccacccagcccgctgcaacagaggctcaaaccacacccttggccgctactgaggctcagaccacgcgtctgaccgcaacagaggctcagacgacccccctcgctgccaccgaagcacaaaccacaccccccgccgccaccgaggcacagaccacccagcctacaggccttgaggcacagaccaccgctcccgctgcgatggaggcgcagaccacagccccagcggccatggaggcccagactacacctcctgccgccatggaggcccagacaactcaaaccaccgcgatggaagcgcagactacagccccagaggctacagaggctcagactacccagcctaccgccaccgaagcccagactactccgctcgccgccatggaagcgctttcaaccgaacccagcgctacagaagcacttagtatggagcccactacaaagaggggcctgttcataccttttagtgtctccagtgtgacccataaagggatccccatggcagcttcaaacctctcagtcaattatccagtcggcgccccagaccacatctctgtcaagcagtgcttactagccatcctgatcctggctcttgtagcaacaatcttctttgtctgcaccgtggtgttggctgtgcggctgagcagaaaaggccacatgtatccggtgaggaactattcaccaacagaaatggtttgcatcagcagcctgctgcctgatgggggagagggaccgtccgcaacggccaacggaggtctcagtaaagcgaaatcccctgggcttacacccgagcccagggaagatcgagagggggatgacctcacccttcattcatttctcccgtag

SEQ ID NO: 282342 - DNA, 1239 bp, Artificial Sequence
  derived and/or modified sequence
atgccactgcagttattgctattactgatcctccttggccctggaaacagcctgcagttgtgggatacatgggcggacgaggcggagaaggcacttggacctctgctggccagagaccgacgtcaggctacagaatatgagtacctggactatgattttctcccagagaccgagccacctgagatgctgagaaatagtactgatactacccctctgaccggccccgggaccccagagagcaccacagtcgagcccgcagccagacgcagcaccggcctagacgccggcggagcggtgaccgagttgactaccgaactggccaatatgggcaatctatcaaccgacagcgctgccatggaaatccagacgacacagccggctgcaactgaagcccagaccactcagcccgtaccaactgaggcccagacgacacccctggccgcaactgaggcacagactaccaggctgactgctacggaggctcagactacccccctggccgctacggaggcgcagacaaccccccccgctgccacagaggctcaaactacacagcccacagggctggaggcacagactaccgcccctgcagctatggaagcccaaacaaccgcccctgcagccatggaggcccagaccacccccccagcagctatggaggctcaaaccactcagaccactgcgatggaggcccagaccaccgcgccagaagcaaccgaggcacagacgactcagccaaccgccactgaggctcagaccactcccctggcggccatggaagctctatccacagagccgtccgcaactgaagcacttagcatggagccaactacgaagaggggcttgttcatccctttctccgtgagcagtgtgacccacaaaggtatccctatggcagccagcaacctgtccgttaattatcccgttggggcaccagaccacattagcgtaaagcagtgcctgttagcgatacttatactggctctggttgcaaccatcttctttgtgtgtacagtcgtgctggccgtgcgactcagcaggaaaggccacatgtacccagttcggaattatagccccacggaaatggtgtgcatctcttccttgcttcccgatggaggagaaggaccatccgccacagccaatggggggctttcaaaggctaagagcccaggacttactccagagccaagggaagatcgagaaggggacgacttgaccctacacagcttcctcccttag

SEQ ID NO: 282343 - DNA, 1287 bp, Artificial Sequence
  derived and/or modified sequence
atggctgtgggcgccagcggcctggagggggacaagatggccggggccatgcccctgcagctgctgctgctgctgatcctgctgggccctggcaacagcctgcagctgtgggacacctgggcagatgaggccgagaaggccctgggccccctgctggcccgggaccggcggcaggccacagaatatgagtacctggactatgacttcctgcctgagacagagcccccagagatgctgaggaacagcacagacaccacccccctgactggacctggcaccccagagagcaccaccgtggagcctgctgcccggcgcagcacaggcctggatgctggaggagctgtgacagagctgaccacagagctggccaacatgggcaacctgagcacagacagcgctgccatggagatccagaccacccagcctgctgccacagaggcccagaccacccagcctgtgcccacagaggcccagaccacccccctggccgccacagaggcccagaccacccggctgacagccacagaggcccagaccacccccctggccgccacagaggcccagaccaccccacctgctgccacagaggcccagaccacccagcccaccggcctggaggcccagaccacagccccagctgccatggaggcccagaccacagccccagctgccatggaggcccagaccaccccacctgctgccatggaggcccagaccacccagaccacagccatggaggcccagaccacagcccctgaggccacagaggcccagaccacccagcccacagccacagaggcccagaccacccccctggccgccatggaggccctgagcacagagcccagcgccacagaggccctgtccatggagcccaccaccaagaggggcctcttcatccccttctctgtgtcctctgtgacccacaagggcatccccatggccgccagcaacctgtctgtgaactaccctgtgggcgccccagaccacatctctgtgaagcagtgcctgctggccatcctgatcctggccctggtggccaccatcttctttgtgtgcaccgtggtgctggccgtgcggctgagcaggaagggccacatgtaccctgtgaggaactacagccccacagagatggtgtgcatcagcagcctgctgcctgatggaggagagggccccagcgccacagccaatggaggcctgagcaaggccaagagccctggcctgaccccagagccccgggaggaccgggagggagatgacctgaccctgcacagcttcctgccctag

SEQ ID NO: 282344 - DNA, 1209 bp, Artificial Sequence
  derived and/or modified sequence
atgcccctgcagctgctgctgctgctgatcctgctgggccctggcaacagcctgcagctgtgggacacctgggcagatgaggccgagaaggccctgggccccctgctggcccgggaccggcggcaggccacagaatatgagtacctggactatgacttcctgcctgagacagagcccccagagatgctgaggaacagcacagacaccacccccctgactggacctggcaccccagagagcaccaccgtggagcctgctgcccggcgcagcacaggcctggatgctggaggagctgtgacagagctgaccacagagctggccaacatgggcaacctgagcacagacagcgctgccatggagatccagaccacccagcctgctgccacagaggcccagaccacccccctggccgccacagaggcccagaccacccggctgacagccacagaggcccagaccacccccctggccgccacagaggcccagaccaccccacctgctgccacagaggcccagaccacccagcccaccggcctggaggcccagaccacagccccagctgccatggaggcccagaccacagccccagctgccatggaggcccagaccaccccacctgctgccatggaggcccagaccacccagaccacagccatggaggcccagaccacagcccctgaggccacagaggcccagaccacccagcccacagccacagaggcccagaccacccccctggccgccatggaggccctgagcacagagcccagcgccacagaggccctgtccatggagcccaccaccaagaggggcctcttcatccccttctctgtgtcctctgtgacccacaagggcatccccatggccgccagcaacctgtctgtgaactaccctgtgggcgccccagaccacatctctgtgaagcagtgcctgctggccatcctgatcctggccctggtggccaccatcttctttgtgtgcaccgtggtgctggccgtgcggctgagcaggaagggccacatgtaccctgtgaggaactacagccccacagagatggtgtgcatcagcagcctgctgcctgatggaggagagggccccagcgccacagccaatggaggcctgagcaaggccaagagccctggcctgaccccagagccccgggaggaccgggagggagatgacctgaccctgcacagcttcctgccctag

SEQ ID NO: 282345 - DNA, 1239 bp, Artificial Sequence
  derived and/or modified sequence
atgcccctgcagctgctgctgctgctgatcctgctgggccctggcaacagcctgcagctgtgggacacctgggcagatgaggccgagaaggccctgggccccctgctggcccgggaccggcggcaggccacagaatatgagtacctggactatgacttcctgcctgagacagagcccccagagatgctgaggaacagcacagacaccacccccctgactggacctggcaccccagagagcaccaccgtggagcctgctgcccggcgcagcacaggcctggatgctggaggagctgtgacagagctgaccacagagctggccaacatgggcaacctgagcacagacagcgctgccatggagatccagaccacccagcctgctgccacagaggcccagaccacccagcctgtgcccacagaggcccagaccacccccctggccgccacagaggcccagaccacccggctgacagccacagaggcccagaccacccccctggccgccacagaggcccagaccaccccacctgctgccacagaggcccagaccacccagcccaccggcctggaggcccagaccacagccccagctgccatggaggcccagaccacagccccagctgccatggaggcccagaccaccccacctgctgccatggaggcccagaccacccagaccacagccatggaggcccagaccacagcccctgaggccacagaggcccagaccacccagcccacagccacagaggcccagaccacccccctggccgccatggaggccctgagcacagagcccagcgccacagaggccctgtccatggagcccaccaccaagaggggcctcttcatccccttctctgtgtcctctgtgacccacaagggcatccccatggccgccagcaacctgtctgtgaactaccctgtgggcgccccagaccacatctctgtgaagcagtgcctgctggccatcctgatcctggccctggtggccaccatcttctttgtgtgcaccgtggtgctggccgtgcggctgagcaggaagggccacatgtaccctgtgaggaactacagccccacagagatggtgtgcatcagcagcctgctgcctgatggaggagagggccccagcgccacagccaatggaggcctgagcaaggccaagagccctggcctgaccccagagccccgggaggaccgggagggagatgacctgaccctgcacagcttcctgccctag

SEQ ID NO: 282346 - DNA, 1287 bp, Artificial Sequence
  derived and/or modified sequence
atggccgtgggcgccagcggcctggagggcgacaagatggccggcgctatgcccctgcaactgctgcttcttttaatattactaggccccgggaacagtttgcagctgtgggatacttgggcagatgaggcggagaaagccctcgggccgctattagcaagggacagacggcaggctactgaatatgagtatcttgactacgactttctgccagagacagaaccccccgaaatgctgcgcaatagtaccgacacaaccccacttacgggacctggcacccctgaatcgaccacggttgagcctgctgccagacgttctaccgggttggatgcaggcggagcggtcactgagctgaccactgagctcgccaatatgggtaatttatccacagatagcgctgcgatggagatacaaaccacgcagccagccgctaccgaagctcagacaacccaaccagttcccaccgaggctcagactaccccactcgcggctactgaggctcagactaccagattgaccgcaaccgaggctcagaccacccccctggcggcaactgaggcacagactacgcctccagccgctaccgaggcgcagaccacccagcctacaggactggaagctcaaactaccgcccctgccgcaatggaagcccagactactgccccagcggcgatggaagcgcagacaacacctccagctgctatggaggctcaaacaactcaaacaaccgctatggaggcgcagactacagctccagaggcgaccgaggctcagacgactcagccaacagccaccgaggcacagacgaccccactggctgccatggaagccttatcaacagaaccaagtgctaccgaggcgttgtccatggaacctacgaccaagagagggctatttattcctttttccgtttcctctgtgactcataaaggcatccccatggcagccagtaacctaagtgttaactaccccgttggtgcaccggaccacatatcggttaagcagtgcctgctcgcaatactgattctcgctctggttgcaacaattttctttgtttgtaccgttgttctcgctgtacgtttgtcacggaagggacacatgtacccagttaggaattattccccaacggagatggtgtgtatcagcagtttgctgccggatgggggtgagggcccatcagccacagccaacgggggcctctccaaagcaaagtctcctggcctgacgcccgaaccgcgcgaggacagagagggtgacgacctaacattacattcgttcctaccctag

SEQ ID NO: 282347 - DNA, 1209 bp, Artificial Sequence
  derived and/or modified sequence
atgcccctgcagctgctgctgctgctgatcctgctgggccccggcaacagtttgcaattgtgggatacatgggctgacgaggctgaaaaggccctcgggcctctgctcgccagagatcgtcggcaggccacggagtacgaatatctggattatgactttctcccggaaactgagccaccggagatgctaaggaatagcaccgatacgacgcccttgaccggaccggggacccccgaatcgacgactgtggagcctgcagcccgccgctctacaggactggatgctggcggggcagtgaccgaactgacaactgaactcgcaaatatggggaaccttagtacagattctgctgccatggagatccagaccacacagcctgccgctaccgaggcgcagacgaccccgcttgcggccaccgaagcccaaaccacgagactgaccgccacggaagcccagactacaccactggctgccacagaggcgcagaccacacctcccgctgctactgaagcccagaccacacagccaacagggctcgaggcccagactacagctcctgccgctatggaagcccaaacgactgctcccgctgccatggaagcccaaacaacacctcctgccgctatggaagcacagaccacccaaacaacagcgatggaggcacaaaccaccgctcccgaggctaccgaagcccagacaacccagccaacagctactgaggctcagaccactccactggccgccatggaagcactgtccacagagccttccgcaaccgaggccctctccatggaacccaccacaaaaagggggctgtttattcctttttcagtgtcctccgtcacacataagggaatacccatggccgcgtccaacttgagcgtcaactaccccgtgggggccccggatcacatatccgttaagcagtgtctgctcgcaatcctcattttggctttagtcgcaacaatcttctttgtctgcacggtggtcctcgccgtgcgtctgagtcgcaagggacatatgtaccccgtgagaaattactctcccacagaaatggtgtgcatcagtagcctgttaccggatgggggggaaggtcccagcgccactgctaacggcggtctatcaaaggctaaatcccccggattgacacccgagccaagggaagatcgggaaggcgacgacctaacgctgcattcgtttttaccctag

SEQ ID NO: 282348 - DNA, 1239 bp, Artificial Sequence
  derived and/or modified sequence
atgcccctgcagctgctgctgctgctgatcctgctgggccccggcaatagcctccagctctgggacacatgggcggatgaggccgaaaaagctcttggccccctcctagccagggatcggagacaggcaacagagtatgagtacttggattacgactttctgccagaaactgaacctccagaaatgctgaggaactccacagataccactcctctgacaggaccaggaactccggaatcaaccacagtagaacccgccgcacgaagatctaccgggcttgatgcagggggcgctgtgaccgagttgaccacagagctggcaaacatggggaatctctctacagacagtgcagccatggaaatccagactacccagccggctgccacagaggctcagactacgcagcctgtgccgacagaggcacagacaaccccgctggctgctactgaggcgcagaccacaagactgactgcgaccgaggcccagacaaccccactggcagcaaccgaagctcagaccaccccacctgctgccacagaagcacagactacacagcctaccggactcgaggcacagacaacggccccagccgcaatggaagcccagaccacagctccagcagcaatggaagcacagacaactccccctgctgcaatggaggcccagaccacacaaaccaccgccatggaagcgcagactacagcccccgaggccacggaagctcagacaacacagcccactgctaccgaagcacaaacaacccctcttgccgccatggaggccctgagcactgaaccctctgcaacagaagctctatccatggagcccaccaccaaaaggggcctctttatcccattcagcgtttcttcagtaacacataagggaataccaatggccgcctctaatctgtctgtgaactaccctgttggagcccctgaccacatttccgtcaagcaatgtctgttagcaatcctcatccttgctctcgttgccactatcttcttcgtgtgtacagtggtcctcgctgtgcggctgagtcggaaggggcacatgtaccctgtccggaactacagtcccactgagatggtgtgcatcagcagtctacttccagacggaggggaagggcccagtgccacagccaatggaggcctgtctaaggcaaaatcacccgggctgacacccgaaccaagggaggatcgggagggcgacgatttgactctgcattcatttttgccttag

SEQ ID NO: 282349 - DNA, 1287 bp, Artificial Sequence
  derived and/or modified sequence
atggccgtgggagcctctggcctagagggagataaaatggctggcgctatgccgctgcagttattgcttctgctgatcctactgggcccaggcaacagtctccagttgtgggacacctgggccgatgaggcggagaaggccctggggcctctgttggcccgagataggcgccaggcaacagagtatgaatacctggattatgacttcctccccgagacggaacctcccgagatgctccgcaactctaccgacacaacgccactgaccgggccaggaaccccagaatccaccacagtggaaccagccgctagacgttccacaggcctggacgctgggggagcggttaccgagcttacaaccgagctggctaatatggggaacttgtctaccgactcagctgctatggaaattcagacaacacaacccgcagcaacagaagcacagaccacccagccagtgcctacagaagcccagactacacctctcgccgcaactgaggcccagactactagactgaccgcgacggaagcacagacaaccccacttgccgctaccgaggctcagacaactcctcccgcagccaccgaggcccagactactcaacccaccggacttgaagcccagacaactgccccagctgctatggaggcacaaaccacggccccagccgcaatggaagcacagaccacaccaccggctgctatggaggcgcagactacccaaactaccgctatggaggcacagacgaccgcccctgaagcaacggaggcgcagaccacacagcccactgcaacagaggcacagacaactcccctggccgctatggaggcactgtccacagagccgtcagccaccgaggccctctcgatggagcccaccacaaagcggggactttttatcccgttcagcgttagtagcgtgacacacaaaggcattcctatggcagcaagtaacctgtctgtcaactaccctgtcggcgctcctgaccacattagcgtgaagcagtgtctgctggccattctgatcctggcgctcgtggccaccatattcttcgtctgtacagtcgtgcttgctgtccgactgtctagaaaaggacatatgtatcccgtgaggaattattcccctactgaaatggtatgcatttccagcctgctccctgatggcggtgaaggaccaagtgcaaccgctaacggaggactgtcaaaggccaagtcgccaggcttaactcctgaaccacgcgaagaccgggaaggagatgatctgaccttacactcgtttttgccctag

SEQ ID NO: 282350 - DNA, 1209 bp, Artificial Sequence
  derived and/or modified sequence
atgccactgcagcttctgctgctgcttatactgctgggtccgggtaacagcttacagctgtgggatacctgggccgacgaggcggaaaaggctctgggcccattgctggcacgcgatcgcagacaggccaccgagtatgaatatctggattatgactttctacccgagacagagcccccagagatgctccgtaattcaactgacactacaccattgaccggacctggtacccccgaatccacaacggtggagcctgcagcgcgacgatcaacaggcctagatgctggcggtgcagtaaccgaactgacaaccgagctggcaaacatgggaaatctgtccacagactcggctgcgatggagattcagaccacccagcctgcagctactgaggcccagaccacccctcttgccgctacagaagcgcaaaccaccagactaacagctacggaagcccaaactacccccctggcagccacagaagcacagaccacacccccagccgctaccgaggcccaaacaacacagcccactggcttagaagctcagactactgcacccgctgctatggaggcccagacgacggcgccagccgcaatggaagcacagacgacccccccagcagcaatggaagcccagactactcagacaaccgctatggaggcgcagactacagcccctgaggccacggaggcccagactacacagcccacagccactgaggcccagacgacacctctcgctgccatggaggccctgtccacggagccatcggctaccgaagctcttagcatggaaccaaccaccaaacgtggtctcttcatcccgtttagcgtatcttctgttacacataagggcatcccgatggctgctagtaacctctccgtcaactatccagtcggcgctcccgaccacattagtgtaaaacaatgcttgctcgcaatcctcatcttggctctcgtggcaaccatattttttgtctgtacagtggtgctcgctgtgcgactgtccaggaagggacacatgtaccctgtgcggaattactcccctactgaaatggtgtgcatatctagtctgctgcccgatggcggagaaggcccatccgcaacagcgaacgggggactgagcaaggccaaatctcctggtcttacacccgaaccgagggaggaccgggaaggggacgatttaacgttgcactcatttctgccttag

SEQ ID NO: 282351 - DNA, 1239 bp, Artificial Sequence
  derived and/or modified sequence
atgcctcttcagctgctcctgctcctaatacttctgggaccaggcaattcactacaactgtgggatacatgggcggacgaagccgagaaggctctgggacctctgctagcgagagaccggaggcaggccaccgaatatgaatacttggattatgattttctgcctgaaaccgaacctccagaaatgttgcgcaacagtactgacacaacacctctgacagggccaggaactccagaatcgactactgttgaaccagcggcaagaagatctaccggcctcgatgctggcggagccgttacagaactgactactgagctcgccaatatggggaacctgtccactgattctgcagctatggagattcagactactcaacccgcagcgaccgaggctcaaactactcaacctgtccccacagaagcgcagactacccccctcgcagcgacggaggcccagacaacccgcctgaccgcgactgaggcccagactacaccactggcagccacagaagcacaaaccacccctcccgcagccactgaggctcagaccacccagccaacaggacttgaggcacagacaaccgcacctgccgctatggaggctcaaacaacagcccctgccgctatggaggcgcaaacaactccacccgctgccatggaggcccaaacaacccagacgactgccatggaagctcagacaactgccccagaggcaacagaggctcagaccacccaaccaacagccaccgaggcacagaccactccactcgccgctatggaggctctcagcactgagccttctgctactgaggccctgtccatggagcctactaccaagcggggattgttcatcccttttagtgtgtcctcagttacccacaaaggcatcccaatggctgcaagtaaccttagcgtgaattatcctgtcggagctcccgaccacatttccgtgaagcagtgcctgcttgctatcttgatcctcgccctggttgccaccatctttttcgtctgcaccgtggtcctagcagtgaggctctcccgcaaaggccatatgtacccggtgcggaattactcacctaccgagatggtttgtatctcctcgctattgcccgatgggggtgaggggccaagcgccaccgcgaatggcggactgagcaaggcgaagtcccctggcttgaccccagaaccgagagaggacagagagggagacgacctcaccctgcattcttttctgccttag

SEQ ID NO: 282352 - DNA, 1704 bp, Artificial Sequence
  derived and/or modified sequence
aatcatccgagaaccttggagggtggacagtgccccttttacagatgagaaaactgaggcttgaaggggagaagcagctgcctctggcggcatggcttctggctgcaggatgcccatggagttcgtggtgaccctaggcctgtgtctcggcttcctttgctgaacttgaacaggaagatggcagtgggggccagtggtctagaaggagataagatggctggtgccatgcctctgcaactcctcctgttgctgatcctactgggccctggcaacagcttgcagctgtgggacacctgggcagatgaagccgagaaagccttgggtcccctgcttgcccgggaccggagacaggccaccgaatatgagtacctagattatgatttcctgccagaaacggagcctccagaaatgctgaggaacagcactgacaccactcctctgactgggcctggaacccctgagtctaccactgtggagcctgctgcaaggcgttctactggcctggatgcaggaggggcagtcacagagctgaccacggagctggccaacatggggaacctgtccacggattcagcagctatggagatacagaccactcaaccagcagccacggaggcacagaccactcaaccagtgcccacggaggcacagaccactccactggcagccacagaggcacagacaactcgactgacggccacggaggcacagaccactccactggcagccacagaggcacagaccactccaccagcagccacggaagcacagaccactcaacccacaggcctggaggcacagaccactgcaccagcagccatggaggcacagaccactgcaccagcagccatggaagcacagaccactccaccagcagccatggaggcacagaccactcaaaccacagccatggaggcacagaccactgcaccagaagccacggaggcacagaccactcaacccacagccacggaggcacagaccactccactggcagccatggaggccctgtccacagaacccagtgccacagaggccctgtccatggaacctactaccaaaagaggtctgttcatacccttttctgtgtcctctgttactcacaagggcattcccatggcagccagcaatttgtccgtcaactacccagtgggggccccagaccacatctctgtgaagcagtgcctgctggccatcctaatcttggcgctggtggccactatcttcttcgtgtgcactgtggtgctggcggtccgcctctcccgcaagggccacatgtaccccgtgcgtaattactcccccaccgagatggtctgcatctcatccctgttgcctgatgggggtgaggggccctctgccacagccaatgggggcctgtccaaggccaagagcccgggcctgacgccagagcccagggaggaccgtgagggggatgacctcaccctgcacagcttcctcccttagctcactctgccatctgttttggcaagaccccacctccacgggctctcctgggccacccctgagtgcccagaccccattccacagctctgggcttcctcggagacccctggggatggggatcttcagggaaggaactctggccacccaaacaggacaagagcagcctggggccaagcagacgggcaagtggagccacctctttcctccctccgcggatgaagcccagccacatttcagccg

SEQ ID NO: 282353 - DNA, 2528 bp, Artificial Sequence
  derived and/or modified sequence
acacacagccattgggggttgctcggatccgggactgccgcagggggtgccacagcagtgcctggcagcgtgggctgggaccttgtcactaaagcagagaagccacttcttctgggcccacgaggcagctgtcccatgctctgctgagcacggtggtgccatgcctctgcaactcctcctgttgctgatcctactgggccctggcaacagcttgcagctgtgggacacctgggcagatgaagccgagaaagccttgggtcccctgcttgcccgggaccggagacaggccaccgaatatgagtacctagattatgatttcctgccagaaacggagcctccagaaatgctgaggaacagcactgacaccactcctctgactgggcctggaacccctgagtctaccactgtggagcctgctgcaaggcgttctactggcctggatgcaggaggggcagtcacagagctgaccacggagctggccaacatggggaacctgtccacggattcagcagctatggagatacagaccactcaaccagcagccacggaggcacagaccactccactggcagccacagaggcacagacaactcgactgacggccacggaggcacagaccactccactggcagccacagaggcacagaccactccaccagcagccacggaagcacagaccactcaacccacaggcctggaggcacagaccactgcaccagcagccatggaggcacagaccactgcaccagcagccatggaagcacagaccactccaccagcagccatggaggcacagaccactcaaaccacagccatggaggcacagaccactgcaccagaagccacggaggcacagaccactcaacccacagccacggaggcacagaccactccactggcagccatggaggccctgtccacagaacccagtgccacagaggccctgtccatggaacctactaccaaaagaggtctgttcatacccttttctgtgtcctctgttactcacaagggcattcccatggcagccagcaatttgtccgtcaactacccagtgggggccccagaccacatctctgtgaagcagtgcctgctggccatcctaatcttggcgctggtggccactatcttcttcgtgtgcactgtggtgctggcggtccgcctctcccgcaagggccacatgtaccccgtgcgtaattactcccccaccgagatggtctgcatctcatccctgttgcctgatgggggtgaggggccctctgccacagccaatgggggcctgtccaaggccaagagcccgggcctgacgccagagcccagggaggaccgtgagggggatgacctcaccctgcacagcttcctcccttagctcactctgccatctgttttggcaagaccccacctccacgggctctcctgggccacccctgagtgcccagaccccattccacagctctgggcttcctcggagacccctggggatggggatcttcagggaaggaactctggccacccaaacaggacaagagcagcctggggccaagcagacgggcaagtggagccacctctttcctccctccgcggatgaagcccagccacatttcagccgaggtccaaggcaggaggccatttacttgagacagattctctcctttttcctgtcccccatcttctctgggtccctctaacatctcccatggctctccccgcttctcctggtcactggagtctcctccccatgtacccaaggaagatggagctcccccatcccacacgcactgcactgccattgtcttttggttgccatggtcaccaaacaggaagtggacattctaagggaggagtactgaagagtgacggacttctgaggctgtttcctgctgctcctctgacttggggcagcttgggtcttcttgggcacctctctgggaaaacccagggtgaggttcagcctgtgagggctgggatgggtttcgtgggcccaagggcagacctttctttgggactgtgtggaccaaggagcttccatctagtgacaagtgacccccagctatcgcctcttgccttcccctgtggccactttccagggtggactctgtcttgttcactgcagtatcccaactgcaggtccagtgcaggcaataaatatgtgatggacaaacgatagcggaatccttcaaggtttcaaggctgtctccttcaggcagccttcccggaattctccatccctcagtgcaggatgggggctggtcctcagctgtctgccctcagcccctggccccccaggaagcctctttcatgggctgttaggttgacttcagttttgcctcttggacaacagggggtcttgtacatccttgggtgaccaggaaaagttcaggctatggggggccaaagggagggctgccccttccccaccagtgaccactttattccacttcctccattacccagttttggcccacagagtttggtcccccccaaacctcggaccaatatccctctaaacatcaatctatcctcctgtt

SEQ ID NO: 282354 - DNA, 2256 bp, Artificial Sequence
  derived and/or modified sequence
aaacaatggggtgtgggctgtcacatggccctgcctaagtaaccacattctcgcttcctccttccacacacagccattgggggttgctcggatccgggactgccgcagggggtgccacagcagtgcctggcagcgtgggctgggaccttgtcactaaagcagagaagccacttcttctgggcccacgaggcagctgtcccatgctctgctgagcacggtggtgccatgcctctgcaactcctcctgttgctgatcctactgggccctggcaacagcttgcagctgtgggacacctgggcagatgaagccgagaaagccttgggtcccctgcttgcccgggaccggagacaggccaccgaatatgagtacctagattatgatttcctgccagaaacggagcctccagaaatgctgaggaacagcactgacaccactcctctgactgggcctggaacccctgagtctaccactgtggagcctgctgcaaggcgttctactggcctggatgcaggaggggcagtcacagagctgaccacggagctggccaacatggggaacctgtccacggattcagcagctatggagatacagaccactcaaccagcagccacggaggcacagaccactcaaccagtgcccacggaggcacagaccactccactggcagccacagaggcacagacaactcgactgacggccacggaggcacagaccactccactggcagccacagaggcacagaccactccaccagcagccacggaagcacagaccactcaacccacaggcctggaggcacagaccactgcaccagcagccatggaggcacagaccactgcaccagcagccatggaagcacagaccactccaccagcagccatggaggcacagaccactcaaaccacagccatggaggcacagaccactgcaccagaagccacggaggcacagaccactcaacccacagccacggaggcacagaccactccactggcagccatggaggccctgtccacagaacccagtgccacagaggccctgtccatggaacctactaccaaaagaggtctgttcatacccttttctgtgtcctctgttactcacaagggcattcccatggcagccagcaatttgtccgtcaactacccagtgggggccccagaccacatctctgtgaagcagtgcctgctggccatcctaatcttggcgctggtggccactatcttcttcgtgtgcactgtggtgctggcggtccgcctctcccgcaagggccacatgtaccccgtgcgtaattactcccccaccgagatggtctgcatctcatccctgttgcctgatgggggtgaggggccctctgccacagccaatgggggcctgtccaaggccaagagcccgggcctgacgccagagcccagggaggaccgtgagggggatgacctcaccctgcacagcttcctcccttagctcactctgccatctgttttggcaagaccccacctccacgggctctcctgggccacccctgagtgcccagaccccattccacagctctgggcttcctcggagacccctggggatggggatcttcagggaaggaactctggccacccaaacaggacaagagcagcctggggccaagcagacgggcaagtggagccacctctttcctccctccgcggatgaagcccagccacatttcagccgaggtccaaggcaggaggccatttacttgagacagattctctcctttttcctgtcccccatcttctctgggtccctctaacatctcccatggctctccccgcttctcctggtcactggagtctcctccccatgtacccaaggaagatggagctcccccatcccacacgcactgcactgccattgtcttttggttgccatggtcaccaaacaggaagtggacattctaagggaggagtactgaagagtgacggacttctgaggctgtttcctgctgctcctctgacttggggcagcttgggtcttcttgggcacctctctgggaaaacccagggtgaggttcagcctgtgagggctgggatgggtttcgtgggcccaagggcagacctttctttgggactgtgtggaccaaggagcttccatctagtgacaagtgacccccagctatcgcctcttgccttcccctgtggccactttccagggtggactctgtcttgttcactgcagtatcccaactgcaggtccagtgcaggcaataaatatgtgatggacaaa

SEQ ID NO: 282355 - DNA, 1287 bp, Artificial Sequence
  derived and/or modified sequence
atggccgtgggcgccagcggcctggagggcgacaagatggccggcgccatgcccctgcagctgctgctgctgctgatcctgctgggccccggcaacagcctgcagctgtgggacacctgggccgacgaggccgagaaggccctgggccccctgctggccagagacagaagacaggccaccgagtacgagtacctggactacgacttcctgcccgagaccgagccccccgagatgctgagaaacagcaccgacaccacccccctgaccggccccggcacccccgagagcaccaccgtggagcccgccgccagaagaagcaccggcctggacgccggcggcgccgtgaccgagctgaccaccgagctggccaacatgggcaacctgagcaccgacagcgccgccatggagatccagaccacccagcccgccgccaccgaggcccagaccacccagcccgtgcccaccgaggcccagaccacccccctggccgccaccgaggcccagaccaccagactgaccgccaccgaggcccagaccacccccctggccgccaccgaggcccagaccaccccccccgccgccaccgaggcccagaccacccagcccaccggcctggaggcccagaccaccgcccccgccgccatggaggcccagaccaccgcccccgccgccatggaggcccagaccaccccccccgccgccatggaggcccagaccacccagaccaccgccatggaggcccagaccaccgcccccgaggccaccgaggcccagaccacccagcccaccgccaccgaggcccagaccacccccctggccgccatggaggccctgagcaccgagcccagcgccaccgaggccctgagcatggagcccaccaccaagagaggcctgttcatccccttcagcgtgagcagcgtgacccacaagggcatccccatggccgccagcaacctgagcgtgaactaccccgtgggcgcccccgaccacatcagcgtgaagcagtgcctgctggccatcctgatcctggccctggtggccaccatcttcttcgtgtgcaccgtggtgctggccgtgagactgagcagaaagggccacatgtaccccgtgagaaactacagccccaccgagatggtgtgcatcagcagcctgctgcccgacggcggcgagggccccagcgccaccgccaacggcggcctgagcaaggccaagagccccggcctgacccccgagcccagagaggacagagagggcgacgacctgaccctgcacagcttcctgccctag

SEQ ID NO: 282356 - DNA, 1209 bp, Artificial Sequence
  derived and/or modified sequence
atgcccctgcagctgctgctgctgctgatcctgctgggccccggcaacagcctgcagctgtgggacacctgggccgacgaggccgagaaggccctgggccccctgctggccagagacagaagacaggccaccgagtacgagtacctggactacgacttcctgcccgagaccgagccccccgagatgctgagaaacagcaccgacaccacccccctgaccggccccggcacccccgagagcaccaccgtggagcccgccgccagaagaagcaccggcctggacgccggcggcgccgtgaccgagctgaccaccgagctggccaacatgggcaacctgagcaccgacagcgccgccatggagatccagaccacccagcccgccgccaccgaggcccagaccacccccctggccgccaccgaggcccagaccaccagactgaccgccaccgaggcccagaccacccccctggccgccaccgaggcccagaccaccccccccgccgccaccgaggcccagaccacccagcccaccggcctggaggcccagaccaccgcccccgccgccatggaggcccagaccaccgcccccgccgccatggaggcccagaccaccccccccgccgccatggaggcccagaccacccagaccaccgccatggaggcccagaccaccgcccccgaggccaccgaggcccagaccacccagcccaccgccaccgaggcccagaccacccccctggccgccatggaggccctgagcaccgagcccagcgccaccgaggccctgagcatggagcccaccaccaagagaggcctgttcatccccttcagcgtgagcagcgtgacccacaagggcatccccatggccgccagcaacctgagcgtgaactaccccgtgggcgcccccgaccacatcagcgtgaagcagtgcctgctggccatcctgatcctggccctggtggccaccatcttcttcgtgtgcaccgtggtgctggccgtgagactgagcagaaagggccacatgtaccccgtgagaaactacagccccaccgagatggtgtgcatcagcagcctgctgcccgacggcggcgagggccccagcgccaccgccaacggcggcctgagcaaggccaagagccccggcctgacccccgagcccagagaggacagagagggcgacgacctgaccctgcacagcttcctgccctag

SEQ ID NO: 282357 - DNA, 1239 bp, Artificial Sequence
  derived and/or modified sequence
atgcccctgcagctgctgctgctgctgatcctgctgggccccggcaacagcctgcagctgtgggacacctgggccgacgaggccgagaaggccctgggccccctgctggccagagacagaagacaggccaccgagtacgagtacctggactacgacttcctgcccgagaccgagccccccgagatgctgagaaacagcaccgacaccacccccctgaccggccccggcacccccgagagcaccaccgtggagcccgccgccagaagaagcaccggcctggacgccggcggcgccgtgaccgagctgaccaccgagctggccaacatgggcaacctgagcaccgacagcgccgccatggagatccagaccacccagcccgccgccaccgaggcccagaccacccagcccgtgcccaccgaggcccagaccacccccctggccgccaccgaggcccagaccaccagactgaccgccaccgaggcccagaccacccccctggccgccaccgaggcccagaccaccccccccgccgccaccgaggcccagaccacccagcccaccggcctggaggcccagaccaccgcccccgccgccatggaggcccagaccaccgcccccgccgccatggaggcccagaccaccccccccgccgccatggaggcccagaccacccagaccaccgccatggaggcccagaccaccgcccccgaggccaccgaggcccagaccacccagcccaccgccaccgaggcccagaccacccccctggccgccatggaggccctgagcaccgagcccagcgccaccgaggccctgagcatggagcccaccaccaagagaggcctgttcatccccttcagcgtgagcagcgtgacccacaagggcatccccatggccgccagcaacctgagcgtgaactaccccgtgggcgcccccgaccacatcagcgtgaagcagtgcctgctggccatcctgatcctggccctggtggccaccatcttcttcgtgtgcaccgtggtgctggccgtgagactgagcagaaagggccacatgtaccccgtgagaaactacagccccaccgagatggtgtgcatcagcagcctgctgcccgacggcggcgagggccccagcgccaccgccaacggcggcctgagcaaggccaagagccccggcctgacccccgagcccagagaggacagagagggcgacgacctgaccctgcacagcttcctgccctag

SEQ ID NO: 282358 - DNA, 471 bp, Artificial Sequence
  derived and/or modified sequence
taagaaggggacacagtcccgtctttcctgcggctatgcatcgccgccgtggacaagcgaggcctggacgtggacggcatctatagggtctcgggtaatctcgccgtggtgcaaaaattgagatttctggtagaccgggagcgtgccgtgacaagtgacggcagatacgtgtttcctgaacagccgggccaagctctgtctgagagcgaacagtgtctctctcagatccaggagttaatcggttcaatgccaaaaccaaatcacgacaccctacgatacctactcgagcacttgtgccgggtgattgctcacagcgacaagaacagaatgactccgcacaacctaggaatcgtgtttggacctacattgttccgacctgagcaggagactagcgatcccgcagcccatgctctctacccggggcagctcgtccagctgatgctgaccaactttacctcactcttcccctag

SEQ ID NO: 282359 - DNA, 471 bp, Artificial Sequence
  derived and/or modified sequence
tgagaaggagacacagtgcccagcttcctgcggctgtgcatcgctgctgtggacaagaggggcctggatgtggatggcatctacagagtgtctggcaacctggccgtggtgcagaagctgcgcttcctggtggaccgggagagagctgtgaccagtgatggccgctacgtgtttcctgagcagcccggccaggccctgtctgagagcgagcagtgcctgagccagatccaggagctgattggctccatgcccaagcccaaccacgacaccctgcgctacctgctggagcacctgtgcagggtcatcgcccacagcgacaagaacaggatgaccccccacaacctgggcatcgtgtttggccccaccctcttccggcctgagcaggagaccagtgaccctgctgcccacgccctgtacccaggccagctggtgcagctgatgctgaccaacttcaccagcctcttcccctag

SEQ ID NO: 282360 - DNA, 471 bp, Artificial Sequence
  derived and/or modified sequence
tgagagggcgacaccgtgcccagcttcctgcggctgtgcatcgccgcagtggacaagcgggggcttgacgtagatggcatctaccgcgtgtcgggcaatctggccgtcgtgcagaaacttaggttcctggtggaccgagagcgggccgtgacgtccgatggacgttacgtgtttccggaacagccagggcaagctcttagcgagtccgagcagtgcttgtcacagattcaggagttaatcggaagcatgcctaagcctaaccacgacacccttcgctacctgttggaacatctgtgccgtgtcattgcacactctgataagaaccgtatgacaccacataaccttggcatagtctttggtccgacactgtttcggcctgagcaagaaacaagcgatccagcggctcacgcactgtaccccggtcagctggtgcaactgatgctgactaactttacttctttattcccttag

SEQ ID NO: 282361 - DNA, 471 bp, Artificial Sequence
  derived and/or modified sequence
tgagagggggacaccgtccctagtttccttcgactgtgtattgctgccgtcgacaaaagagggctggatgttgatggcatttatagagttagtggcaatctggctgtggtgcagaagttacgcttcttggttgatagagaacgcgctgttacttccgacggacgctatgtgtttccagaacagccgggtcaggcgctcagtgagtccgagcaatgtctttcccaaatacaggagctgatcggttctatgccaaaacctaaccacgacacgctcaggtatctgctggaacacctttgccgcgtgatcgcccattctgacaagaaccgtatgacaccacacaatctgggaatagtttttgggccaaccctcttcaggcctgagcaagagaccagcgaccctgcagcacacgccctgtacccaggccaactggtgcaactcatgctgacaaactttactagcttatttccgtag

SEQ ID NO: 282362 - DNA, 722 bp, Artificial Sequence
  derived and/or modified sequence
gggaaggagacacggtgcccagctttttgcggctctgcattgctgctgtggataaaagaggtctagatgtggatggcatttatcgggtgagcgggaacttggcagtggtccagaagcttcgctttctggtggacagagagcgtgcggtcacctccgatgggaggtatgtgttcccagaacagccaggacaagcactctccgaatcagagcagtgcctctctcagatacaagaattaataggctcaatgccaaagcccaaccatgacactctacggtacctcctggagcatttatgcagggtgatagcacactcagataagaatcgcatgacaccccacaacctgggaattgtgtttggaccaaccctgtttcggccagagcaggagacatctgacccagcagcccatgctctctacccagggcagctggtccagctgatgctcaccaacttcaccagcctcttcccctgatgcagggaaggaagaagagaaaacatatttccggtcatctctggtggtgagaggctggtgttctgttttgaggatatccctttaaatctcccaaatgactgtctctatcttcatgagtgtgacttgaggtgttgggatgggtgagggagcttctctaaagaggaaagtgagtggattaacccctgcttctcttcttgttccctgttatcattcctccccaacataataatacataaagtggcatggtatttt

SEQ ID NO: 282363 - DNA, 471 bp, Artificial Sequence
  derived and/or modified sequence
tgagagggcgacaccgtgcccagcttcctgagactgtgcatcgccgccgtggacaagagaggcctggacgtggacggcatctacagagtgagcggcaacctggccgtggtgcagaagctgagattcctggtggacagagagagagccgtgaccagcgacggcagatacgtgttccccgagcagcccggccaggccctgagcgagagcgagcagtgcctgagccagatccaggagctgatcggcagcatgcccaagcccaaccacgacaccctgagatacctgctggagcacctgtgcagagtgatcgcccacagcgacaagaacagaatgaccccccacaacctgggcatcgtgttcggccccaccctgttcagacccgagcaggagaccagcgaccccgccgcccacgccctgtaccccggccagctggtgcagctgatgctgaccaacttcaccagcctgttcccctag

SEQ ID NO: 282364 - DNA, 3393 bp, Artificial Sequence
  derived and/or modified sequence
atggccgtgagaaagaaggacggcggccccaacgtgaagtactacgaggccgccgacaccgtgacccagttcgacaacgtgagactgtggctgggcaagaactacaagaagtacatccaggccgagccccccaccaacaagagcctgagcagcctggtggtgcagctgctgcagttccaggaggaggtgttcggcaagcacgtgagcaacgcccccctgaccaagctgcccatcaagtgcttcctggacttcaaggccggcggcagcctgtgccacatcctggccgccgcctacaagttcaagagcgaccagggctggagaagatacgacttccagaaccccagcagaatggacagaaacgtggagatgttcatgaccatcgagaagagcctggtgcagaacaactgcctgagcagacccaacatcttcctgtgccccgagatcgagcccaagctgctgggcaagctgaaggacatcatcaagagacaccagggcaccgtgaccgaggacaagaacaacgccagccacgtggtgtaccccgtgcccggcaacctggaggaggaggagtgggtgagacccgtgatgaagagagacaagcaggtgctgctgcactggggctactaccccgacagctacgacacctggatccccgccagcgagatcgaggccagcgtggaggacgcccccacccccgagaagcccagaaaggtgcacgccaagtggatcctggacaccgacaccttcaacgagtggatgaacgaggaggactacgaggtgaacgacgacaagaaccccgtgagcagaagaaagaagatcagcgccaagaccctgaccgacgaggtgaacagccccgacagcgacagaagagacaagaagggcggcaactacaagaagagaaagagaagccccagccccagccccacccccgaggccaagaagaagaacgccaagaagggccccagcaccccctacaccaagagcaagagaggccacagagaggaggagcaggaggacctgaccaaggacatggacgagcccagccccgtgcccaacgtggaggaggtgaccctgcccaagaccgtgaacaccaagaaggacagcgagagcgcccccgtgaagggcggcaccatgaccgacctggacgagcaggaggacgagagcatggagaccaccggcaaggacgaggacgagaacagcaccggcaacaagggcgagcagaccaagaaccccgacctgcacgaggacaacgtgaccgagcagacccaccacatcatcatccccagctacgccgcctggttcgactacaacagcgtgcacgccatcgagagaagagccctgcccgagttcttcaacggcaagaacaagagcaagacccccgagatctacctggcctacagaaacttcatgatcgacacctacagactgaacccccaggagtacctgaccagcaccgcctgcagaagaaacctggccggcgacgtgtgcgccatcatgagagtgcacgccttcctggagcagtggggcctgatcaactaccaggtggacgccgagagcagacccacccccatgggccccccccccaccagccacttccacgtgctggccgacacccccagcggcctggtgcccctgcagcccaagaccccccagggcagacaggtggacgccgacaccaaggccggcagaaagggcaaggagctggacgacctggtgcccgagaccgccaagggcaagcccgagctgcagaccagcgccagccagcagatgctgaacttccccgacaagggcaaggagaagcccaccgacatgcagaacttcggcctgagaaccgacatgtacaccaagaagaacgtgcccagcaagagcaaggccgccgccagcgccaccagagagtggaccgagcaggagaccctgctgctgctggaggccctggagatgtacaaggacgactggaacaaggtgagcgagcacgtgggcagcagaacccaggacgagtgcatcctgcacttcctgagactgcccatcgaggacccctacctggaggacagcgaggccagcctgggccccctggcctaccagcccatccccttcagccagagcggcaaccccgtgatgagcaccgtggccttcctggccagcgtggtggaccccagagtggccagcgccgccgccaagagcgccctggaggagttcagcaagatgaaggaggaggtgcccaccgccctggtggaggcccacgtgagaaaggtggaggaggccgccaaggtgaccggcaaggccgaccccgccttcggcctggagagcagcggcatcgccggcaccaccagcgacgagcccgagagaatcgaggagagcggcaacgacgaggccagagtggagggccaggccaccgacgagaagaaggagcccaaggagcccagagagggcggcggcgccatcgaggaggaggccaaggagaagaccagcgaggcccccaagaaggacgaggagaagggcaaggagggcgacagcgagaaggagagcgagaagagcgacggcgaccccatcgtggaccccgagaaggagaaggagcccaaggagggccaggaggaggtgctgaaggaggtggtggagagcgagggcgagagaaagaccaaggtggagagagacatcggcgagggcaacctgagcaccgccgccgccgccgccctggccgccgccgccgtgaaggccaagcacctggccgccgtggaggagagaaagatcaagagcctggtggccctgctggtggagacccagatgaagaagctggagatcaagctgagacacttcgaggagctggagaccatcatggacagagagagagaggccctggagtaccagagacagcagctgctggccgacagacaggccttccacatggagcagctgaagtacgccgagatgagagccagacagcagcacttccagcagatgcaccagcagcagcagcagcccccccccgccctgccccccggcagccagcccatcccccccaccggcgccgccggcccccccgccgtgcacggcctggccgtggcccccgccagcgtggtgcccgcccccgccggcagcggcgccccccccggcagcctgggccccagcgagcagatcggccaggccggcagcaccgccggcccccagcagcagcagcccgccggcgccccccagcccggcgccgtgccccccggcgtgcccccccccggcccccacggccccagccccttccccaaccagcagaccccccccagcatgatgcccggcgccgtgcccggcagcggccaccccggcgtggccgaccccggcacccccctgccccccgaccccaccgcccccagccccggcaccgtgacccccgtgccccccccccagtag

SEQ ID NO: 282365 - DNA, 3459 bp, Artificial Sequence
  derived and/or modified sequence
atggccgtgagaaagaaggacggcggccccaacgtgaagtactacgaggccgccgacaccgtgacccagttcgacaacgtgagactgtggctgggcaagaactacaagaagtacatccaggccgagccccccaccaacaagagcctgagcagcctggtggtgcagctgctgcagttccaggaggaggtgttcggcaagcacgtgagcaacgcccccctgaccaagctgcccatcaagtgcttcctggacttcaaggccggcggcagcctgtgccacatcctggccgccgcctacaagttcaagagcgaccagggctggagaagatacgacttccagaaccccagcagaatggacagaaacgtggagatgttcatgaccatcgagaagagcctggtgcagaacaactgcctgagcagacccaacatcttcctgtgccccgagatcgagcccaagctgctgggcaagctgaaggacatcatcaagagacaccagggcaccgtgaccgaggacaagaacaacgccagccacgtggtgtaccccgtgcccggcaacctggaggaggaggagtgggtgagacccgtgatgaagagagacaagcaggtgctgctgcactggggctactaccccgacagctacgacacctggatccccgccagcgagatcgaggccagcgtggaggacgcccccacccccgagaagcccagaaaggtgcacgccaagtggatcctggacaccgacaccttcaacgagtggatgaacgaggaggactacgaggtgaacgacgacaagaaccccgtgagcagaagaaagaagatcagcgccaagaccctgaccgacgaggtgaacagccccgacagcgacagaagagacaagaagggcggcaactacaagaagagaaagagaagccccagccccagccccacccccgaggccaagaagaagaacgccaagaagggccccagcaccccctacaccaagagcaagagaggccacagagaggaggagcaggaggacctgaccaaggacatggacgagcccagccccgtgcccaacgtggaggaggtgaccctgcccaagaccgtgaacaccaagaaggacagcgagagcgcccccgtgaagggcggcaccatgaccgacctggacgagcaggaggacgagagcatggagaccaccggcaaggacgaggacgagaacagcaccggcaacaagggcgagcagaccaagaaccccgacctgcacgaggacaacgtgaccgagcagacccaccacatcatcatccccagctacgccgcctggttcgactacaacagcgtgcacgccatcgagagaagagccctgcccgagttcttcaacggcaagaacaagagcaagacccccgagatctacctggcctacagaaacttcatgatcgacacctacagactgaacccccaggagtacctgaccagcaccgcctgcagaagaaacctggccggcgacgtgtgcgccatcatgagagtgcacgccttcctggagcagtggggcctgatcaactaccaggtggacgccgagagcagacccacccccatgggccccccccccaccagccacttccacgtgctggccgacacccccagcggcctggtgcccctgcagcccaagaccccccagggcagacaggtggacgccgacaccaaggccggcagaaagggcaaggagctggacgacctggtgcccgagaccgccaagggcaagcccgagctgcagaccagcgccagccagcagatgctgaacttccccgacaagggcaaggagaagcccaccgacatgcagaacttcggcctgagaaccgacatgtacaccaagaagaacgtgcccagcaagagcaaggccgccgccagcgccaccagagagtggaccgagcaggagaccctgctgctgctggaggccctggagatgtacaaggacgactggaacaaggtgagcgagcacgtgggcagcagaacccaggacgagtgcatcctgcacttcctgagactgcccatcgaggacccctacctggaggacagcgaggccagcctgggccccctggcctaccagcccatccccttcagccagagcggcaaccccgtgatgagcaccgtggccttcctggccagcgtggtggaccccagagtggccagcgccgccgccaagagcgccctggaggagttcagcaagatgaaggaggaggtgcccaccgccctggtggaggcccacgtgagaaaggtggaggaggccgccaaggtgaccggcaaggccgaccccgccttcggcctggagagcagcggcatcgccggcaccaccagcgacgagcccgagagaatcgaggagagcggcaacgacgaggccagagtggagggccaggccaccgacgagaagaaggagcccaaggagcccagagagggcggcggcgccatcgaggaggaggccaaggagaagaccagcgaggcccccaagaaggacgaggagaagggcaaggagggcgacagcgagaaggagagcgagaagagcgacggcgaccccatcgtggaccccgagaaggagaaggagcccaaggagggccaggaggaggtgctgaaggaggtggtggagagcgagggcgagagaaagaccaaggtggagagagacatcggcgagggcaacctgagcaccgccgccgccgccgccctggccgccgccgccgtgaaggccaagcacctggccgccgtggaggagagaaagatcaagagcctggtggccctgctggtggagacccagatgaagaagctggagatcaagctgagacacttcgaggagctggagaccatcatggacagagagagagaggccctggagtaccagagacagcagctgctggccgacagacaggccttccacatggagcagctgaagtacgccgagatgagagccagacagcagcacttccagcagatgcaccagcagcagcagcagcccccccccgccctgccccccggcagccagcccatcccccccaccggcgccgccggcccccccgccgtgcacggcctggccgtggcccccgccagcgtggtgcccgcccccgccggcagcggcgccccccccggcagcctgggccccagcgagcagatcggccaggccggcagcaccgccggcccccagcagcagcagcccgccggcgccccccagcccggcgccgtgccccccggcgtgcccccccccggcccccacggccccagccccttccccaaccagcagaccccccccagcatgatgcccggcgccgtgcccggcagcggccaccccggcgtggccgcccagagccccgccatcgtggccgccgtgcagggcaacctgctgcccagcgccagccccctgcccgaccccggcacccccctgccccccgaccccaccgcccccagccccggcaccgtgacccccgtgccccccccccagtag

SEQ ID NO: 282366 - DNA, 3393 bp, Artificial Sequence
  derived and/or modified sequence
atggctgtgcggaaaaaggatggcggcccaaatgtgaagtactacgaggcagcggacacggttacacaatttgacaacgtaagattatggctgggcaagaattacaagaaatacatacaggcagagcccccaaccaataaatctctgtcaagtttggtcgtacaactgctgcaatttcaggaggaagtgttcggcaagcatgttagcaatgccccactgactaagctccccattaagtgtttcctggacttcaaagccgggggctccttgtgccatattcttgccgctgcgtacaagtttaagagtgaccaaggctggcgcaggtacgattttcagaacccttcacgcatggaccgaaacgtagaaatgtttatgaccattgagaagtcgctggtccaaaataactgtctatctaggccgaacatttttctttgcccagagattgagccaaagttgctcggcaagctcaaggacattatcaagcggcatcagggcacggtaacggaggataagaacaatgcaagtcacgttgtgtacccagtgccaggcaatttggaagaagaagagtgggtacggccagtcatgaaaagggataagcaggtgctcctgcattggggctactatccagatagttacgacacttggatccctgcatccgagatcgaagcgtcggtcgaggatgcgcccacccccgaaaaacctaggaaggtgcacgctaagtggattctggacactgacacgttcaacgagtggatgaatgaggaggactatgaggtgaacgacgataagaaccccgtgtctcggcgcaaaaaaatatctgccaagactctgactgatgaagtgaactcaccggattctgacagaagagacaaaaaaggaggcaattacaagaagcgaaaacggtccccttctcctagcccaacccccgaggccaagaagaagaatgccaagaagggaccgtcgacaccttataccaagagcaagcgcggccacagagaggaagaacaggaggatctgacaaaggacatggacgagcctagcccagtgccaaacgtggaggaggtcaccctccctaagacagttaatactaagaaagacagcgaatctgctcccgtcaaggggggcacaatgaccgacctggacgagcaggaggatgaatctatggaaactactggtaaggacgaagacgagaattctacagggaataagggagaacagactaaaaacccggatctacacgaagataacgtcacagagcagactcaccatatcatcatccccagctacgccgcctggtttgattataactcggtccatgcaatcgagaggcgtgcccttcccgagttcttcaatgggaagaataaatcaaaaacccctgagatttatttagcatatcggaactttatgattgacacataccggctaaatcctcaggagtacctcaccagcaccgcctgtcgaaggaaccttgctggggacgtttgcgcaataatgagggttcatgccttccttgaacagtggggcctaattaactaccaggttgatgcagaatctcgccccacacctatgggaccaccccccacgtcccacttccatgtgttggcagatacaccttctggcctcgttccacttcagcctaaaacaccccagggacggcaggtagacgccgataccaaggctggccgcaaaggtaaagagttagacgacttggttccagaaactgctaaagggaagccggagctgcagaccagcgcatctcaacagatgctgaacttccctgacaaaggcaaggaaaaaccgaccgatatgcaaaattttgggttaaggacagacatgtacacaaagaagaacgtgccctcaaaatctaaggcagcagcatctgctacaagagagtggactgagcaggagaccctccttctgttggaggccctagaaatgtacaaggacgactggaacaaggtttccgagcatgttggaagtcggacgcaggacgagtgcattctgcatttcctgcgcctccctatcgaggacccatatctggaggatagcgaggctagcctcggccccttagcataccaacctatcccattctctcagagcggcaatccagtgatgtcgactgtggcattcctggcctctgtggtggatccaagagttgcctcagctgcagccaaatcagctcttgaagagttttccaaaatgaaggaagaggtacccaccgcattagtggaggcccatgtcaggaaagtcgaggaggcagcaaaggtgactggcaaagccgatccagcattcggcctggagtcttccggaattgctggcactacctccgacgaacccgagcgaattgaagagtctgggaatgacgaggcccgcgttgagggccaagcgacagatgaaaagaaagagcctaaagagccccgcgagggtggcggggctattgaagaagaggccaaggaaaagaccagtgaggcgcccaaaaaggacgaggagaagggaaaagaaggcgattcagaaaaggagagcgaaaagagtgacggtgaccccattgtggatccagagaaggagaaggagcctaaagaaggccaggaagaagtacttaaagaggtggtcgagagcgagggcgaacgcaagactaaggttgaaagagacataggggagggcaatttgagcactgcagccgcagccgcccttgctgcagccgctgtcaaagccaaacaccttgcggcagtggaggagcgaaagataaaatcactggtggctttgctcgtggagacccagatgaagaagttggagataaagctcagacatttcgaggaacttgagactataatggacagagaacgggaggctttggaataccaaaggcaacagctgctggccgatcgccaggcctttcacatggagcagctgaaatacgccgagatgcgagcaagacaacagcactttcaacagatgcaccagcaacagcagcaacctcctcctgcactgcccccaggaagccagcccatcccacctactggggcagctggtcctcctgccgttcatggactagcagtagctccagctagtgtcgtaccagctcctgcaggctctggtgcccctcccggatcactgggcccctctgaacagattgggcaggccgggagcaccgccggaccacagcagcagcagccagctggagccccgcagcctggggcagtccctccaggcgtgccgccaccagggcctcatgggcccagcccatttcctaaccagcagacacccccaagtatgatgcctggagctgtccccggctctggccatccaggagttgcagatcctgggacccctttaccaccagacccaaccgctccctcacccgggacagtaaccccggtgccacctccccagtag

SEQ ID NO: 282367 - DNA, 3459 bp, Artificial Sequence
  derived and/or modified sequence
atggctgtgagaaagaaggatggaggtccaaatgtcaaatactacgaagccgcagacactgtgacgcagtttgataatgtgcgtttgtggcttgggaagaactataagaaatatatccaggccgagcccccaaccaacaagtcactgtcctctcttgtggtgcaacttctgcagtttcaagaggaggtctttggaaagcacgtatcaaatgctccactcaccaaactgccgatcaaatgtttcctggattttaaagctgggggaagtctatgtcatatactggctgccgcctataaattcaagtcagatcagggctggagaaggtacgatttccagaatccttctcggatggaccgtaacgtcgaaatgtttatgacgatcgagaagagtcttgtccaaaataactgtctcagccgaccaaacatatttctgtgccccgagattgaacctaaattattaggcaaattaaaagacatcataaaacggcatcaggggacagtgacagaggacaagaacaacgcgtcccatgttgtttaccctgtccctgggaacctggaagaggaggaatgggtgagacctgttatgaagcgagacaaacaagtgcttcttcattgggggtactatcctgactcatacgatacttggatccccgcttcagagatcgaagccagcgtcgaggatgcccccacccccgaaaagcctcgcaaggtccatgctaaatggattctcgacacagatacctttaacgaatggatgaacgaggaggattacgaagtgaatgacgataagaacccagtgtccagacggaaaaagatctcagccaagacactcacagacgaggtgaatagcccagactcagatcgacgagataaaaagggcgggaattataagaaacggaaacgatccccctccccttcccccacacctgaggccaaaaagaagaacgctaaaaagggcccttctacaccctatactaaatccaaacgagggcaccgggaagaagagcaagaagatctcaccaaggacatggacgagcctagccctgtgcccaacgtggaagaagtgacacttcccaaaacagtgaatacaaagaaagatagtgagtccgcaccagtgaaagggggaaccatgacagatttggacgagcaagaggatgaatccatggagaccaccggtaaagatgaggatgagaactcaacagggaataagggagagcagacgaagaaccccgatttacatgaggataacgtgacggaacaaacccatcacatcattattccttcctacgccgcctggtttgactacaatagtgtgcatgcaatcgaacgcagagcactccctgaattttttaatggcaagaataaatctaaaacacctgagatctacctggcttatcgaaactttatgattgatacctatcgactgaacccgcaggaatacctcacgtccactgcctgtaggcggaaccttgccggtgacgtctgtgctataatgagagtccacgcctttctagagcagtggggcttgatcaattaccaggtggatgcagagagtaggccaacccctatggggcctccgcccacaagccatttccatgtcctggcggatactccttctggcctcgtccccctgcagcccaagaccccccaggggcgccaggtggatgcagacaccaaagctggaagaaaagggaaagaactagatgacctagtacccgaaactgccaagggtaagcctgagctacaaacaagtgccagccaacagatgttaaatttccctgacaaaggtaaggaaaaaccaaccgatatgcagaatttcggcctgagaacggatatgtacaccaagaagaatgtcccgtcaaagagcaaggccgccgcatccgcaactcgggagtggacggaacaggagacacttcttctgctggaagcgcttgaaatgtataaagacgattggaacaaggtgtcagagcacgttggcagcaggacccaagacgagtgcatccttcactttctacgactacccatcgaagatccctatcttgaagatagcgaagcctctttaggcccattggcgtatcaaccaattcccttctcccaatcaggcaatccagtgatgagtacggtggccttccttgcaagcgtggtggacccgagggtggcatctgcggccgcgaaatccgctctggaggagttctcaaaaatgaaggaagaggttccaacagctcttgtggaagctcatgttaggaaggtggaggaggcagccaaagttacggggaaagccgatcctgcatttggtttggagtcgagtgggatagccggtactaccagcgatgagcccgagagaattgaagaatcaggaaatgacgaggcacgggtggaagggcaggcaacggatgagaaaaaggaacctaaagagccgcgcgagggcggtggggccattgaagaggaagcaaaggagaagacaagcgaggcacccaagaaagacgaggaaaagggcaaagagggagacagcgagaaggagagtgaaaaatccgatggagatcccatcgtagaccccgagaaggaaaaagaacctaaggaaggacaggaggaggtgctcaaggaggtcgttgagtcagagggagagcgcaagactaaggttgaaagggatatcggggaggggaacttatccacagccgctgcggcagctctcgctgcagctgccgtgaaagcaaaacatctggcagccgtggaggaacggaaaattaaatcgttagtggccctgttggtagagacacagatgaaaaagcttgagataaaacttcggcactttgaggagttagagacgattatggatagagaaagagaggctctagaataccagcgtcagcagctgctagccgatcgccaggctttccacatggagcagcttaaatacgccgagatgagggcccgccaacagcactttcagcaaatgcatcagcagcaacagcagcctcctcccgcgctcccaccaggctcccaaccaattccacctactggcgctgccgggcctcctgctgtgcatggcctggcagtagctcccgcaagcgtcgtacctgctccggccggtagcggagcacctcctgggtccctgggcccttccgaacagatcggacaggccggtagcaccgcaggaccacaacaacagcagcccgccggcgcaccacagcccggggctgtgcctcccggggtgcccccccctgggccacatggccccagcccctttcctaaccagcagaccccaccaagcatgatgcccggcgcagtgcctggtagcggtcacccaggagtggccgcacagtcccccgcaattgtcgccgctgtgcaaggaaatcttttgccctctgcttccccactgcccgacccgggtacacctcttccccccgaccccacagcgccatcccctggcaccgtgacccctgtcccacccccccagtag

SEQ ID NO: 282368 - DNA, 3393 bp, Artificial Sequence
  derived and/or modified sequence
atggctgtgaggaagaaggatggcggccccaacgtgaagtactatgaagctgctgacacagtgacccagtttgacaacgtgcggctgtggctgggcaagaactacaagaagtacatccaggccgagccccccaccaacaagagcctgagcagcctggtggtgcagctgctgcagttccaggaggaggtgtttgggaagcacgtgtccaatgcccccctgaccaagctgcccatcaagtgcttcctggacttcaaggccggcggcagcctgtgccacatcctggccgccgcctacaagttcaagagtgaccagggctggaggagatatgacttccagaaccccagcaggatggacagaaatgtggagatgttcatgaccatcgagaagagcctggtgcagaacaactgcctgagccggcccaacatcttcctgtgcccagaaattgagcccaagctgctgggcaagctgaaggacatcatcaagaggcaccagggcaccgtgacagaggacaagaacaatgccagccacgtggtgtaccctgtgcccggcaacctggaggaggaggagtgggtgcggcctgtgatgaagagggacaagcaggtgctgctgcactggggctactacccagacagctatgacacctggatcccagccagcgagattgaggcctctgtggaggatgcccccaccccagagaagcccaggaaggtgcacgccaagtggatcctggacacagacaccttcaatgagtggatgaatgaagaagattatgaggtgaatgatgacaagaaccctgtgtccaggaggaagaagatcagcgccaagaccctgacagatgaggtgaacagcccagacagcgaccggcgggacaagaagggcggcaactacaagaagaggaagaggagccccagccccagccccaccccagaggccaagaagaagaatgccaagaagggccccagcaccccctacaccaagagcaagaggggccaccgggaggaggagcaggaggacctgaccaaggacatggatgagcccagccctgtgcccaacgtggaggaggtgaccctgcccaagacagtgaacaccaagaaggacagcgagagcgcccctgtgaagggcggcaccatgacagacctggatgagcaggaggatgagagcatggagaccaccgggaaggatgaagatgagaacagcacaggcaacaagggggagcagaccaagaacccagacctgcacgaggacaacgtgacagagcagacccaccacatcatcatccccagctatgctgcctggtttgactacaacagcgtgcacgccattgaaagaagagccctgcctgagttcttcaacgggaagaacaagagcaagaccccagagatctacctggcctacagaaacttcatgattgacacctaccgcctgaacccccaggagtacctgaccagcacagcctgcagaagaaacctggccggagatgtgtgtgccatcatgagggtgcacgccttcctggagcagtggggcctcatcaactaccaggtggatgctgagagccggcccacccccatgggccccccacccaccagccacttccacgtgctggccgacaccccatctggcctggtgcccctgcagcccaagaccccccagggccggcaggtggatgctgacaccaaggccggcaggaagggcaaggagctggatgacctggtgcctgagacagccaagggcaagccagagctgcagaccagcgccagccagcagatgctgaacttcccagacaagggcaaggagaagcccacagacatgcagaactttggcctgaggacagacatgtacaccaagaagaatgtgcccagcaagagcaaggctgctgccagcgccacccgggagtggacagagcaggagaccctgctgctgctggaggccctggagatgtacaaggatgactggaacaaggtgtctgaacatgtgggcagcaggacccaggatgagtgcatcctgcacttcctgcggctgcccatcgaggacccctacctggaggacagcgaggccagcctgggccccctggcctaccagcccatccccttcagccagagcggcaaccctgtgatgagcacagtggccttcctggcctctgtggtggacccccgggtggccagcgctgctgccaagagcgccctggaggagttcagcaagatgaaggaggaggtgcccacagccctggtggaggcccacgtgaggaaggtggaggaggccgccaaggtgacaggcaaggctgaccctgccttcggcctggagagcagcggcattgctggcaccaccagtgatgagcctgagcgcatcgaggagagcggaaatgatgaggcccgggtggagggccaggccacagatgagaagaaggagcccaaggagccccgggagggcggcggggccatcgaggaggaggccaaggagaagaccagcgaggcccccaagaaggatgaggagaagggcaaggagggggacagcgagaaggagagcgagaagagtgatggagaccccatcgtggaccctgagaaggagaaggagcccaaggagggccaggaggaggtgctgaaggaggtggtggagagcgagggggagaggaagaccaaggtggagcgggacatcggggagggcaacctgagcacagctgctgctgctgccctggccgctgctgctgtgaaggccaagcacctggccgctgtggaggagaggaagatcaagagcctggtggccctgctggtggagacccagatgaagaagctggagatcaagctgcggcactttgaggagctggagaccatcatggaccgggagcgggaggccctggagtaccagaggcagcagctgctggccgaccggcaggccttccacatggagcagctgaagtatgcagagatgagggcccggcagcagcacttccagcagatgcaccagcagcagcagcagcccccaccagccctgcccccaggcagccagcccatcccccccaccggggctgctggccccccagctgtgcacggcctggccgtggccccagcctctgtggtgcctgccccagctggcagcggggcccctcctggcagcctgggccccagcgagcagatcggccaggccggcagcacagctggcccccagcagcagcagcctgctggggccccccagcccggggctgtgcccccaggagtgcccccacctggcccccacggccccagccccttccccaaccagcagaccccacccagcatgatgcctggagctgtgcccggcagcggccaccctggggtggccgaccccggcacccccctgcccccagaccccacagcccccagccctggcaccgtgacccctgtgcccccaccccagtag

SEQ ID NO: 282369 - DNA, 3459 bp, Artificial Sequence
  derived and/or modified sequence
atggctgtgaggaagaaggatggcggccccaacgtgaagtactatgaagctgctgacacagtgacccagtttgacaacgtgcggctgtggctgggcaagaactacaagaagtacatccaggccgagccccccaccaacaagagcctgagcagcctggtggtgcagctgctgcagttccaggaggaggtgtttgggaagcacgtgtccaatgcccccctgaccaagctgcccatcaagtgcttcctggacttcaaggccggcggcagcctgtgccacatcctggccgccgcctacaagttcaagagtgaccagggctggaggagatatgacttccagaaccccagcaggatggacagaaatgtggagatgttcatgaccatcgagaagagcctggtgcagaacaactgcctgagccggcccaacatcttcctgtgcccagaaattgagcccaagctgctgggcaagctgaaggacatcatcaagaggcaccagggcaccgtgacagaggacaagaacaatgccagccacgtggtgtaccctgtgcccggcaacctggaggaggaggagtgggtgcggcctgtgatgaagagggacaagcaggtgctgctgcactggggctactacccagacagctatgacacctggatcccagccagcgagattgaggcctctgtggaggatgcccccaccccagagaagcccaggaaggtgcacgccaagtggatcctggacacagacaccttcaatgagtggatgaatgaagaagattatgaggtgaatgatgacaagaaccctgtgtccaggaggaagaagatcagcgccaagaccctgacagatgaggtgaacagcccagacagcgaccggcgggacaagaagggcggcaactacaagaagaggaagaggagccccagccccagccccaccccagaggccaagaagaagaatgccaagaagggccccagcaccccctacaccaagagcaagaggggccaccgggaggaggagcaggaggacctgaccaaggacatggatgagcccagccctgtgcccaacgtggaggaggtgaccctgcccaagacagtgaacaccaagaaggacagcgagagcgcccctgtgaagggcggcaccatgacagacctggatgagcaggaggatgagagcatggagaccaccgggaaggatgaagatgagaacagcacaggcaacaagggggagcagaccaagaacccagacctgcacgaggacaacgtgacagagcagacccaccacatcatcatccccagctatgctgcctggtttgactacaacagcgtgcacgccattgaaagaagagccctgcctgagttcttcaacgggaagaacaagagcaagaccccagagatctacctggcctacagaaacttcatgattgacacctaccgcctgaacccccaggagtacctgaccagcacagcctgcagaagaaacctggccggagatgtgtgtgccatcatgagggtgcacgccttcctggagcagtggggcctcatcaactaccaggtggatgctgagagccggcccacccccatgggccccccacccaccagccacttccacgtgctggccgacaccccatctggcctggtgcccctgcagcccaagaccccccagggccggcaggtggatgctgacaccaaggccggcaggaagggcaaggagctggatgacctggtgcctgagacagccaagggcaagccagagctgcagaccagcgccagccagcagatgctgaacttcccagacaagggcaaggagaagcccacagacatgcagaactttggcctgaggacagacatgtacaccaagaagaatgtgcccagcaagagcaaggctgctgccagcgccacccgggagtggacagagcaggagaccctgctgctgctggaggccctggagatgtacaaggatgactggaacaaggtgtctgaacatgtgggcagcaggacccaggatgagtgcatcctgcacttcctgcggctgcccatcgaggacccctacctggaggacagcgaggccagcctgggccccctggcctaccagcccatccccttcagccagagcggcaaccctgtgatgagcacagtggccttcctggcctctgtggtggacccccgggtggccagcgctgctgccaagagcgccctggaggagttcagcaagatgaaggaggaggtgcccacagccctggtggaggcccacgtgaggaaggtggaggaggccgccaaggtgacaggcaaggctgaccctgccttcggcctggagagcagcggcattgctggcaccaccagtgatgagcctgagcgcatcgaggagagcggaaatgatgaggcccgggtggagggccaggccacagatgagaagaaggagcccaaggagccccgggagggcggcggggccatcgaggaggaggccaaggagaagaccagcgaggcccccaagaaggatgaggagaagggcaaggagggggacagcgagaaggagagcgagaagagtgatggagaccccatcgtggaccctgagaaggagaaggagcccaaggagggccaggaggaggtgctgaaggaggtggtggagagcgagggggagaggaagaccaaggtggagcgggacatcggggagggcaacctgagcacagctgctgctgctgccctggccgctgctgctgtgaaggccaagcacctggccgctgtggaggagaggaagatcaagagcctggtggccctgctggtggagacccagatgaagaagctggagatcaagctgcggcactttgaggagctggagaccatcatggaccgggagcgggaggccctggagtaccagaggcagcagctgctggccgaccggcaggccttccacatggagcagctgaagtatgcagagatgagggcccggcagcagcacttccagcagatgcaccagcagcagcagcagcccccaccagccctgcccccaggcagccagcccatcccccccaccggggctgctggccccccagctgtgcacggcctggccgtggccccagcctctgtggtgcctgccccagctggcagcggggcccctcctggcagcctgggccccagcgagcagatcggccaggccggcagcacagctggcccccagcagcagcagcctgctggggccccccagcccggggctgtgcccccaggagtgcccccacctggcccccacggccccagccccttccccaaccagcagaccccacccagcatgatgcctggagctgtgcccggcagcggccaccctggggtggccgcccagagccctgccatcgtggccgctgtgcagggcaacctgctgcccagcgccagccccctgcctgaccccggcacccccctgcccccagaccccacagcccccagccctggcaccgtgacccctgtgcccccaccccagtag

SEQ ID NO: 282370 - DNA, 3393 bp, Artificial Sequence
  derived and/or modified sequence
atggccgtgcggaagaaggacggcggccccaacgtgaagtactacgaagccgccgacactgttacacaatttgataacgttagactctggctgggcaaaaattacaagaaatacattcaggcagagccccctacgaataagagtctgtcttctctcgtcgtgcaactcctacagtttcaggaggaggtgttcgggaagcacgtctccaacgccccacttactaaactgcctatcaaatgcttcctggattttaaggccggaggctccctttgtcatattcttgcagctgcttacaagtttaaatccgaccagggatggaggagatatgacttccaaaatccttcccgaatggaccgcaatgtcgagatgtttatgacaattgagaagtctttggtgcagaataactgcctgtccaggccgaacatctttctctgccccgagatcgagccaaagcttctggggaaactcaaagatatcatcaaacggcatcagggcactgtgacagaggacaaaaacaatgcttcacatgtggtctatcccgtccctgggaacttggaggaagaagaatgggtacgacccgtcatgaaaagggacaaacaagttctcctccattggggatattatccagacagctacgacacatggatccctgcttccgaaatcgaagctagcgtggaagatgcacctacccccgaaaagccaagaaaggtgcacgctaaatggatccttgacacggatacctttaatgaatggatgaacgaggaggactacgaggtcaacgatgacaaaaacccagtgtcccggaggaaaaagatcagcgcaaagacactgacggacgaagtgaacagtccggactccgaccggagagacaagaagggaggaaactacaaaaaaagaaagaggtctccatcacccagtcctaccccagaggctaagaagaagaacgcgaaaaagggccctagcaccccttacacaaaatcaaagagaggccatagggaggaagaacaggaggacttaacaaaggacatggacgaaccctcccccgtgcctaacgtggaagaggtgaccctcccaaaaactgtgaacacaaaaaaagattcagagagcgcccccgttaaagggggcacaatgaccgacttggacgaacaggaagacgagtcgatggagaccacaggcaaagatgaagatgagaatagcactggaaacaagggtgaacagaccaagaaccccgatctccacgaggataatgtgaccgagcagactcaccacattatcataccttcctacgccgcatggtttgattacaatagcgtgcatgctattgagcggcgcgccttgcccgagttcttcaatggaaaaaacaaaagtaaaacacctgagatctatctagcttacagaaactttatgatcgatacttaccgccttaatccccaggagtatttaacttccactgcctgcaggagaaacttggcgggcgatgtgtgtgcaatcatgcgcgtacacgccttcctggaacaatggggactgatcaattaccaggtagatgccgaaagccgccccaccccgatggggcccccccctacttcccacttccacgttctggccgacactccttctggactggtccctctccagcccaagacgcctcagggacggcaggttgacgccgacacaaaggcgggaagaaaaggcaaggagctggatgatttggtaccggagaccgccaaggggaagccggagctgcagacaagcgcatcacagcaaatgctgaatttccctgacaagggcaaggagaaacccacggacatgcagaactttggcctcagaaccgatatgtacacgaaaaagaacgttccctctaaatcaaaggcagctgcatctgccactcgcgagtggacagagcaggaaactctgctgctcctcgaagcattagagatgtacaaggatgactggaacaaggtctctgagcatgtggggtcacgtacgcaggatgaatgtatcctgcactttttgagactgcccatagaagacccctacctggaagactctgaggcctcactgggaccactcgcttatcagcctatccctttctcccagtcaggaaaccctgtaatgtcaaccgtggcgttcctcgcaagcgtggtcgatcccagggtggcttctgcggccgctaagtccgccttggaagaattctcaaaaatgaaggaagaagtgcccacagccctggtggaggcccatgttcgaaaagtagaggaggcagccaaagtgacgggtaaagcagatcctgcctttgggctcgagagcagtgggattgcaggtactacatccgatgagcccgagaggatcgaagagagtggcaacgatgaagcacgtgtggaaggtcaagccacagacgagaaaaaggaaccaaaagaacctagagaaggcggaggcgcaatcgaagaagaagccaaagagaagacgtccgaggctcccaaaaaggacgaggaaaaaggtaaggaaggggactcggaaaaggagtcggagaagagtgatggggaccccatcgtggaccctgagaaagaaaaagaaccgaaagaaggacaagaagaagtcttgaaggaagttgttgaatcagagggagagagaaagacaaaggtcgaacgggacattggcgagggaaatctgtcgacagcggccgccgcagctttggcagccgccgccgtgaaggctaagcacctcgctgccgtagaggagaggaagattaaatctcttgtggctctgcttgtggagacgcaaatgaaaaagttggaaattaagctgcgtcactttgaggagctggaaactattatggatcgggaaagggaggcacttgagtatcagcgacaacagctgctggcagatcgacaggccttccatatggaacagctgaagtacgctgaaatgagggcaaggcagcaacattttcaacagatgcaccaacagcagcagcagcccccaccggcgctccctcctggaagtcagcctattccacctaccggagccgccggccctccagcagtgcatggtcttgccgtggcccctgctagtgtagtgcccgcccccgccgggtcgggcgcaccgcctgggtccctgggtccatcggaacagatcggccaggccggcagcacagcggggccacagcagcagcagcccgccggagccccacagcctggcgccgtgccaccaggtgttcccccaccaggcccgcacgggccctccccattccctaatcagcagactcctccatctatgatgccaggcgcagtcccagggagcgggcatcccggagtggccgaccccggcacccccttacctcccgaccccacagctccttcccctggtactgtgactcctgtgcctcccccccagtag

SEQ ID NO: 282371 - DNA, 3459 bp, Artificial Sequence
  derived and/or modified sequence
atggccgtgcggaagaaggacggcggccccaacgtgaagtactacgaggctgccgacaccgtcacccaattcgataacgtgcggctgtggctcgggaaaaactataaaaagtacatccaggccgagccccctacgaataaatccctctctagcctcgtggtgcagctgctacagtttcaagaagaggtgttcggcaagcacgtcagcaatgcccctctgaccaagctccctattaaatgctttctcgacttcaaagccggaggctcattatgtcatatcctggcagcagcctataaatttaaatccgaccaaggttggcgacggtacgactttcagaatccatcccggatggatcggaacgttgagatgttcatgacgatcgagaagtcactggtacagaataactgtctatccagacccaacattttcttgtgtccggagatcgagcctaaactgctgggcaagcttaaagatataatcaaacgccaccagggaaccgtgacagaggacaagaataatgcctcacatgttgtatatcccgtgcccgggaacctggaggaggaggaatgggtccgccccgtgatgaaacgagataagcaagtgctgctgcactggggctactacccagacagttacgatacatggatccccgcctccgaaatcgaggcctctgtggaggatgcacctacaccggagaagccccggaaggtgcacgccaagtggattcttgatacagataccttcaatgagtggatgaacgaagaggattacgaggtgaatgacgacaagaatccagtcagcaggagaaagaagatctctgctaagacacttacggacgaagtaaatagcccagactccgacagacgagacaaaaaaggcggtaactacaagaagaggaaaaggtcccccagtcccagtccaacccccgaggccaaaaaaaaaaacgccaagaaaggaccttccacaccatatacaaagtccaagcggggccatagggaagaggagcaggaggacctgactaaagatatggacgagccaagccccgtgccaaacgttgaagaggtgacactgccaaaaactgtaaacacaaaaaaagattctgagtccgcccctgtgaagggaggaactatgaccgacctggatgaacaagaagatgagagcatggagaccacgggaaaggacgaagacgagaatagcaccggcaacaaaggtgagcagactaagaatcccgacctccatgaggacaatgtgactgagcagacacaccacatcataattccttcatatgctgcgtggtttgactacaacagcgtgcacgctatcgaacggagagcactacctgagttttttaacggtaaaaacaaaagcaaaactcccgagatctacctggcctacagaaactttatgatcgacacttaccggctgaacccccaagagtatttgacctccacagcatgccgccgcaacctggccggggacgtgtgtgccattatgcgggtacatgcattcctcgaacagtggggattaatcaattaccaggtggatgccgagtccaggcctactcctatgggccccccccccacgtcgcactttcacgtgctagccgacactccctcaggcttagtgcctttgcagcccaaaaccccccagggccgccaggtcgacgccgataccaaggccggccgcaaaggcaaagagctcgacgacctggtgccagagaccgccaaggggaagcccgaactacaaacatcagcctcacaacagatgttgaactttcccgataagggcaaagaaaaacccacagatatgcaaaacttcggactccggaccgacatgtacaccaagaaaaatgtgccctctaagagcaaggccgcagcaagcgctacaagagagtggacagaacaagaaacactcctcctgttagaagctctggagatgtataaggacgactggaacaaggtgagcgagcacgtggggagccgcacacaggatgagtgcatcctacattttttaaggctgcccattgaagatccatatctggaggatagtgaagcttccttgggcccgctagcctatcaaccaattccattctctcagtccggtaacccagtaatgtcaacagtagcattcctcgcctctgttgttgaccctcgagtagcatccgccgcagctaagagcgccctggaggagttttcgaagatgaaggaggaagttccaactgcactggtagaagcccatgtgcgcaaagtggaagaggcggcaaaggtcacaggcaaggccgaccccgcatttggtctcgagtccagtggaattgcggggactacaagcgatgaaccggagaggatcgaagaaagtggaaacgatgaagctagggtagagggacaggcaactgacgagaagaaggaaccaaaggagcctagagaaggaggtggggcgatcgaggaggaggccaaggagaagacctcggaggctcccaaaaaagacgaggagaagggaaaagagggggattctgagaaggaaagtgaaaagtcagacggggatcctattgtcgacccggagaaggagaaagaaccaaaggagggacaggaggaggttctcaaagaagttgtggagtccgagggcgaacgtaagacaaaagtggagcgtgatatcggagaaggtaatttgagcaccgcagctgccgcagcattggcagctgcggccgtcaaagccaaacacctggcagcggtcgaagaacgtaagattaagtccttagttgctctgctggtcgaaacacagatgaagaagctggagatcaagcttcggcactttgaggagttggagacgatcatggaccgcgagagagaagccttggaataccagaggcaacagctcctggctgataggcaggccttccacatggaacaactcaagtatgcagagatgcgggccaggcagcagcactttcaacagatgcatcagcagcagcagcagccgcctcccgccttgcctcccggctctcagccgatcccccctactggggccgcaggcccgcccgccgtgcacggtctagcagtcgcgccagcttcggttgtccctgcacctgccgggtcaggagcccccccaggttcgctgggcccatcagagcagatagggcaggccgggtctactgcaggccctcaacagcagcagcctgccggcgctccccagccaggagccgtgccgcccggggtgccccctccggggcctcacggcccatcaccattccctaaccagcagacgcccccttctatgatgcccggggccgtacctgggtcaggtcatcccggggttgcagcacagagtccagctatcgtcgccgccgtgcaagggaatttgttacccagcgctagtccgctgcctgatcctggtactccactccccccagaccccacagccccaagccccggaactgtgaccccggttcctccccctcaatag

SEQ ID NO: 282372 - DNA, 3393 bp, Artificial Sequence
  derived and/or modified sequence
atggctgtccggaagaaagatgggggtcccaatgtgaagtattacgaggccgctgacacggttacacagttcgacaacgtaagactctggctgggaaaaaattacaaaaaatacattcaggcggagccccctacaaataagagtctgtcttccctggttgttcaactgttgcaatttcaggaggaagtgtttggaaagcacgtgtccaacgcccctctgaccaaacttcccatcaaatgttttctagattttaaggcgggtggctccttgtgccatatcctggccgctgcctataaattcaaatccgatcaggggtggagacgctacgatttccagaatccatctcgcatggatcggaacgttgagatgtttatgacaattgaaaaatcattagtgcaaaataactgtctctctaggccaaatatttttctgtgccccgaaatcgaacccaagcttctcgggaagttaaaagatatcattaaacggcaccaaggcacagttactgaagataagaacaatgcatcacacgtcgtgtaccctgtccccggaaacctcgaagaagaagaatgggtgagacccgtcatgaaaagggacaagcaggtactgctccactggggctattaccccgatagttacgacacatggattccagccagcgagatcgaggcctccgtcgaagatgcccctacaccagagaagcctaggaaggtgcacgcaaagtggattctggatactgatacgtttaatgagtggatgaacgaagaggattatgaggtcaacgacgacaagaatccggtgagtaggaggaagaagataagtgcgaaaactttgactgatgaggtgaattcacccgactccgatcgcagagacaagaagggaggcaactataagaagcgcaaacgcagcccgtctcctagtccgacccccgaggcaaaaaagaaaaatgctaaaaagggcccttcgactccatacaccaagagcaaacgcggacatagggaggaggaacaggaggacctgacaaaagacatggatgaaccctcccctgtgcccaatgtcgaggaagtaactctgcccaagactgtcaatacaaaaaaggacagcgagagcgccccagtgaaggggggaacaatgacagatcttgacgagcaagaagatgaaagcatggagacgacagggaaagatgaggatgaaaacagcacaggtaataaaggcgagcaaaccaagaatcccgacctccacgaggataatgtgaccgaacagacccaccacatcatcatcccttcctatgcggcatggttcgattacaatagcgtgcatgccattgaaaggagagcgctgccggagttcttcaacggaaagaataagtctaagacccccgagatctatctggcttaccggaacttcatgattgacacctataggttgaatcctcaggagtaccttacttcaaccgcgtgcagacggaaccttgccggagatgtgtgcgcaataatgcgcgttcacgcatttctggaacagtggggactgatcaactaccaggtggacgccgagtctcgccctacgccgatgggaccaccacccacatcccacttccatgtactggcagataccccaagcgggctggtgccactgcaacctaagacccctcaggggagacaggtggacgcggacacaaaagccggtcgcaaaggaaaagagctcgatgatttggtgccagagacagcaaagggcaagcccgagcttcagacctcagcttcccagcaaatgctgaatttccctgataaggggaaagagaagcctacagatatgcaaaacttcggactccggaccgacatgtacactaagaaaaacgttccttcaaagtctaaggctgcagcttccgctactcgcgagtggactgagcaggaaactctgcttctgctggaagcgctcgagatgtataaggatgattggaataaggtatcagaacatgtgggtagccgcacacaggatgaatgtatcctgcactttctgcgcttacccattgaagacccctatctggaggattcagaagcctctctgggacctctggcctatcagcctatacctttcagccaatcgggcaaccccgtgatgtcaacagtggctttcttggctagtgtagtagacccacgcgtcgccagcgcagccgctaagagcgccctggaagagttctctaagatgaaagaagaagtgcccacagctctggttgaagcccacgtgcgcaaggtcgaagaggcagccaaggtcacaggaaaggcggatcccgctttcggcctcgaatctagcggcatcgccggtaccacaagtgacgaacccgaacggattgaggaaagcgggaacgatgaggctagggtagagggccaggctactgatgagaaaaaggagcccaaagaacccagggaaggcggaggagccattgaggaagaagccaaggaaaaaacttctgaagcaccaaagaaagacgaagaaaaaggcaaggagggagacagcgaaaaggagtctgaaaaatcggacggggaccctatagtggaccccgagaaggagaaagaacctaaagagggacaggaggaggttttaaaggaagtggttgagtctgaaggcgaacgaaagacaaaagtggagagggatattggagaaggcaatctgtcaactgcggcagccgctgccttggccgctgctgctgtgaaggcaaaacacctggctgccgtggaagaacggaaaattaagtcattagtggctctgctggtggagacgcagatgaagaaactggagattaaactgcggcactttgaggaactggaaacaattatggatcgtgagcgggaagccttggagtatcagagacagcagttgctggccgacaggcaagctttccacatggagcagttgaagtacgcagagatgcgcgcacgccagcaacacttccagcagatgcaccagcagcagcagcagccgccaccagctctgccaccgggaagccagcccattccaccgaccggcgctgccggaccaccggctgtgcatggcctcgccgtggccccagctagcgtcgtcccagcaccagctggatctggcgctccacccggaagcctcgggccttcggaacagattggccaagccggatcaacagccggaccccagcagcaacagccggcaggcgcacctcagcccggtgccgtccctcccggagtgccgcctccgggacctcatggtccttccccttttcccaaccagcagacccctcccagcatgatgcccggagctgtgccaggctccggccatcctggagtagctgatcctgggacaccactgccccctgaccccacagccccatctcctggaactgtaacccctgtaccgcctccgcagtag

SEQ ID NO: 282373 - DNA, 3459 bp, Artificial Sequence
  derived and/or modified sequence
atggctgtcaggaagaaagatggcggaccaaacgttaaatactatgaggcagccgataccgtgactcagttcgacaacgttagattgtggcttggaaaaaattataagaaatatatacaggccgaacctcccacgaacaagtctctatcctctttggtagtacagcttctgcaatttcaagaagaggtgttcggcaaacatgttagtaacgcacccctcacaaagttacctatcaaatgtttcctggactttaaggccggtggcagcttgtgccatatactcgcagccgcttacaagtttaagtccgaccaaggttggcggaggtacgatttccagaatccctcaaggatggaccggaatgtagagatgtttatgactatagaaaagtcgcttgtgcaaaacaactgcctaagtaggcccaacatctttttgtgtcccgagatcgaaccaaaactcctggggaaactgaaggacattatcaaacgccaccagggaacagttactgaggataaaaataatgcaagccacgtggtgtatcctgttcctgggaaccttgaagaagaggaatgggtgagaccagtcatgaaacgagataaacaggtgctattgcattggggatattatcctgattcatacgatacatggattcccgctagtgagatagaggcctccgttgaagacgcgccaacacccgaaaagccaagaaaggttcacgctaaatggatcctagatactgacaccttcaacgagtggatgaacgaagaggactatgaggtgaacgatgataagaatcctgtgagcaggcgcaaaaaaatcagtgcaaaaacgttgacagatgaagtgaacagtcctgacagtgaccggagggacaagaagggcggaaactataaaaaacggaaacgcagcccgtccccctcccccacccctgaagccaagaagaaaaacgcaaaaaagggtccatctaccccttacactaaaagcaaacgaggacatagagaggaggagcaggaggatttaactaaggacatggatgagccatctccagtaccaaatgtcgaggaagttacacttccaaaaaccgtcaacaccaaaaaagactccgagagcgcacccgtgaaagggggaaccatgacagacctggacgaacaagaggacgagagcatggagaccacaggcaaggatgaggatgagaatagcactgggaacaagggcgaacagacaaagaatccagacctgcacgaggacaacgttactgaacagacgcaccacattattataccttcgtacgctgcttggtttgattacaacagcgtgcatgcaatagaacggagggccctccctgagttttttaacggaaaaaacaaaagcaagactcctgaaatatacctcgcttaccgcaactttatgatagacacttatcgactgaaccctcaggaatatctgaccagcactgcgtgtagacgcaacctcgcaggagatgtctgcgccatcatgagggtccacgcctttctagaacagtgggggctgatcaattatcaagtggatgctgaatcacgccctacacccatgggacccccaccaacgtcccacttccacgtgctagcggatactccatccggtttagtccctctccaacccaagaccccccagggcaggcaggttgatgccgatacaaaggcaggacgcaaggggaaagaactggacgacctggtgcctgaaaccgctaagggcaagcctgagttacagacctccgcctctcagcagatgctgaatttccctgacaagggcaaggaaaagcccactgacatgcagaacttcggcctgaggaccgacatgtacaccaagaaaaatgttcccagtaagtcaaaagcagcagcaagtgccactagagagtggaccgagcaggagacactgctgctgctggaggcactggaaatgtacaaagacgattggaacaaagttagcgagcatgttgggagcagaacacaggatgaatgtatcttacactttctgcgcctgcccatcgaggatccctatttggaggattccgaggcttccctcgggcctttggcttaccagccaatcccctttagccagagtggaaacccagtgatgtctaccgtggccttcctcgcctctgtggttgatccgcgagtggcgtcagcggcagctaaatccgctctggaggaattttcaaaaatgaaagaagaagttccgacagcactcgtggaagcccatgttaggaaggtggaggaggcagctaaagttacgggaaaggcggaccctgcatttgggttagaatcttccggtattgccggaaccacctctgacgagcccgagcgcattgaagagagtggcaatgacgaggccagagttgaagggcaggccacagatgaaaaaaaggaacctaaggaacccagagagggaggaggagccatcgaagaagaagccaaagaaaagacgtctgaagccccaaagaaggatgaagaaaaaggtaaagaaggcgatagcgaaaaggaatccgaaaagtcagatggagacccaatcgtggatcccgagaaggagaaagaaccaaaggagggacaagaggaggtgttaaaggaagtggtggaatccgaaggtgagagaaaaacaaaggtggaacgtgatattggtgagggcaacctgagtacagccgctgctgcagccctcgccgctgcagctgtgaaagccaaacacctggccgcagttgaagagagaaagatcaagagtttggtggctctgttagtcgagacccaaatgaagaagctagagataaaattgaggcacttcgaggagctggagacaataatggatagagaaagggaggccctcgagtaccagaggcagcagctgctggctgacagacaagcatttcacatggagcagttgaagtacgctgaaatgcgggctaggcagcagcattttcagcagatgcatcagcaacagcagcaacctccaccagccctccccccaggttctcagccgattccacccaccggcgctgccggacccccagccgttcacggtctcgcagtggctccagcaagcgtggtgccagctcccgcaggaagtggggctccgcctggtagtctcgggccttctgagcagattggccaggcgggatccacggcaggcccacagcagcagcaacccgctggcgcaccacagccaggagccgtgccacccggagtgccgccacctgggcctcacgggcctagccctttcccgaatcagcagacacctccgtccatgatgccaggggcagtccctggtagtggtcaccccggagtggccgcacaaagccctgctattgtagctgccgttcaagggaacctgctgccgtccgcttcgccgctccctgatcccggtaccccactgccgcctgacccgacggctcccagccccggaacagtgacccccgtaccacctccccagtag

SEQ ID NO: 282374 - DNA, 3839 bp, Artificial Sequence
  derived and/or modified sequence
gcggcgggaggcgggcggaggaggaggcggaggaggcgggagctgagctgagtggggcgggcggcggcggggcccgagccggagaagatggcggtgcggaagaaggacggcggccccaacgtgaagtactacgaggccgcggacaccgtgacccagttcgacaacgtgcggctgtggctcggcaagaactacaagaagtatatacaagctgaaccacccaccaacaagtccctgtctagcctggttgtacagttgctacaatttcaggaagaagtttttggcaaacatgtcagcaatgcaccgctcactaaactgccgatcaaatgtttcctagatttcaaagcgggaggctccttgtgccacattcttgcagctgcctacaaattcaagagtgaccagggatggcggcgttacgatttccagaatccatcacgcatggaccgcaatgtggaaatgtttatgaccattgagaagtccttggtgcagaataattgcctgtctcgacctaacatttttctgtgcccagaaattgagcccaaactactagggaaattaaaggacattatcaagagacaccagggaacagtcactgaggataagaacaatgcctcccatgttgtgtatcctgtcccggggaatctagaagaagaggaatgggtacgaccagtcatgaagagggataagcaggttcttctgcactggggctactatcctgacagttacgacacgtggatcccagcgagtgaaattgaggcatctgtggaagatgctccaactcctgagaaacctaggaaggttcatgcaaagtggatcctggacaccgacaccttcaatgaatggatgaatgaggaagactatgaagtaaatgatgacaaaaaccctgtctcccgccgaaagaagatttcagccaagacactgacagatgaggtgaacagcccagattcagatcgacgggacaagaaggggggaaactataagaagaggaagcgctccccctctccttcaccaaccccagaagcaaagaagaaaaatgctaagaaaggtccctcaacaccttacactaagtcaaagcgtggccacagagaagaggagcaagaagacctgacaaaggacatggacgagccctcaccagtccccaatgtagaagaggtgacacttcccaaaacagtcaacacaaagaaagactcagagtcggccccagtcaaaggcggcaccatgaccgacctggatgaacaggaagatgaaagcatggagacgacgggcaaggatgaggatgagaacagtacggggaacaagggagagcagaccaagaatccagacctgcatgaggacaatgtgactgaacagacccaccacatcatcattcccagctacgctgcctggtttgactacaatagtgttcatgccattgagcggagggctctccccgagttcttcaacggcaagaacaagtccaagactccagagatctacctggcctatcgaaactttatgattgacacttaccgactgaacccccaagagtatcttacctctaccgcctgccgccgaaacctagcgggtgatgtctgtgccatcatgagggtccatgccttcctagaacagtggggtcttattaactaccaggtggatgctgagagtcgaccaaccccaatggggcctccgcctacctctcacttccatgtcttggctgacacaccatcagggctggtgcctctgcagcccaagacacctcagggccgccaggttgatgctgataccaaggctgggcgaaagggcaaagagctggatgacctggtgccagagacggctaagggcaagccagagctgcagacctctgcttcccaacaaatgctcaactttcctgacaaaggcaaagagaaaccaacagacatgcaaaactttgggctgcgcacagacatgtacacaaaaaagaatgttccctccaagagcaaggctgcagccagtgccactcgtgagtggacagaacaggaaaccctgcttctcctggaggcactggaaatgtacaaagatgactggaacaaagtgtccgagcatgtgggaagccgcacacaggacgagtgcatcttgcattttcttcgtcttcccattgaagacccatacctggaggactcagaggcctccctaggccccctggcctaccaacccatccccttcagtcagtcgggcaaccctgttatgagcactgttgccttcctggcctctgtcgtcgatccccgagtcgcctctgctgctgcaaagtcagccctagaggagttctccaaaatgaaggaagaggtacccacggccttggtggaggcccatgttcgaaaagtggaagaagcagccaaagtaacaggcaaggcggaccctgccttcggtctggaaagcagtggcattgcaggaaccacctctgatgagcctgagcggattgaggagagcgggaatgacgaggctcgggtggaaggccaggccacagatgagaagaaggagcccaaggaaccccgagaaggagggggtgctatagaggaggaagcaaaagagaaaaccagcgaggctcccaagaaggatgaggagaaagggaaagaaggcgacagtgagaaggagtccgagaagagtgatggagacccaatagtcgatcctgagaaggagaaggagccaaaggaagggcaggaggaagtgctgaaggaagtggtggagtctgagggggaaaggaagacaaaggtggagcgggacattggcgagggcaacctctccaccgctgctgccgccgccctggccgccgccgcagtgaaagctaagcacttggctgctgttgaggaaaggaagatcaaatctttggtggccctgctggtggagacccagatgaaaaagttggagatcaaacttcggcactttgaggagctggagactatcatggaccgggagcgagaagcactggagtatcagaggcagcagctcctggccgacagacaagccttccacatggagcagctgaagtatgcggagatgagggctcggcagcagcacttccaacagatgcaccaacagcagcagcagccaccaccagccctgcccccaggctcccagcctatccccccaacaggggctgctgggccacccgcagtccatggcttggctgtggctccagcctctgtagtccctgctcctgctggcagtggggcccctccaggaagtttgggcccttctgaacagattgggcaggcagggtcaactgcagggccacagcagcagcaaccagctggagccccccagcctggggcagtcccaccaggggttcccccccctggaccccatggcccctcaccgttccccaaccaacaaactcctccctcaatgatgccaggggcagtgccaggcagcgggcacccaggcgtggcggacccaggcacccccctgcctccagaccccacagccccgagcccaggcacggtcacccctgtgccacctccacagtgaggagccagccagacatctctccccctcaccccctgtggacatcacggttccaggaacagcccttcccccaccactgggaccctccccagcctggagagttcatcactacgtaaggaaagctccttccgcccctccaaagccctcaccatgcctaacagaggcatgcatttttatatcagattattcaaggacttctgtttaaaagatgtttataatgtctgggagagaggataggatgggaatgctgccctaaaggaagggctggtgaaaggtgtttatacaaggttctattaaccacttctaagggtacacctccctccaaactactgcattttctatggattaaaaaaaaaaaaaaa

SEQ ID NO: 282375 - DNA, 4271 bp, Artificial Sequence
  derived and/or modified sequence
gcggccgcggcggcgggaggcggcgggaggcgggcggaggaggaggcggaggaggcgggagctgagctgagtggggcgggcggcggcggggcccgagccggagaagatggcggtgcggaagaaggacggcggccccaacgtgaagtactacgaggccgcggacaccgtgacccagttcgacaacgtgcggctgtggctcggcaagaactacaagaagtatatacaagctgaaccacccaccaacaagtccctgtctagcctggttgtacagttgctacaatttcaggaagaagtttttggcaaacatgtcagcaatgcaccgctcactaaactgccgatcaaatgtttcctagatttcaaagcgggaggctccttgtgccacattcttgcagctgcctacaaattcaagagtgaccagggatggcggcgttacgatttccagaatccatcacgcatggaccgcaatgtggaaatgtttatgaccattgagaagtccttggtgcagaataattgcctgtctcgacctaacatttttctgtgcccagaaattgagcccaaactactagggaaattaaaggacattatcaagagacaccagggaacagtcactgaggataagaacaatgcctcccatgttgtgtatcctgtcccggggaatctagaagaagaggaatgggtacgaccagtcatgaagagggataagcaggttcttctgcactggggctactatcctgacagttacgacacgtggatcccagcgagtgaaattgaggcatctgtggaagatgctccaactcctgagaaacctaggaaggttcatgcaaagtggatcctggacaccgacaccttcaatgaatggatgaatgaggaagactatgaagtaaatgatgacaaaaaccctgtctcccgccgaaagaagatttcagccaagacactgacagatgaggtgaacagcccagattcagatcgacgggacaagaaggggggaaactataagaagaggaagcgctccccctctccttcaccaaccccagaagcaaagaagaaaaatgctaagaaaggtccctcaacaccttacactaagtcaaagcgtggccacagagaagaggagcaagaagacctgacaaaggacatggacgagccctcaccagtccccaatgtagaagaggtgacacttcccaaaacagtcaacacaaagaaagactcagagtcggccccagtcaaaggcggcaccatgaccgacctggatgaacaggaagatgaaagcatggagacgacgggcaaggatgaggatgagaacagtacggggaacaagggagagcagaccaagaatccagacctgcatgaggacaatgtgactgaacagacccaccacatcatcattcccagctacgctgcctggtttgactacaatagtgttcatgccattgagcggagggctctccccgagttcttcaacggcaagaacaagtccaagactccagagatctacctggcctatcgaaactttatgattgacacttaccgactgaacccccaagagtatcttacctctaccgcctgccgccgaaacctagcgggtgatgtctgtgccatcatgagggtccatgccttcctagaacagtggggtcttattaactaccaggtggatgctgagagtcgaccaaccccaatggggcctccgcctacctctcacttccatgtcttggctgacacaccatcagggctggtgcctctgcagcccaagacacctcagggccgccaggttgatgctgataccaaggctgggcgaaagggcaaagagctggatgacctggtgccagagacggctaagggcaagccagagctgcagacctctgcttcccaacaaatgctcaactttcctgacaaaggcaaagagaaaccaacagacatgcaaaactttgggctgcgcacagacatgtacacaaaaaagaatgttccctccaagagcaaggctgcagccagtgccactcgtgagtggacagaacaggaaaccctgcttctcctggaggcactggaaatgtacaaagatgactggaacaaagtgtccgagcatgtgggaagccgcacacaggacgagtgcatcttgcattttcttcgtcttcccattgaagacccatacctggaggactcagaggcctccctaggccccctggcctaccaacccatccccttcagtcagtcgggcaaccctgttatgagcactgttgccttcctggcctctgtcgtcgatccccgagtcgcctctgctgctgcaaagtcagccctagaggagttctccaaaatgaaggaagaggtacccacggccttggtggaggcccatgttcgaaaagtggaagaagcagccaaagtaacaggcaaggcggaccctgccttcggtctggaaagcagtggcattgcaggaaccacctctgatgagcctgagcggattgaggagagcgggaatgacgaggctcgggtggaaggccaggccacagatgagaagaaggagcccaaggaaccccgagaaggagggggtgctatagaggaggaagcaaaagagaaaaccagcgaggctcccaagaaggatgaggagaaagggaaagaaggcgacagtgagaaggagtccgagaagagtgatggagacccaatagtcgatcctgagaaggagaaggagccaaaggaagggcaggaggaagtgctgaaggaagtggtggagtctgagggggaaaggaagacaaaggtggagcgggacattggcgagggcaacctctccaccgctgctgccgccgccctggccgccgccgcagtgaaagctaagcacttggctgctgttgaggaaaggaagatcaaatctttggtggccctgctggtggagacccagatgaaaaagttggagatcaaacttcggcactttgaggagctggagactatcatggaccgggagcgagaagcactggagtatcagaggcagcagctcctggccgacagacaagccttccacatggagcagctgaagtatgcggagatgagggctcggcagcagcacttccaacagatgcaccaacagcagcagcagccaccaccagccctgcccccaggctcccagcctatccccccaacaggggctgctgggccacccgcagtccatggcttggctgtggctccagcctctgtagtccctgctcctgctggcagtggggcccctccaggaagtttgggcccttctgaacagattgggcaggcagggtcaactgcagggccacagcagcagcaaccagctggagccccccagcctggggcagtcccaccaggggttcccccccctggaccccatggcccctcaccgttccccaaccaacaaactcctccctcaatgatgccaggggcagtgccaggcagcgggcacccaggcgtggcggcccaaagccctgccattgtggcagctgttcagggcaacctcctgcccagtgccagcccactgccagacccaggcacccccctgcctccagaccccacagccccgagcccaggcacggtcacccctgtgccacctccacagtgaggagccagccagacatctctccccctcaccccctgtggacatcacggttccaggaacagcccttcccccaccactgggaccctccccagcctggagagttcatcactacgtaaggaaagctccttccgcccctccaaagccctcaccatgcctaacagaggcatgcatttttatatcagattattcaaggacttctgtttaaaagatgtttataatgtctgggagagaggataggatgggaatgctgccctaaaggaagggctggtgaaaggtgtttatacaaggttctattaaccacttctaagggtacacctccctccaaactactgcattttctatggattaaaaaaaaaaaaaaaaagtagattttaaaaagccacattggagctcccttctacccactaaaaaataaccaatttttacattttttgagggggagtgagttttaggaaaggggaattaagattccagggagagctctggggatagaacagggcgcagattccatctctccccaagcccctttttagtgactaagtcaaggccccaactcccctcccccaccctacgctgagcttattcgagttcattcgtactaataatccctcctgcggcttcctcattgttgctgttttaggccaccccagctcagccaatgattcctttccctctgaatgtcagttttgtttttaaaagtcacttgctt

SEQ ID NO: 282376 - DNA, 876 bp, Artificial Sequence
  derived and/or modified sequence
atgatgcccctgaacaagagaggcagcagcctgcccttcaagagcctggtgatcgagctggacaaggacctgtacggccccgacaaccacctggtggagtggcacagaaccgccaccacccaggagaccgacggcttccaggtgaagagacccggcgacgtgaacgtgagatgcaccgtgctgctgatgctggactaccagcccccccagttcaagctggaccccagactggccagactgctgggcatccacacccagaccagacccgtgatcatccaggccctgtggcagtacatcaagacccacaagctgcaggacccccacgagagagagttcgtgatctgcgacaagtacctgcagcagatcttcgagagccagagaatgaagttcagcgagatcccccagagactgcacgccctgctgatgccccccgagcccatcatcatcaaccacgtgatcagcgtggaccccaacgaccagaagaagaccgcctgctacgacatcgacgtggaggtggacgacaccctgaagacccagatgaacagcttcctgctgagcaccgccagccagcaggagatcgccaccctggacaacaagatccacgagaccatcgagaccatcaaccagctgaagacccagagagagttcatgctgagcttcgccagagacccccagggcttcatcaacgactggctgcagagccagtgcagagacctgaagaccatgaccgacgtggtgggcaaccccgaggaggagagaagagccgagttctacttccagccctgggcccaggaggccgtgtgcagatacttctacagcaaggtgcagcagagaagacaggagctggagcaggccctgggcatcagaaacacctag

SEQ ID NO: 282377 - DNA, 876 bp, Artificial Sequence
  derived and/or modified sequence
atgatgcccctgaacaaacggggctccagcctgccattcaaatcactggtgatagaactcgacaaggatctatacggtcccgataatcacctggtcgagtggcaccggactgccactacacaagagactgacgggttccaggtaaagcgccccggagacgttaatgtgagatgtaccgtgctgctgatgctcgattaccaacccccacaattcaagcttgatcctcgtctcgcccggctgttggggattcatacacaaaccagaccggtgattattcaggctctgtggcagtatatcaagactcataagcttcaggatccgcacgagagagaattcgtcatttgcgacaagtacctgcagcagattttcgaatctcagcggatgaagttttctgaaataccacagcgcctccacgccttacttatgccgcctgaaccaatcattatcaaccacgtcatcagtgtggaccccaacgaccagaagaaaactgcctgctatgatatcgatgtggaggtcgatgatactctaaagacccagatgaatagtttcctgctgtcaactgcgagtcagcaggaaattgcaacgctggataataaaattcatgagaccattgagacaattaatcagctgaaaactcagcgcgagtttatgctatctttcgcccgtgatccacaagggtttattaacgattggttacagagtcagtgccgggatctaaaaacgatgaccgatgtggtgggcaatccagaggaagagcgccgtgcagaattctactttcagccttgggcccaagaagctgtgtgcagatatttttactccaaggtgcagcagagaaggcaggagctggagcaggctctgggtataagaaacacctag

SEQ ID NO: 282378 - DNA, 876 bp, Artificial Sequence
  derived and/or modified sequence
atgatgcccctgaacaagaggggcagcagcctgcccttcaagagcctggtgattgagctggacaaggacctgtatggccctgacaaccacctggtggagtggcacaggacagccaccacccaggagacagatggcttccaggtgaagaggcctggagatgtgaatgtgcgctgcaccgtgctgctgatgctggactaccagcccccccagttcaagctggacccccggctggcccggctgctgggcatccacacccagaccaggcctgtgatcatccaggccctgtggcagtacatcaagacccacaagctgcaggacccccatgagcgggagtttgtgatctgtgacaagtacctgcagcagatctttgagagccagaggatgaagttcagcgagatcccccagaggctgcacgccctgctgatgcctcctgagcccatcatcatcaaccacgtgatctctgtggaccccaatgaccagaagaagacagcctgctatgacattgatgtggaggtggatgacaccctgaagacccagatgaacagcttcctgctgagcacagccagccagcaggagatcgccaccctggacaacaagatccacgagaccatcgagaccatcaaccagctgaagacccagcgggagttcatgctgagctttgcccgggacccccagggcttcatcaatgactggctgcagagccagtgccgggacctgaagaccatgacagatgtggtgggcaaccctgaggaggagaggagagctgagttctacttccagccctgggcccaggaggccgtgtgccgctacttctacagcaaggtgcagcagaggcggcaggagctggagcaggccctgggcatccggaacacctag

SEQ ID NO: 282379 - DNA, 876 bp, Artificial Sequence
  derived and/or modified sequence
atgatgcccctgaacaagcggggcagcagcctgcccttcaagagcttggtgatcgaactggacaaggacctatacggtcctgataaccacctggtggaatggcatagaactgcaaccactcaggaaacggatggatttcaggtgaaaagaccaggggacgttaacgtcagatgcacagtgctgctgatgctggactatcaacccccccaatttaagctcgacccacgcctggcacgactgttggggattcatacccagacgagaccggtgatcatccaggccttgtggcagtacataaagacgcacaagttgcaggatccccatgaaagagaattcgtcatctgtgacaagtacctgcaacagatcttcgagtcacagcgcatgaaattctctgaaatcccgcaacggttacacgcattgctcatgcccccggagcctattattatcaaccacgtcatatccgtcgaccctaacgatcaaaagaagacagcatgctatgatattgacgtcgaggtcgatgacaccctcaagactcagatgaattccttcctgctgagtactgccagccaacaggagattgctacgttggataacaagattcacgagacaattgaaactatcaaccaactcaaaacacagcgggagttcatgttgagcttcgcgagggatccacagggcttcattaatgattggctgcagtctcagtgccgagatctgaaaaccatgacagacgtggtgggaaatcccgaagaagaaagaagggccgaattctattttcaaccctgggcacaagaagcagtatgccgttatttttactccaaggtccagcagagacggcaggagctggaacaggccctggggatcaggaacacttag

SEQ ID NO: 282380 - DNA, 876 bp, Artificial Sequence
  derived and/or modified sequence
atgatgcctctcaacaagcggggatcttcccttccctttaaatctcttgtgatagaactagacaaagatttgtacggccctgataatcacctggtggaatggcacaggacagccacaacccaagagactgacgggttccaggtcaagcgtccaggcgatgtgaacgtgcgctgtactgtcttacttatgctcgattaccaaccccctcagttcaaattggacccaagactggcacgtctcttgggcattcatacccagacccggcctgttatcatccaggccctgtggcagtacatcaaaacccacaaactgcaggaccctcatgagagggaattcgtgatttgtgacaagtatctgcagcagatcttcgaaagtcagaggatgaagttctcagaaatcccacagaggctacacgccctcctaatgcctccagaacccattattataaatcatgtgatctccgtggacccaaacgatcagaagaaaacagcttgctatgacattgacgtagaggtagacgataccctgaaaactcagatgaatagtttccttctgtcaaccgcaagccagcaagagattgccaccctggataacaagatacacgagaccattgagacgataaaccaattgaaaactcaacgagaattcatgttgagctttgctagagatcctcaagggttcatcaatgactggctccaatcccaatgccgcgatcttaaaactatgacagatgtggtgggaaatcctgaggaagagagacgcgctgagttctatttccagccatgggcacaggaagcagtatgccggtacttttactccaaggtgcaacagcgcaggcaggaactggaacaggccctggggatcaggaatacttag

SEQ ID NO: 282381 - DNA, 1757 bp, Artificial Sequence
  derived and/or modified sequence
tttgtgcggctgcatcggcggctccgggaagatggcggcccgggcgggtttccagtctgtggctccaagcggcggcgccggagcctcaggaggggctgtaccgctccccgatgcccggagcggcctatccgagaccaggtatgttgccaggcagccgaatgacacctcagggaccttccatgggaccccctggctatggggggaacccttcagtccgacctggcctggcccagtcagggatggatcagtcccgcaagagacctgcccctcagcagatccagcaggtccagcagcaggcggtccaaaatcgaaaccacaatgcaaagaaaaagaagatggctgacaaaattctacctcaaaggattcgtgaactggtaccagaatcccaggcctatatggatctcttggcttttgaaaggaaactggaccagactatcatgaggaaacggctagatatccaagaggccttgaaacgtcccatcaagtcagccttgtccaaatatgatgccactaaacaaaagaggaagttctcttccttttaagtccttggtgattgaactggacaaagacctgtatgggccagacaaccatctggtagaatggcacaggaccgccactacccaggagaccgatggctttcaggtgaagcggccgggagacgtgaatgtacggtgtactgtcctactgatgctggattaccagcctccccagtttaaattagacccccgcctagctcgactcctgggcatccatacccagactcgtccagtgatcatccaagcactgtggcaatatattaagacacataagctccaggaccctcacgagcgggagtttgtcatctgtgacaagtacctgcagcagatctttgagtctcaacgtatgaagttttcagagatccctcagcggctccatgccttgcttatgccaccagaacctatcatcattaatcatgtcatcagtgttgacccgaatgatcagaaaaagacagcttgttatgacattgatgttgaagtggatgacaccttgaagacccagatgaattcttttctgctgtccactgccagccaacaggagattgctactctagacaacaagatccatgagacaatagaaaccatcaaccagctgaagactcagcgggagttcatgctgagctttgccagagaccctcagggtttcatcaatgactggcttcagtcccagtgcagggacctcaagacaatgactgatgtggtgggtaacccagaggaggagcgccgagctgagttctacttccagccctgggctcaggaggctgtgtgccgatacttctactccaaggtgcagcagagacgacaagaattagagcaagccctgggaatccggaatacatagggcctctcccacagccctgattcgactgcaccaattcttgatttgggccctgtgctgcctgcctcatagtatctgccttggtcttgcttggggcgttccaggggatgctgttggttcaaggacaacaccagaatgaagagggtctcacaagacacctgttatcctcttctttcaccctatctcttcccacccccagcttccctttgccccacaaagttcccatgtgcctgtaccctcccctggtctacataggacctctagatagtgttagagagagaacatgtagtggtaatgagtgcttggaatggattgggcctcaggccaggtggtcttcaaggggaccagctaactgatcctgcccttcagagacccaggagttg

SEQ ID NO: 282382 - protein, 460 aa, Artificial Sequence
  derived and/or modified sequence
MAQWEMLQNLDSPFQDQLHQLYSHSLLPVDIRQYLAVWIEDQNWQEAALGSDDSKATMLFFHFLDQLNYECGRCSQDPESLLLQHNLRKFCRDIQDPTQLAEMIFNLLLEEKRILIQAQRAQLEQGEPVLETPVESQQHEIESRILDLRAMMEKLVKSISQLKDQQDVFCFRYKIQAKGKTPSLDPHQTKEQKILQETLNELDKRRKEVLDASKALLGRLTTLIELLLPKLEEWKAQQQKACIRAPIDHGLEQLETWFTAGAKLLFHLRQLLKELKGLSCLVSYQDDPLTKGVDLRNAQVTELLQRLLHRAFVVETQPCMPQTPHRPLILKTGSKFTVRTRLLVRLQEGNESLTVEVSIDRNPPQLQGFRKFNILTSNQKTLTPEKGQSQGLIWDFGYLTLVEQRSGGSGKGSNKGPLGVTEELHIISFTVKYTYQGLKQELKVSENGGQGERKQLWKKA

SEQ ID NO: 282383 - DNA, 1383 bp, Artificial Sequence
  derived and/or modified sequence
atggcccagtgggagatgctgcagaacctggacagccccttccaggaccagctgcaccagctgtacagccacagcctgctgcccgtggacatcagacagtacctggccgtgtggatcgaggaccagaactggcaggaggccgccctgggcagcgacgacagcaaggccaccatgctgttcttccacttcctggaccagctgaactacgagtgcggcagatgcagccaggaccccgagagcctgctgctgcagcacaacctgagaaagttctgcagagacatccaggaccccacccagctggccgagatgatcttcaacctgctgctggaggagaagagaatcctgatccaggcccagagagcccagctggagcagggcgagcccgtgctggagacccccgtggagagccagcagcacgagatcgagagcagaatcctggacctgagagccatgatggagaagctggtgaagagcatcagccagctgaaggaccagcaggacgtgttctgcttcagatacaagatccaggccaagggcaagacccccagcctggacccccaccagaccaaggagcagaagatcctgcaggagaccctgaacgagctggacaagagaagaaaggaggtgctggacgccagcaaggccctgctgggcagactgaccaccctgatcgagctgctgctgcccaagctggaggagtggaaggcccagcagcagaaggcctgcatcagagcccccatcgaccacggcctggagcagctggagacctggttcaccgccggcgccaagctgctgttccacctgagacagctgctgaaggagctgaagggcctgagctgcctggtgagctaccaggacgaccccctgaccaagggcgtggacctgagaaacgcccaggtgaccgagctgctgcagagactgctgcacagagccttcgtggtggagacccagccctgcatgccccagaccccccacagacccctgatcctgaagaccggcagcaagttcaccgtgagaaccagactgctggtgagactgcaggagggcaacgagagcctgaccgtggaggtgagcatcgacagaaaccccccccagctgcagggcttcagaaagttcaacatcctgaccagcaaccagaagaccctgacccccgagaagggccagagccagggcctgatctgggacttcggctacctgaccctggtggagcagagaagcggcggcagcggcaagggcagcaacaagggccccctgggcgtgaccgaggagctgcacatcatcagcttcaccgtgaagtacacctaccagggcctgaagcaggagctgaaggtgagcgagaacggcggccagggcgagagaaagcagctgtggaagaaggcctag

SEQ ID NO: 282384 - DNA, 1383 bp, Artificial Sequence
  derived and/or modified sequence
atggctcagtgggagatgcttcaaaatctagattctcccttccaggaccagctgcaccagctgtacagtcacagtcttctgccagtggacatccgccaatacctagctgtgtggattgaggaccaaaattggcaggaagcagccctcgggagcgacgactccaaggctacgatgctgttcttccacttcctagaccaactcaattatgagtgcgggcgctgcagccaagacccagagtcgctgctgttacagcataaccttcgcaagttttgccgggacatccaagatcccacacagctggccgaaatgatctttaatctgctgttggaggagaaacggatacttattcaagcacagcgtgcacaactcgagcagggagagcctgtactagagacccctgtggaatctcagcaacacgaaatagagtcacgaattcttgacctgagagctatgatggagaaacttgtgaagtcgattagccagctcaaggatcaacaggatgtcttctgctttcggtataaaatccaagccaaggggaaaaccccctcgctcgatcctcaccagacgaaggaacagaagattctccaggaaacacttaacgagttggacaaacggcgaaaggaggtgctggacgcgtctaaggccctcttggggagactgacgactctgattgagctgctgcttccgaagttggaagaatggaaagcacagcagcaaaaagcctgcattagagctcccattgaccatggcctagaacagctagaaacatggttcacggctggcgcaaaactactgttccatctccggcagctgctgaaggagctaaagggcctttcatgcttagtcagttaccaagacgatcctttaaccaaaggagttgaccttcgaaatgcacaggtgaccgagctgctccaaagactactgcatagggcatttgtggttgaaacccagccctgtatgcctcaaacaccccaccgacctctcatactcaaaacggggtccaagttcaccgtccgtacccgcctcctggtcagattgcaggagggtaacgagtccctaacggtggaggtttcaattgatagaaatccacctcagctgcagggatttcgcaagttcaacatcctgacttcaaaccagaaaacactcacccctgaaaagggtcagagtcagggcctcatctgggacttcggctacctgacgctggtggagcagaggtccggcggttcaggcaaaggcagcaataagggcccgctgggtgtcactgaggagctgcacattatctcctttacagtaaaatacacctatcagggcctcaaacaggagctcaaggtaagcgagaacggaggccaaggtgaaaggaagcagttgtggaagaaggcttag

SEQ ID NO: 282385 - DNA, 1383 bp, Artificial Sequence
  derived and/or modified sequence
atggcccagtgggagatgctgcagaacctggacagccccttccaggaccagctgcaccagctgtacagccacagcctgctgcctgtggacatccggcagtacctggccgtgtggattgaggaccagaactggcaggaggccgccctgggcagtgatgacagcaaggccaccatgctgttcttccacttcctggaccagctgaactatgaatgtggccgctgcagccaggaccctgagagcctgctgctgcagcacaacctgaggaagttctgccgggacatccaggaccccacccagctggccgagatgatcttcaacctgctgctggaggagaagaggatcctgatccaggcccagagggcccagctggagcagggcgagcctgtgctggagacccctgtggagagccagcagcatgaaattgagagccgcatcctggacctgcgggccatgatggagaagctggtgaagagcatcagccagctgaaggaccagcaggatgtgttctgcttccgctacaagatccaggccaagggcaagacccccagcctggacccccaccagaccaaggagcagaagatcctgcaggagaccctgaatgagctggacaagaggaggaaggaggtgctggatgccagcaaggccctgctgggccgcctgaccaccctcatcgagctgctgctgcccaagctggaggagtggaaggcccagcagcagaaggcctgcatccgggcccccatcgaccacggcctggagcagctggagacctggttcaccgctggggccaagctgctcttccacctgcggcagctgctgaaggagctgaagggcctgagctgcctggtgtcctaccaggatgaccccctgaccaagggcgtggacctgagaaatgcccaggtgacagagctgctgcagaggctgctgcaccgggcctttgtggtggagacccagccctgcatgccccagaccccccaccggcccctcatcctgaagacaggcagcaagttcaccgtgaggacccggctgctggtgcggctgcaggagggcaatgaaagcctgactgtggaggtgtccattgacagaaatccaccccagctgcagggcttcaggaagttcaacatcctgaccagcaaccagaagaccctgaccccagagaagggccagagccagggcctcatctgggactttggctacctgaccctggtggagcagaggtctgggggcagcggcaagggcagcaacaagggccccctgggcgtgacagaggagctgcacatcatctccttcaccgtgaagtacacctaccagggcctgaagcaggagctgaaggtgtctgaaaatggaggccagggcgagaggaagcagctgtggaagaaggcctag

SEQ ID NO: 282386 - DNA, 1383 bp, Artificial Sequence
  derived and/or modified sequence
atggcccagtgggagatgctgcagaacctggacagccccttccaggatcagcttcaccagttatactcacactccctcctgcctgtagacatccgccaatacctggctgtttggatagaggaccagaattggcaagaggccgcccttggaagcgacgacagcaaggccactatgctgttctttcattttcttgatcagctaaactacgaatgtgggcgttgtagccaggacccggaatctctgttgctacagcataatctccggaagttttgtcgggatatccaagacccaacccagctggctgaaatgatctttaacctgctgttggaggagaagaggatcttgatccaagcacagcgggcacagctagagcagggagagccggtcttggagaccccggtggagtctcagcagcacgagatagagagccgcatcctggatcttcgggccatgatggaaaaactggtaaaaagcatctcacaactgaaagatcaacaggacgtgttctgtttcagatacaagatccaggccaagggcaaaacgccctccctcgatccccatcaaacaaaggagcagaagattctccaggaaaccctcaacgaactcgacaaacgccgcaaggaagtgttagatgcctcaaaggccctactgggtagactcacaacactgattgagctcctgctgccaaagctcgaagagtggaaggctcagcagcaaaaagcttgcataagggctcccatagatcacggcttggagcagctcgagacctggtttactgcgggagctaaactcttattccacttgcggcagcttctgaaagagctaaaaggacttagttgcctggtgagctaccaggacgatcccctcaccaagggcgttgatttacgtaacgcccaggtgaccgagctcttacaacggcttctgcaccgtgccttcgtggttgaaactcagccctgcatgccacagaccccccatcgccctctgatcctcaagacaggttctaaatttacagtgaggacacgcctcttggtgcgtttgcaagagggtaatgagagcctcacagttgaggtgagtattgatcggaatccccctcagctgcagggatttcgcaagtttaatatcctcacgagtaaccagaagacacttactcctgaaaagggccagagccaggggctgatctgggactttgggtacctaacattagttgagcaacgctccggtggatcaggcaaaggatctaacaagggtccactgggcgttacagaggaactgcacataataagctttacagttaagtatacttaccaaggcttgaaacaggagctcaaagtgtccgagaatggtggccagggggaacgcaagcagctttggaaaaaggcctag

SEQ ID NO: 282387 - DNA, 1383 bp, Artificial Sequence
  derived and/or modified sequence
atggcacagtgggaaatgcttcagaacctggattctccattccaggatcagctgcaccagctttactcacacagcctcctcccggtggacattcgacagtacctggccgtatggatcgaggatcaaaattggcaagaagcagccttgggctccgatgactctaaggcaacaatgctgttcttccactttctggaccaactgaattacgagtgtggtaggtgtagtcaggacccagaaagtctgcttttacagcacaacctgcgaaagttttgtcgggacatccaggatccgacccagcttgctgaaatgatcttcaacctccttttagaggagaagagaatcctcatccaagcacagagagcccagctcgaacaaggcgaacctgtactcgaaactcccgtagaaagccagcagcatgaaatcgaatccagaatactcgacctccgagcaatgatggaaaaactggtgaaatctatttcccaactgaaagatcagcaggacgtgttctgttttcgttataagattcaagctaaggggaaaaccccgtccctggatcctcaccagaccaaagagcaaaaaatcctgcaagaaacactgaatgaactagataaaaggaggaaggaggttttagatgcatccaaggctctgctgggaaggcttaccacactgattgagctgttgcttccgaagctagaagaatggaaggctcagcagcagaaagcttgcattcgcgctcctatcgatcacggcctcgaacagctcgagacttggtttacggctggggctaagctgctgttccacctaaggcagttactcaaggaattgaaaggcctgagttgtttggtttcctaccaggacgaccctctcaccaagggggtggatctgcgaaacgcacaggtcacggagctgttacaacgtctcttacatcgcgcttttgttgttgaaacccagccctgtatgcctcaaactcctcatcgcccactaattctaaaaactggaagtaagttcactgtgagaactcgacttctggtgcgccttcaggagggcaacgaaagcctaacagtggaggtgtccattgatcgcaaccctccacagctgcagggcttcaggaaatttaatatccttacatctaatcagaagacgctgacacccgaaaaaggccagtctcagggactgatctgggactttgggtatctcacattggttgaacagcggagcggcggaagtggaaagggtagcaataagggcccactcggggttacggaagagttgcacattatctccttcacagtgaaatatacttatcagggcctgaaacaggaattgaaagtgtccgagaatggcggacagggggagcgtaagcagctgtggaaaaaggcatag

SEQ ID NO: 282388 - DNA, 1548 bp, Artificial Sequence
  derived and/or modified sequence
agctcatactagggacgggaagtcgcgaccagagccattggagggcgcggggactgcaaccctaatcagagcccaaatggcgcagtgggaaatgctgcagaatcttgacagcccctttcaggatcagctgcaccagctttactcgcacagcctcctgcctgtggacattcgacagtacttggctgtctggattgaagaccagaactggcaggaagctgcacttgggagtgatgattccaaggctaccatgctattcttccacttcttggatcagctgaactatgagtgtggccgttgcagccaggacccagagtccttgttgctgcagcacaatttgcggaaattctgccgggacattcaggatcctacccagttggctgagatgatctttaacctccttctggaagaaaaaagaattttgatccaggctcagagggcccaattggaacaaggagagccagttctcgaaacacctgtggagagccagcaacatgagattgaatcccggatcctggatttaagggctatgatggagaagctggtaaaatccatcagccaactgaaagaccagcaggatgtcttctgcttccgatataagatccaggccaaagggaagacaccctctctggacccccatcagaccaaagagcagaagattctgcaggaaactctcaatgaactggacaaaaggagaaaggaggtgctggatgcctccaaagcactgctaggccgattaactaccctaatcgagctactgctgccaaagttggaggagtggaaggcccagcagcaaaaagcctgcatcagagctcccattgaccacgggttggaacagctggagacatggttcacagctggagcaaagctgttgtttcacctgaggcagctgctgaaggagctgaagggactgagttgcctggttagctatcaggatgaccctctgaccaaaggggtggacctacgcaacgcccaggtcacagagttgctacagcgtctgctccacagagcctttgtggtagaaacccagccctgcatgccccaaactccccatcgacccctcatcctcaagactggcagcaagttcaccgtccgaacaaggctgctggtgagactccaggaaggcaatgagtcactgactgtggaagtctccattgacaggaatcctcctcaattacaaggcttccggaagttcaacattctgacttcaaaccagaaaactttgacccccgagaaggggcagagtcagggtttgatttgggactttggttacctgactctggtggagcaacgttcaggtggttcaggaaagggcagcaataaggggccactaggtgtgacagaggaactgcacatcatcagcttcacggtcaaatatacctaccagggtctgaagcaggagctgaaagtgagtgaaaatggagggcaaggagagagaaagcagctttggaagaaggcataagaaggggataaacagaagcctcttgggaaccagcagttcttctccaacccccccaaggccccctggagcttgctgggccctgctctcag

SEQ ID NO: 282389 - protein, 545 aa, Artificial Sequence
  derived and/or modified sequence
MLLLHRAVVLRLQQACRLKSIPSRICIQACSTNDSFQPQRPSLTFSGDNSSTQGWRVMGTLLGLGAVLAYQDHRCRAAQESTHIYTKEEVSSHTSPETGIWVTLGSEVFDVTEFVDLHPGGPSKLMLAAGGPLEPFWALYAVHNQSHVRELLAQYKIGELNPEDKVAPTVETSDPYADDPVRHPALKVNSQRPFNAEPPPELLTENYITPNPIFFTRNHLPVPNLDPDTYRLHVVGAPGGQSLSLSLDDLHNFPRYEITVTLQCAGNRRSEMTQVKEVKGLEWRTGAISTARWAGARLCDVLAQAGHQLCETEAHVCFEGLDSDPTGTAYGASIPLARAMDPEAEVLLAYEMNGQPLPRDHGFPVRVVVPGVVGARHVKWLGRVSVQPEESYSHWQRRDYKGFSPSVDWETVDFDSAPSIQELPVQSAITEPRDGETVESGEVTIKGYAWSGGGRAVIRVDVSLDGGLTWQVAKLDGEEQRPRKAWAWRLWQLKAPVPAGQKELNIVCKAVDDGYNVQPDTVAPIWNLRGVLSNAWHRVHVYVSP

SEQ ID NO: 282390 - protein, 43 aa, Artificial Sequence
  derived and/or modified sequence
MLLLHRAVVLRLQQACRLKSIPSRICIQACSTNDSFQPQRPSL

SEQ ID NO: 282391 - DNA, 1638 bp, Artificial Sequence
  derived and/or modified sequence
atgctgctgctgcacagagccgtggtgctgagactgcagcaggcctgcagactgaagagcatccccagcagaatctgcatccaggcctgcagcaccaacgacagcttccagccccagagacccagcctgaccttcagcggcgacaacagcagcacccagggctggagagtgatgggcaccctgctgggcctgggcgccgtgctggcctaccaggaccacagatgcagagccgcccaggagagcacccacatctacaccaaggaggaggtgagcagccacaccagccccgagaccggcatctgggtgaccctgggcagcgaggtgttcgacgtgaccgagttcgtggacctgcaccccggcggccccagcaagctgatgctggccgccggcggccccctggagcccttctgggccctgtacgccgtgcacaaccagagccacgtgagagagctgctggcccagtacaagatcggcgagctgaaccccgaggacaaggtggcccccaccgtggagaccagcgacccctacgccgacgaccccgtgagacaccccgccctgaaggtgaacagccagagacccttcaacgccgagcccccccccgagctgctgaccgagaactacatcacccccaaccccatcttcttcaccagaaaccacctgcccgtgcccaacctggaccccgacacctacagactgcacgtggtgggcgcccccggcggccagagcctgagcctgagcctggacgacctgcacaacttccccagatacgagatcaccgtgaccctgcagtgcgccggcaacagaagaagcgagatgacccaggtgaaggaggtgaagggcctggagtggagaaccggcgccatcagcaccgccagatgggccggcgccagactgtgcgacgtgctggcccaggccggccaccagctgtgcgagaccgaggcccacgtgtgcttcgagggcctggacagcgaccccaccggcaccgcctacggcgccagcatccccctggccagagccatggaccccgaggccgaggtgctgctggcctacgagatgaacggccagcccctgcccagagaccacggcttccccgtgagagtggtggtgcccggcgtggtgggcgccagacacgtgaagtggctgggcagagtgagcgtgcagcccgaggagagctacagccactggcagagaagagactacaagggcttcagccccagcgtggactgggagaccgtggacttcgacagcgcccccagcatccaggagctgcccgtgcagagcgccatcaccgagcccagagacggcgagaccgtggagagcggcgaggtgaccatcaagggctacgcctggagcggcggcggcagagccgtgatcagagtggacgtgagcctggacggcggcctgacctggcaggtggccaagctggacggcgaggagcagagacccagaaaggcctgggcctggagactgtggcagctgaaggcccccgtgcccgccggccagaaggagctgaacatcgtgtgcaaggccgtggacgacggctacaacgtgcagcccgacaccgtggcccccatctggaacctgagaggcgtgctgagcaacgcctggcacagagtgcacgtgtacgtgagcccctag

SEQ ID NO: 282392 - DNA, 1638 bp, Artificial Sequence
  derived and/or modified sequence
atgttgctgttacaccgcgcagtcgtcttgcgcctgcaacaggcgtgccgactgaaatctatcccttccaggatctgtatccaggcctgctccaccaatgactcttttcagccacagcggccaagcctcacgttctctggtgataacagctcaacacagggctggagggttatggggacattgcttgggcttggtgccgttttagcttaccaggatcatcgatgtagggccgcgcaggagagcactcacatctatactaaagaggaagtcagttcacatacctccccagaaactggcatctgggtcaccctgggctcagaagttttcgatgtaacagagttcgtggacctgcatccgggcgggccttctaaattaatgctggccgccggcggaccactggagcctttctgggccctctacgcagtccataaccaatcccatgtccgggagttattggcacagtataagattggcgagctcaaccctgaggacaaagtggctccaacagtagagaccagcgacccctacgccgatgacccagtgcgtcatccagcattgaaggttaatagccaacgccctttcaacgcagaacctccccccgagctgctgacagaaaattacataacccctaaccccattttctttacccgaaatcacctgcctgttcctaacctggaccctgacacttacaggttgcacgtcgtcggagctcccgggggccaatcactctccttgtctttagacgacctgcacaatttcccgaggtatgaaataactgttacgcttcagtgtgccggaaaccgaaggtccgagatgacccaggtcaaggaggtgaagggcttggagtggagaactggggcaatcagcacagcgcgctgggccggagctaggttatgcgacgtgctggcccaggccgggcaccagctttgtgaaaccgaagcacatgtctgtttcgagggtctggactctgatccaaccgggactgcttacggtgcaagcattccgctggcccgcgcaatggatccagaggctgaggtgctcctcgcctatgaaatgaacggtcagccattaccccgcgatcatggatttcccgtgcgggtggtggtgccaggggtggttggcgcgcgacacgtgaaatggctcggcagagtctcagtgcagcccgaggagtcttactcccactggcagaggagagattataaagggttctccccctccgtcgattgggaaacagttgactttgatagtgcaccaagtattcaggaactgcctgtgcagagcgccattacagagcctcgagacggagaaaccgtagaatccggagaggtgaccataaaaggctatgcctggagcggcggcgggagagcagttatcagggtggacgtgagcctggatgggggactgacatggcaggtggccaaattggatggcgaagaacagagaccacggaaagcctgggcttggcggctttggcagctaaaggctcccgttccggcgggtcagaaggagctaaatatcgtgtgcaaagcagtcgatgatggttataatgtccagccagatactgtggccccaatctggaatttgcggggcgttctcagcaatgcctggcatagggtgcacgtgtacgtgtccccctag

SEQ ID NO: 282393 - DNA, 1638 bp, Artificial Sequence
  derived and/or modified sequence
atgttactgttacaccgtgccgttgtgctgaggctccaacaggcgtgtcgtctgaagtctatacctagtagaatatgcattcaggcatgtagcacgaacgatagttttcagccccagcgcccatcactgaccttttctggtgataattcctctacccaggggtggcgtgttatgggtaccctactcgggctaggcgccgtgttggcataccaggatcataggtgcagagcagcacaggaaagcacccacatttatacaaaagaagaagtgtcgagccacaccagtcctgaaaccggcatatgggtcactctgggatccgaagtgtttgatgttactgagtttgtggacttacatcccggcggtccttcaaagttgatgctggcggccggtggccctctcgaaccattctgggccctgtatgcggtgcacaatcagtcccacgtgcgcgaactgctggcacagtacaagatcggggagctgaatcccgaggacaaggtggccccaactgtggagacgagcgatccatacgcggacgacccggtgcggcacccggctctgaaagtaaacagccagcggccattcaatgccgaaccgcctccagaattgctgacagagaattacataacaccaaacccgattttcttcacacgcaatcatctgcctgtcccaaatcttgatcccgacacataccggttacatgtggtaggtgctccaggcggtcagagcttgagccttagtctggacgatttacataacttcccgaggtatgagataaccgtgacccttcagtgcgccggaaatagaaggtcagagatgacccaggtcaaggaggttaaggggttagagtggaggactggtgccatttctactgcgcggtgggctggcgccaggctctgcgatgttctggctcaagctggccaccagctatgtgaaacagaagcccatgtctgcttcgaaggcttggactccgaccccactggtaccgcttacggagcaagtataccgctggctcgcgccatggaccctgaggcggaagtcctgttggcttacgagatgaatggccaaccgcttcccagggatcatgggttcccagtgagagtcgtggtaccgggagtggtgggggcgcggcacgtgaagtggcttggaagggtttctgttcagcctgaggaaagctactcccattggcaacggcgggattacaagggattctctccctcggtggattgggaaacggtcgattttgacagcgcaccctccatacaggaactacccgtgcaaagtgctatcacggagccacgggacggggaaactgtggagtcgggagaagtcacaattaagggttacgcgtggagcggcggcggcagagcggtgattcgcgtggatgtctcactggatggtggattgacttggcaggtggccaagctggatggcgaggagcagagacccagaaaagcttgggcgtggagactctggcaacttaaagcacctgtgccagccggccaaaaagagctaaatatcgtctgcaaggccgtggacgatggttacaatgtgcagcctgataccgtagcgccaatttggaatcttagaggcgtgctgagcaacgcctggcacagagtgcacgtgtatgtcagcccctag

SEQ ID NO: 282394 - DNA, 1638 bp, Artificial Sequence
  derived and/or modified sequence
atgctgctactccatcgagccgttgtgttgaggctccagcaggcatgccgcctcaaatccattccatcacgaatatgtatccaagcttgcagtactaatgatagcttccaacctcagcgaccgagcctgactttttcgggagacaacagtagtacgcagggatggcgtgtgatggggacactcctgggacttggggctgtgctggcgtatcaggaccaccggtgtagagcagcccaggaatccacgcacatttatactaaggaggaggtctcgagtcacacctcaccagaaaccggaatctgggtaacgctggggagtgaggtctttgatgtcaccgaattcgttgacctgcatcccggcggaccatcaaaactcatgctggccgctggtgggccactggaaccgttctgggctctttatgctgtgcacaatcaaagccacgtaagggaattgctcgcccaatacaaaattggcgagctgaaccccgaggacaaagttgccccaaccgttgagactagtgatccctatgcagacgatccagttagacacccggcactcaaggtgaatagtcagagaccatttaacgcagaaccaccacccgaactgttgacagagaattacataacacctaatcccatcttcttcactcgtaatcatttgccggtgcctaacctcgaccccgatacttatcgactccacgtggttggggctcccggcgggcagtccctcagcttatcactggatgacctgcacaattttcctcgatatgagataacggtaacacttcagtgcgccggaaacaggcgatccgaaatgacccaagtgaaagaggtaaaggggctcgaatggaggaccggcgccatctccactgcccgctgggctggagccaggctgtgcgacgttttggcacaggctgggcaccagctttgtgaaaccgaggctcatgtctgtttcgaggggctggattccgatcctaccggcacagcgtacggggcatcaattcctctggctagggccatggaccccgaagcggaggtgctcctcgcgtatgagatgaacggccagcctttgcccagagaccacggttttccggtgagggtagtcgtgccaggagtggtcggggccaggcatgtcaagtggctgggtagagtttccgttcagccagaagaatcctactcacactggcagaggcgagactacaaaggattctctccctcagttgattgggagacggtcgacttcgatagtgctccctctatccaagaactgccggtgcagagcgccatcactgagcctcgcgatggcgagaccgtcgagtccggagaggtgacaatcaaaggttatgcctggtccggcggagggagggctgtcatcagagtagatgttagcctggacggcggactaacttggcaagtggctaagcttgatggcgaggaacagagacctcggaaggcgtgggcatggcgactgtggcagcttaaagcgcctgtcccagcgggccaaaaagagctaaacatagtgtgtaaggcggtcgacgatggatataatgtgcagcctgacaccgtcgcgcctatctggaaccttagaggcgtcctgagtaacgcgtggcacagggtacacgtgtatgtgtcaccatag

SEQ ID NO: 282395 - DNA, 1638 bp, Artificial Sequence
  derived and/or modified sequence
atgctgctcttgcatcgcgctgttgtgctgaggctacaacaggcgtgtcggttgaagagtatcccatccaggatctgcattcaggcatgctccaccaatgattcattccagccgcagcggccatcactgacctttagcggagataactctagcacacagggatggagggtcatgggaaccctgttggggctcggggccgtgctggcctaccaggaccaccgttgccgggctgcccaggaaagtactcacatttacaccaaggaggaagtgagcagtcacacgtcccctgaaactggcatttgggttacacttggctctgaggttttcgatgtcacagaattcgtcgatcttcatccaggaggaccatcaaaactgatgttggccgcgggaggcccgctggagcccttttgggcgctgtacgcagtgcataaccagtctcacgttcgcgaattgctggctcaatacaagatcggggagctgaacccagaggataaggtggctcctacagtggaaactagcgatccatatgccgatgatcccgtgagacatcctgctctgaaggtgaatagccagcgtcccttcaatgccgagcctccgccggaactgctaacagagaattatatcacccctaatccaatttttttcacaaggaatcacttgcctgtgcccaatttagaccccgacacctacagactccacgtcgtgggagcacccggcggccagtcattgtctctgagcctggatgatctacacaacttcccacgatatgaaattaccgtgacactccagtgcgccggtaatcgtcgaagtgaaatgactcaagttaaggaggtgaaaggattagagtggcgtaccggcgctatctcaaccgcccgatgggccggggcccgcctctgtgatgtgttagcgcaagccggacatcagctgtgtgagaccgaggcacatgtgtgctttgaaggtctggatagcgatccaacagggacagcatacggtgcgtcgatccccttggcccgggcaatggatccagaagccgaggttctcttagcctacgagatgaacggccagcctctcccaagggatcatggttttccggtcagagtggtggtgccaggggttgtgggagcccgacacgtcaagtggctcggccgcgtgtccgtccagccagaggagtcttatagccactggcagcgtcgtgactacaaaggttttagtccaagtgtggactgggagaccgtggatttcgacagcgcaccttccattcaggagctgcccgtgcagtctgccattacggaaccccgggatggcgaaacagttgaatcaggagaggttacaatcaaagggtacgcctggtctggtgggggccgggctgtgattagggttgatgtgtctctggacggagggttaacttggcaggttgctaaactggacggtgaagagcagcggccacgcaaggcatgggcgtggcgcttatggcagcttaaagcacccgtgcccgctgggcagaaagagctaaacattgtctgcaaagccgtcgatgatggttacaacgtccagcctgacaccgtggcaccgatttggaatctccgcggcgtcctgtcaaatgcctggcaccgggtccatgtgtacgtgtcaccctag

SEQ ID NO: 282396 - DNA, 1638 bp, Artificial Sequence
  derived and/or modified sequence
atgctgttactccatcgggccgtggttctgaggttacagcaggcttgcagattgaagtccattcccagtcggatatgcatccaggcttgttcaaccaacgatagctttcagccccagaggcccagtttgacattctctggtgataattccagcacccagggatggcgcgtaatgggaactctgctcggtctgggggcagtgctggcctatcaggaccatcgatgcagagccgctcaagagtcaactcatatatacaccaaggaagaggtctccagtcacacgagtccagagacaggcatttgggtgacactcggttctgaagtctttgacgtgacagagttcgtcgatctccaccccggcggcccctctaagctgatgttggccgcagggggaccactggagccattttgggctttgtacgctgtgcacaaccagtcgcacgttcgcgagttactggcacagtataaaataggtgagctgaatccagaggacaaagttgcaccaactgtggagacttctgacccctatgcggatgatcccgtcaggcaccccgctctgaaagtaaattctcagcgcccgtttaatgctgaaccccccccagaactattaaccgaaaactatatcactcccaatcctatctttttcacaaggaatcaccttcctgttcccaatttggatccagatacatacagactccatgtcgtgggcgcccccgggggccagtcgctgtctttgtcactagatgatctacataattttccgcgatacgaaatcaccgttacactgcagtgcgcgggtaatcgcagatccgagatgacacaggtgaaagaggtgaagggtctggagtggagaacgggagctatctccacagccaggtgggcgggggcacgcctctgtgatgtgctcgcacaggctggtcaccaactgtgtgaaaccgaagcacatgtgtgctttgaaggcctggatagtgacccaaccgggactgcatacggcgcatccatcccccttgctagagccatggatccagaggctgaggtgcttctggcctacgagatgaacggtcaaccgttgcctcgtgatcatgggtttcccgtgcgcgtggtggtgcctggggtagtgggtgcaaggcacgtgaaatggctcggacgagtctccgtccagccagaggaatcttattctcactggcaaaggagggactacaaaggattcagcccttcagtcgactgggagactgtggattttgactcagcccctagcattcaggagctgcccgttcagtctgcgattaccgagccaagggatggagagacagtggagagtggagaagtaacgataaagggttacgcctggtccgggggtgggcgtgcggttatacgggtcgacgtttccctcgacggaggcctgacgtggcaggtggcgaagctcgacggggaggagcagaggccccggaaagcctgggcttggcggttgtggcaactgaaagcgccagtgcccgctggccagaaggagctcaatatcgtctgtaaggcagtggatgatggctataacgtacagcccgataccgtggcaccaatttggaacttgcgcggtgttttgtctaatgcatggcacagggtgcatgtgtacgtctccccatag

SEQ ID NO: 282397 - DNA, 1638 bp, Artificial Sequence
  derived and/or modified sequence
atgctgctgctccatcgggcagtagtgttgcgcttgcagcaagcatgtcggctcaagagcatcccttctcgcatctgtatccaggcgtgttcaaccaatgatagttttcagccacagcgacccagcctgacttttagcggggacaactcaagtacccaaggttggcgcgtaatgggtaccctgctggggctgggagctgtgctcgcgtaccaggaccacagatgcagggccgctcaagaatctactcacatttatacgaaggaagaggtgagcagccacaccagtcctgagactggaatttgggtgactctggggtctgaggtcttcgacgttacagaattcgtggatctccatccgggcggacccagtaagttaatgctggccgccggtgggcccctggagcccttctgggccctttatgcagtgcacaaccagtcccacgtccgtgagttgctcgcgcaatacaaaatcggcgaattgaacccagaggataaggtggcaccgacagtagaaacatcggacccttacgctgacgaccctgtgagacatcccgctctcaaggtcaacagccaacgcccatttaacgccgaaccacctcctgagctactcacggagaattatataacacctaatcccatctttttcacccgaaatcacttacctgtgccaaatctggaccctgatacttaccggctccatgtggtgggtgcccctggtgggcaaagtctctctttaagtctggacgacctgcacaacttccctcgttacgagatcacagtgaccctgcagtgtgcggggaatcgaaggagtgaaatgactcaggtgaaggaggttaaaggtttggagtggcggactggggcgatctccactgccaggtgggcaggcgctcgcctgtgcgacgtgctggcccaggcgggtcatcaactttgtgaaacggaggcacatgtgtgctttgaagggctagactccgatccaactggcacagcttacggagccagtatcccacttgccagggcaatggatccagaagctgaagtactattggcatacgaaatgaacggacaacccctcccccgagaccacggattccctgtgagggtggtggttcccggagtggtcggtgcgaggcatgttaagtggctgggacgagtcagcgtccagcccgaggaatcctatagccactggcagcggcgcgattacaagggattctctccttccgtggattgggagacagtcgacttcgattccgccccttccatccaggagctgcccgtgcagagtgccattactgagcctagagacggggagactgtggaaagtggcgaggtgactatcaaaggctatgcttggagcggaggaggcagggcagtgataagagtagacgtatccctggacggggggctcacctggcaggtcgccaagctcgatggtgaggaacaaagaccacggaaggcatgggcatggaggctttggcagctgaaggcaccagtcccagctggacagaaggaactgaacattgtttgcaaggccgtggacgacgggtataacgtgcagccggataccgttgccccgatctggaatcttcgaggagtgctcagtaacgcctggcaccgggtacatgtgtatgtttcaccctag

SEQ ID NO: 282398 - DNA, 1638 bp, Artificial Sequence
  derived and/or modified sequence
atgctgctgctgcacagagctgtggtgctgcggctgcagcaggcctgccgcctgaagagcatccccagccgcatctgcatccaggcctgcagcaccaatgacagcttccagccccagaggcccagcctgaccttcagcggggacaacagcagcacccagggctggagggtgatgggcaccctgctgggcctgggcgctgtgctggcctaccaggaccaccgctgcagagctgcccaggagagcacccacatctacaccaaggaggaggtgagcagccacaccagccctgagaccggcatctgggtgaccctgggcagcgaggtgtttgatgtgacagaatttgtggacctgcaccctgggggccccagcaagctgatgctggccgccggcggccccctggagcccttctgggccctgtatgctgtgcacaaccagagccacgtgcgggagctgctggcccagtacaagattggagagctgaaccctgaggacaaggtggcccccaccgtggagaccagtgacccctatgcagatgatcctgtgcgccacccagccctgaaggtgaacagccagaggcccttcaatgctgagcccccacctgagctgctgacagagaactacatcacccccaaccccatcttcttcaccaggaaccacctgcctgtgcccaacctggaccctgacacctaccgcctgcacgtggtgggcgcccctgggggccagagcctgagcctgagcctggatgacctgcacaacttccccaggtatgagatcaccgtgaccctgcagtgtgccggcaacagaagaagtgagatgacccaggtgaaggaggtgaagggcctggagtggaggactggagccatcagcacagcccgctgggccggggcccggctgtgtgatgtgctggcccaggccggccaccagctgtgtgaaacagaggcccacgtgtgctttgagggcctggacagcgaccccaccggcacagcctacggggccagcatccccctggcccgggccatggaccctgaggccgaggtgctgctggcctatgagatgaatggccagcccctgccccgggaccacggcttccctgtgcgggtggtggtgcctggggtggtgggcgcccggcacgtgaagtggctgggccgggtgtctgtgcagcctgaggagagctacagccactggcagaggcgggactacaagggcttcagccccagcgtggactgggagaccgtggactttgacagcgcccccagcatccaggagctgcctgtgcagagcgccatcacagagcccagagatggagaaacagtggagagcggggaggtgaccatcaagggctacgcctggagcggcggcggccgggccgtcatccgggtggatgtgtccctggatggcggcctgacctggcaggtggccaagctggatggagaggagcagaggcccaggaaggcctgggcctggaggctgtggcagctgaaggcccctgtgcctgctggccagaaggagctgaacatcgtgtgcaaggctgtggatgatggctacaacgtgcagcctgacacagtggcccccatctggaacctgcggggcgtgctgagcaatgcctggcaccgggtgcacgtgtatgtgagcccctag

SEQ ID NO: 282399 - DNA, 1638 bp, Artificial Sequence
  derived and/or modified sequence
atgctgctgctgcaccgggccgtggtgctgcggctgcagcaggcctgccgactgaaatccatcccctccaggatctgcatccaagcttgcagcacgaacgatagctttcagccccagagacccagcctaacattttcgggcgacaatagctccacacaagggtggcgtgttatgggcacgttgttgggtctgggggcggtcctggcctatcaggatcaccgatgtagggccgcacaggagagtacgcatatctatactaaggaagaagtctccagccacacctcgcctgaaactggcatttgggtgacactgggaagtgaggtatttgacgttaccgagtttgtggaccttcaccccggaggaccgagtaagctgatgttggccgcagggggaccattagagcccttttgggcgttgtacgccgtgcacaatcaaagccacgtgagagagctgctggcccagtataagatcggcgagctcaacccggaagacaaggtcgccccaacagtggaaacatctgacccctacgctgacgatccagtacgacatccagccctgaaggtgaactctcaacggccctttaatgccgagccaccccctgaactgctcactgaaaattacataacaccaaatcctatcttttttacacggaatcacttgccagtgcccaacttggatccggacacatacaggctccacgtcgttggcgcgccgggtggccagagcctcagtttgtcccttgacgatctacacaatttcccccggtatgaaattaccgttactctgcagtgtgccggcaacagacgaagcgagatgacccaagtgaaggaggtgaaggggctggagtggaggacaggggccatcagcactgccaggtgggctggagcgagactgtgcgatgttctggcacaggccggacaccagttatgcgaaacggaggcccatgtctgctttgagggactcgactctgatcccacaggcaccgcatatggggcctccattcccttggcacgggctatggacccagaggctgaggtactgctggcctacgagatgaatggtcagccgctgccccgggatcacgggtttcccgtaagagtcgtggtaccgggtgtagtcggagcacgacatgttaaatggttgggcagggtgtctgtgcaacccgaggagtcctacagccactggcagaggcgagactacaagggattcagtccgtcggtggattgggagactgtcgacttcgactctgcaccttctattcaggagttgccggttcagagcgccattactgaacctcgcgacggtgaaaccgtggagtctggtgaagtaactatcaaaggatatgcctggtcaggcggggggcgtgctgtgataagagtggacgtaagtttggacggcggtttaacttggcaggtggctaaactcgacggggaagagcagagaccgcggaaagcttgggcatggagactgtggcagttgaaagctccggttcccgcgggccaaaaagagctcaacatagtctgcaaggccgtcgacgatggctacaatgtccaacctgacacagtagccccaatttggaatttgcggggggtgctttcaaatgcttggcacagagtccacgtatacgtgtccccctag

SEQ ID NO: 282400 - DNA, 1638 bp, Artificial Sequence
  derived and/or modified sequence
atgctgctgctgcaccgggccgtggtgctgcggctgcagcaggcctgtcgactgaaaagcattcctagtagaatctgtattcaggcatgttcaaccaacgacagttttcagccacagagaccatcactgacgttctcgggcgataactcctctacccagggttggcgggttatgggcacactactggggctcggtgcagtcctcgcctaccaggatcacaggtgcagagccgcccaagagagtacccacatatacacgaaggaagaggtctcttctcataccagtcctgaaactggtatctgggtgaccctcgggtccgaggtgtttgatgtcacagagttcgtagaccttcaccctggtggcccatctaagctaatgttagccgcaggggggcccctggaaccgttttgggccctgtacgcagtccacaaccagtcacatgtgcgtgagttgctcgcccagtataaaattggggaactcaatccagaggacaaagtggcaccaacggttgaaaccagcgacccatatgctgatgacccagtgcgtcatccagcccttaaagtgaattcccagcgcccgttcaatgccgagcctccgccggagctgctgaccgaaaactatattactcctaaccccatcttttttacgcgaaatcatctccccgtccctaatctggatccagatacttatagattgcacgtggtcggagcgcccggtggccaatctctgtctctctcattagacgatctgcacaattttcccagatacgagattaccgttacgcttcaatgcgcaggaaatcgccgcagcgaaatgactcaggtcaaggaggtgaagggactagagtggaggacaggagctattagtacagccagatgggcgggggcccggctgtgtgacgtgttggctcaggctggccatcagctttgtgaaaccgaggctcatgtgtgttttgagggtctggattccgatccaacaggcacggcctatggcgcatccatccctctggccagagccatggatcctgaagctgaggtgctgctggcctacgagatgaatggtcagccactgccccgggatcatggatttccagtgcgagtcgtcgtgcccggcgtggtcggcgcacggcacgtaaagtggcttggcagagttagcgtccagccagaagaaagctactcccactggcagcggcgcgactacaaagggttttcccctagcgtggattgggaaactgttgacttcgactcggcaccttccatccaggagctccctgttcaatcagccatcaccgagccccgcgacggcgaaactgtagagagcggcgaggtgaccatcaaggggtatgcctggagcggtggcgggcgagctgttattcgagtcgacgtctctctggacggggggctgacttggcaggtagcaaaacttgatggggaggaacaaaggccccgtaaagcttgggcatggcggctgtggcagctgaaggccccagtgcccgcgggtcagaaagagctgaatatcgtatgcaaggccgtcgatgacggatataatgtgcaaccagacaccgtggctccgatctggaacctgcgcggggtcttgtcgaatgcctggcacagagtgcatgtttatgtgtcaccctag

SEQ ID NO: 282401 - DNA, 1638 bp, Artificial Sequence
  derived and/or modified sequence
atgctgctgctgcaccgggccgtggtgctgcggctgcagcaggcctgcaggctgaaatcaatccctagccgcatctgcatccaggcttgctcaacaaacgatagcttccaacctcagcgacctagcctaacattctcaggcgataacagcagcacacaaggctggagggtgatgggtacccttctcgggctgggagccgtcctcgcctatcaagaccacaggtgcagagctgcccaggagagtacgcatatctatacaaaagaggaggtatcctcacacacgtcaccggaaaccggcatctgggttactctgggtagcgaagtgttcgatgtgaccgagtttgttgacctccacccgggtggaccatccaaattgatgctcgctgccggaggccccctggagcccttctgggcgctatacgctgtgcacaatcagtcacatgttcgagaattgctcgcacagtataagatcggcgagctgaaccctgaggacaaagtggcccctacagtggaaacctcagatccttatgctgacgaccctgtgagacacccagccttaaaagtcaattcccaaagacctttcaacgccgaacctccgccggaactactgaccgaaaactatattaccccaaatcctatcttctttacccgcaatcatctcccagtcccgaatctcgatccggacacctatcggcttcacgtcgtgggcgctccaggggggcagtccctgtctctgagcctggacgaccttcacaactttcctaggtacgagataactgtgacgttgcagtgcgccgggaatcgcagatccgagatgacgcaggtgaaggaggtcaagggacttgagtggaggacaggtgcaatctccaccgcgcggtgggctggcgcaaggctgtgtgacgtgttagcccaggcaggccatcaactatgcgaaacggaggcacacgtttgctttgaagggcttgactccgatcctaccggaactgcgtacggggcttccattcctctggcacgcgccatggatccagaagcggaggtactgctggcctatgaaatgaacgggcagcctttgccgcgggaccatggttttcccgtcagggtggtggtcccaggcgtagtcggagccaggcatgtgaagtggcttggacgcgtgagtgttcagccagaagaatcatacagccattggcaacgcagggactacaagggatttagcccaagtgtggactgggaaaccgttgattttgattcagcacctagtattcaagaactccctgtgcagtcagctattacagagcctagggatggagagaccgtggagagcggggaggttacaataaaagggtacgcctggtctggcgggggtcgggctgtcatccgggtcgacgtgagtctggatggtggattaacgtggcaggtggccaaactggacggggaggaacagaggccaaggaaagcatgggcctggagactctggcaacttaaggctcccgtgcctgctgggcaaaaggagcttaatatagtatgcaaggccgtcgatgatgggtataatgtgcagcccgacacagtggcccctatctggaacctgagaggggtgttgagcaatgcatggcatagggtccacgtctacgtgagtccctag

SEQ ID NO: 282402 - DNA, 1638 bp, Artificial Sequence
  derived and/or modified sequence
atgctgctgctgcaccgggccgtggtgctgcggctgcagcaggcctgccgactgaaatccatcccatctcgcatctgcattcaagcctgctctacgaatgattcctttcagccccagagacctagcctgaccttctccggggacaattcctcaactcaaggatggagggtaatggggaccctcttgggtttaggcgctgtcttggcctaccaggaccacaggtgtcgcgccgcccaggagagcacgcacatctatacaaaggaagaggtgagtagccatacaagtccagagaccggcatttgggtgacactaggtagtgaagtctttgacgtcacagagtttgtggacttacaccccggcgggccatctaaactgatgttggccgccggcgggcccttggaacctttctgggctctgtatgctgtacacaaccagtctcacgttcgagagctactggcacagtataagataggagagctcaatcccgaagataaggtggcaccaacagttgagaccagcgatccttacgcggatgaccctgtccgccatcctgctcttaaagtgaacagccaaaggccatttaacgccgagcctccccctgaacttctgaccgagaactacattaccccaaacccaatcttctttacgcgcaaccatttgcctgtgcctaatctcgacccagacacttatcggctgcacgttgtgggggcgccaggaggacaaagcttgtcactctcacttgacgatcttcacaatttcccgaggtacgagataacggtgacattgcaatgcgcagggaatcggaggtctgaaatgactcaggtcaaggaggtcaagggtctggagtggcgcacaggggctatcagtacagcccgatgggcaggagccaggctgtgcgacgttttagcccaggcaggccaccagctttgcgaaacagaggcccatgtctgcttcgaagggctggatagcgatcccacggggacagcctatggggcaagtatccccctagctcgcgcgatggaccctgaggctgaagtcttgctggcttatgagatgaacggccagcctctgcctcgtgaccatggcttcccagttcgagtggtggtgcctggagtcgttggtgctaggcacgtcaagtggcttggacgggtcagtgtgcagcctgaggagagctactcccactggcagcgtagggactacaagggtttcagtccgtcagtcgactgggaaacagttgattttgattccgctccatccattcaggaactgccagtgcagtccgctataacagagccgagagatggcgaaacagtggagagcggcgaggtcacaatcaaaggctacgcctggagtggtgggggtagggccgtaattagggtcgacgtctctcttgatgggggtctgacttggcaagtggccaagctggatggtgaggagcagaggcccagaaaagcctgggcatggagactttggcagttaaaggcccctgtgcctgccggccagaaggaacttaacattgtgtgcaaggccgttgacgatggctacaacgtacaacccgacactgtggcccctatatggaatctgaggggggtcttgagtaacgcatggcatcgtgtgcatgtctacgtcagcccctag

SEQ ID NO: 282403 - DNA, 1638 bp, Artificial Sequence
  derived and/or modified sequence
atgctgctgctgcaccgggccgtggtgctgcggctgcagcaggcctgtcgtctgaagagcatcccttctagaatttgcatacaggcttgtagcacaaacgacagtttccagccccaacggcctagtctgaccttttccggggacaacagttctacccaagggtggcgggttatgggtaccctgcttggcctcggcgctgtactggcttaccaggaccacaggtgccgtgcggcccaagaaagcacacatatctacaccaaggaagaagtttcgtcccatactagtcctgagactggcatatgggttaccctgggctccgaggttttcgatgttactgaattcgtggacctgcatcctggcggtccctccaagctgatgctggccgctgggggtccactggagcctttctgggcactctatgccgttcacaatcagtctcacgtgagggagttactggctcagtacaaaattggggaactgaaccccgaagataaggtagcccccaccgtggaaacatcagacccatatgccgatgatcctgtgcgccaccctgctctgaaggtgaacagtcagaggcctttcaatgccgaaccgccacccgagctgctcacggagaattatataacaccaaatccgatcttctttactaggaaccatttgcccgttcctaatctggaccctgatacctatcgcctgcatgtagtgggcgcacccggaggccagtccctgagtctatctcttgatgacctccacaacttcccaaggtatgaaattaccgtaaccttacagtgcgccggcaatcgaaggtccgaaatgacccaggttaaagaggtgaaggggctcgaatggcggaccggagctatttccactgccaggtgggcaggcgcaagactctgcgacgtcctggctcaagccggacaccagctctgcgagaccgaagcccacgtctgctttgagggcctggactccgatcctaccggaaccgcctacggcgctagcatccccctggctagagcaatggatcccgaggcagaggttttactggcctatgaaatgaacgggcagcccctgcctagggaccatggatttccggtaagggttgtggtccctggcgttgtgggggctaggcacgtgaaatggctcggcagagtatccgtgcaaccggaggagagctatagccattggcagaggagggactacaaaggcttctccccctcagtggattgggagactgttgacttcgatagtgcccctagtatacaggaactgcctgttcagtctgcgatcaccgaaccgcgcgacggtgagaccgtggagagtggagaggtgacaatcaaaggctacgcatggtccggcgggggtcgggccgtgattcgggtagacgtctctctcgatggcggcttgacgtggcaggttgcaaagcttgacggagaggagcagagacctagaaaagcatgggcttggcgcctatggcagttgaaagcccctgttccggcgggccaaaaagagctgaatatcgtctgcaaagctgtggatgatggctacaacgtgcaacccgatactgtggcaccaatctggaatctgagaggcgttctttctaacgcctggcaccgcgtacatgtctatgtctccccctag

SEQ ID NO: 282404 - DNA, 1638 bp, Artificial Sequence
  derived and/or modified sequence
atgctgctgctgcaccgggccgtggtgctgcggctgcagcaggcctgccggctgaaaagcattccctcccggatctgtatacaggcttgttccaccaacgactctttccaaccccaacgaccctcactgactttctccggcgacaattcgtcaacacagggctggagagtgatgggtactcttctcggacttggtgccgtgctggcttatcaagaccaccgttgtagggctgcacaagagagcacccatatttacacgaaggaggaggttagtagccacacatcacccgagaccggaatatgggtcaccctgggatctgaagtgtttgacgtcaccgagttcgtagatctgcaccctggtggcccatctaagctcatgctggcagcaggggggccactggaacctttctgggcactgtatgccgtccataatcagtctcacgtgcgagagttgctggcccaatataaaataggagagctcaatccagaggacaaggttgctccaacagtggagacaagcgatccatacgcagatgacccagtgaggcatcccgccctgaaggtcaactcgcagcgtccattcaacgcagaaccacctcctgaattactaaccgaaaattatatcactcccaatcctatcttctttactcgcaaccacctgccggtacctaacctcgatcctgacacctataggctccacgtggtgggcgcccctggcggccagtctctcagcttatcactcgatgatctccataactttcctcgctatgaaattaccgttacgctgcagtgtgccggcaatcgcaggagcgaaatgactcaggtgaaggaagtaaagggtctcgaatggcggactggggcaatttcaacagcccgttgggccggggctcggctgtgtgacgtcctagcacaagcaggccaccaattgtgcgagactgaagcacacgtctgttttgaggggctcgatagcgatccaactggcactgcatatggcgcatctatccccctggcacgggccatggatccggaagccgaggtgctcctagcatacgagatgaacggacagcccctcccccgggaccacgggttccccgtcagagtggtggtccccggagtggtgggcgcgcggcacgtgaagtggttaggaagggtgagcgtccagccagaggaaagttacagtcactggcagagaagggactataagggatttagcccctctgttgactgggagaccgttgacttcgattctgcccctagcatccaggagctccctgtgcagagcgccataaccgagcctagagatggggaaacagtcgagagcggtgaggttaccattaaagggtatgcttggagtggggggggcagagctgtcattagggttgatgtgtcactcgacggcggtcttacttggcaagtcgcgaaactcgacggagaggagcagcggccccggaaggcttgggcatggcgactctggcaactcaaagcccctgtgccagctggacagaaggagctgaatattgtgtgtaaggccgtagatgatgggtacaacgtacagccagacacggtcgcgcccatttggaacctgcggggcgtgctctccaatgcatggcatcgagttcacgtgtatgtctcaccatag

SEQ ID NO: 282405 - DNA, 1638 bp, Artificial Sequence
  derived and/or modified sequence
atgcttctgctgcaccgggctgtcgttctccgtctccaacaggcatgcagactaaaatccatcccttctaggatctgcatccaggcctgctccaccaatgatagttttcagccacagaggccatctcttacattctctggagacaactcgtcaacgcagggctggagggtgatgggcacattgctgggcctgggagccgtgcttgcttaccaagatcaccgctgccgcgctgcacaggaatccacacacatatacacaaaggaagaagtcagctctcataccagcccagaaaccggcatttgggttaccttggggtctgaggtattcgacgtcaccgaatttgttgacttgcatccaggcggtccatcaaagctcatgctggccgcaggcggtcctctggagcccttttgggcactgtacgccgtacacaatcagagtcacgtgcgggaactgctggcacaatacaagattggcgaactgaacccagaggacaaagtggctcccactgtagagacatctgacccctacgctgacgaccccgttcgacatccagccttgaaagtgaattctcagcgaccgtttaacgcagagcccccaccagagctgctgactgagaattacatcacccccaacccgattttttttacaaggaatcatctcccggttcccaatttagaccctgatacctatcgccttcacgtcgtgggcgcacctggcggacagtcactgagtcttagtctggacgatcttcacaactttccaagatatgaaatcaccgttacgttacaatgtgccggtaacagacggtcagaaatgacacaagtgaaagaggtcaaggggctcgagtggagaaccggagccatctctacggccagatgggcgggagcgaggctgtgcgacgtgttggcacaggccggacatcagctgtgcgaaacagaagctcacgtgtgtttcgaaggcctcgacagcgaccccactggcaccgcctacggcgcttcaattccgctagcgagagcaatggatccggaggccgaggttttattagcctacgaaatgaacggccagcccctccctagagatcatggctttcccgttcgcgtggtggtgcccggagttgtcggtgcccgtcacgtaaagtggttaggtcgagtgagtgtgcagccggaagaatcatatagccactggcagcgtagagattacaaaggtttcagcccctcagtggactgggagactgtcgactttgattccgctccatcaattcaggaactgcctgtgcagtctgccatcacagagcccagggacggcgagactgtagagagtggcgaggtcacaatcaaaggatatgcttggtccgggggagggagagcagtcatacgcgtggatgtatctctcgatggcggtctgacgtggcaagtcgcaaagctggacggcgaagaacagcgacctcggaaagcgtgggcatggcgactctggcagctgaaagctccagtgccggctggacagaaggagttaaatatcgtatgtaaagctgtcgatgacggttacaatgtacaacccgatactgtggccccaatctggaacctacgcggtgttctcagcaacgcatggcatagagtgcacgtgtatgtctcgccatag

SEQ ID NO: 282406 - DNA, 1638 bp, Artificial Sequence
  derived and/or modified sequence
atgctcctgctgcatcgcgctgtggtcctgaggttgcagcaggcgtgccgtctgaagtccatcccctctcgcatttgcatacaggcatgttccacaaacgattcttttcagccccagcgcccaagtctgacattttccggggacaatagtagtacccagggttggcgtgtgatgggaaccctgttgggcctcggagccgtgctggcctatcaagatcatcgttgtcgcgcagctcaggaatctactcacatctatacgaaggaggaagtctcatctcataccagtcctgagaccggaatttgggtgactttgggatccgaagttttcgatgtaaccgagtttgtcgacctccatcccggagggccaagtaaactgatgctggccgctggtgggccactggagcccttttgggcactttacgctgtgcacaaccaatcacacgttcgggaactgttggcacagtataagatcggtgaactgaatcccgaggacaaggttgcgcctacagtagagaccagcgacccttacgccgatgatcccgttcggcatcccgctctcaaggttaactctcagcgcccattcaacgccgaaccgcctcccgaactactcacagagaactatatcactcctaatcctattttcttcacccgcaaccatctgcccgtgcctaaccttgacccagacacatacagactgcacgttgtgggtgcccctggaggtcagtcgctgagcctttctctggacgatttgcataattttccaagatacgagatcacagtgacattgcagtgcgccggaaatcggaggtccgaaatgacacaagtgaaggaggtgaaggggttggaatggcgcacgggtgcaatttccaccgccagatgggctggcgcacggctgtgtgatgtattagctcaggcaggccaccagctgtgcgaaactgaagcacatgtctgcttcgaggggttagatagtgatcccaccggaaccgcttatggcgcttctatccccctagcccgtgctatggatccagaggctgaagtgctgctggcctatgagatgaatgggcagcctctccccagagaccatgggtttcctgtgcgcgtagtggtgcctggtgttgtgggggctaggcatgtgaagtggcttggcagggtttccgtgcaaccggaagagagttactcacattggcagagacgcgattataagggcttctccccttctgtagactgggagactgtggatttcgactcagcgcctagcatccaggagctaccggtccagtcggccatcacagagccgcgtgacggagagaccgtggaaagcggggaggtcaccataaaaggctatgcatggtctggaggcggacgagcggtaatccgggtggacgtgtctctggacggcggtcttacctggcaggtggccaaactcgatggggaggagcaaaggccaaggaaggcctgggcctggcggctttggcagttgaaagctcctgttcccgctgggcagaaagagttgaacattgtctgtaaagctgtagacgatgggtataacgtgcaaccagatacagtggcccctatctggaacctccgaggggttctctcaaatgcctggcatagggtccacgtatacgtctcaccctag

SEQ ID NO: 282407 - DNA, 1638 bp, Artificial Sequence
  derived and/or modified sequence
atgctactcctacaccgagctgttgtgttgcgccttcaacaagcgtgtcgattgaaaagcatcccctctcgcatatgtatccaagcctgctctacgaacgactcattccagccccagagaccgtctctgacatttagcggtgataacagtagcacgcaggggtggagggtgatggggaccttgttagggttaggtgccgtactggcctaccaagaccataggtgccgtgccgctcaagagtcaactcacatatacactaaggaggaggtctccagccacacaagcccagagacaggcatttgggttactctagggagcgaggtgtttgatgttacggagttcgtcgacctgcaccccggaggtcctagcaagctgatgttagcagcaggtggccctctggagcccttctgggcactctatgccgtgcataaccagtcacatgtgcgggaactgctggctcagtacaaaattggcgagctgaacccagaggacaaagtcgcgccaactgtagagacatctgatccctacgccgacgatccggttcggcaccccgcactgaaagttaactcccagcgacccttcaacgcagaaccacctccggaactcctcactgagaattacatcacccccaacccgatattcttcacacgaaaccatcttcccgtcccaaacttggacccggatacgtaccgtctccacgtagtgggcgctcccggaggccagtctttaagtctgtcgttggatgacctgcacaatttccctaggtacgagattaccgtgacactgcagtgtgcgggaaaccgtcgctctgagatgacccaagtaaaagaagtgaagggccttgagtggcgtacaggcgctatctctacggcccgttgggcaggcgctcggttgtgcgatgtgcttgctcaagctggacatcagctgtgtgagacagaggcacacgtgtgtttcgaggggttggatagtgaccccaccggcacagcttatggggctagcatccctcttgctagggcgatggaccctgaggccgaggtccttctggcttatgaaatgaacggccagcctctgccacgcgatcatggctttcccgttagagttgtggttcccggagtggttggggcaaggcacgtaaagtggttggggagagtgagcgttcagcccgaggaaagctattcacactggcagcggagggattacaaaggctttagtccctcagtagattgggagacagtggatttcgatagcgccccatcaattcaggagctgcccgtgcagagtgctatcaccgaacctcgggacggcgagaccgtggagtccggagaagttacaattaaagggtatgcctggtctggagggggacgggcagtaatccgtgtggatgtgagtctggacggtggcctcacttggcaagtggcaaaactcgacggagaagagcaacgcccacgaaaagcctgggcctggagactatggcagcttaaagcaccagtacccgcaggacagaaagagctgaatattgtgtgtaaggccgttgacgacggctataatgtgcagcccgatactgtggccccaatttggaatcttcggggagtcctttccaacgcctggcacagagtgcatgtatatgtgtccccctag

SEQ ID NO: 282408 - DNA, 1638 bp, Artificial Sequence
  derived and/or modified sequence
atgctgctgttgcaccgggctgttgtcctgcgcctgcaacaagcttgccgcctaaaatccatcccttcacgcatctgtattcaggcgtgcagcactaacgattccttccagccgcagaggcccagccttaccttttctggggataattccagcacgcaggggtggcgggtgatggggaccttgctgggcctgggcgcagttctcgcataccaagatcacaggtgtagagctgcacaggaaagtactcatatctacaccaaagaggaggtgtcatcacacacctcccccgagaccgggatctgggtgactctgggttctgaagtgtttgacgtcactgaattcgtggaccttcaccctggcggaccatcaaaacttatgctggcggctgggggtccactcgagccattttgggccctgtatgcagtccacaatcagtcccacgtcagggaactgttggcgcagtacaaaatcggagaactcaatcctgaagacaaagtcgctccaactgtggagacttctgatccttatgctgacgaccccgtgcgtcacccggctctgaaggtcaatagtcaaagaccttttaacgccgagcctccccctgaattgctgaccgagaattatataacacccaatccaatttttttcacccgtaatcacttaccagttccaaatctggaccctgatacataccggctccacgtcgtcggtgctccagggggacaatcattgtccttgtccctggacgatctgcacaacttccccaggtacgagatcacagtcacgctgcagtgcgccggaaatcgcagatctgaaatgactcaggtgaaagaagtgaagggcctggaatggaggacaggagccatcagtacagcaagatgggcgggagcaagactctgtgatgttctggctcaggccggacaccaactctgtgaaactgaggcccacgtatgctttgaaggtcttgattccgatccaaccggcaccgcctacggggcatccatcccgctagccagagcaatggacccagaagccgaggttctcctggcttatgagatgaacggtcagccgctccccagagaccatggcttccctgtccgtgtggtcgtccccggtgtcgttggagccagacatgtcaaatggctcggcagggtatctgtgcagcctgaggagtcctactcacattggcagagaagggattataaaggtttcagtccatctgttgattgggaaacagtggattttgatagcgctccatccattcaggagctgcccgtgcagtccgccatcactgaaccaagggacggcgagactgtagagagtggagaagtgacaataaagggatacgcctggtctggcggagggagggctgtgatacgggtcgacgtctccttggatggcggattgacctggcaagtagcaaaactggacggtgaggaacagcgcccacgtaaagcctgggcatggaggttgtggcagcttaaggcgccagtgccagctgggcagaaggaattgaacatcgtgtgcaaagcagtggacgatgggtataatgttcagccagatactgtagcacccatttggaacttgagaggggtcctttccaatgcctggcatcgagtgcacgtgtatgtgtctccatag

SEQ ID NO: 282409 - DNA, 1638 bp, Artificial Sequence
  derived and/or modified sequence
atgctgcttttacaccgtgctgtggttctgcggctgcagcaggcatgccgcttgaagtctattccctccaggatatgcatccaggcttgtagtacaaacgatagttttcagccgcagcgaccctcattaacattctctggtgataactctagtacccaaggttggcgggtgatgggaaccctgttagggcttggggcagtcctcgcttatcaggatcatcgatgtcgcgcagcccaggagagcacccacatctataccaaagaggaggtctccagccacacctcccctgaaaccggtatttgggtgactctgggctccgaggtttttgatgtgacagagtttgttgacctgcatccaggtggcccttctaaactgatgctcgcagccggaggccctcttgagcccttctgggctctgtatgctgtacataaccagagccacgtccgggagttgctggctcagtacaagattggggagcttaacccagaagataaagtggctcccaccgtggaaactagtgacccctacgctgatgatcctgtgcggcaccccgctttgaaggtgaacagtcagcgcccattcaacgccgagccaccaccagaactgctcaccgagaattatattaccccaaatcccatctttttcactcgtaaccacttaccagtgccaaacttggaccctgatacataccgccttcacgtggttggcgctcccggaggacaatctctgtctctatctctagacgatctccacaattttccacggtacgaaataacagtgactctgcagtgtgcagggaatcgacgctcagagatgacccaggtcaaagaagtgaaggggctcgagtggagaaccggagcaatctctactgcgaggtgggcgggtgccagactttgtgatgtactggcccaggctggacaccaattgtgtgaaactgaggcccatgtttgcttcgagggattggatagcgatcccaccgggactgcatatggtgcttctataccgctggctcgagccatggatcccgaggccgaagtactcctagcctatgagatgaacggacagcccctccctagggaccacggttttcctgtgagagttgtggtgcccggagtggttggggcacggcacgtgaaatggttggggagggtgagtgtccaaccagaagaatcttattcacactggcaaagacgggattacaagggatttagtcccagcgttgactgggaaacggtcgactttgattcagccccttcaattcaagaactgccagtccagagcgccattactgagccccgagacggagaaactgtagagtctggtgaggtgactattaagggatacgcctggagtggaggaggtcgcgcagtgatccgggtggacgtgagcttggacggcggactgacctggcaggtggctaaactcgacggcgaggaacagcgccctcgtaaggcctgggcatggcgactgtggcagttgaaagccccagtgcctgccggacaaaaagaattgaatattgtgtgcaaagctgtggacgacggatataacgtccagccagatactgttgctccaatctggaacttacggggtgtgctgagcaacgcttggcatagagtacatgtgtatgtgtccccttag

SEQ ID NO: 282410 - DNA, 1638 bp, Artificial Sequence
  derived and/or modified sequence
atgctattgttgcatagggctgtggtgctgaggctgcaacaagcctgtagattgaaatcaattccatcaagaatatgcatacaggcctgcagcacaaacgatagctttcaacctcagaggccaagcctaacattcagcggcgacaattcctctacccagggatggcgcgtaatgggaacccttctgggtctgggcgctgtactcgcttaccaggaccacaggtgtcgcgctgctcaggaaagcacccacatctatacaaaagaggaggtttccagccacactagtcccgagacagggatttgggtgacactcggcagtgaagtgtttgacgttacagaatttgtggaccttcaccctgggggaccatccaaactcatgctggccgcaggcggaccgctcgaaccattttgggccctctacgctgtgcacaaccagagccatgtccgggaactattggctcagtataagattggcgagctcaacccagaagacaaagttgcccctaccgttgagacatctgacccctacgccgacgaccccgttcgtcacccagccctgaaagtgaattctcagagaccatttaatgccgaaccccctccagagctgctgactgagaactacatcacaccaaaccctattttcttcactaggaaccacctcccagtcccgaaccttgacccagacacttacagactacatgttgtgggagctccgggaggacaatcactctctctatcactggatgacttacataacttcccaagatatgaaatcacagtaacattacagtgtgccggaaaccggaggtcagagatgacacaggtcaaggaagtgaaaggcttggagtggaggaccggggcaatcagtaccgctcgctgggccggagccaggctctgtgacgtgctggcccaagctgggcatcagctttgtgagaccgaggctcacgtctgtttcgaaggcctggactctgacccaaccgggacagcatacggggcatcgatccctttagcacgggctatggatcccgaggccgaggtgcttctggcttacgagatgaacggacagccgctgcctcgtgaccacggttttccagtgagagtagtagtgcccggagtagtgggcgcaagacacgtgaagtggctcggcagggtttcagtgcagcctgaggaatcttactcccactggcagcggagggattacaaaggcttcagccccagcgtggattgggagactgttgatttcgacagcgctccgagcatacaggaactccccgtgcagtctgctatcacggagcctcgggacggcgagactgtggagtccggcgaagtcaccatcaaggggtatgcgtggagcggcggaggcagagccgtaatccgcgtggacgtaagcctcgacggcggattaacttggcaggtcgccaaactcgatggcgaagagcaaagacccaggaaagcttgggcttggagactgtggcagctcaaggcacctgtccctgcaggtcaaaaggaattaaacatcgtgtgcaaggctgtggacgatggctacaacgtccagcctgataccgtcgcccctatatggaacctgaggggtgtgctgtccaacgcatggcatcgcgtgcacgtgtacgtctcgccatag

SEQ ID NO: 282411 - DNA, 2364 bp, Artificial Sequence
  derived and/or modified sequence
agtgagaggtcacttactgcagccggacataacggcgctggccccgccccttctcgagaactcgcagagctgggctggtaaaattgcagtgctgaagacactggacccgcaaaaggctgtccctcccaaacctgggattctgggctcactgagttcacctgcgagtcagccctacctgcactgctctggtctagtacaaacaggctgctggcattgaggtctgctacaatgctgctgctgcacagagctgtggtcctcaggctccaacaggcctgcagactcaagtcaatcccctcaaggatctgcattcaggcctgctccacaaatgattcatttcagccccagcgccccagcctcaccttctctggtgataactccagcacccagggatggagagtcatggggaccctattaggtctcggtgcagtgttggcctatcaggaccatcggtgtagggctgctcaggagtcaacacacatatacactaaggaggaagtgagttcccacaccagccctgagactgggatctgggtgactctgggctctgaggtctttgatgtcacagaatttgtggacctacatccaggggggccttcaaagctgatgctagcagctgggggtcccctagagcccttctgggccctctatgctgttcacaaccagtcccatgtgcgtgagttactggctcagtacaagattggggagctgaatcctgaagacaaggtagcccccaccgtggagacctctgacccttatgctgatgatcctgtacgtcacccagccctgaaggtcaacagccagcggccctttaatgcagagcctccccctgagctgctgacagaaaactacatcacacccaaccctatcttcttcacccggaaccatctgcctgtacctaacctggatccagacacctatcgcttacacgtagtaggagcacctgggggtcagtcactgtctctttccctggatgacttgcacaactttcccaggtacgagatcacagtcactctgcagtgtgccggcaaccgacgctctgagatgactcaggtcaaagaagtaaaaggtctggagtggagaacaggagccatcagcactgcacgctgggctggggcacggctctgtgatgtgttagcccaggctggccaccaactctgtgaaactgaggcccacgtctgctttgagggactggactcagaccctactgggactgcctatggagcatccatccctctggctcgggccatggaccctgaagctgaggtcctgctggcatatgagatgaatgggcagcctctgccacgtgaccacggcttccctgtgcgtgtggtggttcctggagtggtgggtgcccgccatgtcaaatggctgggcagagtgagtgtgcagccagaggaaagttacagccactggcaacggcgggattacaaaggcttctctccatctgtggactgggagactgtagattttgactctgctccatccattcaggaacttcctgtccagtcggccatcacagagccccgggatggagagactgtagaatcaggggaggtgaccatcaagggctatgcatggagtggtggtggcagggctgtgatccgggtggatgtgtctctggatgggggcctaacctggcaggtggctaagctggatggagaggaacagcgccccaggaaggcctgggcatggcgtctgtggcagttgaaagcccctgtgccagctggacaaaaggaactgaacattgtttgtaaggctgtggatgatggttacaatgtgcagccagacaccgtggccccaatctggaacctgcgaggtgttctcagcaatgcctggcatcgtgtccatgtctatgtctccccatgagcatggaaaggagccacctccacccctttccccacccattagcctcactgcttcagaaaaatctttcccacctttcaacttcttggatcacaactctggccttcctaagccatacccaagtacacatatagcacatttcacccaaggaccttccctctttggacactatgttacatacccctcttggcctttgaacctgtgccaggaagtgtgagctgttacagcaaggggctagaagtgaaaaaagtaattctggagacaagcactattttctcttcctaccccacctccatttctaatgcctactgccatcaaggccttgttttgcttttctttttggattgttcagagaaatgtgtgtggcatgtgtaagaaaagtgtatatactatcttatactacctctccaggttgccagagagttgcgaggagagcaaggggcacaaccgtctccctttatagttctacttttctaataaatagtctgtttaagatcataa

SEQ ID NO: 282412 - DNA, 2306 bp, Artificial Sequence
  derived and/or modified sequence
aatggttgagccacccgcttccagccaatggctgagggataagctgaggggagtgagaggtcacttactgcagccggacataacggcgctggccccgccccttctcgagaactcgcagagctgggctggtaaaattgcagtgctgaagacactggacccggtctgctacaatgctgctgctgcacagagctgtggtcctcaggctccaacaggcctgcagactcaagtcaatcccctcaaggatctgcattcaggcctgctccacaaatgattcatttcagccccagcgccccagcctcaccttctctggtgataactccagcacccagggatggagagtcatggggaccctattaggtctcggtgcagtgttggcctatcaggaccatcggtgtagggctgctcaggagtcaacacacatatacactaaggaggaagtgagttcccacaccagccctgagactgggatctgggtgactctgggctctgaggtctttgatgtcacagaatttgtggacctacatccaggggggccttcaaagctgatgctagcagctgggggtcccctagagcccttctgggccctctatgctgttcacaaccagtcccatgtgcgtgagttactggctcagtacaagattggggagctgaatcctgaagacaaggtagcccccaccgtggagacctctgacccttatgctgatgatcctgtacgtcacccagccctgaaggtcaacagccagcggccctttaatgcagagcctccccctgagctgctgacagaaaactacatcacacccaaccctatcttcttcacccggaaccatctgcctgtacctaacctggatccagacacctatcgcttacacgtagtaggagcacctgggggtcagtcactgtctctttccctggatgacttgcacaactttcccaggtacgagatcacagtcactctgcagtgtgccggcaaccgacgctctgagatgactcaggtcaaagaagtaaaaggtctggagtggagaacaggagccatcagcactgcacgctgggctggggcacggctctgtgatgtgttagcccaggctggccaccaactctgtgaaactgaggcccacgtctgctttgagggactggactcagaccctactgggactgcctatggagcatccatccctctggctcgggccatggaccctgaagctgaggtcctgctggcatatgagatgaatgggcagcctctgccacgtgaccacggcttccctgtgcgtgtggtggttcctggagtggtgggtgcccgccatgtcaaatggctgggcagagtgagtgtgcagccagaggaaagttacagccactggcaacggcgggattacaaaggcttctctccatctgtggactgggagactgtagattttgactctgctccatccattcaggaacttcctgtccagtcggccatcacagagccccgggatggagagactgtagaatcaggggaggtgaccatcaagggctatgcatggagtggtggtggcagggctgtgatccgggtggatgtgtctctggatgggggcctaacctggcaggtggctaagctggatggagaggaacagcgccccaggaaggcctgggcatggcgtctgtggcagttgaaagcccctgtgccagctggacaaaaggaactgaacattgtttgtaaggctgtggatgatggttacaatgtgcagccagacaccgtggccccaatctggaacctgcgaggtgttctcagcaatgcctggcatcgtgtccatgtctatgtctccccatgagcatggaaaggagccacctccacccctttccccacccattagcctcactgcttcagaaaaatctttcccacctttcaacttcttggatcacaactctggccttcctaagccatacccaagtacacatatagcacatttcacccaaggaccttccctctttggacactatgttacatacccctcttggcctttgaacctgtgccaggaagtgtgagctgttacagcaaggggctagaagtgaaaaaagtaattctggagacaagcactattttctcttcctaccccacctccatttctaatgcctactgccatcaaggccttgttttgcttttctttttggattgttcagagaaatgtgtgtggcatgtgtaagaaaagtgtatatactatcttatactacctctccaggttgccagagagttgcgaggagagcaaggggcacaaccgtctccctttatagttctacttttctaataaatagtctgtttaagatcataa

SEQ ID NO: 282413 - DNA, 2860 bp, Artificial Sequence
  derived and/or modified sequence
gtaatatagggtttggtgcaatctgtggtttcaaacatctactgggggtcgtagaacatatccccagtggataagggggtactactgtacttgttggctcttcatgttagctctgctaggcagatgtcatttcagagatgaggaagcaagttcagaacggcttggaatcttgctcaggaaatcgggctggttaatgaataacaagagatccagtttcacaaacccaaggcattttgcccccagaatctgggcttcttcacccatttaggctgtcactacttttttttcacttttttatccctgtttaagtcagtctgacccacagttgtcctctgctgacttcagaaataataatctggccagtagacatttggtttcggtcctttaggcccttcgccccaggcatcgttctctatggtggacaaagttcagaatggaagatgggagaaaggtgattctgattctagaagcacccatccctcctaccccattccccacccgcattacctgccatcctgtcagcacagtctgtctctgaagtgctccaagttttctctaagggcccatttggactcccactctcaagactcctcacttgcccagaaagctccttgctgaccttctctgtgtcttcctctcacccattcccttaggcctccctaatatcccctcccagggtctccctatcttgatcccagaatcttccttctacaggtctgctacaatgctgctgctgcacagagctgtggtcctcaggctccaacaggcctgcagactcaagtcaatcccctcaaggatctgcattcaggcctgctccacaaatgattcatttcagccccagcgccccagcctcaccttctctggtgataactccagcacccagggatggagagtcatggggaccctattaggtctcggtgcagtgttggcctatcaggaccatcggtgtagggctgctcaggagtcaacacacatatacactaaggaggaagtgagttcccacaccagccctgagactgggatctgggtgactctgggctctgaggtctttgatgtcacagaatttgtggacctacatccaggggggccttcaaagctgatgctagcagctgggggtcccctagagcccttctgggccctctatgctgttcacaaccagtcccatgtgcgtgagttactggctcagtacaagattggggagctgaatcctgaagacaaggtagcccccaccgtggagacctctgacccttatgctgatgatcctgtacgtcacccagccctgaaggtcaacagccagcggccctttaatgcagagcctccccctgagctgctgacagaaaactacatcacacccaaccctatcttcttcacccggaaccatctgcctgtacctaacctggatccagacacctatcgcttacacgtagtaggagcacctgggggtcagtcactgtctctttccctggatgacttgcacaactttcccaggtacgagatcacagtcactctgcagtgtgccggcaaccgacgctctgagatgactcaggtcaaagaagtaaaaggtctggagtggagaacaggagccatcagcactgcacgctgggctggggcacggctctgtgatgtgttagcccaggctggccaccaactctgtgaaactgaggcccacgtctgctttgagggactggactcagaccctactgggactgcctatggagcatccatccctctggctcgggccatggaccctgaagctgaggtcctgctggcatatgagatgaatgggcagcctctgccacgtgaccacggcttccctgtgcgtgtggtggttcctggagtggtgggtgcccgccatgtcaaatggctgggcagagtgagtgtgcagccagaggaaagttacagccactggcaacggcgggattacaaaggcttctctccatctgtggactgggagactgtagattttgactctgctccatccattcaggaacttcctgtccagtcggccatcacagagccccgggatggagagactgtagaatcaggggaggtgaccatcaagggctatgcatggagtggtggtggcagggctgtgatccgggtggatgtgtctctggatgggggcctaacctggcaggtggctaagctggatggagaggaacagcgccccaggaaggcctgggcatggcgtctgtggcagttgaaagcccctgtgccagctggacaaaaggaactgaacattgtttgtaaggctgtggatgatggttacaatgtgcagccagacaccgtggccccaatctggaacctgcgaggtgttctcagcaatgcctggcatcgtgtccatgtctatgtctccccatgagcatggaaaggagccacctccacccctttccccacccattagcctcactgcttcagaaaaatctttcccacctttcaacttcttggatcacaactctggccttcctaagccatacccaagtacacatatagcacatttcacccaaggaccttccctctttggacactatgttacatacccctcttggcctttgaacctgtgccaggaagtgtgagctgttacagcaaggggctagaagtgaaaaaagtaattctggagacaagcactattttctcttcctaccccacctccatttctaatgcctactgccatcaaggccttgttttgcttttctttttggattgttcagagaaatgtgtgtggcatgtgtaagaaaagtgtatatactatcttatactacctctccaggttgccagagagttgcgaggagagcaaggggcacaaccgtctccctttatagttctacttttctaataaatagtctgtttaagatcataa

SEQ ID NO: 282414 - DNA, 2394 bp, Artificial Sequence
  derived and/or modified sequence
gaactcgcagagctgggctggtaaaattgcagtgctgaagacactggacccgcaaaaggctgtccctcccaaacctgggattctgggctcactgagttcacctgcgagtcagccctacctgcactgctctggtctagtacaaacaggctgctggcattgagggacggagtctccaactcctggcctctagcagtcctcctgtgtaggtctcccaaagtgctagtgtgtccggaattggtgggttcttggtctcactgacttcaagaatgaagccgcggaccctcgcagtctgctacaatgctgctgctgcacagagctgtggtcctcaggctccaacaggcctgcagactcaagtcaatcccctcaaggatctgcattcaggcctgctccacaaatgattcatttcagccccagcgccccagcctcaccttctctggtgataactccagcacccagggatggagagtcatggggaccctattaggtctcggtgcagtgttggcctatcaggaccatcggtgtagggctgctcaggagtcaacacacatatacactaaggaggaagtgagttcccacaccagccctgagactgggatctgggtgactctgggctctgaggtctttgatgtcacagaatttgtggacctacatccaggggggccttcaaagctgatgctagcagctgggggtcccctagagcccttctgggccctctatgctgttcacaaccagtcccatgtgcgtgagttactggctcagtacaagattggggagctgaatcctgaagacaaggtagcccccaccgtggagacctctgacccttatgctgatgatcctgtacgtcacccagccctgaaggtcaacagccagcggccctttaatgcagagcctccccctgagctgctgacagaaaactacatcacacccaaccctatcttcttcacccggaaccatctgcctgtacctaacctggatccagacacctatcgcttacacgtagtaggagcacctgggggtcagtcactgtctctttccctggatgacttgcacaactttcccaggtacgagatcacagtcactctgcagtgtgccggcaaccgacgctctgagatgactcaggtcaaagaagtaaaaggtctggagtggagaacaggagccatcagcactgcacgctgggctggggcacggctctgtgatgtgttagcccaggctggccaccaactctgtgaaactgaggcccacgtctgctttgagggactggactcagaccctactgggactgcctatggagcatccatccctctggctcgggccatggaccctgaagctgaggtcctgctggcatatgagatgaatgggcagcctctgccacgtgaccacggcttccctgtgcgtgtggtggttcctggagtggtgggtgcccgccatgtcaaatggctgggcagagtgagtgtgcagccagaggaaagttacagccactggcaacggcgggattacaaaggcttctctccatctgtggactgggagactgtagattttgactctgctccatccattcaggaacttcctgtccagtcggccatcacagagccccgggatggagagactgtagaatcaggggaggtgaccatcaagggctatgcatggagtggtggtggcagggctgtgatccgggtggatgtgtctctggatgggggcctaacctggcaggtggctaagctggatggagaggaacagcgccccaggaaggcctgggcatggcgtctgtggcagttgaaagcccctgtgccagctggacaaaaggaactgaacattgtttgtaaggctgtggatgatggttacaatgtgcagccagacaccgtggccccaatctggaacctgcgaggtgttctcagcaatgcctggcatcgtgtccatgtctatgtctccccatgagcatggaaaggagccacctccacccctttccccacccattagcctcactgcttcagaaaaatctttcccacctttcaacttcttggatcacaactctggccttcctaagccatacccaagtacacatatagcacatttcacccaaggaccttccctctttggacactatgttacatacccctcttggcctttgaacctgtgccaggaagtgtgagctgttacagcaaggggctagaagtgaaaaaagtaattctggagacaagcactattttctcttcctaccccacctccatttctaatgcctactgccatcaaggccttgttttgcttttctttttggattgttcagagaaatgtgtgtggcatgtgtaagaaaagtgtatatactatcttatactacctctccaggttgccagagagttgcgaggagagcaaggggcacaaccgtctccctttata

SEQ ID NO: 282415 - DNA, 952 bp, Artificial Sequence
  derived and/or modified sequence
actggacccggtaaggagactgggggtggtaaagaagctggggaggaagggctgctgagctgggcagcggagggggccttggtgtccagctgtgctccgaacctcaagggcaacaaaactatcagtacctgcctccactccttctgtctgggtgctcttgagatcgcggggtgttgccgcaagacccttttgtgcctggatgccggacgtatgttcctacctaacgtgcccatggggagtgaggggtcatcacctgcaccaacgggtggcatttctgtattacagcaaaaggctgtccctcccaaacctgggattctgggctcactgagttcacctgcgagtcagccctacctgcactgctctggtctagtacaaacaggctgctggcattgaggcccttcgccccaggcatcgttctctatggtggacaaagttcagaatggaagatgggagaaaggtctgctacaatgctgctgctgcacagagctgtggtcctcaggctccaacaggcctgcagactcaagtcaatcccctcaaggatctgcattcaggcctgctccacaaatgattcatttcagccccagcgccccagcctcaccttctctggtgataactccagcacccagggatggagagtcatggggaccctattaggtctcggtgcagtgttggcctatcaggaccatcggtgtagggctgctcaggagtcaacacacatatacactaaggaggaagtgagttcccacaccagccctgagactgggatctgggtgactctgggctctgaggtctttgatgtcacagaatttgtggacctacatccaggggggccttcaaagctgatgctagcagctgggggtcccctagagcccttctgggccctctatgctgttcacaaccagtcccatgtgcgtgagttactggctcagtacaagattggggagctgaatcc

SEQ ID NO: 282416 - DNA, 556 bp, Artificial Sequence
  derived and/or modified sequence
aactcgcagagctgggctggtaaaattgcagtgctgaagacactggacccgcaaaaggctgtccctcccaaacctgggattctgggctcactgagttcacctgcgagtcagccctacctgcactgctctggtctagtacaaacaggctgctggcattgagggacggagtctccaactcctggcctctagcagtcctcctgtgtaggtctcccaaagtgctagtgtgtccggaattggtgggttcttggtctcactgacttcaagaatgaagccgcggaccctcgcagtgagtgttacagttcttaaaggcagcgtgtccggagtttgttccttctgatgttcagatgtgtttggagtttcttccttctggtgggttcgtgctcttgctggctcaggagtgaagctgcagaccttcacagtctgctacaatgctgctgctgcacagagctgtggtcctcaggctccaacaggcctgcagactcaagtcaatcccctcaaggatctgcattcaggcctgctccacaaatgattcatttcagccccagcgccccagcct

SEQ ID NO: 282417 - DNA, 2352 bp, Artificial Sequence
  derived and/or modified sequence
agctgggctggtaaaattgcagtgctgaagacactggacccgagacaggttttccccattttggccaggctggtctcaaactcctgacctcaggtgatttgcccgcctcagcctcccaaagtgctgggattacagacgtgagccactgcgccgggcattgttgttaatctcttactgtgggtaatttagtaattaaactataagaggtctgctacaatgctgctgctgcacagagctgtggtcctcaggctccaacaggcctgcagactcaagtcaatcccctcaaggatctgcattcaggcctgctccacaaatgattcatttcagccccagcgccccagcctcaccttctctggtgataactccagcacccagggatggagagtcatggggaccctattaggtctcggtgcagtgttggcctatcaggaccatcggtgtagggctgctcaggagtcaacacacatatacactaaggaggaagtgagttcccacaccagccctgagactgggatctgggtgactctgggctctgaggtctttgatgtcacagaatttgtggacctacatccaggggggccttcaaagctgatgctagcagctgggggtcccctagagcccttctgggccctctatgctgttcacaaccagtcccatgtgcgtgagttactggctcagtacaagattggggagctgaatcctgaagacaaggtagcccccaccgtggagacctctgacccttatgctgatgatcctgtacgtcacccagccctgaaggtcaacagccagcggccctttaatgcagagcctccccctgagctgctgacagaaaactacatcacacccaaccctatcttcttcacccggaaccatctgcctgtacctaacctggatccagacacctatcgcttacacgtagtaggagcacctgggggtcagtcactgtctctttccctggatgacttgcacaactttcccaggtacgagatcacagtcactctgcagtgtgccggcaaccgacgctctgagatgactcaggtcaaagaagtaaaaggtctggagtggagaacaggagccatcagcactgcacgctgggctggggcacggctctgtgatgtgttagcccaggctggccaccaactctgtgaaactgaggcccacgtctgctttgagggactggactcagaccctactgggactgcctatggagcatccatccctctggctcgggccatggaccctgaagctgaggtcctgctggcatatgagatgaatgggcagcctctgccacgtgaccacggcttccctgtgcgtgtggtggttcctggagtggtgggtgcccgccatgtcaaatggctgggcagagtgagtgtgcagccagaggaaagttacagccactggcaacggcgggattacaaaggcttctctccatctgtggactgggagactgtagattttgactctgctccatccattcaggaacttcctgtccagtcggccatcacagagccccgggatggagagactgtagaatcaggggaggtgaccatcaagggctatgcatggagtggtggtggcagggctgtgatccgggtggatgtgtctctggatgggggcctaacctggcaggtggctaagctggatggagaggaacagcgccccaggaaggcctgggcatggcgtctgtggcagttgaaagcccctgtgccagctggacaaaaggaactgaacattgtttgtaaggctgtggatgatggttacaatgtgcagccagacaccgtggccccaatctggaacctgcgaggtgttctcagcaatgcctggcatcgtgtccatgtctatgtctccccatgagcatggaaaggagccacctccacccctttccccacccattagcctcactgcttcagaaaaatctttcccacctttcaacttcttggatcacaactctggccttcctaagccatacccaagtacacatatagcacatttcacccaaggaccttccctctttggacactatgttacatacccctcttggcctttgaacctgtgccaggaagtgtgagctgttacagcaaggggctagaagtgaaaaaagtaattctggagacaagcactattttctcttcctaccccacctccatttctaatgcctactgccatcaaggccttgttttgcttttctttttggattgttcagagaaatgtgtgtggcatgtgtaagaaaagtgtatatactatcttatactacctctccaggttgccagagagttgcgaggagagcaaggggcacaaccgtctccctttatagttctacttttctaataaatagtctgtttaagatcataa

SEQ ID NO: 282418 - DNA, 2511 bp, Artificial Sequence
  derived and/or modified sequence
ctgctacaatgctgctgctgcacagagctgtggtcctcaggctccaacaggcctgcagactcaagtcaatcccctcaaggatctgcattcaggcctgctccacaaatgattcatttcagccccagcgccccagcctcaccttctctggtgataactccagcacccagggatggagagtcatggggaccctattaggtctcggtgcagtgttggcctatcaggaccatcggtgtagggctgctcaggagtcaacacacatatacactaaggaggaagtgagttcccacaccagccctgagactgggatctgggtgactctgggctctgaggtctttgatgtcacagaatttgtggacctacatccaggggggccttcaaagctgatgctagcagctgggggtcccctagagcccttctgggccctctatgctgttcacaaccagtcccatgtgcgtgagttactggctcagtacaagattggggagctgaatcctgaagacaaggtagcccccaccgtggagacctctgacccttatgctgatgatcctgtacgtcacccagccctgaaggtcaacagccagcggccctttaatgcagagcctccccctgagctgctgacagaaaactacatcacacccaaccctatcttcttcacccggaaccatctgcctgtacctaacctggatccagacacctatcgcttacacgtagtaggagcacctgggggtcagtcactgtctctttccctggatgacttgcacaactttcccaggtacgagatcacagtcactctgcagtgtgccggcaaccgacgctctgagatgactcaggtcaaagaagtaaaaggtctggagtggagaacaggagccatcagcactgcacgctgggctggggcacggctctgtgatgtgttagcccaggctggccaccaactctgtgaaactgaggcccacgtctgctttgagggactggactcagaccctactgggactgcctatggagcatccatccctctggctcgggccatggaccctgaagctgaggtcctgctggcatatgagatgaatgggcagcctctgccacgtgaccacggcttccctgtgcgtgtggtggttcctggagtggtgggtgcccgccatgtcaaatggctgggcagagtgagtgtgcagccagaggaaagttacagccactggcaacggcgggattacaaaggcttctctccatctgtggactgggagactgtagattttgactctgctccatccattcaggaacttcctgtccagtcggccatcacagagccccgggatggagagactgtagaatcaggggaggtgaccatcaagggctatgcatggagtggtggtggcagggctgtgatccgggtggatgtgtctctggatgggggcctaacctggcaggtggctaagctggatggagaggaacagcgccccaggaaggcctgggcatggcgtctgtggcagttgaaagcccctgtgccagctggacaaaaggaactgaacattgtttgtaaggctgtggatgatggttacaatgtgcagccagacaccgtggccccaatctggaacctgcgaggtgttctcagcaatgcctggcatcgtgtccatgtctatgtctccccatgagcatggaaaggagccacctccacccctttccccacccattagcctcactgcttcagaaaaatctttcccacctttcaacttcttggatcacaactctggccttcctaagccatacccaagtacacatatagcacatttcacccaaggaccttccctctttggacactatgttacatacccctcttggcctttgaacctgtgccaggaagtgtgagctgagagcaaggggcacaaccgtctccctttatagttctacttttctaataaatagtctgtttaagatcataactcttgggcctggggagtgagcctattgcaggaggaaggatgcatttgtactgggatgtataatgagattagaccaaaacaaacaaaactggggaggaagacagagaggaagtaggcttgtaggttaagaagtagggcttccggctgagcacagtggctcacgcctgtaatcccagcacttgggaggccaaggcaggtggatcacttgaggtcaggagttcgagaccagcctggccaacatggcaaaacccagtctctaccaaaaatacaaaaattagctgggtgtggtggtgggtgcctgtaatcccagctacttgggaggctgaggcaggagaatcgcttgaaccaaggaggcagagttcaagcaattctgtctcagcctcccaggtagctgggacgacaggcgcacaccgccacgcccggctaatttcttttgtattttagtagagatgggtttcaccatgttgcccaggctggtctcgaactcctgagctcaggcagtacgtctgcctcggcctcccaaagtgctaggattacaggcgtgagccaccaagcccggcttttttttttttttttt

SEQ ID NO: 282419 - DNA, 543 bp, Artificial Sequence
  derived and/or modified sequence
agagctgggctggtaaaattgcagtgctgaagacactggacccgggacggagtctccaactcctggcctctagcagtcctcctgtgtaggtctcccaaagtgctagtgtgtccggaattggtgggttcttggtctcactgacttcaagaatgaagccgcggaccctcgcagtctgctacaatgctgctgctgcacagagctgtggtcctcaggctccaacaggcctgcagactcaagtcaatcccctcaaggatctgcattcaggcctgctccacaaatgattcatttcagccccagcgccccagcctcaccttctctggtgataactccagcacccagggatggagagtcatggggaccctattaggtctcggtgcagtgttggcctatcaggaccatcggtgtagggctgctcaggagtcaacacacatatacactaaggaggaagtgagttcccacaccagccctgagactgggatctgggtgactctgggctctgaggtctttgatgtcacagaatttgtggacctacatccagggggg

SEQ ID NO: 282420 - DNA, 1038 bp, Artificial Sequence
  derived and/or modified sequence
atgctggccgccaaccccggcaagacccccatcagcctgctgcaggagtacggcaccagaatcggcaagacccccgtgtacgacctgctgaaggccgagggccaggcccaccagcccaacttcaccttcagagtgaccgtgggcgacaccagctgcaccggccagggccccagcaagaaggccgccaagcacaaggccgccgaggtggccctgaagcacctgaagggcggcagcatgctggagcccgccctggaggacagcagcagcttcagccccctggacagcagcctgcccgaggacatccccgtgttcaccgccgccgccgccgccacccccgtgcccagcgtggtgctgaccagaagcccccccatggagctgcagccccccgtgagcccccagcagagcgagtgcaaccccgtgggcgccctgcaggagctggtggtgcagaagggctggagactgcccgagtacaccgtgacccaggagagcggccccgcccacagaaaggagttcaccatgacctgcagagtggagagattcatcgagatcggcagcggcaccagcaagaagctggccaagagaaacgccgccgccaagatgctgctgagagtgcacaccgtgcccctggacgccagagacggcaacgaggtggagcccgacgacgaccacttcagcatcggcgtgggcagcagactggacggcctgagaaacagaggccccggctgcacctgggacagcctgagaaacagcgtgggcgagaagatcctgagcctgagaagctgcagcctgggcagcctgggcgccctgggccccgcctgctgcagagtgctgagcgagctgagcgaggagcaggccttccacgtgagctacctggacatcgaggagctgagcctgagcggcctgtgccagtgcctggtggagctgagcacccagcccgccaccgtgtgccacggcagcgccaccaccagagaggccgccagaggcgaggccgccagaagagccctgcagtacctgaagatcatggccggcagcaagtag

SEQ ID NO: 282421 - DNA, 1038 bp, Artificial Sequence
  derived and/or modified sequence
atgctggctgcaaaccccgggaagacaccaatctcactgcttcaggagtatggcacgaggatcggaaaaactcccgtgtacgatctgttgaaggccgaagggcaggcacaccagccgaattttacgttcagggtcactgtaggggacacctcttgtacagggcagggaccatcaaaaaaggcagctaagcataaggccgcagaggttgctctaaaacacttgaagggcggctctatgctggaaccagctttagaggatagttcttctttcagcccattagactcctcactgccagaagatattccagttttcaccgctgccgcagctgccacgcccgtgccaagtgtcgtgctcacccgctctccccctatggagctccagcctcccgtaagcccacagcaatccgaatgtaatcccgtaggggctctccaggaactggtggtccagaaagggtggagactgccggagtatactgtgacgcaggagtcaggacctgcccaccgcaaggagttcactatgacgtgtcgagtggagcgatttatcgaaatcggcagtggaacatctaagaagcttgctaagcgcaatgccgctgcgaagatgctgcttcgcgtacacacagtacccctggatgcacgggacgggaatgaggtggaacccgacgacgaccatttttccatcggcgtgggcagccgactggacggcttacgcaatagggggcctggctgtacttgggatagtctgagaaacagtgtgggagagaagatcctctcccttcggtcttgcagtctcgggtcacttggcgccctgggcccagcctgctgtcgggtgctgagtgagctgtctgaagaacaggcattccacgtatcctatcttgacatcgaggagctgagcttgagtggcctgtgccagtgcctcgtggaactgtccacgcagcctgcaacagtgtgtcacgggtctgccactacaagagaggcagcacggggtgaagctgcccgtcgagcattacagtatttaaaaattatggcagggtccaagtag

SEQ ID NO: 282422 - DNA, 1038 bp, Artificial Sequence
  derived and/or modified sequence
atgcttgcagctaatccaggaaaaacgccgatcagcctcctacaggagtatggtacaaggattgggaagacccccgtgtatgatctcctgaaggccgaaggtcaggcccatcaaccaaatttcacttttcgggtgaccgtgggagatacctcatgtaccgggcagggcccctccaagaaggcggccaaacacaaggctgccgaggtcgcattaaagcatcttaagggcggtagcatgctggaaccagccctcgaggactccagcagtttttctcccctcgacagctcattgcccgaagatatcccggtcttcaccgcagcagccgccgcgacacccgttccgtccgtagtgctgacccgctccccgcccatggagttgcagcctcctgtcagtcctcagcagagcgaatgtaatcccgttggagccctacaggagctcgttgtgcagaagggctggcgtttgccggagtatacagtgacgcaggagtccggccctgcccacagaaaggagttcaccatgacctgtagagtcgagagatttatagagattgggagtggaaccagtaaaaagctcgctaagagaaatgccgcagctaagatgctgctgcgtgtgcatacagtgcctttggatgcacgggacggcaatgaagtagagcctgatgacgatcatttctctataggagtgggtagccggttagacggtctaagaaaccgtgggcccgggtgtacatgggactcacttcgcaatagcgtaggcgagaagatcctgagcctaagatcttgttctctggggtctctcggagctttgggccccgcctgctgcagagtgcttagcgaactaagtgaagaacaggcgtttcacgtgagttatcttgatatcgaagaactcagtttgagcggcctctgccagtgcctcgtggagcttagcacccagccagcgaccgtgtgtcacgggtccgccacaacaagagaggcagcccgcggtgaggcagcaagacgcgctctccagtatctgaaaatcatggccggaagtaagtag

SEQ ID NO: 282423 - DNA, 1038 bp, Artificial Sequence
  derived and/or modified sequence
atgctggccgccaaccctgggaagacccccatcagcctgctgcaggagtatggcaccagaattggcaagacccctgtgtatgacctgctgaaggccgagggccaggcccaccagcccaacttcaccttccgggtgacagtgggggacaccagctgcaccggccagggccccagcaagaaggccgccaagcacaaggctgctgaggtggccctgaagcacctgaagggcggctccatgctggagcccgccctggaggacagcagcagcttcagccccctggacagcagcctgcctgaggacatccctgtgttcaccgctgctgctgctgccacccctgtgcccagcgtggtgctgaccaggagcccccccatggagctgcagccccctgtgagcccccagcagagcgagtgcaaccctgtgggcgccctgcaggagctggtggtgcagaagggctggaggctgcctgagtacacagtgacccaggagagcggccctgcccacaggaaggagttcaccatgacctgccgggtggagcgcttcattgaaattggcagcggcaccagcaagaagctggccaagagaaatgctgctgccaagatgctgctgcgggtgcacacagtgcccctggatgccagagatggaaatgaggtggagccagatgatgaccacttcagcattggagtgggcagccggctggatggcctgaggaacagaggccctggctgcacctgggacagcctgaggaacagcgtgggggagaagatcctgagcctgcggagctgcagcctgggcagcctgggcgccctgggccctgcctgctgccgggtgctgtctgagctgtctgaggagcaggccttccacgtgtcctacctggacatcgaggagctgagcctgagcggcctgtgccagtgcctggtggagctgagcacccagcctgccaccgtgtgccacggcagcgccaccacccgggaggccgcccggggggaggccgcccggcgggccctgcagtacctgaagatcatggccggcagcaagtag

SEQ ID NO: 282424 - DNA, 1038 bp, Artificial Sequence
  derived and/or modified sequence
atgctggccgccaaccccggcaagacccccatcagcctgctgcaggagtacggtactcgtattgggaagacacccgtgtacgacttgctgaaggccgagggccaggctcatcaacccaatttcactttccgcgtcaccgttggagatacatcctgcacggggcaaggccccagcaaaaaggctgcgaagcacaaggcggctgaggttgccttgaagcacctgaaagggggttctatgctcgagcccgccctcgaagactcaagtagcttttcccccctcgattcctccctccctgaagacatacctgtgtttaccgcagctgcggcggctacccctgtacccagtgtagtgctgacgaggtccccaccaatggagttacagccccccgttagtccacagcaaagcgagtgtaatcccgtgggagcactgcaggaactggtggtgcagaaaggctggcgcttaccagagtacaccgtcacccaggagtccgggcccgcccatcggaaggaatttactatgacatgccgcgtcgaaaggttcattgagattggcagtggaaccagtaaaaagctggcgaaacgaaacgcggccgcaaagatgctgttgcgggtgcacactgtcccccttgatgcacgcgatgggaacgaggtggaacctgacgatgaccacttctcaatcggcgtcggatctagactcgacggattgagaaatcgagggcccggttgtacctgggattctctgaggaattccgtgggagagaagattctaagcttgagaagctgtagtcttggctctctgggagctctgggccccgcttgttgtagagtcctgtctgaactgagtgaggagcaggccttccacgtcagttacctggacatcgaggaacttagcctcagcggactttgccagtgcttagtggaattgtccacccagccggccaccgtttgccacgggtctgcaactacaagggaggccgctcgtggggaagctgcacggcgagccctccagtacctcaagatcatggcagggtcaaagtag

SEQ ID NO: 282425 - DNA, 1038 bp, Artificial Sequence
  derived and/or modified sequence
atgctggccgccaaccccggcaagacccccatcagcctgctgcaggaatatggaactcggataggaaagacaccggtctatgaccttctaaaggcagaaggccaggcccatcagccaaacttcacattccgagtgaccgtgggggacacatcttgcaccggacaggggccatctaagaaggctgccaaacacaaagcagctgaggtggctctgaagcacctaaaaggaggctcgatgttggaaccagctttagaagactcatcctcattctcgcctctcgactccagtctgcccgaggacatccccgtgttcacagcggcagccgccgccactccggtgccttctgttgttttgaccagatccccccccatggagttgcaaccgccagtctctccgcagcaatccgaatgcaaccctgtgggggctctccaggaactcgtggtccagaaaggctggcgcttgcccgaatacacagtcactcaggagagcggtcctgcccatcgcaaggagtttactatgacctgccgagtcgagcgcttcattgaaatcggctctggtacctccaagaagctggccaaacggaatgccgctgctaaaatgctcttgcgtgtgcatacggtgcccttagatgctagagacggaaacgaagtggagcctgatgacgatcacttcagcatcggagtgggctctcgtctggacggtctaagaaatagggggcctggatgcacctgggacagtctccgaaattcggtgggtgagaaaatcctcagcttgagaagctgtagtttgggttccttgggggcattaggccccgcctgctgcagggtcctgagcgaactcagcgaggaacaggccttccacgtgtcttacttggatattgaggaactgtcactcagcgggttgtgccaatgtctagtcgagctcagcacacagcccgccaccgtgtgccatggctctgccaccacgcgggaggccgcacggggtgaggctgcccgaagggcattgcaatacctgaaaattatggccgggtctaagtag

SEQ ID NO: 282426 - DNA, 1038 bp, Artificial Sequence
  derived and/or modified sequence
atgttagcggcaaacccaggcaagactcccattagcctacttcaggaatacggcaccaggattggtaaaactcctgtgtatgatcttcttaaggctgagggacaagcgcaccagcccaattttacttttcgggttacggttggcgatacaagttgtactggacagggtccaagcaagaaggccgctaagcataaggcagccgaggtggcactcaaacatttgaagggcggaagcatgcttgagcccgctcttgaagattcatcatccttttcgcctctggactctagcctgcctgaggacatacctgtctttacagctgccgctgcggctacccctgtcccttccgtcgtgctgactcgttctcctccgatggaactccagcctccggtctctccccaacaaagcgagtgcaatcccgtgggagccctccaggaattggtcgtgcagaaaggctggaggctcccagagtacaccgtgactcaggagtcagggccagcacatcgtaaagaattcacaatgacatgcagagtggagagatttatagaaatcggcagcggtacttccaagaaacttgctaagagaaacgcagctgcgaaaatgttgcttcgcgttcatacagtgcctctggacgccagggatggtaatgaggtcgagcccgacgacgatcatttcagcatcggtgttggctctcggctcgatgggcttcggaatcggggacctggatgtacatgggatagcctgcggaactctgtgggcgagaagattttaagtttgcgctcttgttcactgggctccctcggagccctgggaccggcatgttgccgcgtgctatccgagctgtcggaggagcaggcctttcacgtgtcctacctggacatcgaggaactttcgctcagtggattgtgtcagtgccttgtcgagctgtccacccaacctgcgacagtctgtcacggaagcgctaccaccagggaggccgcaaggggagaggctgcgcgacgagcgctgcagtacctcaagatcatggccggtagcaaatag

SEQ ID NO: 282427 - DNA, 1038 bp, Artificial Sequence
  derived and/or modified sequence
atgctggccgctaatcccggaaaaaccccaattagtctgctgcaagagtacgggactcgaataggtaagacacccgtgtacgatctgctgaaagccgaggggcaagctcatcagcctaattttacttttcgtgtaacagtgggggacacctcgtgcacaggccagggccctagtaagaaggcagcaaaacataaagcagctgaagtcgccctgaagcaccttaaggggggaagcatgctggaacctgcattggaagacagctcctctttctccccactagattcttccctgcccgaggacatcccggtcttcacggcagcggctgctgctacacctgtgccatcagttgtactgacgcgatccccccctatggagctgcagcctcctgtgtctccccagcagtctgagtgcaacccggttggagccctccaagagctggtcgtgcagaaaggctggcggctccccgaatatactgtcacgcaagagtcagggcctgcccaccgcaaggaatttaccatgacgtgccgagttgaaaggtttatagagattggaagcgggacaagcaagaagcttgccaaacgcaacgcggctgccaagatgctactccgtgttcatacggtgcctctggacgctcgggatggaaacgaggttgaaccagacgacgatcacttctctattggggttggttctcgcctggacgggctgaggaacagaggcccagggtgcacctgggacagcctcaggaattcagtgggggagaagatcctgtctttacgcagttgttctctgggctcactgggagcacttggcccagcatgctgtcgtgtgttatccgagttgagcgaagagcaggccttccatgtgtcatatctcgatatagaggaactttctttgagtggactttgtcagtgcctggtggaactatccacacaacctgctactgtgtgtcatggctctgccacaacaagagaagccgctcgcggagaagccgctagaagagcactgcaatatctgaaaatcatggcaggatctaagtag

SEQ ID NO: 282428 - protein, 295 aa, Artificial Sequence
  derived and/or modified sequence
MSHSSVTREAPQLLSQRQRREVRGVWGWGCLPGPRGGPALFGLVTFGQSGDCCTDSGTMNIFDRKINFDALLKFSHITPSTQQHLKKVYASFALCMFVAAAGAYVHMVTHFIQAGLLSALGSLILMIWLMATPHSHETEQKRLGLLAGFAFLTGVGLGPALEFCIAVNPSILPTAFMGTAMIFTCFTLSALYARRRSYLFLGGILMSALSLLLLSSLGNVFFGSIWLFQANLYVGLVVMCGFVLFDTQLIIEKAEHGDQDYIWHCIDLFLDFITVFRKLMMILAMNEKDKKKEKK

SEQ ID NO: 282429 - protein, 16 aa, Artificial Sequence
  derived and/or modified sequence
MNIFDRKINFDALLKF

SEQ ID NO: 282430 - protein, 44 aa, Artificial Sequence
  derived and/or modified sequence
MNIFDRKINFDALLKFSHITPSTQQHLKKVYASFALCMFVAAAG

SEQ ID NO: 282431 - DNA, 888 bp, Artificial Sequence
  derived and/or modified sequence
atgagccacagcagcgtgaccagagaggccccccagctgctgagccagagacagagaagagaggtgagaggcgtgtggggctggggctgcctgcccggccccagaggcggccccgccctgttcggcctggtgaccttcggccagagcggcgactgctgcaccgacagcggcaccatgaacatcttcgacagaaagatcaacttcgacgccctgctgaagttcagccacatcacccccagcacccagcagcacctgaagaaggtgtacgccagcttcgccctgtgcatgttcgtggccgccgccggcgcctacgtgcacatggtgacccacttcatccaggccggcctgctgagcgccctgggcagcctgatcctgatgatctggctgatggccaccccccacagccacgagaccgagcagaagagactgggcctgctggccggcttcgccttcctgaccggcgtgggcctgggccccgccctggagttctgcatcgccgtgaaccccagcatcctgcccaccgccttcatgggcaccgccatgatcttcacctgcttcaccctgagcgccctgtacgccagaagaagaagctacctgttcctgggcggcatcctgatgagcgccctgagcctgctgctgctgagcagcctgggcaacgtgttcttcggcagcatctggctgttccaggccaacctgtacgtgggcctggtggtgatgtgcggcttcgtgctgttcgacacccagctgatcatcgagaaggccgagcacggcgaccaggactacatctggcactgcatcgacctgttcctggacttcatcaccgtgttcagaaagctgatgatgatcctggccatgaacgagaaggacaagaagaaggagaagaagtag

SEQ ID NO: 282432 - DNA, 33 bp, Artificial Sequence
  derived and/or modified sequence
atgaacatcttcgacagaaagatcaacttctag

SEQ ID NO: 282433 - DNA, 36 bp, Artificial Sequence
  derived and/or modified sequence
atgaacatcttcgacagaaagatcaacttcgactag

SEQ ID NO: 282434 - DNA, 51 bp, Artificial Sequence
  derived and/or modified sequence
atgaacatcttcgacagaaagatcaacttcgacgccctgctgaagttctag

SEQ ID NO: 282435 - DNA, 888 bp, Artificial Sequence
  derived and/or modified sequence
atgagccatagtagtgtcaccagagaagctccccaactgctcagccaaagacagaggcgagaggttaggggagtatgggggtggggttgcctcccagggccgagggggggccccgctctgtttggccttgttacgtttggtcaatctggagattgctgcactgacagtggaacgatgaatatcttcgaccgtaaaatcaacttcgatgcgctccttaagttctcccatatcaccccaagcacacagcagcacctgaaaaaagtttatgcatcattcgccttgtgcatgttcgtcgccgccgccggcgcctacgttcatatggtcactcactttatccaggctggactgttgagcgcactgggtagcttaattctgatgatctggctgatggccacgccccactctcatgagactgagcagaagcgcctaggactcctcgcagggtttgcgtttctgaccggtgtcggactgggccccgctctcgaattttgcatcgccgtgaacccctcaattctacctacggccttcatgggtacagcgatgattttcacttgttttactctttccgccctgtatgctaggaggcggtcttacttgtttcttggtgggattctgatgtctgctctgtcccttctcctgctttcatcactggggaacgtcttctttggatccatttggctgttccaagcaaatctctacgtgggtctggttgtcatgtgtggctttgttctgttcgacacgcagttaataatagagaaggctgaacacggagaccaggattacatctggcactgtatagatctgtttctggattttattaccgtctttagaaaactgatgatgattctcgctatgaatgagaaggataaaaaaaaggagaaaaaatag

SEQ ID NO: 282436 - DNA, 33 bp, Artificial Sequence
  derived and/or modified sequence
atgaacatctttgacaggaagattaatttttag

SEQ ID NO: 282437 - DNA, 36 bp, Artificial Sequence
  derived and/or modified sequence
atgaatatatttgaccggaagattaatttcgactag

SEQ ID NO: 282438 - DNA, 51 bp, Artificial Sequence
  derived and/or modified sequence
atgaacatcttcgacagaaaaattaacttcgatgctctgctgaaattctag

SEQ ID NO: 282439 - DNA, 888 bp, Artificial Sequence
  derived and/or modified sequence
atgtctcacagtagcgtgacccgcgaggctccacaactactcagtcaaaggcagaggcgtgaggtgcgaggggtttgggggtggggctgtctgccaggtccccggggggggcccgcattgttcggccttgtgactttcggccagagtggcgattgttgtacagattctggcacaatgaatatcttcgatcggaagatcaacttcgacgcactgctgaaattcagtcacataaccccatctacacaacaacatctcaagaaggtgtacgcaagctttgcgctgtgtatgtttgtggctgccgccggtgcttatgtccacatggtaacccatttcattcaggcaggtctgctgtccgccctcggctctctgatccttatgatatggctgatggcaactccccactctcacgaaactgagcagaaaaggctcggcctacttgctgggttcgctttcctgacaggagtggggctaggcccagccctggaattctgcattgctgttaaccccagtattctgccaacagccttcatgggaactgctatgattttcacctgttttacgctgtctgccctttatgctcgacggaggagttacctgttcctgggcgggatcctaatgagcgctctttcgctactgctgctgtcaagcctcggcaatgttttcttcgggtctatatggttgttccaagcaaacctctacgttggactcgtggttatgtgcgggtttgtactgtttgacacccaactcataattgaaaaagccgagcacggcgatcaggactatatttggcactgcatagacctcttcctggattttattactgtctttagaaaactgatgatgatcctggctatgaatgaaaaagataaaaaaaaggaaaaaaagtag

SEQ ID NO: 282440 - DNA, 888 bp, Artificial Sequence
  derived and/or modified sequence
atgagccacagctctgtgacccgggaggccccccagctgctgagccagaggcagaggcgggaggtgcggggcgtgtggggctggggctgcctgcccggcccccggggcggccctgccctgtttggcctggtgaccttcggccagagcggggactgctgcacagacagcggcaccatgaacatctttgacaggaagatcaactttgatgccctgctgaagttcagccacatcacccccagcacccagcagcacctgaagaaggtgtatgccagctttgccctgtgcatgtttgtggccgctgctggggcctacgtgcacatggtgacccacttcatccaggccggcctgctgagcgccctgggcagcctcatcctgatgatctggctgatggccaccccccacagccatgaaacagagcagaagaggctgggcctgctggccggctttgccttcctgactggagtgggcctgggccctgccctggagttctgcatcgctgtgaaccccagcatcctgcccacagccttcatgggcacagccatgatcttcacctgcttcaccctgagcgccctgtatgccaggagaagaagctacctgttcctgggcggcatcctgatgtctgccctgagcctgctgctgctgagcagcctgggcaatgtgttcttcggcagcatctggctgttccaggccaacctgtatgtgggcctggtggtgatgtgtggctttgtgctgtttgacacccagctgatcatcgagaaggccgagcacggggaccaggactacatctggcactgcatcgacctcttcctggacttcatcaccgtcttcaggaagctgatgatgatcctggccatgaatgagaaggacaagaagaaggagaagaagtag

SEQ ID NO: 282441 - DNA, 33 bp, Artificial Sequence
  derived and/or modified sequence
atgaacatctttgacaggaagatcaacttctag

SEQ ID NO: 282442 - DNA, 36 bp, Artificial Sequence
  derived and/or modified sequence
atgaacatctttgacaggaagatcaactttgattag

SEQ ID NO: 282443 - DNA, 51 bp, Artificial Sequence
  derived and/or modified sequence
atgaacatctttgacaggaagatcaactttgatgccctgctgaagttctag

SEQ ID NO: 282444 - DNA, 888 bp, Artificial Sequence
  derived and/or modified sequence
atgagccacagcagcgtgacccgggaggccccccagctgctgagccagaggcagagaagggaggtgagaggagtttggggttggggttgcttacctgggccgagagggggcccagccttgttcggactagtgaccttcggccagtccggagactgttgtacggactccggaaccatgaatatctttgaccggaaaattaactttgacgcgcttttgaagtttagccatattaccccctcaactcagcagcacttgaagaaggtttacgcttcatttgccctctgcatgttcgtcgcggcagccggcgcctacgtgcacatggtcacccactttatacaagccggactcctgtcagcacttggaagcctgatcctgatgatctggttaatggctacaccacatagtcatgagacggagcagaagaggctgggtctgctggccggtttcgcgtttctcaccggggtcggccttggccccgcgctggagttctgtatcgcagtcaacccaagcatcctccccacagcctttatgggaacagcaatgatcttcacatgcttcacactgtcggcgttgtacgcacgccggaggagttatctgttcctcgggggaatcctgatgtctgccctgtccttactactgctgtcatccctaggcaatgtctttttcggctccatatggttatttcaggccaacctgtacgttggactcgtggtcatgtgcgggttcgtgcttttcgacacgcagctgatcatcgagaaagcagagcatggggaccaggactatatctggcactgcatcgacttgtttctagactttatcaccgtgttccggaagctgatgatgatcctcgctatgaacgaaaaggataagaaaaaggagaagaaatag

SEQ ID NO: 282445 - DNA, 33 bp, Artificial Sequence
  derived and/or modified sequence
atgaacatcttcgaccggaagatcaacttctag

SEQ ID NO: 282446 - DNA, 36 bp, Artificial Sequence
  derived and/or modified sequence
atgaacatcttcgaccggaagatcaacttcgactag

SEQ ID NO: 282447 - DNA, 51 bp, Artificial Sequence
  derived and/or modified sequence
atgaacatcttcgaccggaagatcaacttcgacgccctgctgaagttctag

SEQ ID NO: 282448 - DNA, 888 bp, Artificial Sequence
  derived and/or modified sequence
atgagccacagcagcgtgacccgggaggccccccagctgctgagccagagacagcgacgcgaagtcaggggggtatggggatggggctgcctgccgggacctcggggggggcccgccctcttcggtctcgtcaccttcggacagtctggggactgctgcactgactcagggacgatgaacatcttcgatcggaaaataaactttgacgcactcctcaagttcagtcacataacaccctcaacacaacaacatttaaagaaagtgtacgcgagcttcgcactgtgtatgtttgtcgcagctgcgggtgcttacgttcatatggttacacactttatccaggcaggcctactctcagctttgggcagccttattctgatgatctggttaatggcaacgccacactctcacgagactgaacagaagcgcctagggctgctggcaggcttcgcgttcctgactggcgtgggactcggtcccgctctagagttttgcatcgcggttaatcctagcatccttcctactgctttcatgggtaccgccatgatcttcacttgctttacccttagcgcactgtacgctaggagaaggagttacctcttcctgggaggaatccttatgagcgcgctgagcctcctgttattgagctctctgggcaacgtgtttttcggctcaatctggctgtttcaggcgaacctctatgtcggactggttgtgatgtgtggcttcgtcctgttcgacacccagctcataatagaaaaggcagaacatggagaccaggattacatatggcactgtatcgacctgtttttggattttatcacagtgttcaggaagttgatgatgatactagctatgaatgagaaggacaaaaaaaaagagaagaagtag

SEQ ID NO: 282449 - DNA, 888 bp, Artificial Sequence
  derived and/or modified sequence
atgtcacactcttcggtgacacgggaggcaccacaactgctttctcagcgtcaaaggagggaagtgagaggtgtgtggggttgggggtgcttgcctggcccacgaggcggtcccgctctctttggcctggtgaccttcggtcaatctggcgattgctgtactgatagtggtacaatgaacatttttgaccgcaagatcaactttgatgcgctgctcaagttctctcacatcactccatctactcagcagcacctcaaaaaagtctatgcttctttcgccctatgcatgtttgtagccgcagccggtgcatacgtccatatggtaacacacttcatccaggcaggcctgctcagcgccttgggatcattaatcctgatgatctggctgatggctactccgcatagccacgaaactgaacaaaagcggctgggcttgctggctggattcgcgtttctgacaggtgttggtctagggcctgccctggaattttgcatagcagtgaatccatcgattttgcccacagccttcatggggaccgccatgatttttacgtgcttcacgctgagcgctctttacgcccgaagaaggtcttacctgttcttgggcggaatcctgatgtcagctctgtccctgctgttgttgtcaagcctcggtaatgtcttctttggctcgatttggctttttcaggccaatctctacgtagggttggtggtaatgtgtggctttgtgctctttgatactcagttgatcattgaaaaagccgagcacggtgatcaagattatatctggcactgcattgacttattccttgattttattacggtatttaggaaactgatgatgatcttagcaatgaatgagaaggacaaaaaaaaggagaagaagtag

SEQ ID NO: 282450 - DNA, 33 bp, Artificial Sequence
  derived and/or modified sequence
atgaacatttttgatcgcaagatcaacttctag

SEQ ID NO: 282451 - DNA, 36 bp, Artificial Sequence
  derived and/or modified sequence
atgaatatcttcgacaggaaaatcaatttcgattag

SEQ ID NO: 282452 - DNA, 51 bp, Artificial Sequence
  derived and/or modified sequence
atgaatatcttcgatagaaagataaatttcgatgctttgctgaaattttag

SEQ ID NO: 282453 - DNA, 888 bp, Artificial Sequence
  derived and/or modified sequence
atgagtcatagcagcgtgacccgcgaggcaccacagcttctgtcccagcggcagcggcgtgaggtgagaggagtctggggttggggttgtctgcctgggcctcggggtggcccagccctgtttggactggtgacctttggccagtcaggagattgttgtaccgacagtggaacaatgaacatttttgatcgcaagatcaacttcgacgccttactgaagttctcccacattacccccagtacgcagcagcacttgaagaaggtatatgccagcttcgcactgtgtatgtttgtagcggctgcgggtgcctatgtacatatggtcacacactttattcaagcgggattgctgtccgcgctggggagtctgatcctcatgatctggctgatggccactccccacagccacgagaccgaacagaagcgtcttgggctcctcgccggattcgcttttcttaccggcgtggggctggggccagccttagaattttgcattgcagtcaacccctcaattcttcccactgcgtttatgggcaccgccatgatatttacctgttttaccctgtccgctctgtatgccaggagaaggtcatatctgtttttagggggtatactaatgtccgcattgtccctcttgctgcttagctctctcggcaacgttttctttggatctatctggcttttccaggcaaacctctatgtcggtcttgtggtgatgtgtggatttgtgcttttcgatacccaactcataatcgagaaagcagaacacggagaccaggactatatctggcactgtatagacctgttcctagactttattactgtgtttcggaaactgatgatgatcttggctatgaatgagaaagataaaaagaaagagaagaaatag

SEQ ID NO: 282454 - DNA, 2833 bp, Artificial Sequence
  derived and/or modified sequence
agagcacatccggtgttagaagcgctggtaggccttggagaggcgggttaggaagagtggagactgctgcacggactctggaaccatgaacatatttgatcgaaagatcaactttgatgcgcttttaaaattttctcatataaccccgtcaacgcagcagcacctgaagaaggtctatgcaagttttgccctttgtatgtttgtggcggctgcaggggcctatgtccatatggtcactcatttcattcaggctggcctgctgtctgccttgggctccctgatattgatgatttggctgatggcaacacctcatagccatgaaactgaacagaaaagactgggacttcttgctggatttgcattccttacaggagttggcctgggccctgccctggagttttgtattgctgtcaaccccagcatccttcccactgctttcatgggcacggcaatgatctttacctgcttcaccctcagtgcactctatgccaggcgccgtagctacctctttctgggaggtatcttgatgtcagccctgagcttgttgcttttgtcttccctggggaatgttttctttggatccatttggcttttccaggcaaacctgtatgtgggactggtggtcatgtgtggcttcgtcctttttgatactcaactcattattgaaaaggccgaacatggagatcaagattatatctggcactgcattgatctcttcttagatttcattactgtcttcagaaaactcatgatgatcctggccatgaatgaaaaggataagaagaaagagaagaaatgaagtgaccatccagcctttcccaattagacttcctctccttccacccctcatttcctttttgcacacattacaggtggtgtgttctgtgataatgaaaagcatcagaaaagcttttgtactttgtggtttcctctattttgaattttttgatcaaaaaactgattagcagaatatagtttggagtttggcttcatcttcctggggttcccctcactcccttttttgtcaaccccatctgtagcctcttcctctactcaggcagtcgacccgccacgatgagaagtgggaccagcagagggcgccaacttcaggagtccgctttcccaccaggcttcattcacccagtggacctgaactgtttggtagagccacccggcccttccttcctcattgttgtttggtatgcgcacagttcctgtgggactgggccgtgagttttccattggaaagaagttcagtggtcccattgttaactcagcctcaaatctcaactgtcaggccctacaaagaaaatggagagcctcttctggtggatgctttgctccctctgagctgcccatgctggtctggcaaacacacctttctgctttgccttcacaaaagtaatgtgttccctttcccaccccttgcctgaccctcagggagtcagcctgcttccatccatgggtgggaagacttcagcacaaaggaaagactaattcttgtcaggcatttttgaaaaggctgattatgtgtatcaaggtacagcatcgtagggttcccctaaacttgccctgtttttgtttttttagtttgttatccccttactgagcggcctctactaggtggctgtgattaaatgtcccaagcaaggatagggaaggggaatggttgagcctctggagatcattgtaaccaatcctgccagacctgtttggggcagtggggagcaaacctagataaggacctgtttggggcagcagggagcaaaatctcctttaacaaccaagcagttcctcattcacatcaacagagcgaggctgtgataacttaggaggcagcaatcctaatagtccttcagtgcattttagtctgtctccaactggacaccagtaggtagtgtcaagccagagattcggggcagtagataaatgttcattttactgatgcactttagtttttggtctgttacctgttttccagaaatttgtggccttttaggcgggagttaggcgaccaaaccagtgagagccccaatccctgcagttttgtggcttcaagtgtgggtggacagtcctaatggggatctccagctccttcctgtgggctgccacagacagctacccccagaagggtcaatgttgggagtggttgtggctctgagctgctctacagagcttcagtgtgagaggatcgagccattgaaagctcattaccagtaggacataatttttggctctccctattcacaaccagtgcacagtttgacacagtggcctcaggttcacagtgcaccatgtcactgtgctatcctacgaaatcatttgtttctaagttgtgtttattcctggagtgacatgccaccccgaatggctcactttcactgaggatgctgtcctctgatttagctgctgcctccagcctctggcttgagaacttactaaaggcacttccttcctgttaaacccctgttaactctccataaatttggtgattctctgctaggcctaagattttgagttaacatctcttgaagccaaactccaccttctgtgctttttgcttgggataatggagtttttctttagaaacagtgccaagaatgacaagatattaaaaaaaaaaaagaaagaaaaaaaaaaaaacacctacttttaaagaaaatacctaacagatttttaatatagttatctctaccactttcttttctagtttcttgattttcagctcaggctgcattctaactcatactgtgaagacaaaggtgtttttgattcagaaatatatgaaatctgcatagtcttaatttgtaaaaaataaagaaaattccttaac

SEQ ID NO: 282455 - DNA, 2598 bp, Artificial Sequence
  derived and/or modified sequence
ttctgcagagtggagactgctgcacggactctggaaccatgaacatatttgatcgaaagatcaactttgatgcgcttttaaaattttctcatataaccccgtcaacgcagcagcacctgaagaaggtctatgcaagttttgccctttgtatgtttgtggcggctgcaggggcctatgtccatatggtcactcatttcattcaggctggcctgctgtctgccttgggctccctgatattgatgatttggctgatggcaacacctcatagccatgaaactgaacagaaaagactgggacttcttgctggatttgcattccttacaggagttggcctgggccctgccctggagttttgtattgctgtcaaccccagcatccttcccactgctttcatgggcacggcaatgatctttacctgcttcaccctcagtgcactctatgccaggcgccgtagctacctctttctgggaggtatcttgatgtcagccctgagcttgttgcttttgtcttccctggggaatgttttctttggatccatttggcttttccaggcaaacctgtatgtgggactggtggtcatgtgtggcttcgtcctttttgatactcaactcattattgaaaaggccgaacatggagatcaagattatatctggcactgcattgatctcttcttagatttcattactgtcttcagaaaactcatgatgatcctggccatgaatgaaaaggataagaagaaagagaagaaatgaagtgaccatccagcctttcccaattagacttcctctccttccacccctcatttcctttttgcacacattacaggtggtgtgttctgtgataatgaaaagcatcagaaaagcttttgtactttgtggtttcctctattttgaattttttgatcaaaaaactgattagcagaatatagtttggagtttggcttcatcttcctggggttcccctcactcccttttttgtcaaccccatctgtagcctcttcctctactcaggcagtcgacccgccacgatgagaagtgggaccagcagagggcgccaacttcaggagtccgctttcccaccaggcttcattcacccagtggacctgaactgtttggtagagccacccggcccttccttcctcattgttgtttggtatgcgcacagttcctgtgggactgggccgtgagttttccattggaaagaagttcagtggtcccattgttaactcagcctcaaatctcaactgtcaggccctacaaagaaaatggagagcctcttctggtggatgctttgctccctctgagctgcccatgctggtctggcaaacacacctttctgctttgccttcacaaaagtaatgtgttccctttcccaccccttgcctgaccctcagggagtcagcctgcttccatccatgggtgggaagacttcagcacaaaggaaagactaattcttgtcaggcatttttgaaaaggctgattatgtgtatcaaggtacagcatcgtagggttcccctaaacttgccctgtttttgtttttttagtttgttatccccttactgagcggcctctactaggtggctgtgattaaatgtcccaagcaaggatagggaaggggaatggttgagcctctggagatcattgtaaccaatcctgccagacctgtttggggcagtggggagcaaacctagataaggacctgtttggggcagcagggagcaaaatctcctttaacaaccaagcagttcctcattcacatcaacagagcgaggctgtgataacttaggaggcagcaatcctaatagtccttcagtgcattttagtctgtctccaactggacaccagtaggtagtgtcaagccagagattcggggcagtagataaatgttcattttactgatgcactttagtttttggtctgttacctgttttccagaaatttgtggccttttaggcgggagttaggcgaccaaaccagtgagagccccaatccctgcagttttgtggcttcaagtgtgggtggacagtcctaatggggatctccagctccttcctgtgggctgccacagacagctacccccagaagggtcaatgttgggagtggttgtggctctgagctgctctacagagcttcagtgtgagaggatcgagccattgaaagctcattaccagtaggacataatttttggctctccctattcacaaccagtgcacagtttgacacagtggcctcaggttcacagtgcaccatgtcactgtgctatcctacgaaatcatttgtttctaagttgtgtttattcctggagtgacatgccaccccgaatggctcactttcactgaggatgctgtcctctgatttagctgctgcctccagcctctggcttgagaacttactaaaggcacttccttcctgttaaacccctgttaactctccataaatttggtgattctctgctaggcctaagattttgagttaacatctcttgaagccaaactccaccttctgtgctttttgcttgggataatggagtttttctttagaaacagtgccaagaatgacaagatattaaaaaaaaaaaagaaagaaaaaaaaaaaaaca

SEQ ID NO: 282456 - DNA, 3254 bp, Artificial Sequence
  derived and/or modified sequence
acagtgctgaagcgggggtggggcggaggcgagtctgcgggggttttggggggtgtcgaggcctctattctgccccagagcgctggcgaaggccccttctcagcccgccttttcctttctcccgctccttctcctctactaagtgtagacgcagggccccttggcctagcttcgatcgttcgaattcagagcacgtccttccgaggtgaaggaacgcgaaactccacccatccgattgctgttcggctgcgggcgggtcctttggtcgggctgaccctgggtgagcggcccggagccaagactcgaggtagggcctggcgggcgggtgatgtcacactcctctgtgacacgcgaggctcctcagttacttagccaacggcagaggcgggaagtgagaggagtctggggctggggctgccttccaggcccacggggcggccccgctcttttcggattggttacctttgggcagagtggagactgctgcacggactctggaaccatgaacatatttgatcgaaagatcaactttgatgcgcttttaaaattttctcatataaccccgtcaacgcagcagcacctgaagaaggtctatgcaagttttgccctttgtatgtttgtggcggctgcaggggcctatgtccatatggtcactcatttcattcaggctggcctgctgtctgccttgggctccctgatattgatgatttggctgatggcaacacctcatagccatgaaactgaacagaaaagactgggacttcttgctggatttgcattccttacaggagttggcctgggccctgccctggagttttgtattgctgtcaaccccagcatccttcccactgctttcatgggcacggcaatgatctttacctgcttcaccctcagtgcactctatgccaggcgccgtagctacctctttctgggaggtatcttgatgtcagccctgagcttgttgcttttgtcttccctggggaatgttttctttggatccatttggcttttccaggcaaacctgtatgtgggactggtggtcatgtgtggcttcgtcctttttgatactcaactcattattgaaaaggccgaacatggagatcaagattatatctggcactgcattgatctcttcttagatttcattactgtcttcagaaaactcatgatgatcctggccatgaatgaaaaggataagaagaaagagaagaaatgaagtgaccatccagcctttcccaattagacttcctctccttccacccctcatttcctttttgcacacattacaggtggtgtgttctgtgataatgaaaagcatcagaaaagcttttgtactttgtggtttcctctattttgaattttttgatcaaaaaactgattagcagaatatagtttggagtttggcttcatcttcctggggttcccctcactcccttttttgtcaaccccatctgtagcctcttcctctactcaggcagtcgacccgccacgatgagaagtgggaccagcagagggcgccaacttcaggagtccgctttcccaccaggcttcattcacccagtggacctgaactgtttggtagagccacccggcccttccttcctcattgttgtttggtatgcgcacagttcctgtgggactgggccgtgagttttccattggaaagaagttcagtggtcccattgttaactcagcctcaaatctcaactgtcaggccctacaaagaaaatggagagcctcttctggtggatgctttgctccctctgagctgcccatgctggtctggcaaacacacctttctgctttgccttcacaaaagtaatgtgttccctttcccaccccttgcctgaccctcagggagtcagcctgcttccatccatgggtgggaagacttcagcacaaaggaaagactaattcttgtcaggcatttttgaaaaggctgattatgtgtatcaaggtacagcatcgtagggttcccctaaacttgccctgtttttgtttttttagtttgttatccccttactgagcggcctctactaggtggctgtgattaaatgtcccaagcaaggatagggaaggggaatggttgagcctctggagatcattgtaaccaatcctgccagacctgtttggggcagtggggagcaaacctagataaggacctgtttggggcagcagggagcaaaatctcctttaacaaccaagcagttcctcattcacatcaacagagcgaggctgtgataacttaggaggcagcaatcctaatagtccttcagtgcattttagtctgtctccaactggacaccagtaggtagtgtcaagccagagattcggggcagtagataaatgttcattttactgatgcactttagtttttggtctgttacctgttttccagaaatttgtggccttttaggcgggagttaggcgaccaaaccagtgagagccccaatccctgcagttttgtggcttcaagtgtgggtggacagtcctaatggggatctccagctccttcctgtgggctgccacagacagctacccccagaagggtcaatgttgggagtggttgtggctctgagctgctctacagagcttcagtgtgagaggatcgagccattgaaagctcattaccagtaggacataatttttggctctccctattcacaaccagtgcacagtttgacacagtggcctcaggttcacagtgcaccatgtcactgtgctatcctacgaaatcatttgtttctaagttgtgtttattcctggagtgacatgccaccccgaatggctcactttcactgaggatgctgtcctctgatttagctgctgcctccagcctctggcttgagaacttactaaaggcacttccttcctgttaaacccctgttaactctccataaatttggtgattctctgctaggcctaagattttgagttaacatctcttgaagccaaactccaccttctgtgctttttgcttgggataatggagtttttctttagaaacagtgccaagaatgacaagatattaaaaaaaaaaaagaaagaaaaaaaaaaaaacacctacttttaaagaaaatacctaacagatttttaatatagttatctctaccactttcttttctagtttcttgattttcagctcaggctgcattctaactcatactgtgaagacaaaggtgtttttgattcagaaatatatgaaatctgcatagtcttaatttgtaaaaaataaagaaaattccttaaccttt

SEQ ID NO: 282457 - DNA, 1361 bp, Artificial Sequence
  derived and/or modified sequence
acatccggtgttagaagcgctggtaggccttggagaggcgggttaggaagagtggagactgctgcacggactctggaaccatgaacatatttgatcgaaagatcaactttgatgcgcttttaaaattttctcatataaccccgtcaacgcagcagcacctgaagaaggtctatgcaagttttgccctttgtatgtttgtggcggctgcaggggcctatgtccatatggtcactcatttcattcaggctggcctgctgtctgccttgggctccctgatattgatgatttggctgatggcaacacctcatagccatgaaactgaacagaaaagactgggacttcttgctggatttgcattccttacaggagttggcctgggccctgccctggagttttgtattgctgtcaaccccagcatccttcccactgctttcatgggcactgcattgatctcttcttagatttcattactgtcttcagaaaactcatgatgatcctggccatgaatgaaaaggataagaagaaagagaagaaatgaagtgaccatccagcctttcccaattagacttcctctccttccacccctcatttcctttttgcacacattacaggtggtgtgttctgtgataatgaaaagcatcagaaaagcttttgtactttgtggtttcctctattttgaattttttgatcaaaaaactgattagcagaatatagtttggagtttggcttcatcttcctggggttcccctcactcccttttttgtcaaccccatctgtagcctcttcctctactcaggcagtcgacccgccacgatgagaagtgggaccagcagagggcgccaacttcaggagtccgctttcccaccaggcttcattcacccagtggacctgaactgtttggtagagccacccggcccttccttcctcattgttgtttggtatgcgcacagttcctgtgggactgggccgtgagttttccattggaaagaagttcagtggtcccattgttaactcagcctcaaatctcaactgtcaggccctacaaagaaaatggagagcctcttctggtggatgctttgctccctctgagctgcccatgctggtctggcaaacacacctttctgctttgccttcacaaaagtaatgtgttccctttcccaccccttgcctgaccctcagggagtcagcctgcttccatccatgggtgggaagacttcagcacaaaggaaagactaattcttgtcaggcatttttgaaaaggctgattatgtgtatcaaggtacagcatcgtagggttcccctaaacttgccctgtttttgtttttttagtttgttatccccttactgagcggcctctacta

SEQ ID NO: 282458 - DNA, 2669 bp, Artificial Sequence
  derived and/or modified sequence
agtgctgaagcgggggtggggcggaggcgagtctgcgggggttttggggggtgtcgaggcctctattctgccccagagcgctggcgaaggccccttctcagcccgccttttcctttctcccgctccttctcctctactaagtgtagacgcagggccccttggcctagcttcgatcgttcgaattcagagcacgtccttccgaggtgaaggaacgcgaaactccacccatccgattgctgttcggctgcgggcgggtcctttggtcgggctgaccctgggtgagcggcccggagccaagactcgaggtagggcctggcgggcgggtgatgtcacactcctctgtgacacgcgaggctcctcagttacttagccaacggcagaggcgggaagtgagaggagtctggggctggggctgccttccaggcccacggggcggccccgctcttttcggattggttacctttgggcaggtgaggtggctttgctttgcttggtcttgaggttttgtgggcgtctttctaagtctgctcagcaagggcgtcgttgggcagtttttatcttgggcctacttgctggacctgtggtaacaagtaggctttggtatctttgtatatttactgagtgtagaattactacccggtgccagcccgggctgcttggggtcatcagcctttcattgaccacccccacaacaaaaatcactatgaacttgagactgtgttctagcaacttgtgaatgtgtaacccagtagaagggctgactgtgcttgaaacagacaaggattttaaggtcaaagagtggagactgctgcacggactctggaaccatgaacatatttgatcgaaagatcaactttgatgcgcttttaaaattttctcatataaccccgtcaacgcagcagcacctgaagaaggtctatgcaagttttgccctttgtatgtttgtggcggctgcaggggcctatgtccatatggtcactcatttcattcaggctggcctgctgtctgccttgggctccctgatattgatgatttggctgatggcaacacctcatagccatgaaactgaacagaaaagactgggacttcttgctggatttgcattccttacaggagttggcctgggccctgccctggagttttgtattgctgtcaaccccagcatccttcccactgctttcatgggcacggcaatgatctttacctgcttcaccctcagtgcactctatgccaggcgccgtagctacctctttctgggaggtatcttgatgtcagccctgagcttgttgcttttgtcttccctggggaatgttttctttggatccatttggcttttccaggcaaacctgtatgtgggactggtggtcatgtgtggcttcgtcctttttgatactcaactcattattgaaaaggccgaacatggagatcaagattatatctggcactgcattgatctcttcttagatttcattactgtcttcagaaaactcatgatgatcctggccatgaatgaaaaggataagaagaaagagaagaaatgaagtgaccatccagcctttcccaattagacttcctctccttccacccctcatttcctttttgcacacattacaggtggtgtgttctgtgataatgaaaagcatcagaaaagcttttgtactttgtggtttcctctattttgaattttttgatcaaaaaactgattagcagaatatagtttggagtttggcttcatcttcctggggttcccctcactcccttttttgtcaaccccatctgtagcctcttcctctactcaggcagtcgacccgccacgatgagaagtgggaccagcagagggcgccaacttcaggagtccgctttcccaccaggcttcattcacccagtggacctgaactgtttggtagagccacccggcccttccttcctcattgttgtttggtatgcgcacagttcctgtgggactgggccgtgagttttccattggaaagaagttcagtggtcccattgttaactcagcctcaaatctcaactgtcaggccctacaaagaaaatggagagcctcttctggtggatgctttgctccctctgagctgcccatgctggtctggcaaacacacctttctgctttgccttcacaaaagtaatgtgttccctttcccaccccttgcctgaccctcagggagtcagcctgcttccatccatgggtgggaagacttcagcacaaaggaaagactaattcttgtcaggcatttttgaaaaggctgattatgtgtatcaaggtacagcatcgtagggttcccctaaacttgccctgtttttgtttttttagtttgttatccccttactgagcggcctctactaggtggctgtgattaaatgtcccaagcaaggatagggaaggggaatggttgagcctctggagatcattgtaaccaatcctgccagacctgtttggggcagtggggagcaaacctagataaggacctgtttggggcagcagggagcaaaatctcctttaacaaccaagcagttcctcattcacatcaacagagctaggcctaagattttgagttaacatctcttgaagccaaactccaccttctgtgctttttgcttgggataatggagtttttctttagaaacagtgccaagaatgacaagatatt

SEQ ID NO: 282459 - DNA, 556 bp, Artificial Sequence
  derived and/or modified sequence
ttccttaaaatttggacttgtacagtaaggacttcaactgaccttcctcagactgaggactgttcccagtgtatacatcaagtcactgagagtggagactgctgcacggactctggaaccatgaacatatttgatcgaaagatcaactttgatgcgcttttaaaattttctcatataaccccgtcaacgcagcagcacctgaagaaggtctatgcaagttttgccctttgtatgtttgtggcggctgcaggggcctatgtccatatggtcactcatttcattcaggctggcctgctgtctgccttgggctccctgatattgatgatttggctgatggcaacacctcatagccatgaaactgaacagaaaagactgggacttcttgctggatttgcattccttacaggagttggcctgggccctgccctggagttttgtattgctgtcaaccccagcatccttcccactgctttcatgggcacggcaatgatctttacctgcttcaccctcagtgcactctatgccaggcgccgtagctacctctttctgggaggta

SEQ ID NO: 282460 - DNA, 521 bp, Artificial Sequence
  derived and/or modified sequence
agagcacatccggtgttagaagcgctggtaggccttggagaggcgggttaggaagtagagacgggcttttgccaagttgtccagcctggtctcgaactccacacctcaagcgattcgcccgccttgacctcccaaattgctaggattacaggtgtaatcctttcctaaagaaaaagagtcatctctcctgaagaataagaaaagagtggagactgctgcacggactctggaaccatgaacatatttgatcgaaagatcaactttgatgcgcttttaaaattttctcatataaccccgtcaacgcagcagcacctgaagaaggtctatgcaagttttgccctttgtatgtttgtggcggctgcaggggcctatgtccatatggtcactcatttcattcaggctggcctgctgtctgccttgggctccctgatattgatgatttggctgatggcaacacctcatagccatgaaactgaacagaaaagactgggacttcttgctggatttgcattccttacagg

SEQ ID NO: 282461 - DNA, 669 bp, Artificial Sequence
  derived and/or modified sequence
ggcgagtcagagcacatccggtgttagaagcgctggtaggccttggagaggcgggttaggaagacgcagggccccttggcctagcttcgatcgttcgaattcagagcacgtccttccgaggtgaaggaacgcgaaactccacccatccgattgctgttcggctgcgggcgggtcctttggtcgggctgaccctgggtgagcggcccggagccaagactcgagagtttctaaccaaactgcatgcagcccttcgtagtttttatacacattttgttttccaaagatggtgttcgagaccaaggagagaaaggctgtctccttgacttaaaggttacctaagtgaccccttgagagtggagactgctgcacggactctggaaccatgaacatatttgatcgaaagatcaactttgatgcgcttttaaaattttctcatataaccccgtcaacgcagcagcacctgaagaaggtctatgcaagttttgccctttgtatgtttgtggcggctgcaggggcctatgtccatatggtcactcatttcattcaggctggcctgctgtctgccttgggctccctgatattgatgatttggctgatggcaacacctcatagccatgaaactgaacagaaaagactgggacttcttgctggatttgcattccttacagg

SEQ ID NO: 282462 - DNA, 640 bp, Artificial Sequence
  derived and/or modified sequence
tgggcgagtcagagcacatccggtgttagaagcgctggtaggccttggagaggcgggttaggaagagtttctaaccaaactgcatgcagcccttcgtagtttttatacacattttgttttccaaagatggtgttcgagaccaaggagagaaaggctgtctccttgacttaaaggttacctaagtgaccccttgagagtggagactgctgcacggactctggaaccatgaacatatttgatcgaaagatcaactttgatgcgcttttaaaattttctcatataaccccgtcaacgcagcagcacctgaagaaggtctatgcaagttttgccctttgtatgtttgtggcggctgcaggggcctatgtccatatggtcactcatttcattcaggctggcctgctgtctgccttgggctccctgatattgatgatttggctgatggcaacacctcatagccatgaaactgaacagaaaagactgggacttcttgctggatttgcattccttacaggagttggcctgggccctgccctggagttttgtattgctgtcaaccccagcatccttcccactgctttcatgggcacggcaatgatctttacctgcttcaccctcagtgcactctatgccaggcgccgta

SEQ ID NO: 282463 - DNA, 582 bp, Artificial Sequence
  derived and/or modified sequence
gaaggtacgtctgaacctagtactgggcgaactgggagtgagaaatggaaagggagttagcagttactgtctgagcaagagtggcagtagcttccttctgcggacagatggcaccctgaaggaacgaggccctgctcggagaccagactcgggaaaacaggagtggagactgctgcacggactctggaaccatgaacatatttgatcgaaagatcaactttgatgcgcttttaaaattttctcatataaccccgtcaacgcagcagcacctgaagaaggtctatgcaagttttgccctttgtatgtttgtggcggctgcaggggcctatgtccatatggtcactcatttcattcaggctggcctgctgtctgccttgggctccctgatattgatgatttggctgatggcaacacctcatagccatgaaactgaacagaaaagactgggacttcttgctggatttgcattccttacaggagttggcctgggccctgccctggagttttgtattgctgtcaaccccagcatccttcccactgctttcatgggcacggcaatgatctttacctgcttcaccctca

SEQ ID NO: 282464 - DNA, 551 bp, Artificial Sequence
  derived and/or modified sequence
gaaggtacgtctgaacctagtactgggcgaactgggagtgagaaatggaaagggagttagcagttactgtctgagcaagagtggcagtagcttccttctgcggacagatggcaccctgaaggaacgaggccctgctcggagaccagactcgggaaaacaggacgcagggccccttggcctagcttcgatcgttcgaattcagagcacgtccttccgaggtgaaggaacgcgaaactccacccatccgattgctgttcggctgcgggcgggtcctttggtcgggctgaccctgggtgagcggcccggagccaagactcgagaattactacccggtgccagcccgggctgcttggggtcatcagcctttcattgaccacccccacaacaaaaatcactatgaacttgagactgtgttctagcaacttgtgaatgtgtaacccagtagaagggctgactgtgcttgaaacagacaaggattttaaggtcaaagagtggagactgctgcacggactctggaaccatgaacatatttgatcgaaagatcaactttg

SEQ ID NO: 282465 - DNA, 469 bp, Artificial Sequence
  derived and/or modified sequence
tggcggcctcagccggcatcgaatcaccgcggttcccagagggcgtgaggggctggcgtggacacaccgggaatggaccgtaccctttttcaaaaggaactcatgatgtatacaaatagaatgctcttccccttctttgctggccaattcctactcatctgttaaaaccaagcttagagattacctctttgatgacatctctaccaagtctgattgagaacatctctgtgagcacatagtattctaacatctctatcatcataccatgaaatcatcagactaaagccagaatcccaagactgcagcgctaccccttcacaagccgtcgggctgtcccgggcggggccggcccattttcactttctccactagaggcagcagcgcaccgtgaccctggcttactacgagtggagactgctgcacggactctggaaccatgaacatatttgatcgaaagatcaactttgat

SEQ ID NO: 282466 - DNA, 373 bp, Artificial Sequence
  derived and/or modified sequence
agagcacatccggtgttagaagcgctggtaggccttggagaggcgggttaggaagagacagggtttcgccgtgttggccagactggtctcgaactcctgacgtcaaagtgatccacctgcctcggcctcccaaagtactgggattacaggcgtgagccactgtgcccaacctgtaagtcatttttgagtcaacgatatttttaatttacaatgggtgtatccagatgtaagccatcgcaaatcaaggagtgtaccgaatgagtatcaatttctcccagtgataggtcaaccctgagtggagactgctgcacggactctggaaccatgaacatatttgatcgaaagatcaactttgatgcgcttttaaaatttt

SEQ ID NO: 282467 - DNA, 446 bp, Artificial Sequence
  derived and/or modified sequence
tagagacgggcttttgccaagttgtccagcctggtctcgaactccacacctcaagcgattcgcccgccttgacctcccaaattgctaggattacaggtgtaatcctttcctaaagaaaaagagtcatctctcctgaagaataagaaaagagtggagactgctgcacggactctggaaccatgaacatatttgatcgaaagatcaactttgatgcgcttttaaaattttctcatataaccccgtcaacgcagcagcacctgaagaaggtctatgcaagttttgccctttgtatgtttgtggcggctgcaggggcctatgtccatatggtcactcatttcattcaggctggcctgctgtctgccttgggctccctgatattgatgatttggctgatggcaacacctcatagccatgaaactgaacagaaaagactgggacttcttgct

SEQ ID NO: 282468 - DNA, 2771 bp, Artificial Sequence
  derived and/or modified sequence
agaagcgctggtaggccttggagaggcgggttaggaagacgcagggccccttggcctagcttcgatcgttcgaattcagagcacgtccttccgaggtgaaggaacgcgaaactccacccatccgattgctgttcggctgcgggcgggtcctttggtcgggctgaccctgggtgagcggcccggagccaagactcgagagtggagactgctgcacggactctggaaccatgaacatatttgatcgaaagatcaactttgatgcgcttttaaaattttctcatataaccccgtcaacgcagcagcacctgaagaaggtctatgcaagttttgccctttgtatgtttgtggcggctgcaggggcctatgtccatatggtcactcatttcattcaggctggcctgctgtctgccttgggctccctgatattgatgatttggctgatggcaacacctcatagccatgaaactgaacagaaaagactgggacttcttgctggatttgcattccttacaggagttggcctgggccctgccctggagttttgtattgctgtcaaccccagcatccttcccactgctttcatgggcacggcaatgatctttacctgcttcaccctcagtgcactctatgccaggcgccgtagctacctctttctgggaggtatcttgatgtcagccctgagcttgttgcttttgtcttccctggggaatgttttctttggatccatttggcttttccaggcaaacctgtatgtgggactggtggtcatgtgtggcttcgtcctttttgatactcaactcattattgaaaaggccgaacatggagatcaagattatatctggcactgcattgatctcttcttagatttcattactgtcttcagaaaactcatgatgatcctggccatgaatgaaaaggataagaagaaagagaagaaatgaagtgaccatccagcctttcccaattagacttcctctccttccacccctcatttcctttttgcacacattacaggtggtgtgttctgtgataatgaaaagcatcagaaaagcttttgtactttgtggtttcctctattttgaattttttgatcaaaaaactgattagcagaatatagtttggagtttggcttcatcttcctggggttcccctcactcccttttttgtcaaccccatctgtagcctcttcctctactcaggcagtcgacccgccacgatgagaagtgggaccagcagagggcgccaacttcaggagtccgctttcccaccaggcttcattcacccagtggacctgaactgtttggtagagccacccggcccttccttcctcattgttgtttggtatgcgcacagttcctgtgggactgggccgtgagttttccattggaaagaagttcagtggtcccattgttaactcagcctcaaatctcaactgtcaggccctacaaagaaaatggagagcctcttctggtggatgctttgctccctctgagctgcccatgctggtctggcaaacacacctttctgctttgccttcacaaaagtaatgtgttccctttcccaccccttgcctgaccctcagggagtcagcctgcttccatccatgggtgggaagacttcagcacaaaggaaagactaattcttgtcaggcatttttgaaaaggctgattatgtgtatcaaggtacagcatcgtagggttcccctaaacttgccctgtttttgtttttttagtttgttatccccttactgagcggcctctactaggtggctgtgattaaatgtcccaagcaaggatagggaaggggaatggttgagcctctggagatcattgtaaccaatcctgccagacctgtttggggcagtggggagcaaacctagataaggacctgtttggggcagcagggagcaaaatctcctttaacaaccaagcagttcctcattcacatcaacagagcgaggctgtgataacttaggaggcagcaatcctaatagtccttcagtgcattttagtctgtctccaactggacaccagtaggtagtgtcaagccagagattcggggcagtagataaatgttcattttactgatgcactttagtttttggtctgttacctgttttccagaaatttgtggccttttaggcgggagttaggcgaccaaaccagtgagagccccaatccctgcagttttgtggcttcaagtgtgggtggacagtcctaatggggatctccagctccttcctgtgggctgccacagacagctacccccagaagggtcaatgttgggagtggttgtggctctgagctgctctacagagcttcagtgtgagaggatcgagccattgaaagctcattaccagtaggacataatttttggctctccctattcacaaccagtgcacagtttgacacagtggcctcaggttcacagtgcaccatgtcactgtgctatcctacgaaatcatttgtttctaagttgtgtttattcctggagtgacatgccaccccgaatggctcactttcactgaggatgctgtcctctgatttagctgctgcctccagcctctggcttgagaacttactaaaggcacttccttcctgttaaacccctgttaactctccataaatttggtgattctctgctaggcctaagattttgagttaacatctcttgaagccaaactccaccttctgtgctttttgcttgggataatggagtttttctttagaaacagtgccaagaatgacaagatattaaaaaaaaaaaagaaa

SEQ ID NO: 282469 - DNA, 759 bp, Artificial Sequence
  derived and/or modified sequence
ggtgttagaagcgctggtaggccttggagaggcgggttaggaagacgcagggccccttggcctagcttcgatcgttcgaattcagagcacgtccttccgaggtgaaggaacgcgaaactccacccatccgattgctgttcggctgcgggcgggtcctttggtcgggctgaccctgggtgagcggcccggagccaagactcgagagacagggtttcgccgtgttggccagactggtctcgaactcctgacgtcaaagtgatccacctgcctcggcctcccaaagtactgggattacaggcgtgagccactgtgcccaacctgtaagtcatttttgagtcaacgatatttttaatttacaatgggtgtatccagatgtaagccatcgcaaatcaaggagtgtaccgaatgagtatcaatttctcccagtgataggtcaaccctgagtggagactgctgcacggactctggaaccatgaacatatttgatcgaaagatcaactttgatgcgcttttaaaattttctcatataaccccgtcaacgcagcagcacctgaagaaggtctatgcaagttttgccctttgtatgtttgtggcggctgcaggggcctatgtccatatggtcactcatttcattcaggctggcctgctgtctgccttgggctccctgatattgatgatttggctgatggcaacacctcatagccatgaaactgaacagaaaagactgggacttcttgctggatttgcattccttacagg

SEQ ID NO: 282470 - DNA, 538 bp, Artificial Sequence
  derived and/or modified sequence
aagtgggcgagtcagagcacatccggtgttagaagcgctggtaggccttggagaggcgggttaggaagagacagggtttcgccgtgttggccagactggtctcgaactcctgacgtcaaagtgatccacctgcctcggcctcccaaagtactgggattacaggcgtgagccactgtgcccaaccttggagactgctgcacggactctggaaccatgaacatatttgatcgaaagatcaactttgatgcgcttttaaaattttctcatataaccccgtcaacgcagcagcacctgaagaaggtctatgcaagttttgccctttgtatgtttgtggcggctgcaggggcctatgtccatatggtcactcatttcattcaggctggcctgctgtctgccttgggctccctgatattgatgatttggctgatggcaacacctcatagccatgaaactgaacagaaaagactgggacttcttgctggatttgcattccttacaggagttggcctgggccctgccctggagttttgtattgctg

SEQ ID NO: 282471 - DNA, 761 bp, Artificial Sequence
  derived and/or modified sequence
gggggtggggcggaggcgagtctgcgggggttttggggggtgtcgaggcctctattctgccccagagcgctggcgaaggccccttctcagcccgccttttcctttctcccgctccttctcctctactaagtgtagacgcagggccccttggcctagcttcgatcgttcgaattcagagcacgtccttccgaggtgaaggaacgcgaaactccacccatccgattgctgttcggctgcgggcgggtcctttggtcgggctgaccctgggtgagcggcccggagccaagactcgagagtggagactgctgcacggactctggaaccatgaacatatttgatcgaaagatcaactttgatgcgcttttaaaattttctcatataaccccgtcaacgcagcagcacctgaagaaggtctatgcaagttttgccctttgtatgtttgtggcggctgcaggggcctatgtccatatggtcactcatttcattcaggctggcctgctgtctgccttgggctccctgatattgatgatttggctgatggcaacacctcatagccatgaaactgaacagaaaagactgggacttcttgctggatttgcattccttacaggagttggcctgggccctgccctggagttttgtattgctgtcaaccccagcatccttcccactgctttcatgggcacggcaatgatctttacctgcttcaccctcagtgcactctatgccaggcgccgtagctacctctttctgggaggtat

SEQ ID NO: 282472 - DNA, 533 bp, Artificial Sequence
  derived and/or modified sequence
gttagaagcgctggtaggccttggagaggcgggttaggaagacgcagggccccttggcctagcttcgatcgttcgaattcagagcacgtccttccgaggtgaaggaacgcgaaactccacccatccgattgctgttcggctgcgggcgggtcctttggtcgggctgaccctgggtgagcggcccggagccaagactcgagaattactacccggtgccagcccgggctgcttggggtcatcagcctttcattgaccacccccacaacaaaaatcactatgaacttgagactgtgttctagcaacttgtgaatgtgtaacccagtagaagggctgactgtgcttgaaacagacaaggattttaaggtcaaagagtggagactgctgcacggactctggaaccatgaacatatttgatcgaaagatcaactttgatgcgcttttaaaattttctcatataaccccgtcaacgcagcagcacctgaagaaggtctatgcaagttttgccctttgtatgtttgtggcggctgcagggg

SEQ ID NO: 282473 - DNA, 423 bp, Artificial Sequence
  derived and/or modified sequence
tcagccggcatcgaatcaccgcggttcccagagggcgtgaggggctggcgtggacacaccgggaatggaccgtaccctttttcaaaaggaactcatgatgtatacaaatagaatgctcttccccttctttgctggccaattcctactcatctgttaaaaccaagcttagagattacctctttgatgacatctctaccaagtctgattgagaacatctctgtgagcacatagtattctaacatctctatcatcataccatgaaatcatcagagtggagactgctgcacggactctggaaccatgaacatatttgatcgaaagatcaactttgatgcgcttttaaaattttctcatataaccccgtcaacgcagcagcacctgaagaaggtctatgcaagttttgccctttgtatgtttgtggcg

SEQ ID NO: 282474 - DNA, 731 bp, Artificial Sequence
  derived and/or modified sequence
ctcagaggagagagcaacaaccttagtaggttctgcagcttctcactgtatctgtccttaagaacagaattaacaaaagttctgagagtggagactgctgcacggactctggaaccatgaacatatttgatcgaaagatcaactttgatgcgcttttaaaattttctcatataaccccgtcaacgcagcagcacctgaagaaggtctatgcaagttttgccctttgtatgtttgtggcggctgcaggggcctatgtccatatggtcactcatttcattcaggctggcctgctgtctgccttgggctccctgatattgatgatttggctgatggcaacacctcatagccatgaaactgaacagaaaagactgggacttcttgctggatttgcattccttacaggagttggcctgggccctgccctggagttttgtattgctgtcaaccccagcatccttcccactgctttcatgggcacggcaatgatctttacctgcttcaccctcagtgcactctatgccaggcgccgtagctacctctttctgggaggtatcttgatgtcagccctgagcttgttgcttttgtcttccctggggaatgttttctttggatccatttggcttttccaggcaaacctgtatgtgggactggtggtcatgtgtggcttcgtcctttttgatactcaactcattattgaaaaggccgaacatggagatcaagattatatctgg

SEQ ID NO: 282475 - DNA, 2964 bp, Artificial Sequence
  derived and/or modified sequence
agagcacatccggtgttagaagcgctggtaggccttggagaggcgggttaggaagacgcagggccccttggcctagcttcgatcgttcgaattcagagcacgtccttccgaggtgaaggaacgcgaaactccacccatccgattgctgttcggctgcgggcgggtcctttggtcgggctgaccctgggtgagcggcccggagccaagactcgaggtagggcctggcgggcgggtgatgtcacactcctctgtgacacgcgaggctcctcagttacttagccaacggcagaggcgggaagtgagaggagtctggggctggggctgccttccaggcccacggggcggccccgctcttttcggattggttacctttgggcagagtggagactgctgcacggactctggaaccatgaacatatttgatcgaaagatcaactttgatgcgcttttaaaattttctcatataaccccgtcaacgcagcagcacctgaagaaggtctatgcaagttttgccctttgtatgtttgtggcggctgcaggggcctatgtccatatggtcactcatttcattcaggctggcctgctgtctgccttgggctccctgatattgatgatttggctgatggcaacacctcatagccatgaaactgaacagaaaagactgggacttcttgctggatttgcattccttacaggagttggcctgggccctgccctggagttttgtattgctgtcaaccccagcatccttcccactgctttcatgggcacggcaatgatctttacctgcttcaccctcagtgcactctatgccaggcgccgtagctacctctttctgggaggtatcttgatgtcagccctgagcttgttgcttttgtcttccctggggaatgttttctttggatccatttggcttttccaggcaaacctgtatgtgggactggtggtcatgtgtggcttcgtcctttttgatactcaactcattattgaaaaggccgaacatggagatcaagattatatctggcactgcattgatctcttcttagatttcattactgtcttcagaaaactcatgatgatcctggccatgaatgaaaaggataagaagaaagagaagaaatgaagtgaccatccagcctttcccaattagacttcctctccttccacccctcatttcctttttgcacacattacaggtggtgtgttctgtgataatgaaaagcatcagaaaagcttttgtactttgtggtttcctctattttgaattttttgatcaaaaaactgattagcagaatatagtttggagtttggcttcatcttcctggggttcccctcactcccttttttgtcaaccccatctgtagcctcttcctctactcaggcagtcgacccgccacgatgagaagtgggaccagcagagggcgccaacttcaggagtccgctttcccaccaggcttcattcacccagtggacctgaactgtttggtagagccacccggcccttccttcctcattgttgtttggtatgcgcacagttcctgtgggactgggccgtgagttttccattggaaagaagttcagtggtcccattgttaactcagcctcaaatctcaactgtcaggccctacaaagaaaatggagagcctcttctggtggatgctttgctccctctgagctgcccatgctggtctggcaaacacacctttctgctttgccttcacaaaagtaatgtgttccctttcccaccccttgcctgaccctcagggagtcagcctgcttccatccatgggtgggaagacttcagcacaaaggaaagactaattcttgtcaggcatttttgaaaaggctgattatgtgtatcaaggtacagcatcgtagggttcccctaaacttgccctgtttttgtttttttagtttgttatccccttactgagcggcctctactaggtggctgtgattaaatgtcccaagcaaggatagggaaggggaatggttgagcctctggagatcattgtaaccaatcctgccagacctgtttggggcagtggggagcaaacctagataaggacctgtttggggcagcagggagcaaaatctcctttaacaaccaagcagttcctcattcacatcaacagagcgaggctgtgataacttaggaggcagcaatcctaatagtccttcagtgcattttagtctgtctccaactggacaccagtaggtagtgtcaagccagagattcggggcagtagataaatgttcattttactgatgcactttagtttttggtctgttacctgttttccagaaatttgtggccttttaggcgggagttaggcgaccaaaccagtgagagccccaatccctgcagttttgtggcttcaagtgtgggtggacagtcctaatggggatctccagctccttcctgtgggctgccacagacagctacccccagaagggtcaatgttgggagtggttgtggctctgagctgctctacagagcttcagtgtgagaggatcgagccattgaaagctcattaccagtaggacataatttttggctctccctattcacaaccagtgcacagtttgacacagtggcctcaggttcacagtgcaccatgtcactgtgctatcctacgaaatcatttgtttctaagttgtgtttattcctggagtgacatgccaccccgaatggctcactttcactgaggatgctgtcctctgatttagctgctgcctccagcctctggcttgagaacttactaaaggcacttccttcctgttaaacccctgttaactctccataaatttggtgattctctgctaggcctaagattttgagttaacatctcttgaagccaaactccaccttctgtgctttttgcttgggataatggagtttttctttagaaacagtgccaagaatgacaagatattaaaaaaaaaaaagaaagaaaaaaaaaa

SEQ ID NO: 282476 - protein, 211 aa, Artificial Sequence
  derived and/or modified sequence
MTTETFVKDIKPGLKNLNLIFIVLETGRVTKTKDGHEVRTCKVADKTGSINISVWDDVGNLIQPGDIIRLTKGYASVFKGCLTLYTGRGGDLQKIGEFCMVYSEVPNFSEPNPEYSTQQAPNKAVQNDSNPSASQPTTGPSAASPASENQNGNGLSAPPGPGGGPHPPHTPSHPPSTRITRSQPNHTPAGPPGPSSNPVSNGKETRRSSKR

SEQ ID NO: 282477 - protein, 152 aa, Artificial Sequence
  derived and/or modified sequence
MTTETFVKDIKPGLKNLNLIFIVLETGRVTKTKDGHEVRTCKVADKTGSINISVWDDVGNLIQPGDIIRLTKGYASVFKGCLTLYTGRGGDLQKIGEFCMVYSEVPNFSEPNPEYSTQQAPNKAVQNDSNPSASQPTTGPSAASPASENQNG

SEQ ID NO: 282478 - protein, 144 aa, Artificial Sequence
  derived and/or modified sequence
MTTETFVKDIKPGLKNLNLIFIVLETGRVTKTKDGHEVRTCKVADKTGSINISVWDDVGNLIQPGDIIRLTKGYASVFKGCLTLYTGRGGDLQKIGEFCMVYSEVPNFSEPNPEYSTQQAPNKAVQNDSNPSASQPTTGPSAAS

SEQ ID NO: 282479 - DNA, 1417 bp, Artificial Sequence
  derived and/or modified sequence
aacttccgggaatgtccgcactcccgcgttccacggggcagcatccggcggcagcggagcctgtggctccccctgcgggctgctcagcggcgtgcacagtcctgccggctggcttggtggggtgccgaggctcaggcagcatgacgacggagacctttgtgaaggatatcaagcctgggctcaagaatctgaaccttatcttcattgtgctggagacaggccgagtgaccaagacaaaggacgggcatgaggttcggacctgcaaagtggcggacaaaacaggcagcatcaatatctctgtctgggacgatgttggcaatctgatccagcctggggacattatccggctcaccaaagggtacgcttcagttttcaaaggttgtctgacactatatactggccgtgggggtgatctgcagaagattggagaattctgtatggtttattctgaggttcctaacttcagtgagccaaacccagagtacagcacccagcaggcacccaacaaggcggtgcagaacgacagcaacccttcagcttcccagcctaccactggaccctctgctgcctctccagcctctgagaaccagaatgggaatggactgagtgccccaccaggtcccggtggtggcccacatccccctcatactccctcccacccacccagcacccgaatcactcgaagccagcccaaccacacacctgcaggcccgcctggcccttccagcaaccctgttagtaacggcaaagaaacccggaggagcagcaagagatagcatgacattctttcttcctgccaccaaccacatcccaagtgtcccctggagagcaagatagccttccactgattggctggtgtagcagtattttagccactgaacttcagtggagggtggtgagcagtgtccttatccaccctaatctcatactccctcattgtccagctgaactacctgtcccctgggagtcaggaccctctgcctgctctctttcctctttagaaatggcagttactggctgggcgcagtggctcacgcttgtaatcccagcactttgggaagccgaggtgggcggatcacctgaggtcgggagttcaagaccagcctgaccaacatggagaaaccccgtgtctactaaaaatacagaattagccaggcatggtggcgtatgcctgtaatcccagctacttaggaggctgaggcaggagaatctcttgaaaccgggaggcggaggttgaggtgagccgaaattgcaccattgcactccagcctgggcaataagagcgaaactccatctcaaaaaaaaaagaaagaaagaaagaaagaaagaaagaaatggcagttaccatctgtttcttctgtgtgagacatgggagtctaactgaagtctctccttcctaataaatgttaccactcta

SEQ ID NO: 282480 - DNA, 1775 bp, Artificial Sequence
  derived and/or modified sequence
ggggcagcatccggcggcagcggagcctgtggctccccctgcgggctgctcagcggcgtgcacagtcctgccggctggcttgggtgggtggtgggctgcgggtaggggaggggatggaccgagtcccggcttgtcgggatgagggttccggaagatctggccagtaagattctactccctggctgtgcaccgggttccctacccctgtctacgtcggctccgccacttcgcggcttgagactaaaagagcatcccggcagggggccttccagccccaaagcagcctgtccagagacccccaaattctgatcctgaagttggaggcctccggggatgttcttttttaatcttttagaagggttagaggggttgaggctgcctgaccccagcctaatggggtaggtaggccttgggaagtggagcatgggggcaaaggatccaagcattgagccttcatcctctattccccatccagtggggtgccgaggctcaggcagcatgacgacggagacctttgtgaaggatatcaagcctgggctcaagaatctgaaccttatcttcattgtgctggagacaggccgagtgaccaagacaaaggacgggcatgaggttcggacctgcaaagtggcggacaaaacaggcagcatcaatatctctgtctgggacgatgttggcaatctgatccagcctggggacattatccggctcaccaaagggtacgcttcagttttcaaaggttgtctgacactatatactggccgtgggggtgatctgcagaagattggagaattctgtatggtttattctgaggttcctaacttcagtgagccaaacccagagtacagcacccagcaggcacccaacaaggcggtgcagaacgacagcaacccttcagcttcccagcctaccactggaccctctgctgcctctccagcctctgagaaccagaatgggaatggactgagtgccccaccaggtcccggtggtggcccacatccccctcatactccctcccacccacccagcacccgaatcactcgaagccagcccaaccacacacctgcaggcccgcctggcccttccagcaaccctgttagtaacggcaaagaaacccggaggagcagcaagagatagcatgacattctttcttcctgccaccaaccacatcccaagtgtcccctggagagcaagatagccttccactgattggctggtgtagcagtattttagccactgaacttcagtggagggtggtgagcagtgtccttatccaccctaatctcatactccctcattgtccagctgaactacctgtcccctgggagtcaggaccctctgcctgctctctttcctctttagaaatggcagttactggctgggcgcagtggctcacgcttgtaatcccagcactttgggaagccgaggtgggcggatcacctgaggtcgggagttcaagaccagcctgaccaacatggagaaaccccgtgtctactaaaaatacagaattagccaggcatggtggcgtatgcctgtaatcccagctacttaggaggctgaggcaggagaatctcttgaaaccgggaggcggaggttgaggtgagccgaaattgcaccattgcactccagcctgggcaataagagcgaaactccatctcaaaaaaaaaagaaagaaagaaagaaagaaagaaagaaatggcagttaccatctgtttcttctgtgtgagacatgggagtctaactgaagtctctccttcctaataaatgttaccactcta

SEQ ID NO: 282481 - DNA, 663 bp, Artificial Sequence
  derived and/or modified sequence
agccaggagctgcctacgaggagggacgaaggctggccaggcctccactctagacaggaagtctagtctagagtctatatggtcccagccaggactatgtagccatttaggagggagaactctatgttcttcccggcaaaaacgtgtgggcctggccggccacgcttcgctttggaggggtgcagtggggtgccgaggctcaggcagcatgacgacggagacctttgtgaaggatatcaagcctgggctcaagaatctgaaccttatcttcattgtgctggagacaggccgagtgaccaagacaaaggacgggcatgaggttcggacctgcaaagtggcggacaaaacaggcagcatcaatatctctgtctgggacgatgttggcaatctgatccagcctggggacattatccggctcaccaaagggtacgcttcagttttcaaaggttgtctgacactatatactggccgtgggggtgatctgcagaagattggagaattctgtatggtttattctgaggttcctaacttcagtgagccaaacccagagtacagcacccagcaggcacccaacaaggcggtgcagaacgacagcaacccttcagcttcccagcctaccactggaccctctgctgcctctccagcctctgagaaccagaatgg

SEQ ID NO: 282482 - DNA, 770 bp, Artificial Sequence
  derived and/or modified sequence
agccaggagctgcctacgaggagggacgaaggctggccaggcctccactctagacaggaagtctagtctagagtctatatggtcccagccaggactatgtagccatttaggagggagaactctatgttcttcccggcaaaaacgtgtgggcctggccggccacgcttcgctttggaggggtgcaggttccatttcttccaagaagggtgagcctgccttttgtctctggtgtaaatgccacttttcccagagaccttgaccaagctgggtagtgcattaaagatgagaaccccaaatcaggaacaaagataacgtggggtgccgaggctcaggcagcatgacgacggagacctttgtgaaggatatcaagcctgggctcaagaatctgaaccttatcttcattgtgctggagacaggccgagtgaccaagacaaaggacgggcatgaggttcggacctgcaaagtggcggacaaaacaggcagcatcaatatctctgtctgggacgatgttggcaatctgatccagcctggggacattatccggctcaccaaagggtacgcttcagttttcaaaggttgtctgacactatatactggccgtgggggtgatctgcagaagattggagaattctgtatggtttattctgaggttcctaacttcagtgagccaaacccagagtacagcacccagcaggcacccaacaaggcggtgcagaacgacagcaacccttcagcttcccagcctaccactggaccctctgctgcctctc

SEQ ID NO: 282483 - DNA, 1411 bp, Artificial Sequence
  derived and/or modified sequence
gggctgctcagcggcgtgcacagtcctgccggctggcttgggtgggtggtgggctgcgggtaggggaggggatggaccgagtcccggcttgtcgggatgagggttccggaagatctggccatggggtgccgaggctcaggcagcatgacgacggagacctttgtgaaggatatcaagcctgggctcaagaatctgaaccttatcttcattgtgctggagacaggccgagtgaccaagacaaaggacgggcatgaggttcggacctgcaaagtggcggacaaaacaggcagcatcaatatctctgtctgggacgatgttggcaatctgatccagcctggggacattatccggctcaccaaagggtacgcttcagttttcaaaggttgtctgacactatatactggccgtgggggtgatctgcagaagattggagaattctgtatggtttattctgaggttcctaacttcagtgagccaaacccagagtacagcacccagcaggcacccaacaaggcggtgcagaacgacagcaacccttcagcttcccagcctaccactggaccctctgctgcctctccagcctctgagaaccagaatgggaatggactgagtgccccaccaggtcccggtggtggcccacatccccctcatactccctcccacccacccagcacccgaatcactcgaagccagcccaaccacacacctgcaggcccgcctggcccttccagcaaccctgttagtaacggcaaagaaacccggaggagcagcaagagatagcatgacattctttcttcctgccaccaaccacatcccaagtgtcccctggagagcaagatagccttccactgattggctggtgtagcagtattttagccactgaacttcagtggagggtggtgagcagtgtccttatccaccctaatctcatactccctcattgtccagctgaactacctgtcccctgggagtcaggaccctctgcctgctctctttcctctttagaaatggcagttactggctgggcgcagtggctcacgcttgtaatcccagcactttgggaagccgaggtgggcggatcacctgaggtcgggagttcaagaccagcctgaccaacatggagaaaccccgtgtctactaaaaatacagaattagccaggcatggtggcgtatgcctgtaatcccagctacttaggaggctgaggcaggagaatctcttgaaaccgggaggcggaggttgaggtgagccgaaattgcaccattgcactccagcctgggcaataagagcgaaactccatctcaaaaaaaaaagaaagaaagaaagaaagaaagaaagaaatggcagttaccatctgtttcttctgtgtgagacatgggagtctaactgaagtctctccttcctaataaatgt

SEQ ID NO: 282484 - protein, 368 aa, Artificial Sequence
  derived and/or modified sequence
MLHWSMSSIYGLQPGEVWWAASDLGWVVGHSYICYGPLLHGNTTVLYEGKPVGTPDAGAYFRVLAEHGVAALFTAPTAIRAIRQQDPGAALGKQYSLTRFKTLFVAGERCDVETLEWSKNVFRVPVLDHWWQTETGSPITASCVGLGNSKTPPPGQAGKSVPGYNVMILDDNMQKLKARCLGNIVVKLPLPPGAFSGLWKNQEAFKHLYFEKFPGYYDTMDAGYMDEEGYLYVMSRVDDVINVAGHRISAGAIEESILSHGTVADCAVVGKEDPLKGHVPLALCVLRKDINATEEQVLEEIVKHVRQNIGPVAAFRNAVFVKQLPKTRSGKIPRSALSAIVNGKPYKITSTIEDPSIFGHVEEMLKQA

SEQ ID NO: 282485 - DNA, 2214 bp, Artificial Sequence
  derived and/or modified sequence
caaattattttgtgttgactattgaaggacccaaagaaataatgattcaaagataattttataaaagccaaagtaacttgtagctaatatataaaatacttttgaccaggaacttttaaagtggatgctatgaagatagagagtgtttttacacattgtttattgattttaatttcactttttctctccttagggtgtgattaggcccactgggggatacgctgtcatgctacactggtcaatgtcttccatatacggacttcaacccggagaggtgtggtgggcagcttctgacttaggctgggttgttggacattcctatatctgctatggacctcttcttcatgggaacacaacagttttatatgaggggaagcctgtgggaacaccagatgctggcgcttatttccgtgtgcttgcagagcatggagtagctgccttgtttacagcaccaactgcaattagagcaatccgtcaacaggaccctggggcagctttggggaagcagtactctctgacaaggttcaaaacattatttgtggctggagaacgatgtgatgtagagaccctggaatggtccaaaaatgtcttcagagtacctgtcttagaccattggtggcaaactgagactggatctccaattactgcgtcatgtgttggattaggcaattctaaaacacctccaccagggcaagcaggaaaaagcgtcccaggatacaatgttatgattttggatgacaacatgcaaaaactgaaggctcggtgtttaggaaatattgtggtaaagttaccattgccacctggggctttttcaggactctggaagaatcaggaagcattcaagcatttatactttgaaaaatttcctggatattatgataccatggatgctggttacatggatgaagaaggctatttgtatgttatgtctcgagtggatgatgtaataaatgttgcaggtcacagaatttctgcaggcgccattgaagagtcaatcctttcccatggtaccgtggcagactgtgctgttgttggcaaggaagatcccttaaaaggtcatgtccccttagcactctgtgtattgagaaaagatataaatgcaacagaggagcaagttttggaagaaattgtgaaacacgttagacagaacattggccctgtggctgcttttcgaaatgcagtgtttgtcaaacagctacccaaaaccagatctggcaagatcccccgatcagctttatctgccattgtcaatggcaagccatacaagataacttctacaattgaagaccccagcatttttggccacgtagaagaaatgctgaagcaagcataatgagtttgtcttattcctattttgagttgatttaatttcttaattgaaattaaattatttgagttgtttctcagaaataaatatttcagtagaaattacttgcaaaatgaaatgtgaattgtaaaacttggcctaaacaaatctaatgaaaacatgtgaaagacctgtgccttttttttggtttgaccctgttagcattgttattagttatctataacatggcttattgaatgtcatctactgctttaggaaaaacgtatctagtgtattatttttaaaattgtacctcccaagaagaacactttaattgaaagcaacactaatatagagccacttcctgaaaccaagaatctgtagttttgatccaaaatctaaaacttaaagtcagaaaataattaaaatttttcttgtagaaattttagatattttctagtattctttagatgctcacattgttttaaataaaatagatgaaatgggaagtttaggtaatcatctagacagatgaaattattatctaggtaggagggcttttctatacattttctgagggaaagcagaacaccggggttatagctataccttcaggtcttttgttacttaggcaaggaaaaccacatgtctgacctggttcagcatgtaatccgagcactttgggaggctgaggcaggcggatcacttgaggtcagcagtttgagacgagcctggccaacatggtgaaaccctgtagctactgaaaatacaaaaataagccaggcgtggtggcgggaggctgaggcaaggagaatcacttgaatacaagaggcagaggttgcagtgagccaagttcccccactgtactccagcctgggtgacagagtaagactccatctcaaaacaac

SEQ ID NO: 282486 - protein, 5537 aa, Artificial Sequence
  derived and/or modified sequence
MDSQKLAGEDKDSEPAADGPAASEDPSATESDLPNPHVGEVSVLSSGSPRLQETPQDCSGGPVRRCALCNCGEPSLHGQRELRRFELPFDWPRCPVVSPGGSPGPNEAVLPSEDLSQIGFPEGLTPAHLGEPGGSCWAHHWCAAWSAGVWGQEGPELCGVDKAIFSGISQRCSHCTRLGASIPCRSPGCPRLYHFPCATASGSFLSMKTLQLLCPEHSEGAAYLEEARCAVCEGPGELCDLFFCTSCGHHYHGACLDTALTARKRAGWQCPECKVCQACRKPGNDSKMLVCETCDKGYHTFCLKPPMEELPAHSWKCKACRVCRACGAGSAELNPNSEWFENYSLCHRCHKAQGGQTIRSVAEQHTPVCSRFSPPEPGDTPTDEPDALYVACQGQPKGGHVTSMQPKEPGPLQCEAKPLGKAGVQLEPQLEAPLNEEMPLLPPPEESPLSPPPEESPTSPPPEASRLSPPPEELPASPLPEALHLSRPLEESPLSPPPEESPLSPPPESSPFSPLEESPLSPPEESPPSPALETPLSPPPEASPLSPPFEESPLSPPPEELPTSPPPEASRLSPPPEESPMSPPPEESPMSPPPEASRLFPPFEESPLSPPPEESPLSPPPEASRLSPPPEDSPMSPPPEESPMSPPPEVSRLSPLPVVSRLSPPPEESPLSPPPEESPTSPPPEASRLSPPPEDSPTSPPPEDSPASPPPEDSLMSLPLEESPLLPLPEEPQLCPRSEGPHLSPRPEEPHLSPRPEEPHLSPQAEEPHLSPQPEEPCLCAVPEEPHLSPQAEGPHLSPQPEELHLSPQTEEPHLSPVPEEPCLSPQPEESHLSPQSEEPCLSPRPEESHLSPELEKPPLSPRPEKPPEEPGQCPAPEELPLFPPPGEPSLSPLLGEPALSEPGEPPLSPLPEELPLSPSGEPSLSPQLMPPDPLPPPLSPIITAAAPPALSPLGELEYPFGAKGDSDPESPLAAPILETPISPPPEANCTDPEPVPPMILPPSPGSPVGPASPILMEPLPPQCSPLLQHSLVPQNSPPSQCSPPALPLSVPSPLSPIGKVVGVSDEAELHEMETEKVSEPECPALEPSATSPLPSPMGDLSCPAPSPAPALDDFSGLGEDTAPLDGIDAPGSQPEPGQTPGSLASELKGSPVLLDPEELAPVTPMEVYPECKQTAGQGSPCEEQEEPRAPVAPTPPTLIKSDIVNEISNLSQGDASASFPGSEPLLGSPDPEGGGSLSMELGVSTDVSPARDEGSLRLCTDSLPETDDSLLCDAGTAISGGKAEGEKGRRRSSPARSRIKQGRSSSFPGRRRPRGGAHGGRGRGRARLKSTASSIETLVVADIDSSPSKEEEEEDDDTMQNTVVLFSNTDKFVLMQDMCVVCGSFGRGAEGHLLACSQCSQCYHPYCVNSKITKVMLLKGWRCVECIVCEVCGQASDPSRLLLCDDCDISYHTYCLDPPLLTVPKGGWKCKWCVSCMQCGAASPGFHCEWQNSYTHCGPCASLVTCPICHAPYVEEDLLIQCRHCERWMHAGCESLFTEDDVEQAADEGFDCVSCQPYVVKPVAPVAPPELVPMKVKEPEPQYFRFEGVWLTETGMALLRNLTMSPLHKRRQRRGRLGLPGEAGLEGSEPSDALGPDDKKDGDLDTDELLKGEGGVEHMECEIKLEGPVSPDVEPGKEETEESKKRKRKPYRPGIGGFMVRQRKSHTRTKKGPAAQAEVLSGDGQPDEVIPADLPAEGAVEQSLAEGDEKKKQQRRGRKKSKLEDMFPAYLQEAFFGKELLDLSRKALFAVGVGRPSFGLGTPKAKGDGGSERKELPTSQKGDDGPDIADEESRGLEGKADTPGPEDGGVKASPVPSDPEKPGTPGEGMLSSDLDRISTEELPKMESKDLQQLFKDVLGSEREQHLGCGTPGLEGSRTPLQRPFLQGGLPLGNLPSSSPMDSYPGLCQSPFLDSRERGGFFSPEPGEPDSPWTGSGGTTPSTPTTPTTEGEGDGLSYNQRSLQRWEKDEELGQLSTISPVLYANINFPNLKQDYPDWSSRCKQIMKLWRKVPAADKAPYLQKAKDNRAAHRINKVQKQAESQINKQTKVGDIARKTDRPALHLRIPPQPGALGSPPPAAAPTIFIGSPTTPAGLSTSADGFLKPPAGSVPGPDSPGELFLKLPPQVPAQVPSQDPFGLAPAYPLEPRFPTAPPTYPPYPSPTGAPAQPPMLGASSRPGAGQPGEFHTTPPGTPRHQPSTPDPFLKPRCPSLDNLAVPESPGVGGGKASEPLLSPPPFGESRKALEVKKEELGASSPSYGPPNLGFVDSPSSGTHLGGLELKTPDVFKAPLTPRASQVEPQSPGLGLRPQEPPPAQALAPSPPSHPDIFRPGSYTDPYAQPPLTPRPQPPPPESCCALPPRSLPSDPFSRVPASPQSQSSSQSPLTPRPLSAEAFCPSPVTPRFQSPDPYSRPPSRPQSRDPFAPLHKPPRPQPPEVAFKAGSLAHTSLGAGGFPAALPAGPAGELHAKVPSGQPPNFVRSPGTGAFVGTPSPMRFTFPQAVGEPSLKPPVPQPGLPPPHGINSHFGPGPTLGKPQSTNYTVATGNFHPSGSPLGPSSGSTGESYGLSPLRPPSVLPPPAPDGSLPYLSHGASQRSGITSPVEKREDPGTGMGSSLATAELPGTQDPGMSGLSQTELEKQRQRQRLRELLIRQQIQRNTLRQEKETAAAAAGAVGPPGSWGAEPSSPAFEQLSRGQTPFAGTQDKSSLVGLPPSKLSGPILGPGSFPSDDRLSRPPPPATPSSMDVNSRQLVGGSQAFYQRAPYPGSLPLQQQQQQLWQQQQATAATSMRFAMSARFPSTPGPELGRQALGSPLAGISTRLPGPGEPVPGPAGPAQFIELRHNVQKGLGPGGTPFPGQGPPQRPRFYPVSEDPHRLAPEGLRGLAVSGLPPQKPSAPPAPELNNSLHPTPHTKGPTLPTGLELVNRPPSSTELGRPNPLALEAGKLPCEDPELDDDFDAHKALEDDEELAHLGLGVDVAKGDDELGTLENLETNDPHLDDLLNGDEFDLLAYTDPELDTGDKKDIFNEHLRLVESANEKAEREALLRGVEPGPLGPEERPPPAADASEPRLASVLPEVKPKVEEGGRHPSPCQFTIATPKVEPAPAANSLGLGLKPGQSMMGSRDTRMGTGPFSSSGHTAEKASFGATGGPPAHLLTPSPLSGPGGSSLLEKFELESGALTLPGGPAASGDELDKMESSLVASELPLLIEDLLEHEKKELQKKQQLSAQLQPAQQQQQQQQQHSLLSAPGPAQAMSLPHEGSSPSLAGSQQQLSLGLAGARQPGLPQPLMPTQPPAHALQQRLAPSMAMVSNQGHMLSGQHGGQAGLVPQQSSQPVLSQKPMGTMPPSMCMKPQQLAMQQQLANSFFPDTDLDKFAAEDIIDPIAKAKMVALKGIKKVMAQGSIGVAPGMNRQQVSLLAQRLSGGPSSDLQNHVAAGSGQERSAGDPSQPRPNPPTFAQGVINEADQRQYEEWLFHTQQLLQMQLKVLEEQIGVHRKSRKALCAKQRTAKKAGREFPEADAEKLKLVTEQQSKIQKQLDQVRKQQKEHTNLMAEYRNKQQQQQQQQQQQQQQHSAVLALSPSQSPRLLTKLPGQLLPGHGLQPPQGPPGGQAGGLRLTPGGMALPGQPGGPFLNTALAQQQQQQHSGGAGSLAGPSGGFFPGNLALRSLGPDSRLLQERQLQLQQQRMQLAQKLQQQQQQQQQQQHLLGQVAIQQQQQQGPGVQTNQALGPKPQGLMPPSSHQGLLVQQLSPQPPQGPQGMLGPAQVAVLQQQHPGALGPQGPHRQVLMTQSRVLSSPQLAQQGQGLMGHRLVTAQQQQQQQQHQQQGSMAGLSHLQQSLMSHSGQPKLSAQPMGSLQQLQQQQQLQQQQQLQQQQQQQLQQQQQLQQQQLQQQQQQQQLQQQQQQQLQQQQQQLQQQQQQQQQQFQQQQQQQQMGLLNQSRTLLSPQQQQQQQVALGPGMPAKPLQHFSSPGALGPTLLLTGKEQNTVDPAVSSEATEGPSTHQGGPLAIGTTPESMATEPGEVKPSLSGDSQLLLVQPQPQPQPSSLQLQPPLRLPGQQQQQVSLLHTAGGGSHGQLGSGSSSEASSVPHLLAQPSVSLGDQPGSMTQNLLGPQQPMLERPMQNNTGPQPPKPGPVLQSGQGLPGVGIMPTVGQLRAQLQGVLAKNPQLRHLSPQQQQQLQALLMQRQLQQSQAVRQTPPYQEPGTQTSPLQGLLGCQPQLGGFPGPQTGPLQELGAGPRPQGPPRLPAPPGALSTGPVLGPVHPTPPPSSPQEPKRPSQLPSPSSQLPTEAQLPPTHPGTPKPQGPTLEPPPGRVSPAAAQLADTLFSKGLGPWDPPDNLAETQKPEQSSLVPGHLDQVNGQVVPEASQLSIKQEPREEPCALGAQSVKREANGEPIGAPGTSNHLLLAGPRSEAGHLLLQKLLRAKNVQLSTGRGSEGLRAEINGHIDSKLAGLEQKLQGTPSNKEDAAARKPLTPKPKRVQKASDRLVSSRKKLRKEDGVRASEALLKQLKQELSLLPLTEPAITANFSLFAPFGSGCPVNGQSQLRGAFGSGALPTGPDYYSQLLTKNNLSNPPTPPSSLPPTPPPSVQQKMVNGVTPSEELGEHPKDAASARDSERALRDTSEVKSLDLLAALPTPPHNQTEDVRMESDEDSDSPDSIVPASSPESILGEEAPRFPHLGSGRWEQEDRALSPVIPLIPRASIPVFPDTKPYGALGLEVPGKLPVTTWEKGKGSEVSVMLTVSAAAAKNLNGVMVAVAELLSMKIPNSYEVLFPESPARAGTEPKKGEAEGPGGKEKGLEGKSPDTGPDWLKQFDAVLPGYTLKSQLDILSLLKQESPAPEPPTQHSYTYNVSNLDVRQLSAPPPEEPSPPPSPLAPSPASPPTEPLVELPTEPLAEPPVPSPLPLASSPESARPKPRARPPEEGEDSRPPRLKKWKGVRWKRLRLLLTIQKGSGRQEDEREVAEFMEQLGTALRPDKVPRDMRRCCFCHEEGDGATDGPARLLNLDLDLWVHLNCALWSTEVYETQGGALMNVEVALHRGLLTKCSLCQRTGATSSCNRMRCPNVYHFACAIRAKCMFFKDKTMLCPMHKIKGPCEQELSSFAVFRRVYIERDEVKQIASIIQRGERLHMFRVGGLVFHAIGQLLPHQMADFHSATALYPVGYEATRIYWSLRTNNRRCCYRCSIGENNGRPEFVIKVIEQGLEDLVFTDASPQAVWNRIIEPVAAMRKEADMLRLFPEYLKGEELFGLTVHAVLRIAESLPGVESCQNYLFRYGRHPLMELPLMINPTGCARSEPKILTHYKRPHTLNSTSMSKAYQSTFTGETNTPYSKQFVHSKSSQYRRLRTEWKNNVYLARSRIQGLGLYAAKDLEKHTMVIEYIGTIIRNEVANRREKIYEEQNRGIYMFRINNEHVIDATLTGGPARYINHSCAPNCVAEVVTFDKEDKIIIISSRRIPKGEELTYDYQFDFEDDQHKIPCHCGAWNCRKWMN

SEQ ID NO: 282487 - DNA, 16614 bp, Artificial Sequence
  derived and/or modified sequence
atggacagtcagaaattggctggagaggataaagacagcgagcccgccgccgatggccctgccgctagcgaagatcccagcgctaccgagtctgatctccctaatccccatgtaggcgaagtgagcgtgctgtcttcagggagccctaggctccaggagaccccccaggattgttccgggggccctgttcggcgatgtgcattgtgtaactgcggcgagccgtctttgcatgggcagcgggagctgcggagattcgagttgccgttcgattggccaagatgccctgttgtcagccctggcgggtcgcccgggccaaatgaggccgtactaccttctgaggatcttagccagatcggcttccccgagggcctcacccctgctcacctgggcgaacctggaggctcatgttgggcccaccactggtgcgctgcttggagcgcaggagtgtggggacaggaagggcccgaactttgtggtgtggacaaagctatattctccggtatcagccagagatgcagtcactgcactcggctcggggcctccattccctgccgctcccctggctgtcccaggctttaccatttcccatgtgccaccgcatctggaagctttctctctatgaagacgttacagttgctctgtcccgagcactccgaaggggcagcctatttagaggaggcgcgatgtgccgtatgtgagggccctggggaactctgtgaccttttcttttgtaccagctgtgggcaccattatcatggtgcatgtttggacacggcgctcacggcacggaaacgagctgggtggcagtgtccagagtgtaaggtttgtcaggcgtgtagaaaacccggcaacgactccaagatgctggtgtgtgagacttgtgacaagggttaccatactttttgtctgaaaccacccatggaggaattgccagcacactcctggaagtgcaaagcttgcagagtgtgcagagcgtgcggcgcaggctccgcagaattgaatccaaacagcgaatggtttgagaattattctctctgccaccgctgtcacaaagctcagggagggcagactatacggtctgtggcagaacaacacacaccagtgtgtagcaggttttcgcctccagagccaggtgacacccccacagatgagccggacgccctttacgtggcatgtcagggccagcccaagggagggcacgtgacgtccatgcagcccaaggaacctgggcccttgcagtgtgaggctaaacctcttggcaaggcaggcgttcagttggagccacagctggaagccccgctgaacgaagagatgcccctcctaccgccaccagaggaatctcctttgtctccgcccccggaggaaagtcccacatccccaccgcccgaggcctccagactctccccaccccccgaagaacttcccgcgtcacctcttcctgaagcgctccatctgtctaggcccctagaagaatctcccctgtctcctccgccagaggaatcaccactcagcccaccacccgagagttcaccttttagccccttggaggagagtccacttagtcccccggaagaaagccctccctcccctgccctcgagaccccgctgagccctcctcccgaagcttctcccctctcacccccttttgaggaatctccactgagtccccctcccgaggaactgcctacgtccccccctcctgaggcgtctcggctgtcgccccctccggaggagtctcctatgagtccgccccctgaggagagtcccatgtcaccaccccctgaggcatcacgacttttcccccctttcgaggagagccctttatcacctcctcctgaggagtccccactcagccccccacctgaggcctcaaggcttagcccccccccggaggacagcccaatgagccccccacccgaagagtcacctatgtctccaccccctgaggttagccgcctgagcccactgcccgttgtcagtcggttgtcccccccacctgaagagagcccgttgtcaccacccccagaagaaagtccaacgtccccacctccagaggcctccagattatcgccaccgccagaggactctcccactagccctcccccagaagattctccggcctcgccaccacccgaagacagcctcatgagcctgcccttagaagaatcacctctgctcccactgcccgaagagccccagctgtgtcctaggtcagaaggcccccatttatctcccaggcccgaggaaccacatctttccccacgccccgaagaaccccaccttagccctcaggccgaggagccccatctgtctcctcagcctgaggagccgtgcctgtgtgcagtcccagaagagccccatttgtctcctcaagcggagggaccccacttgtccccccaacctgaggagctccacctctcaccacagactgaagagccccacctctctcccgtccccgaggaaccttgcctcagtcctcagccagaagaaagccatttatccccccagtccgaagaaccatgtctgtcacctcgccctgaggagagtcacctgagccctgagctggagaaacctccgcttagtccacgccccgagaagcctcctgaagaacctggacagtgtcctgcaccggaggagctgcctctattccctccaccgggggagccttctctcagcccattgctaggcgaacccgccctttccgaacccggcgagccccctctatctcctctgccagaagagcttcctctgagtccctcaggagagccttccctatctccccaactcatgccgccagatccactccctccccccctgtcccccatcatcactgctgcagccccaccagctttaagccccctgggcgaactcgaatatcctttcggcgccaaaggagatagcgaccccgaatctccattagctgcaccaatcttggaaacccccatcagccccccgcctgaagctaattgtacagacccagagcctgtgcccccaatgatcctcccaccttcccctggatctcctgtcgggccggcgagtccgatcttgatggaacccctgcctccccagtgctcccctctcttgcagcacagtctggtgccacagaatagtccccctagccaatgttcaccccccgcgcttccgctgtccgtcccttccccactgagtccaatcgggaaggtagttggggtgtctgacgaagctgagctgcacgaaatggagacagagaaggtttcagaacccgagtgcccagccctggagcccagtgcgacatctccactaccatctccaatgggtgacctgtcctgccccgctccctcccccgcccccgctctcgatgacttcagcgggctgggcgaggacacggcacccttggacgggatagatgcccctggttcgcagcctgaaccgggacaaacaccagggagcctcgcatctgaactcaaaggctctcctgttttgcttgaccctgaggagctcgcccccgtgacacctatggaggtttatccagagtgcaaacaaacagcaggtcaggggagtccctgtgaagagcaggaggagccacgcgctcccgtggcaccaacgcctccaaccttgattaaatctgatattgtaaacgaaatcagcaacttatcgcagggggatgctagcgctagttttcctggtagcgaaccactgctgggcagtccagacccagaggggggaggctccctgtctatggaacttggggtatcaactgacgtttctccagcacgggatgaagggagccttcggttatgcactgattctctcccagagaccgatgattccctgctgtgcgatgccggaaccgctatttccggcggaaaagccgagggggagaaggggcgccgcaggtcaagtccagcaaggtcccggatcaaacagggaagatcctcctcctttccgggcagaagacgaccccgcggcggggctcacggagggcgaggacggggacgtgccaggcttaagagtacagcatcctccattgagaccctcgttgtggccgacattgatagcagcccctctaaagaggaggaagaagaagatgacgataccatgcagaatacagtagtcctcttttcaaacaccgataaattcgtgttaatgcaggacatgtgtgtagtgtgcggaagcttcggacggggcgctgaggggcaccttctggcatgctcccagtgctcgcagtgttatcacccttattgtgtcaacagtaagatcacgaaggttatgctgctgaaaggatggaggtgcgtggagtgcattgtctgcgaggtttgtggtcaggcctccgatcctagcaggctgctcctctgtgatgactgtgacatttcgtaccatacgtattgtcttgacccccccctgttgactgttcccaagggggggtggaaatgtaaatggtgcgtttcttgcatgcagtgtggggccgcgtcaccaggcttccactgtgagtggcaaaactcttacacacactgtgggccatgcgctagtctggttacatgcccgatctgtcatgcaccctacgttgaggaagaccttctcattcagtgccgccattgtgaaaggtggatgcacgccgggtgcgagagtttgttcacagaagatgacgtggaacaggcagccgatgagggcttcgactgtgtgagttgtcagccctacgtcgtgaagccagtcgcccccgttgcccccccagaactggtcccaatgaaggtcaaagagcccgagccgcagtacttcagattcgagggcgtctggcttactgaaacaggaatggcgctgctccgtaacttgacaatgtcacccctgcacaaacgccgacagcggaggggacggctggggttgcccggtgaggcaggactggaaggatctgagcccagcgatgccctgggacctgacgataagaaagatggcgacctagatactgacgagctgctcaagggcgagggcggtgtcgagcacatggagtgcgagatcaaactggaaggcccagtgtcacccgatgtcgaacccggaaaggaggagacagaagaaagcaagaagagaaaaaggaaaccctacaggccagggatagggggatttatggtgcggcagcgaaagtcacatactcgcacgaaaaagggccccgctgcccaggctgaagttttgtctggagatggtcagccagacgaagtaatcccggcagatctgcctgctgagggagccgtcgaacagtcattggcagaaggcgatgagaaaaagaaacagcaaaggcggggccgaaagaagagtaaacttgaagacatgttcccagcatatctgcaggaggcgttctttggaaaagaactgcttgacctgtcccggaaggcgctctttgcggttggggtgggcagaccatcatttggcctgggaacccctaaagctaagggcgatggcggaagcgaacgcaaggaattgcccacgtcacagaagggagatgacggtcccgacattgccgatgaggagtcgagaggcctggagggcaaggccgacacgccagggccggaggacgggggagtgaaggctagtcccgtgccctctgacccagaaaagccagggacgcctggtgaaggtatgctctcttccgatttagaccggatctctaccgaggagctgccgaagatggaaagcaaagatctgcagcagctcttcaaagatgtgctgggttcagaacgggagcaacatctcggatgcggcactcccggcctcgaagggtcccgaaccccactgcaacggccttttctgcagggcggtctgcctttagggaacttgccctcctctagcccaatggattcataccctggtctttgccaaagtcctttcttggattcgagagaaagagggggctttttttctccagagcccggggaacccgattcaccttggaccggcagtggcggcaccacacccagcacccccacaacgcctactacagagggagagggtgatgggctatcttataatcaacgatcactgcagagatgggaaaaggacgaggagctgggccaactctcaacgatttcacctgtgctctatgccaacataaattttcccaatctgaaacaagactatccagactggtctagccggtgcaagcagataatgaaactctggaggaaggtcccggcagctgacaaagccccctacctacagaaagctaaagacaatcgcgctgcccataggataaataaagttcagaaacaggctgagtctcagatcaataagcagacaaaagtgggcgacatagccaggaaaaccgatcgtccagccctgcacctgcgtatcccaccacagccaggggccctaggttccccaccacctgccgctgctcctactatttttattgggagccctaccaccccagcaggcctctccaccagcgcggatggattcttgaagccgcccgctggtagcgttcctggcccagattctccaggggagctttttttgaaactgcctccgcaggtcccagctcaggtgccttcgcaggatccttttggcttggccccagcttaccccctagagccccggtttccaacggctccccccacataccccccttacccttctccaaccggggctccagctcaacccccaatgctgggggcaagctcccgcccgggagcgggccagcctggagaattccacaccactccaccagggactcccagacatcagccgagtaccccggatccttttctcaagccgcggtgcccttctctagataacctggcagttcccgaatcaccgggagtcggaggtggaaaagcctcagagcccctgttgtcccccccgccttttggtgagtcccgaaaggccttggaggtgaagaaagaggagctgggtgcctctagccctagttacggacccccgaatctcggctttgtcgacagcccctcaagcgggacacatctcgggggcctcgaactcaaaacccctgacgtcttcaaggccccactgactccccgggcctcacaggtggaaccacaaagcccaggcctgggtctgagaccgcaagagcccccccccgcccaagcccttgccccatcccctccatcccaccccgacatcttccggccagggtcctatacagacccttatgcccagcctcccctgacgcctagaccccaaccgccgccaccggaatcctgctgcgctctcccaccgagatcgttaccctctgacccctttagcagagttccagcatcacctcaaagccagtcttcctcccagagtcccctaaccccgagaccactcagtgcagaggccttctgcccctcacctgtaacaccacgctttcagtcgccagatccatattccagaccgcctagcagacctcaaagccgcgatcccttcgcacctcttcataaaccccccagaccacagcctcccgaggtcgcattcaaagccgggtcactggcccatacttctctcggagccgggggcttccccgcagcactgccagccgggcccgctggagagcttcacgcaaaggtccctagcgggcagccacctaactttgtccgcagcccaggaacaggtgcgttcgtggggacccccagcccgatgaggtttaccttcccccaagccgttggcgaacccagcttaaagcctccagttccccaacctggcctgccgccccctcacggcataaactctcatttcggccccggccctacattagggaagccgcagtccacaaattataccgtagctacaggcaactttcacccatccggcagccccctggggcccagctccggctcaacaggtgagtcctatggactgagcccgctgagaccaccaagtgtgttgcctccaccggcccccgacggctctctcccctacctgtctcacggggccagtcaaagatccggcattacttcgccagtggagaagagagaggaccctgggactggcatgggatccagcctggcgaccgccgaacttccaggtacacaggacccgggcatgagtggactcagtcaaacagagctggagaaacagcgacagcgccagcggctgagggagttgctcatccgccagcagattcagcgcaatacccttagacaggagaaggagaccgccgccgcagccgccggcgcagtcggacctccagggtcctggggggcggagccttcctcaccagcattcgaacaactgtcccggggccagaccccttttgcagggactcaggacaaatcttcgttagtggggctgcccccctcaaaactgtccggtcctattttgggccccggatcttttccgtccgatgaccggctgagccgccctccccctcctgcaacacccagctcaatggacgtgaattcgcgccagctcgtgggcggctcacaggccttctaccagagggctccctatcccggaagtctacctcttcaacagcagcaacaacagctttggcagcaacaacaggctaccgcagcaacctctatgcggttcgccatgtccgctagatttccgagtaccccagggcctgagctgggcaggcaggctcttggcagtcctctggccggcatttccaccagattgccaggcccgggcgaaccagtcccaggaccagcagggcccgcacagtttatcgagctcagacataatgttcagaagggactgggtcccgggggcactccatttccagggcaggggccgccccagagaccacgcttctatccagtctctgaggaccctcacagacttgctccagaggggcttaggggcctcgcagtttctggcttgcctccgcagaagccatccgcaccacctgccccagagctaaacaattctcttcatccgacacctcacacaaaggggcccaccctcccaaccggccttgaattagtgaataggcccccctcctcaacggagctagggaggcctaaccccctggcattagaggccggaaagctgccttgcgaagatcctgaattagacgacgatttcgatgcccataaggcactggaggatgacgaagaactcgcccacctgggtctgggggtggacgtggccaaaggcgacgacgagttgggcacactcgagaacctggaaaccaatgaccctcatctggacgatttactgaacggagatgagttcgacctgctggcctacactgacccagagttggacactggcgataagaaggacatatttaatgagcacctgcggctcgtggagtcggcgaacgagaaagctgaaagggaggcactgttacgcggtgtggagcctggtcctctgggaccggaggaaagacccccacccgccgcagacgcgagcgaaccccgattggcgtccgtcctcccagaggtgaagcctaaagttgaggagggaggtcgccaccctagtccgtgccagttcactattgcgactcctaaggtggaaccagcacccgcagcgaacagcctcggtctcggcctcaagccaggacaatctatgatgggttctcgggatacaaggatgggtaccggcccattctcatcctccggccacaccgccgaaaaagctagtttcggcgccacagggggacccccggcgcatctcctcactccctctcctctcagcgggcctggagggtcatcgctgcttgaaaagttcgaactagaatccggggcgctgacactgccaggaggcccagcagcctccggagacgaactcgataaaatggaaagcagtctggtggcgtccgagttgccactgttaatcgaagacctcttagagcatgagaagaaagagctgcagaagaaacaacaactgtcagcacagctgcagccagctcaacagcagcagcagcaacaacagcagcatagtttgctgtcagccccaggccccgcgcaggccatgagcctccctcatgaaggctctagcccatcattagcaggctctcagcagcagttgtccctggggctcgcgggcgctcggcagcccggcctgccccagcccctaatgcccacccagccacctgcccatgctctgcagcagcggctggcacctagtatggcaatggtctcaaatcagggccacatgctgtcaggacaacacggaggacaggccggcctggttccccaacagtcatcacaaccggtcctctcccagaaaccaatggggacaatgccaccgagtatgtgtatgaagcctcaacagctggccatgcagcaacagctggctaattccttcttccccgataccgatcttgataaatttgcagctgaagacatcatcgacccaatcgcaaaggcaaagatggtcgcattaaagggaatcaagaaggtgatggcccagggcagcatcggggtggcccccggcatgaatcggcagcaggtgtcgttactggctcaacggttgagtgggggcccctcttctgatttacagaaccacgttgcagccgggtccggacaggagaggagcgctggcgacccaagccaaccgaggcccaatccgcccacatttgcgcagggggtgattaacgaggctgaccagcgccagtatgaggagtggttgttccacacccagcaacttctgcagatgcaactgaaagttctggaagagcaaatcggagtccatcgcaagtctcggaaagccctgtgtgccaaacagcggaccgccaaaaaggctggaagagagttccctgaagctgacgcggagaaactgaagcttgtcactgagcaacagagcaaaatccagaagcaactagaccaggtgcgcaaacagcaaaaggagcacaccaatcttatggccgaataccggaacaaacaacagcagcagcaacagcagcagcagcagcagcagcagcagcactctgcggtactggcccttagcccctcacaatccccgcggcttttgaccaagctaccaggccagttgctacccggccacggtcttcagcctccacagggtccacctgggggccaggcggggggccttcggctcactccaggcggtatggctcttccggggcagcccggtggaccgtttctcaacaccgccctggcccaacagcagcagcagcagcattccgggggtgccggctctttggcaggtccaagcggaggtttctttcccggcaatctggcccttagatcgcttgggcccgatagccggctgcttcaggaacgacagctccagctccaacagcagagaatgcagctggctcagaaactccagcaacaacagcagcagcagcaacagcagcagcatctcctgggccaggtggctattcagcagcagcaacaacagggaccgggggtgcagacaaaccaagctctcggtcccaaacctcaggggctgatgcccccctcttcccaccagggactgctcgtccagcagctgtccccccaacccccgcagggcccgcagggcatgctgggaccagcccaggtcgcagtcctgcagcaacagcatcctggggcactagggcctcagggacctcatagacaggtgctgatgacccagtctcgtgtgctttcaagtccccagctcgcacaacaggggcaagggttaatggggcataggctggtaactgctcaacagcagcaacagcagcagcagcatcagcagcagggctcaatggccggattatcccaccttcagcagagcttgatgagtcattcaggtcagcctaaactgagcgctcagccaatggggtctttgcagcagctccagcagcagcagcagctccagcagcaacagcagttacaacagcagcaacagcagcagcttcagcagcagcagcaacttcagcagcagcagttgcaacagcagcaacagcagcagcagctacagcagcagcagcagcagcagcttcagcaacagcaacagcaactgcagcagcagcaacagcaacagcagcaacagttccagcaacaacagcagcaacagcagatgggtttactgaaccagtctagaactcttctgtcccctcagcagcagcaacagcagcaggtcgcacttgggcctggcatgcctgctaagccactgcagcacttttcatcccccggagcgctcggccctacgttattgcttaccgggaaggaacagaacaccgtggatccagccgtcagctccgaggctacggagggtccgtctactcaccaaggaggaccactggcaatcggcacaactccagaaagtatggctacagaaccaggcgaagttaagccttcattatcgggggacagccagttgctgctcgtacaaccccaaccccaaccacagccctcctccttgcagcttcagcctcccctgcggctgcccggacagcagcagcagcaggtatccttgctgcatacggccgggggagggtctcacgggcagctcggttctggctcgagctccgaagcctccagcgtgccacatttgcttgcacaaccctctgtatcacttggcgatcagcccgggagcatgacacagaatttgttgggcccgcaacaacccatgttggagcggccgatgcagaacaatacgggtccgcaaccgcccaaaccaggcccagttcttcaatccggtcaaggcctgcccggtgtgggaatcatgcctaccgtgggccagctgcgggcacagctacagggcgtcctggcgaagaacccccagttacgtcacctctccccccagcagcagcagcagctccaggccctgcttatgcaacggcagttgcagcaatcacaggctgtccggcagactcctccctatcaggagccgggaacgcagaccagtcctctacagggccttctggggtgccaaccgcagctggggggtttcccaggtccccaaaccgggccactccaggagctcggcgctggcccgaggccacaaggcccgcccagattgcccgcccctcctggcgctctgtcaaccgggcctgtgcttggccctgtccatccaacaccccccccatcatcgcctcaagagcccaaaaggccctcacagcttcccagcccctcgtctcagctgccaacggaagctcaacttcctcccacccatcccgggacccctaaacctcaaggtcccaccctcgagccgcctccaggtcgagtcagccctgccgcagcccagctggctgacacgttgttctcaaagggcttaggtccctgggaccctccggataatctggccgaaacccagaagcccgagcaatcttccttggtgcctggccatctcgaccaggttaacggacaggtcgttccagaagccagccagctgtccattaagcaggaaccacgggaggaaccttgcgcactgggagctcagagcgtaaaacgcgaggcgaacggagaacccattggggcacccggcacaagtaaccacctcttgctcgccggccccaggtctgaagctggacatctgcttttgcagaaactgctgagggctaagaatgtccagctgagcactggaagagggagcgaaggacttagagctgagatcaacggacatatcgacagtaagcttgctggactcgaacagaagctccaaggtaccccgagtaataaagaagacgccgcagcaaggaagcccctaacccctaagccaaagcgcgtgcagaaggcgagcgaccggttggtgtcctcccgcaagaagctgcgcaaagaggatggcgtccgggcttccgaagcgctgctgaagcagttgaagcaggaactgagtctgttgccactgacagaacccgctattacagctaattttagtctttttgctccgttcggatcagggtgccccgtgaacggccagtctcagttacggggcgccttcggttctggcgctctgccaactgggcccgattactattctcagctgctgaccaagaataacttgagcaaccctcctaccccccccagcagcctcccccccacaccccctccctcagttcagcaaaaaatggtgaacggagtcacaccgagtgaggagctcggagagcatcctaaggatgccgccagtgctagggactccgagcgagctctgagggacacaagtgaggtcaaaagcctggatctgctggctgcactccccacaccaccccacaatcagactgaagacgtgcggatggaatccgatgaggatagtgatagccctgactccattgtgcctgcctccagcccggagtcaatacttggagaagaggccccgagatttccccatttaggatccgggcggtgggagcaggaggatagagcactgtctcctgtgatccccttgatccctcgcgccagcatcccagtgttccctgatacaaagccttacggggctctgggacttgaagttccgggaaaacttccagtcacgacatgggagaaaggcaagggaagtgaggttagcgtaatgttaactgttagtgcagctgccgcaaagaacctgaatggggtaatggttgccgtggccgagcttcttagcatgaagattccgaattcctatgaagtcctgtttccagagagtcccgctagagcagggacggagcctaagaagggcgaagcggagggccctggggggaaggaaaagggtttggagggcaagagccccgacactgggccagattggctcaagcagtttgacgccgtgctgcctggctacaccctgaaaagccaattggacatactgagcctattgaagcaggagtctccggcccctgaacctcccacgcagcactcctacacctataacgtgtctaatttggatgtgcgccagctatctgccccacccccagaggagccttcaccgccaccatcacctttggccccatctccagcctctcctcctactgaaccacttgtggagctgccaactgaaccccttgcagaacctccggtcccttcccctcttccattggccagctccccggaaagtgcgagacctaaacctagagccaggccacctgaggaaggtgaggattcacgccccccccgtctcaaaaaatggaaaggcgtacgatggaagcgtctccgactcctgctgacaattcaaaagggaagcggccggcaggaagatgagcgagaggtcgctgagttcatggagcagctcggaacagccctccgccccgataaggtcccaagagacatgaggaggtgctgtttttgtcacgaggaaggcgatggcgctactgacggaccggctcgtctgttaaacctcgatctggatctctgggttcacctgaactgtgcactgtggagcactgaagtgtatgagactcaggggggggcgctgatgaacgtggaagtcgctcttcaccgcgggctgctgaccaagtgtagcctctgtcagcggactggcgctacgagcagttgtaataggatgcggtgccctaacgtgtaccacttcgcatgtgccattcgcgccaagtgcatgttcttcaaggacaaaactatgctgtgtccgatgcataaaatcaaaggaccctgcgagcaggaactgtccagcttcgctgtgtttagacgtgtatacatagagcgggacgaagtgaaacaaatcgcttctattattcagcgcggggagcgcctgcatatgtttcgagtgggcggcctcgtgttccatgccattggccaacttctgccccaccaaatggcagactttcattcagctaccgccttataccccgtaggatacgaagccacacgtatttactggtctctgaggacgaataatcggcgttgttgttaccggtgcagcattggggagaacaatggcagacctgagtttgtaattaaggtaatagaacagggcctggaagacctagtgttcacagatgcttctcctcaggccgtctggaataggattattgaacccgttgccgccatgagaaaagaggctgatatgctgagactcttcccagaatacttgaaaggggaggaattgtttggcctaaccgtgcatgctgtattacgaatcgcagagtccttgcccggggtggagagctgtcagaattatctgtttcgttacggcaggcaccccctgatggagctgccattgatgatcaatccaacaggatgtgcccgatccgaacctaagatcctgacccactacaaacgacctcacacactgaattccacctccatgtccaaggcctatcagtcaacctttacaggggagaccaacacgccgtattctaagcagtttgttcattccaagagttcacaatacaggaggctgcggaccgagtggaagaacaatgtgtatctggcgcgtagccgaatccaaggcttgggcctgtatgcagcaaaggacttagagaagcacaccatggtcatagagtatattggaaccatcatcagaaatgaggtggctaatagacgtgaaaagatctacgaagagcagaaccgcggaatttatatgtttcgcattaataatgagcacgttatcgatgcaacattgaccggaggacctgctcggtatatcaaccatagttgtgccccaaactgtgtggccgaggtggtaactttcgacaaggaagacaagatcatcattatatcttcacgccgtatccctaagggagaggaactgacgtacgattatcagttcgatttcgaagacgaccagcacaagattccatgtcactgcggagcctggaattgtcgaaaatggatgaactag

SEQ ID NO: 282488 - DNA, 16614 bp, Artificial Sequence
  derived and/or modified sequence
atggacagccagaagctggccggggaggacaaggacagcgagcctgctgctgatggccctgctgccagcgaggaccccagcgccacagaaagtgacctgcccaacccccacgtgggggaggtgtctgtgctgagcagcggcagcccccggctgcaggagaccccccaggactgcagcggcggccctgtgcggcgctgtgccctgtgcaactgtggggagcccagcctgcacggccagcgggagctgcggagatttgagctgccctttgactggccccgctgccctgtggtgtccccaggcggcagccctggccccaatgaggccgtgctgcccagcgaggacctgagccagatcggcttccctgagggcctgaccccagcccacctgggggagcccggcggcagctgctgggcccaccactggtgtgccgcctggagcgctggggtgtggggccaggagggccctgagctgtgtggggtggacaaggccatcttcagcggcatcagccagcgctgcagccactgcacccggctgggcgccagcatcccctgccgcagccctggctgcccccggctgtaccacttcccctgtgccacagccagcggcagcttcctgtccatgaagaccctgcagctgctgtgcccagagcacagcgagggcgccgcctacctggaggaggcccgctgtgctgtgtgtgagggccctggagagctgtgtgacctcttcttctgcaccagctgtggccaccactaccacggggcctgcctggacacagccctgacagccaggaagagagctggctggcagtgcccagagtgcaaggtgtgccaggcctgcaggaagccaggaaatgacagcaagatgctggtgtgtgagacctgtgacaagggctaccacaccttctgcctgaagccacccatggaggagctgcctgcccacagctggaagtgcaaggcctgccgggtgtgccgggcctgtggggccggcagcgctgagctgaaccccaacagcgagtggtttgagaactacagcctgtgccaccgctgccacaaggcccagggcggccagaccatccgctctgtggccgagcagcacacccctgtgtgcagccgcttcagccccccagagcccggggacacccccacagatgagccagatgccctgtatgtggcctgccagggccagcccaagggcggccacgtgacctccatgcagcccaaggagcccggccccctgcagtgtgaggccaagcccctgggcaaggccggcgtgcagctggagccccagctggaggcccccctgaatgaggagatgcccctgctgcccccacctgaggagagccccctgagccccccacctgaggagagccccaccagccccccacctgaggccagccggctgagccccccacctgaggagctgcctgccagccccctgcctgaggccctgcacctgagccggcccctggaggagagccccctgagccccccacctgaggagagccccctgagccccccacctgagagcagccccttcagccccctggaggagagccccctgagccccccagaggagagcccccccagccctgccctggagacccccctgagccccccacctgaggccagccccctgagccccccatttgaggagagccccctgagccccccacctgaggagctgcccaccagccccccacctgaggccagccggctgagccccccacctgaggagagccccatgagccccccacctgaggagagccccatgagccccccacctgaggccagccgcctcttccccccatttgaggagagccccctgagccccccacctgaggagagccccctgagccccccacctgaggccagccggctgagccccccacctgaggacagccccatgagccccccacctgaggagagccccatgagccccccacctgaggtgtcccggctgagccccctgcctgtggtgtcccggctgagccccccacctgaggagagccccctgagccccccacctgaggagagccccaccagccccccacctgaggccagccggctgagccccccacctgaggacagccccaccagccccccacctgaggacagccctgccagccccccacctgaggacagcctgatgagcctgcccctggaggagagccccctgctgcccctgcctgaggagccccagctgtgccccaggtctgagggcccccacctgagccccaggcctgaggagccccacctgagccccaggcctgaggagccccacctgagcccccaggccgaggagccccacctgagcccccagcctgaggagccctgcctgtgtgctgtgcctgaggagccccacctgagcccccaggccgagggcccccacctgagcccccagcctgaggagctgcacctgagcccccagacagaggagccccacctgagccctgtgcctgaggagccctgcctgagcccccagcctgaggagagccacctgagcccccagagcgaggagccctgcctgagccccaggcctgaggagagccacctgagccctgagctggagaagccacccctgagccccaggcctgagaagcccccagaggagcccggccagtgcccagcccctgaggagctgcccctcttccccccacctggagagcccagcctgagccccctgctgggggagcccgccctgtctgagcctggagagccccccctgagccccctgcctgaggagctgcccctgagccccagcggggagcccagcctgagcccccagctgatgcccccagaccccctgcccccacccctgagccccatcatcacagctgctgcccccccagccctgagccccctgggggagctggagtacccctttggagccaagggggacagcgaccctgagagccccctggccgcccccatcctggagacccccatcagccccccacctgaggccaactgcacagatcctgagcctgtgccccccatgatcctgccccccagccctggcagccctgtgggccctgccagccccatcctgatggagcccctgcccccccagtgcagccccctgctgcagcacagcctggtgccccagaacagcccccccagccagtgcagccccccagccctgcccctgtctgtgcccagccccctgagccccatcggcaaggtggtgggcgtgtctgatgaggccgagctgcacgagatggagacagagaaggtgtctgagcctgagtgcccagccctggagcccagcgccaccagccccctgcccagccccatgggagacctgagctgcccagcccccagccctgccccagccctggatgacttcagcggcctgggggaggacacagcccccctggatggcattgatgcccctggcagccagcctgagcccggccagaccccaggcagcctggccagcgagctgaagggcagccctgtgctgctggaccctgaggagctggcccctgtgacccccatggaggtgtacccagagtgcaagcagacagctggccagggcagcccctgtgaggagcaggaggagccccgggcccctgtggcccccaccccacccaccctcatcaagagtgacatcgtgaatgagatcagcaacctgagccagggagatgccagcgccagcttccctggcagcgagcccctgctgggcagcccagaccctgagggcggcggcagcctgtccatggagctgggcgtgtccacagatgtgtccccagccagagatgagggcagcctgcggctgtgcacagacagcctgcctgagacagatgacagcctgctgtgtgatgctggaacagccatcagcggcggcaaggccgagggggagaagggcagaagaagaagcagccctgcccggagccgcatcaagcagggccgcagcagcagcttccctggaagaagaagaccccggggcggggcccatggaggccggggccggggccgggcccggctgaagagcacagccagcagcattgagaccctggtggtggccgacatcgacagcagccccagcaaggaggaggaggaggaggatgatgacaccatgcagaacacagtggtgctcttcagcaacacagacaagtttgtgctgatgcaggacatgtgtgtggtgtgtggcagctttggccgcggggctgagggccacctgctggcctgcagccagtgcagccagtgctaccacccctactgtgtgaacagcaagatcaccaaggtgatgctgctgaagggctggaggtgtgtggagtgcatcgtgtgtgaggtgtgtggccaggccagtgaccccagccggctgctgctgtgtgatgactgtgacatctcctaccacacctactgcctggacccccccctgctgactgtgcccaagggcggctggaagtgcaagtggtgtgtgtcctgcatgcagtgtggggccgccagccctggcttccactgtgagtggcagaacagctacacccactgcggcccctgtgccagcctggtgacctgccccatctgccacgccccctacgtggaggaggacctgctgatccagtgccgccactgtgagcgctggatgcacgccggctgtgagagcctcttcacagaagatgatgtggagcaggccgcagatgagggctttgactgtgtgtcctgccagccctacgtggtgaagcctgtggcccctgtggcccctcctgagctggtgcccatgaaggtgaaggagcctgagccccagtacttccgctttgaaggagtgtggctgacagaaacaggcatggccctgctgaggaacctgaccatgagccccctgcacaagaggcggcagaggcggggccgcctgggcctgcctggagaggccggcctggagggcagcgagcccagtgatgccctgggcccagatgacaagaaggatggagacctggacacagatgagctgctgaagggggagggcggcgtggagcacatggagtgtgagatcaagctggagggccctgtgtccccagatgtggagcccgggaaggaggagacagaggagagcaagaagaggaagaggaagccctaccggcccggcatcggcggcttcatggtgcggcagaggaagagccacaccaggaccaagaagggccctgctgcccaggccgaggtgctgtctggagatggccagccagatgaggtgatcccagctgacctgcctgctgagggcgctgtggagcagagcctggccgagggagatgagaagaagaagcagcagaggcggggcaggaagaagagcaagctggaggacatgtttcctgcctacctgcaggaggccttcttcggcaaggagctgctggacctgagcaggaaggccctgtttgctgtgggcgtgggccggcccagctttggcctgggcacccccaaggccaagggagatggcggcagcgagaggaaggagctgcccaccagccagaagggagatgatggccctgacattgctgatgaggagagccggggcctggagggcaaggctgacaccccaggcccagaagatggcggcgtgaaggccagccctgtgcccagcgaccctgagaagccaggcaccccaggagagggcatgctgagcagtgacctggaccgcatcagcacagaggagctgcccaagatggagagcaaggacctgcagcagctgttcaaggatgtgctgggcagcgagcgggagcagcacctgggctgcggcaccccaggcctggagggcagcaggacccccctgcagaggcccttcctgcagggcggcctgcccctgggcaacctgcccagcagcagccccatggacagctacccaggcctgtgccagagccccttcctggacagccgggagcggggcggcttcttcagccctgagcccggggagccagacagcccctggacaggcagcggcggcaccacccccagcacccccaccacccccaccacagaaggagaaggagatggcctgagctacaaccagaggagcctgcagcgctgggagaaggatgaggagctgggccagctgagcaccatcagccctgtgctgtatgccaacatcaacttccccaacctgaagcaggactacccagactggagcagccgctgcaagcagatcatgaagctgtggaggaaggtgcctgctgctgacaaggccccctacctgcagaaggccaaggacaacagagctgcccaccgcatcaacaaggtgcagaagcaggccgagagccagatcaacaagcagaccaaggtgggggacatcgccaggaagacagacaggcctgccctgcacctgcgcatccccccccagcccggggccctgggcagccccccacctgctgctgcccccaccatcttcatcggcagccccaccaccccagctggcctgagcaccagcgcagatggcttcctgaagcccccagctggctctgtgcccggccctgacagccctggagagctgttcctgaagctgcccccccaggtgcctgcccaggtgcccagccaggaccccttcggcctggccccagcctaccccctggagccccgcttccccacagccccacccacctacccaccctaccccagccccactggagccccagcccagccccccatgctgggcgccagcagcaggcctggggccggccagcctggagagttccacaccaccccacctggcacccccaggcaccagcccagcaccccagaccccttcctgaagccccgctgccccagcctggacaacctggccgtgcctgagagccctggggtgggcggcggcaaggccagcgagcccctgctgagccccccaccatttggagagagcaggaaggccctggaggtgaagaaggaggagctgggcgccagcagccccagctatggcccccccaacctgggctttgtggacagccccagcagcggcacccacctgggcggcctggagctgaagaccccagatgtgttcaaggcccccctgaccccccgggccagccaggtggagccccagagccctggcctgggcctgcggccccaggagcccccaccagcccaggccctggcccccagcccccccagccacccagacatcttccggcccggcagctacacagacccctatgcccagccccccctgaccccccggccccagcccccacctcctgagagctgctgtgccctgcccccaagaagcctgcccagcgaccccttcagccgggtgcctgccagcccccagagccagagcagcagccagagccccctgaccccccggcccctgtctgctgaggccttctgccccagccctgtgaccccccgcttccagagcccagacccctacagcaggcctcccagccggccccagagccgggacccctttgcccccctgcacaagccaccccggccccagcccccagaggtggccttcaaggccggcagcctggcccacaccagcctgggcgccggcggcttccctgctgccctgcctgctggccctgctggggagctgcacgccaaggtgcccagcggccagccccccaactttgtgcgcagccctggcaccggggcctttgtgggcacccccagccccatgaggttcaccttcccccaggccgtgggggagcccagcctgaagccccctgtgccccagcccggcctgcccccaccccacggcatcaacagccacttcggccctggccccaccctgggcaagccccagagcaccaactacacagtggccaccggcaacttccaccccagcggcagccccctgggccccagcagcggcagcactggagagagctatggcctgagccccctgcggccccccagcgtgctgcccccaccagccccagatggcagcctgccctacctgagccacggggccagccagaggagcggcatcaccagccctgtggagaagcgggaggaccccggcaccggcatgggcagcagcctggccacagctgagctgcccggcacccaggaccccggcatgagcggcctgagccagacagagctggagaagcagaggcagaggcagaggctgcgggagctgctgatccggcagcagatccagaggaacaccctgcggcaggagaaggagacagctgctgctgctgctggagctgtgggccccccaggctcctggggcgctgagcccagcagccctgcctttgagcagctgagccggggccagaccccatttgctggcacccaggacaagagcagcctggtgggcctgccccccagcaagctgagcggccccatcctgggccctggcagcttccccagtgatgaccggctgagcaggcctcctcctccagccacccccagctccatggatgtgaacagccggcagctggtgggcggcagccaggccttctaccagagggccccctacccaggcagcctgcccctgcagcagcagcagcagcagctgtggcagcagcagcaggccacagctgccacctccatgagatttgccatgtctgcccgcttccccagcaccccaggccctgagctgggccggcaggccctgggcagccccctggccggcatcagcacccggctgcccggccctggagagcctgtgcccggccctgctggccctgcccagttcatcgagctgcggcacaacgtgcagaagggcctgggccctgggggcacccccttccctggccagggccccccccagaggccccgcttctaccctgtgtctgaggacccccaccggctggcccctgagggcctgcggggcctggccgtgtctggcctgcccccccagaagcccagcgcccccccagcccctgagctgaacaacagcctgcaccccaccccccacaccaagggccccaccctgcccaccggcctggagctggtgaacagaccacccagcagcacagagctgggccggcccaaccccctggccctggaggccggcaagctgccctgtgaagatcctgagctggatgatgactttgatgcccacaaggccctggaggatgatgaggagctggcccacctgggcctgggcgtggatgtggccaagggagatgatgagctgggcaccctggagaacctggagaccaatgacccccacctggatgacctgctgaatggagatgaatttgacctgctggcctacacagatcctgagctggacacaggagacaagaaggacatcttcaatgagcacctgcggctggtggagagcgccaatgagaaggccgagcgggaggccctgctgcggggcgtggagcccggccccctgggccctgaggagcggcccccacctgctgctgatgccagcgagccccggctggcctctgtgctgcctgaggtgaagcccaaggtggaggagggcggccgccaccccagcccctgccagttcaccatcgccacccccaaggtggagcccgccccagctgccaacagcctgggcctgggcctgaagccaggccagagcatgatgggcagccgggacaccaggatgggcaccggccccttcagcagcagcggccacacagctgagaaggccagctttggagccaccggcggccccccagcccacctgctgacccccagccccctgagcggccctgggggcagcagcctgctggagaagtttgagctggagagcggggccctgaccctgcccggcggccctgctgccagcggagatgagctggacaagatggagagcagcctggtggccagcgagctgcccctgctgattgaggacctgctggagcacgagaagaaggagctgcagaagaagcagcagctgagcgcccagctgcagcctgcccagcagcagcagcagcagcagcagcagcacagcctgctgagcgcccctggccctgcccaggccatgagcctgccccatgagggcagcagccccagcctggccggcagccagcagcagctgagcctgggcctggccggggcccggcagcccggcctgccccagcccctgatgcccacccagcccccagcccacgccctgcagcagaggctggcccccagcatggccatggtgagcaaccagggccacatgctgagcggccagcacggcggccaggccggcctggtgccccagcagagcagccagcctgtgctgagccagaagcccatgggcaccatgccacccagcatgtgcatgaagccccagcagctggccatgcagcagcagctggccaacagcttcttcccagacacagacctggacaagtttgctgctgaggacatcatcgaccccatcgccaaggccaagatggtggccctgaagggcatcaagaaggtgatggcccagggcagcattggagtggcccctggcatgaaccggcagcaggtgtccctgctggcccagaggctgagcggcggccccagcagtgacctgcagaaccacgtggccgccggcagcggccaggagaggtctgctggggaccccagccagccccggcccaacccccccacctttgcccagggcgtcatcaatgaagctgaccagaggcagtatgaggagtggctgttccacacccagcagctgctgcagatgcagctgaaggtgctggaggagcagatcggcgtgcacaggaagagcaggaaggccctgtgtgccaagcagaggacagccaagaaggccggccgggagttccctgaggctgatgctgagaagctgaagctggtgacagagcagcagagcaagatccagaagcagctggaccaggtgaggaagcagcagaaggagcacaccaacctgatggccgagtacagaaacaagcagcagcagcagcagcagcagcagcagcagcagcagcagcagcacagcgctgtgctggccctgagccccagccagagcccccggctgctgaccaagctgcccggccagctgctgcccggccacggcctgcagcccccccagggccccccaggcggccaggccggcggcctgcggctgaccccaggcggcatggccctgcccggccagcccggcggccccttcctgaacacagccctggcccagcagcagcagcagcagcacagcggcggggccggcagcctggccggccccagcggcggcttcttccctggcaacctggccctgcggagcctgggccctgacagccggctgctgcaggagcggcagctgcagctgcagcagcagaggatgcagctggcccagaagctgcagcagcagcagcagcagcagcagcagcagcagcacctgctgggccaggtggccatccagcagcagcagcagcagggccctggggtgcagaccaaccaggccctgggccccaagccccagggcctgatgccacccagcagccaccagggcctgctggtgcagcagctgagcccccagcccccccagggcccccagggcatgctgggccctgcccaggtggccgtgctgcagcagcagcaccctggggccctgggcccccagggcccccaccggcaggtgctgatgacccagagccgggtgctgagcagcccccagctggcccagcagggccagggcctgatgggccaccggctggtgacagcccagcagcagcagcagcagcagcagcaccagcagcagggctccatggccggcctgagccacctgcagcagagcctgatgagccacagcggccagcccaagctgagcgcccagcccatgggcagcctgcagcagctgcagcagcagcagcagctgcagcagcagcagcagctgcagcagcagcagcagcagcagctgcagcagcagcagcagctgcagcagcagcagctgcagcagcagcagcagcagcagcagctgcagcagcagcagcagcagcagctgcagcagcagcagcagcagctgcagcagcagcagcagcagcagcagcagcagttccagcagcagcagcagcagcagcagatgggcctgctgaaccagagcaggaccctgctgagcccccagcagcagcagcagcagcaggtggccctgggccctggcatgcctgccaagcccctgcagcacttcagcagccctggggccctgggccccaccctgctgctgaccgggaaggagcagaacacagtggaccctgctgtgtcctctgaggccacagagggccccagcacccaccagggcggccccctggccatcggcaccaccccagagagcatggccacagagcccggggaggtgaagcccagcctgagcggggacagccagctgctgctggtgcagccccagccccagccccagcccagcagcctgcagctgcagccccccctgcggctgcccggccagcagcagcagcaggtgtccctgctgcacacagctgggggcggcagccacggccagctgggcagcggcagcagcagcgaggccagctctgtgccccacctgctggcccagcccagcgtgtccctgggggaccagcccggctccatgacccagaacctgctgggcccccagcagcccatgctggagcggcccatgcagaacaacacaggcccccagccccccaagccaggccctgtgctgcagagcggccagggcctgcccggggtgggcatcatgcccaccgtgggccagctgcgggcccagctgcagggcgtgctggccaagaacccccagctgcggcacctgagcccccagcagcagcagcagctgcaggccctgctgatgcagaggcagctgcagcagagccaggccgtgcggcagaccccaccctaccaggagcccggcacccagaccagccccctgcagggcctgctgggctgccagccccagctgggcggcttccctggcccccagacaggccccctgcaggagctgggcgccggcccccggccccagggccccccccggctgcctgcccctcctggggccctgagcacaggccctgtgctgggccctgtgcaccccaccccaccacccagcagcccccaggagcccaagaggcccagccagctgcccagccccagcagccagctgcccacagaggcccagctgccccccacccaccctggcacccccaagccccagggccccaccctggagcccccacctggccgggtgtccccagctgctgcccagctggccgacaccctcttcagcaagggcctgggcccctgggaccccccagacaacctggccgagacccagaagccagagcagagcagcctggtgcccggccacctggaccaggtgaatggccaggtggtgcctgaggccagccagctgagcatcaagcaggagccccgggaggagccctgtgccctgggcgcccagagcgtgaagcgggaggccaacggggagcccatcggggcccctggcaccagcaaccacctgctgctggccggccccaggtctgaggccggccacctgctgctgcagaagctgctgcgggccaagaatgtgcagctgagcacaggccggggcagcgagggcctgcgggcagagatcaatggccacatcgacagcaagctggccggcctggagcagaagctgcagggcacccccagcaacaaggaggatgctgctgccaggaagcccctgacccccaagcccaagagggtgcagaaggccagtgaccggctggtgagcagcaggaagaagctgaggaaggaggatggagtgcgggccagcgaggccctgctgaagcagctgaagcaggagctgagcctgctgcccctgacagagcccgccatcacagccaacttcagcctgtttgccccctttggaagtggctgccctgtgaatggccagagccagctgcggggggcctttggaagtggggccctgcccaccggccctgactactacagccagctgctgaccaagaacaacctgagcaacccccccaccccacccagcagcctgccccccaccccacctccttctgtgcagcagaagatggtgaatggagtgaccccatctgaggagctgggggagcaccccaaggatgctgccagcgcccgggacagcgagcgggccctgcgggacaccagcgaggtgaagagcctggacctgctggccgccctgcccaccccaccccacaaccagacagaagatgtgaggatggagagtgatgaagattctgacagcccagacagcatcgtgcctgccagcagccctgagagcatcctgggggaggaggccccccgcttcccccacctgggcagcggccgctgggagcaggaggaccgggccctgagccctgtgatccccctcatcccccgggccagcatccctgtgtttcctgacaccaagccctacggggccctgggcctggaggtgcctgggaagctgcctgtgaccacctgggagaagggcaagggcagcgaggtgtctgtgatgctgactgtgtctgctgctgctgccaagaacctgaatggagtgatggtggccgtggccgagctgctgtccatgaagatccccaacagctatgaggtgctcttccctgagagccctgcccgggccggcacagagcccaagaagggggaggccgagggccctgggggcaaggagaagggcctggagggcaagagcccagacaccggccctgactggctgaagcagtttgatgctgtgctgcccggctacaccctgaagagccagctggacatcctgagcctgctgaagcaggagagccctgcccctgagccccccacccagcacagctacacctacaacgtgagcaacctggatgtgcggcagctgagcgcccctcctcctgaggagcccagccccccacccagccccctggcccccagccctgccagccccccaacagagcccctggtggagctgcccacagagcccctggccgagccccctgtgcccagccccctgcccctggccagcagccctgagagcgcccggcccaagccccgggcccggcccccagaggagggggaggacagccggcccccccggctgaagaagtggaagggcgtgcgctggaagaggctgcggctgctgctgaccatccagaagggcagcggccggcaggaggatgagcgggaggtggccgagttcatggagcagctgggcacagccctgcggccagacaaggtgccccgggacatgaggcgctgctgcttctgccacgaggagggagatggagccacagatggccctgcccggctgctgaacctggacctggacctgtgggtgcacctgaactgtgccctgtggagcacagaggtgtatgagacccagggcggggccctgatgaatgtggaggtggccctgcaccggggcctgctgaccaagtgcagcctgtgccagaggactggagccaccagcagctgcaacaggatgcgctgccccaacgtgtaccactttgcctgtgccatccgggccaagtgcatgttcttcaaggacaagaccatgctgtgccccatgcacaagatcaagggcccctgtgagcaggagctgagcagctttgctgtgttcagaagagtgtacatcgagagagatgaggtgaagcagatcgccagcatcatccagagaggagagcggctgcacatgttccgggtgggcggcctggtgttccacgccatcggccagctgctgccccaccagatggctgacttccacagcgccacagccctgtaccctgtgggctatgaggccacccgcatctactggagcctgcggaccaacaacagacgctgctgctaccgctgcagcatcggggagaacaacggccggcctgagtttgtgatcaaggtgattgagcagggcctggaggacctggtgttcacagatgccagcccccaggccgtgtggaaccgcatcatcgagcctgtggccgccatgaggaaggaggccgacatgctgcggctcttccctgagtacctgaagggggaggagctgtttggcctgactgtgcatgctgtgctgagaattgctgagagcctgcccggggtggagagctgccagaactacctgttccgctatggccgccaccccctgatggagctgcccctgatgatcaaccccaccggctgtgcccggtctgagcccaagatcctgacccactacaagaggccccacaccctgaacagcacctccatgagcaaggcctaccagagcaccttcaccggggagaccaacaccccctacagcaagcagtttgtgcacagcaagagcagccagtacagaaggctgaggacagagtggaagaacaacgtgtacctggcccggagccgcatccagggcctgggcctgtatgctgccaaggacctggagaagcacaccatggtgattgagtacatcggcaccatcatcagaaatgaggtggccaacagaagagagaagatctatgaggagcagaacagaggcatctacatgttccgcatcaacaatgaacatgtgattgatgccaccctgaccggcggccctgcccgctacatcaaccacagctgtgcccccaactgtgtggccgaggtggtgacctttgacaaggaggacaagatcatcatcatcagcagccgccgcatccccaagggggaggagctgacctatgactaccagtttgattttgaagatgaccagcacaagatcccctgccactgtggggcctggaactgcaggaagtggatgaactag

SEQ ID NO: 282489 - DNA, 19419 bp, Artificial Sequence
  derived and/or modified sequence
atggacagccagaagctggctggtgaggataaagattcagaaccggcagctgatggacctgcagcttctgaggacccaagtgccactgagtcagacctgcccaacccacatgtgggagaggtctctgtccttagttctgggagtcccaggcttcaggagactcctcaggactgcagtgggggtccggtgcggcgttgtgctctctgtaactgcggggagcccagtctacacgggcagcgggagctacggcgctttgagttgccatttgattggccccggtgtccagtggtgtcccctggggggagcccagggcccaatgaggcagtgctgcccagtgaggacctatcacagattggtttccctgagggccttacacctgcccacctaggagaacctggagggtcctgctgggctcaccattggtgtgctgcatggtcggcaggcgtatgggggcaggagggcccagaactatgtggtgtggacaaggccatcttctcagggatctcacagcgctgctcccactgcaccaggctcggtgcctccatcccttgccgctcacctggatgtccacggctttaccacttcccctgcgcgactgccagcggttccttcctatccatgaaaacactgcagctgctatgcccagagcacagtgagggggctgcatatctggaggaggctcgctgtgcagtgtgtgaggggccaggggagttgtgtgacctgttcttctgtaccagctgtgggcatcactatcacggggcctgcctggacactgctctgactgcccgcaaacgtgctggctggcagtgccctgaatgcaaagtgtgccaagcctgcaggaaacctgggaatgactctaagatgttggtttgtgagacgtgtgacaaaggataccatactttctgcctaaaaccacccatggaggaactgcctgctcactcttggaagtgcaaggcgtgccgggtgtgccgggcctgtggggcgggctcagcagaactgaatcccaactcggagtggtttgagaactactctctctgtcaccgctgtcacaaagcccagggaggtcagactatccgctccgttgctgagcagcataccccggtgtgtagcagattttcacccccagagcctggcgatacccccactgacgagcccgatgctctgtacgttgcatgccaagggcagccaaagggtgggcacgtgacctctatgcaacccaaggaaccagggcccctgcaatgtgaagccaaaccactagggaaagcaggggtccaacttgagccccagttggaggcccccctaaacgaggagatgccactgctgcccccacctgaggagtcacccctgtccccaccacctgaggaatcacccacgtccccaccacctgaggcatcacgcctgtcaccaccacctgaggaattgcccgcatccccacttcctgaggcattgcacctgtcccggccgctggaggaatcgcccctctctccgccgcctgaggagtctcctctgtctcccccacctgaatcatcacctttttctccactggaggagtcgcccttgtctccaccggaagagtcacccccatctcctgcacttgagacgcctctatccccaccacctgaagcatcgcccctgtccccaccatttgaagaatctcctttgtccccgccacctgaggaattgcccacttccccgccacctgaagcatctcgcctgtctccaccacctgaggagtcacccatgtcccctccacctgaagagtcacccatgtctccaccaccggaggcatctcgtctgttcccaccatttgaagagtctcctctgtcccctccacctgaggagtctcccctttccccaccacctgaggcatcacgcctgtccccaccacctgaggactcgcctatgtccccaccacctgaagaatcacctatgtcccccccacctgaggtatcgcgcctatcccccctgcctgtggtgtcacgcctgtctccaccgcctgaggaatctcccttgtccccaccgcctgaggagtctcccacgtcccctccacctgaggcttcacgcctctccccaccacctgaggactcccccacatccccaccacctgaggactcacctgcttccccaccaccggaggactcgctcatgtccctgccgctggaggagtcacccctgttgccactacctgaggagccgcaactctgcccccggtccgaggggccgcacctgtcaccccggcctgaggagccgcacctgtccccccggcctgaggagccacacctatctccgcaggctgaggagccacacctgtccccccagcctgaggagccatgcctatgcgctgtgcctgaggagccacacttgtccccccaggctgagggaccacatctgtcccctcagcctgaggaattgcacctgtccccccagactgaggagccgcacctgtctcctgtgcctgaggagccatgcttgtccccccaacctgaggaatcacacctgtccccccagtctgaggagccatgcctgtccccccggcctgaggaatcgcatctgtcccctgagcttgagaagccacccctgtcccctcggcctgaaaagccccctgaggagccaggccaatgccctgcacctgaggagctgcccttgttccctccccctggggaaccatccttatctcccttgcttggagagccagccctgtctgagcctggggaaccacctctgtcccctctgcccgaggagctgccgttgtccccatctggggagccatccttgtcgcctcagctgatgccaccagatccccttcctcctccactctcacccatcatcacagctgcggccccaccggccctgtctcctttgggggagttagagtacccctttggtgccaaaggggacagtgaccctgagtcaccgttggctgcccccatcctggagacacccatcagccctccaccagaagctaactgcactgaccctgagcctgtcccccctatgatccttcccccatctccaggctccccagtggggccggcttctcccatcctgatggagccccttcctcctcagtgttcgccactccttcagcattccctggttccccaaaactcccctccttcccagtgctctcctcctgccctaccactgtccgttccctccccgttgagtcccatagggaaggtagtgggggtctcagatgaggctgagctgcacgagatggagactgagaaagtttcagaacctgaatgcccagccttggaacccagtgccaccagtcctctcccttccccaatgggggacctttcctgccccgcccccagccctgccccagccctggatgacttctctggcctaggggaagacacagcccctctggatgggattgatgctccgggttcacagccagagcctggacagacccctggcagtttggctagtgaacttaaaggctcccctgtgctcctggaccccgaggagctggcccctgtgacccctatggaggtctaccccgaatgcaagcagacagcagggcagggctcaccatgtgaagaacaggaagagccacgtgcaccggtggcccccacaccacccactctcatcaaatccgacatcgttaacgagatctctaatctgagccagggtgatgccagtgccagttttcctggctcagagcccctcctgggctctccagacccggaggggggtggctccctgtccatggagttgggggtctctacggatgttagtccagcccgagatgagggctccctacggctctgtactgactcactgccagagactgatgactcactattgtgcgatgctgggacagctatcagcggaggcaaagctgagggggagaaggggcggcggcgcagctccccagcccgttcccgcatcaaacagggtcgcagcagcagtttcccaggaagacgccggcctcgtggaggagcccatggaggacgtggtagaggacgggcccggctaaagtcaactgcttcttccattgagactctggtagttgctgacattgatagctctcccagtaaggaggaggaggaagaagatgatgacaccatgcagaataccgtggttctcttctccaacacagacaaatttgtcctaatgcaggacatgtgtgtggtatgtggcagctttggccggggggcagagggccacctccttgcctgttcgcagtgctctcagtgctatcacccttactgtgtcaacagcaagatcaccaaggtgatgctgctcaagggctggcgttgtgtggagtgtattgtgtgtgaggtgtgtggccaggcctccgacccctcacgcctgctgctctgtgatgactgtgatattagctaccacacatactgcctggaccccccactgctcaccgtccccaagggcggctggaagtgcaagtggtgtgtgtcctgtatgcagtgtggggctgcttcccctggcttccactgtgaatggcagaatagttacacacactgtgggccctgtgccagcctggtgacctgccctatctgtcatgctccttacgtagaagaggacctactaatccagtgccgccactgtgaacggtggatgcatgcaggctgtgagagcctcttcacagaggacgatgtggagcaggcagccgatgaaggctttgactgtgtctcctgccagccctacgtggtaaagcctgtggcgcctgttgcacctccagagctggtgcccatgaaggtgaaagagccagagccccagtactttcgcttcgaaggtgtgtggctgacagaaactggcatggccttgctgcgtaacctgaccatgtcaccactgcacaagcggcgccaacggcgaggacggcttggcctcccaggcgaggcaggattggagggttctgagccctcagatgcccttggccctgatgacaagaaggatggggacctggacaccgatgagctgctcaagggtgaaggtggtgtggagcacatggagtgcgaaattaaactggagggccccgtcagccctgatgtggagcctggcaaagaggagaccgaggaaagcaaaaaacgcaagcgtaaaccatatcggcctggcattggtggtttcatggtgcgacagcggaaatcccacacacgcacgaaaaaggggcctgctgcacaggcggaggtgttgagtggggatgggcagcccgacgaggtgatacctgctgacctgcctgcagagggcgccgtggagcagagcttagctgaaggggatgagaagaagaagcaacagcggcgagggcgcaagaagagcaaactggaggacatgttccctgcttacttgcaggaagccttctttgggaaggagctgctggacctgagccgtaaggccctttttgcagttggggtgggccggccaagctttggactagggaccccaaaagccaagggagatggaggctcagaaaggaaggaactccccacatcgcagaaaggagatgatggtccagatattgcagatgaagaatcccgtggcctcgagggcaaagccgatacaccaggacctgaggatgggggcgtgaaggcatccccagtgcccagtgaccctgagaagccaggcaccccaggtgaagggatgcttagctctgacttagacaggatttccacagaagaactgcccaagatggaatccaaggacctgcagcagctcttcaaggatgttctgggctctgaacgagaacagcatctgggttgtggaacccctggcctagaaggcagccgtacgccactgcagaggccctttcttcaaggtggactccctttgggcaatctgccctccagcagcccaatggactcctacccaggcctctgccagtccccgttcctggattctagggagcgcgggggcttctttagcccggaacccggtgagcccgacagcccctggacgggctcaggtggcaccacgccctccacccccacaacccccaccacggagggtgagggcgacggactctcctataaccagcggagtcttcagcgctgggagaaggatgaggagttgggccagctgtccaccatctcacctgtgctctatgccaacattaattttcctaatctcaagcaagactacccagactggtcaagccgttgcaaacaaatcatgaagctctggagaaaggttccagcagctgacaaagccccctacctgcaaaaggccaaagataaccgggcagctcaccgcatcaacaaggtgcagaagcaggctgagagccagatcaacaagcagaccaaggtgggcgacatagcccgtaagactgaccgaccggccctacatctccgcattcccccgcagccaggggcactgggcagcccgccccccgctgctgcccccaccattttcattggcagccccactacccccgccggcttgtctacctctgcggacgggttcctgaagccgccggcgggctcggtgcctggccctgactcgcctggtgagctcttcctcaagctcccaccccaggtgcccgcccaagtgccttcgcaggacccctttggactggcccctgcctatcccctggagccccgcttccccacggcaccgcccacctatcccccctatcctagtcctacgggggcccctgcgcagcccccgatgctgggcgcctcatctcgtcctggggctggccagccaggggaattccacactaccccacctggcacccccagacaccagccctccacacctgacccattcctcaaaccccgctgcccctcgctggataacttggctgtgcctgagagccctggggtagggggaggcaaagcttccgagcccctgctctcgcccccaccttttggggagtcccggaaggccctagaggtgaagaaggaagagcttggggcatcctctcctagctatgggcccccaaacctgggctttgttgactcaccctcctcaggcacccacctgggtggcctggagttaaagacacctgatgtcttcaaagcccccctgacccctcgggcatctcaggtagagccccagagcccgggcttgggcctaaggccccaggagccaccccctgcccaggctttggcaccttctcctccaagtcacccagacatctttcgccctggctcctacactgacccatatgctcagcccccattgactcctcggccccaacctccgccccctgagagctgctgtgctctgccccctcgctcactgccctccgaccctttctcccgagtgcctgccagtcctcagtcccagtccagctcccagtctccactgacaccccggcctctgtctgctgaagctttttgcccatcacccgttacccctcgcttccagtcccctgacccttattctcgcccaccctcacgccctcagtcccgtgacccatttgccccattgcataagccaccccgaccccagccccctgaagttgcctttaaggctgggtctctagcccacacttcgctgggggctggggggttcccagcagccctgcccgcggggccagcaggtgagctccatgccaaggtcccaagtgggcagccccccaattttgtccggtcccctgggacgggtgcatttgtgggcaccccctctcccatgcgtttcactttccctcaggcagtaggggagccttccctaaagccccctgtccctcagcctggtctcccgccaccccatgggatcaacagccattttgggcccggccccaccttgggcaagcctcaaagcacaaactacacagtagccacagggaacttccacccatcgggcagccccctggggcccagcagcgggtccacaggggagagctatgggctgtccccactacgccctccgtcggttctgccaccacctgcacccgacggatccctcccctacctgtcccatggagcctcacagcgatcaggcatcacctctcctgtcgaaaagcgagaagacccagggactggaatgggtagctctttggcgacagctgaactcccaggtacccaggacccaggcatgtccggccttagccaaacagagctggagaagcaacggcagcgccagcgactacgagagctgctgattcggcagcagatccagcgcaacaccctgcggcaggagaaggaaacagctgcagcagctgcaggagcagtggggcctccaggcagctggggtgctgagcccagcagccctgcctttgagcagctgagtcgaggccagaccccctttgctgggacacaggacaagagcagccttgtggggttgcccccaagcaagctgagtggccccatcctggggccagggtccttccctagcgatgaccgactctcccggccacctccaccagccacgccttcctctatggatgtgaacagccggcaactggtaggaggctcccaagctttctatcagcgagcaccctatcctgggtccctgcccttacagcagcaacagcaacaactgtggcagcaacaacaggcaacagcagcaacctccatgcgatttgccatgtcagctcgctttccatcaactcctggacctgaacttggccgccaagccctaggttccccgttggcgggaatttccacccgtctgccaggccctggtgagccagtgcctggtccagctggtcctgcccagttcattgagctgcggcacaatgtacagaaaggactgggacctgggggcactccgtttcctggtcagggcccacctcagagaccccgtttttaccctgtaagtgaggacccccaccgactggctcctgaagggcttcggggcctggcggtatcaggtcttcccccacagaaaccctcagccccaccggcccctgaattgaacaacagtcttcatccaacaccccacaccaagggtcctaccctgccaactggtttggagctggtcaaccggcccccgtcgagcactgagcttggccgccccaatcctctggccctggaagctgggaagttgccctgtgaggatcccgagctggatgacgattttgatgcccacaaggccctagaggatgatgaagagcttgctcacctgggtctgggtgtggatgtggccaagggtgatgatgaacttggcaccttagaaaacctggagaccaatgacccccacttggatgacctgctcaatggagacgagtttgacctgctggcatatactgatcctgagctggacactggggacaagaaggatatcttcaatgagcacctgaggctggtagaatcggctaatgagaaggctgaacgggaggccctgctgcggggggtggagccaggacccttgggccctgaggagcgccctccccctgctgctgatgcctctgaaccccgcctggcatctgtgctccctgaggtgaagcccaaggtggaggagggtggacgccacccttctccttgccaattcaccattgctacccccaaggtagagcccgcacctgctgccaattcccttggcctggggctaaagccaggacagagcatgatgggcagccgggatacccggatgggcacagggccattttctagcagtgggcacacagctgagaaggcctcctttggggccacgggaggaccaccagctcacctgctgacccccagcccactgagtggcccaggaggatcctccctgctggaaaagtttgagctcgagagtggggctttgaccttgcctggtggacctgcagcatctggggatgagctagacaagatggagagctcactggtagccagcgagttacccctgctcattgaggacctgttggagcatgagaagaaggagctgcagaagaagcagcagctttcagcacagttgcagcctgcccagcagcagcagcaacagcagcagcagcattccctactgtctgcaccaggccctgcccaggccatgtctttgccacatgagggctcttctcccagtttggctgggtcccaacagcagctttccctgggtcttgcaggtgcccgacagccaggtttgccccagccactgatgcccacccagccaccagctcatgccctccagcaacgcctggctccatccatggctatggtgtccaatcaagggcatatgctaagtgggcagcatggagggcaggcaggcttggtaccccagcagagctcacagccagtgctatcacagaagcccatgggcaccatgccaccttccatgtgcatgaagccgcagcaattggcaatgcagcagcagctggcaaacagcttcttcccagatacagacctggacaaatttgctgcagaagatatcattgatcccattgcaaaggccaagatggtggctttgaaaggcatcaagaaagtgatggctcagggcagcattggggtggcacctggtatgaacagacagcaagtgtctctgctagcccagaggctctcggggggacctagcagtgatctgcagaaccatgtggcagctgggagtggccaggagcggagtgctggtgatccctcccagcctcgtcccaacccgcccacttttgctcagggagtgatcaatgaagctgaccagcggcagtatgaggagtggctgttccatacccagcagctcctacagatgcagctgaaggtgctagaggagcagattggtgtacaccgcaagtcccggaaggctctgtgtgccaagcagcgcactgccaaaaaagctggccgtgagttcccagaagctgatgctgagaagctcaagctggttacagagcagcagagcaagatccagaaacaactggatcaggtccggaaacagcagaaggagcacactaatctcatggcagaatatcggaacaagcagcagcaacaacagcagcagcagcagcaacaacagcaacagcactcagctgtgctggctctcagcccttcccagagtccccggctgctcaccaagctccctggtcagctgctccctggccatgggctgcagccaccacaggggcctccgggtgggcaagccggaggtcttcgcctgacccctgggggtatggcactacctggacagcctggtggccccttccttaatacagctctggcccaacagcagcaacagcaacattctggtggggctggatccctggctggcccttcagggggcttcttccctggcaaccttgctcttcgaagcctcggacctgattcaaggcttttacaggaaaggcagctgcagctgcagcagcaacgtatgcagctggcccagaaactgcagcagcagcagcagcagcaacagcagcagcagcaccttctaggacaggtggcaatccagcagcaacagcagcagggtcctggagtacagacaaaccaagctctgggtcccaagccccagggccttatgcctcccagcagccaccaaggcctcctggtccagcagctgtcccctcaaccaccccaggggccccagggcatgctgggccctgcccaggtggctgtgttgcagcagcagcaccctggagctttgggcccccagggccctcacagacaggtgcttatgacccagtcccgggtgctcagttccccccagctggcacagcagggtcagggccttatgggacacaggctggtcacagcccagcagcagcagcagcaacaacagcaccaacagcaagggtccatggcagggctgtcccatcttcagcagagtctgatgtcacacagtgggcagcccaaactgagcgctcagcccatgggctctttacagcagcttcagcagcagcagcagctgcaacagcaacagcaacttcagcagcagcagcagcagcagctacaacagcaacagcaacttcagcagcaacagcttcaacagcagcaacagcagcagcagcttcaacaacagcagcagcaacagcttcaacagcagcaacagcagctacaacagcaacagcaacaacaacagcagcagtttcaacagcagcagcaacagcagcagatgggccttttaaaccagagtcgaactttactgtctcctcagcaacaacagcagcagcaagtggcacttggccctggcatgccagcaaagcctcttcaacacttttctagccctggagccctgggtccaaccctcctcctgacgggcaaggaacaaaacaccgtagacccagccgtttcttcagaggccactgaggggccctctacacatcagggagggccgttagcaataggaactacccctgagtcaatggccactgaaccaggagaggtaaagccctcactctctggggactcacaactcctgcttgtccaaccccagccccagcctcagcccagctctctgcagctgcagccacctctgaggcttccaggacaacagcagcagcaagttagcctgctccacacagcaggtggaggaagccatgggcagctaggcagtggatcatcttctgaggcctcatctgtgccccacctgctggctcagccctctgtttccttaggggatcagcctgggtccatgacccagaaccttctgggcccccaacagcccatgctagagcggcccatgcaaaataatacagggccacaacctcccaaaccaggacctgtcctccagtctgggcagggtctgcctggggttggaatcatgcctacggtgggtcagcttcgagcacagctccaaggagtcctggccaaaaacccacagctgcggcacttaagtcctcagcagcagcagcagctacaggcactcctcatgcagcggcagctgcagcagagtcaggcagtacgccagaccccaccctaccaggagcctgggacccagacctctcccctccagggcctcctgggctgccaacctcaacttgggggcttccctggaccacagacaggccccctccaggagctaggggcagggcctcgacctcagggcccaccccggctccctgccccaccaggagccttatctacaggaccagtccttggccctgtccatcccacacctccaccatccagccctcaagagccaaagagaccttcacaattaccttcccccagctcccagcttcccactgaggcccagctccctcccacccatccagggacccccaaacctcaggggccaaccttggagccgcctcctgggagggtctcacctgctgctgcccagcttgcagataccttgtttagcaagggtctgggaccttgggatcccccagacaacctagcagaaacccagaagccagagcagagcagcctggtacctgggcatctggaccaggtgaatggacaggtggtgcctgaggcatcccaactcagcatcaagcaggaacctcgggaagagccatgtgccctgggagcccagtcagtgaagagggaggccaatggggagccaataggggcaccaggaaccagcaaccacctcctgctggcaggccctcgctcagaagctgggcatctgctcttgcagaagctactccgggcaaagaatgtgcaactcagcactgggcgggggtccgaggggctgcgagctgagatcaacgggcacattgacagcaagctggctgggctggagcagaaactacagggtacccccagcaacaaggaggatgcagcagcaaggaagcctttgacaccgaagcccaagcgggtacagaaggcaagcgacaggttggtgagctcccgaaagaagctgcggaaggaggacggggtcagggccagcgaggccttgctgaaacagctgaaacaggagctgtccctgctgcccctaacggagcctgctatcaccgccaattttagcctctttgccccctttggcagtggctgcccagtcaatgggcagagccagctgaggggggcctttggaagtggggcgctgcccactggccctgactactattcccagctgcttaccaagaataacctgagtaacccgccgacaccaccctcgtcgctgccccccaccccacccccatcggtgcagcagaagatggtgaatggcgtcaccccatctgaagagctgggggagcaccccaaggatgctgcctctgcccgggatagtgaaagggcactgagggatacttcagaggtgaagagtctagacctgctggctgccttgcctacaccccctcacaatcagactgaggatgtcaggatggagagtgatgaggatagcgattctcctgacagcattgtgccagcttcatcccctgagagcatcttgggggaggaggcccctcgtttccctcatctgggctcaggccggtgggagcaagaggaccgggccctctcccctgtcatccccctcattcctcgggccagcatcccagtcttcccagataccaaaccttatggggcccttggcctggaggtccctggaaagctgcctgtcacaacttgggaaaagggcaaaggaagtgaggtgtcagtcatgctcacagtctctgctgctgcagccaagaacctgaatggcgtgatggtggcagtggcggagctgctgagcatgaagatccccaactcctatgaggtgctgttcccagagagccccgcccgggcaggcactgagccaaagaagggggaagctgagggtcctggtgggaaggaaaagggtctggaaggcaagagcccagacactggccctgattggctgaagcagtttgatgcagtgttgcctggctataccctgaagagccaactagacatcttgagcctcctgaaacaggagagccccgccccagagccacccactcagcacagctatacctacaatgtctccaatctggatgtgcgacagctctcggccccacctcctgaagaaccctccccgcccccttcccccttggcaccttctcctgccagtccccctactgagcccttggttgaacttcccaccgaacccttggctgagccacccgtcccctcacctctgccactggcctcatcccctgaatcagcccgacccaagccccgtgcccggccccctgaagaaggtgaagattcccgtcctcctcgcctcaagaaatggaaaggagtgcgctggaagcggcttcggctgctgctgaccatccagaagggcagtgggcggcaggaggatgagcgggaagtggcagagtttatggagcagcttggcacagccttgcgacctgacaaggtaccgcgagacatgcgtcgctgctgtttctgtcatgaggagggtgacggggccactgatgggcctgcccgtctgctgaacctggacctggacctgtgggtgcacctcaactgtgccctttggtccacggaggtgtatgagacccagggcggggcactgatgaatgtggaggttgccctgcaccgaggactgctaaccaagtgctccctgtgccagcgaactggtgccaccagcagctgcaatcgcatgcgttgccccaatgtctaccattttgcttgtgccatccgtgccaagtgcatgttcttcaaggacaagaccatgctgtgtccaatgcataagatcaaggggccctgtgagcaagagctgagctcttttgctgtcttccggcgggtctacattgagcgggacgaggtgaagcaaatcgctagcatcattcagcggggagaacggctgcacatgttccgtgtggggggccttgtgttccacgccatcggacagctgctgcctcaccagatggctgactttcatagtgccactgccctctatcccgtgggctacgaggccacgcgcatctattggagcctccgcaccaacaatcgtcgctgctgctatcgctgttctattggtgagaacaacgggcggccggagtttgtaatcaaagtcatcgagcagggcctggaggacctggtcttcactgacgcctctccccaggccgtgtggaatcgcatcattgagcctgtggctgccatgagaaaagaggctgacatgctgcgactcttccctgagtatctgaagggcgaggagctctttgggctgacggtgcatgccgtgcttcgcatagctgaatcactgcccggggtggagagctgtcaaaactatttattccgctatgggcgccacccccttatggagctgccactcatgatcaaccccactggctgtgcccgatcagagcctaaaatcctcacacactacaaacggccccataccctgaacagcaccagcatgtctaaggcatatcagagcaccttcacaggcgagaccaacaccccctacagcaagcagtttgtgcactccaagtcatctcagtaccggcggctgcgcaccgaatggaagaacaacgtgtacctggctcgctcccgtatccagggcctggggctctatgcagccaaggacctagaaaagcacacaatggttatcgagtacattggcaccatcattcggaacgaggtggccaaccggcgggagaaaatctacgaagagcagaatcgaggcatctacatgttccgaataaacaatgaacatgtgattgatgctacgttgaccggcggccctgccaggtacattaaccattcctgtgcccctaactgtgtggccgaagtcgtgacatttgacaaagaggacaaaatcatcatcatctccagccggcgaatccccaaaggagaggagctaacctatgactatcagtttgattttgaggacgatcagcacaagatcccctgccactgtggagcctggaattgtcggaaatggatgaactaagaagctttgaggctaccaggcaggggagtccccctacccacaacctcttccctgaaagggatgagggggaagagaggtagcagccagagccaggacccagggttggggctgccggctgacccggagcccctggagcaggaggctggggcagagggccctaggccaagcccaccctgggcaccagggacaatcctcttccccaccaccggccctcaggctggcatctctgcccccagctccaggaggggccagacagaagcagccattgggcatctcaggtttgagggggatatgggccgggaactacccagaagcatctgggaggcagcagggtgggggaagaggatgtgtggccgggcctcacagccctgctgctcccactgacctctccggcccaactcacggctgcaaagagacttgactaagcttgacaatcccaaaggccgggtcccacacctggccctgcctgccgggtcctgcccccaccctcacccccatccccctccctcttgatctgtctctgtttccctcttttcctctgtgtttctgtctctctatgggttgtgtttccttgttttccactctgacaaatgcaacatgaacgggaaagaggcgcccagctgcctaggagggcaagctgggcaagccgggcaaggagaccccgcacccacacctacctcatttaagtgttggattttttgctgttttgaaatgtgagaccctctccaagccccctactgccccaaccctctcccccacctcactgccctcttctgagtgggtggaaggggggtaggaggaggaagaaaaacaacaacaaaaaatccatctttgtttttaattatgggcatgggatggtggttgaggcaaatgatgatgaagattggggatgactggcccctagttgctctaggacttccttctccatctggacatgggggcaggagggagctaaacctaggaccaggatatctccctcctgttttcccaacctcatcatgagcctgtttgccctccagcccctggacgggttgggtggggggtagggtgagggctatccctgagtggcatgcccatacctagtgaggcagggtgtggcccggagctcccactttccctcagtcaccaaactgctgctggtctggtgggaaggggtggtgatgtgggggtgggggagcttagtgtcagcgcggggagggtggggggtatttatctatttatacatgggattgtacatagtcttgtggggcatgggggagccggctggaggtgagaaccctcccctctccccccaccccccggggagagcaaatgtaaaactactaatttttgtgctttatatattctatataaatatatctattttctttttacaaaaccagtttataaatggtaggggggtgtggggcggacacatggagctccccttgtgggggggccccctccattacccgacctaccgcccttttcctcaccccccaccccactccccaccccctggctgtgactgctgtaagatgggggtatagaggctgggcaattcccaccccctgttgtatagttggactatgttataacgcacaaaagagagctgaccccagggggagccagagggtgatgggttccttgcctccctttccttcccctttctgcccaagcttgtgctgcagttgaacctcttcctgggggtgggagtaggtaaggggtgggtgaggccccaaacccctctctggtagggaaccgtggggatgaagatgaagcttatatgcagttctcttctaggggctgtgggcaaagggcattttgtaattaatattttcaagaatcagatgtctggagtgtaggggtgggcttggtggtggtggacgggcgggcctgctggagggggagcttggtcgctgttgtgattttaggtttgtttttgttttgttttgaatttggggggttgtggattgttgggggtagggagattttttttttttaaagctgcttcctcaactgtttcaagctgcaaatgtttaagagaataacagcccccactcccacaggaaccgctgtaattaaatcagacagtaggaagactgggctgctgccctcaaagccacagcccttggatgttccttttccgagagcagaaggtctaggctacagggagggggagattggctcccgtgagtcaggctgtgtttggggcttgggccctgggattgggaaaaggggatggggcagactttgtaagcatatgctaggtatccgatagtcctgtagaatttagtgaagaaaccttatacagtttttaatttttatataaactataactcagacccaagctacaaggttggaattttggttggttttttttttaagtaccctgcctgtataattgcatcagaatcccccaccccaccccccgcccccgtgtttgtattttgggttggtttacactcgcacatactcagttttcagttttcccctttacagtcttctcccctcacctccaggaccctccccctttttaaaaaataaatcgctgacaagtgtgaatcccgtgaagactttattttgtgttgtgtgtatcctgtacagcaaggttggtccttcgtaacaacggatgaaatggttcccttttttaaagcgccctctctccctccaccctcagcgcccctgtccttggcatgttttgtatcagcgatcattctgaactgtacatatttatgttgcgagaggcaaagggcaagttttggattttgcttcttccaagtttgtttttaaacgacaaataaaaaaagaacattttaaatacaa

SEQ ID NO: 282490 - DNA, 16614 bp, Artificial Sequence
  derived and/or modified sequence
atggacagccagaagctggccggcgaggacaaggacagcgagcccgcggctgacggcccagccgcctccgaggatccgtccgcaactgagtcagatttgcctaatccccatgttggcgaggtgtcggtgctcagttccgggtcgccaagactgcaagagactccccaggactgtagcgggggacctgtgcggcgatgcgccctgtgcaactgcggtgaaccttcccttcacggccagagggagctgcggcgcttcgaattgccattcgactggccacgttgtccagtggtttcaccagggggatccccaggcccgaatgaagcagttctcccttccgaggacctttcacagatcggattccctgaaggtttgacccctgcccacttgggggagcccggtggctcttgttgggctcaccactggtgcgctgcatggtctgccggcgtgtggggccaggaggggcccgagctgtgcggagtggataaggcaatcttcagcggaatttcgcagcgctgctcacactgcactcgactgggcgcatctataccttgcaggtcccccggatgtcctagattatatcacttcccttgcgccacggcatccggtagcttcctgagcatgaaaacactgcagctgttatgccctgagcacagcgagggcgctgcgtaccttgaggaagccagatgtgcagtctgtgagggcccgggcgagctgtgcgatctgtttttctgtacctcatgcggtcatcattaccacggcgcatgcctagatactgcattgacggcacggaagcgtgctggttggcagtgcccagagtgcaaagtctgccaggcctgccgcaagcctgggaacgactcaaagatgctcgtttgcgagacctgcgacaaggggtatcacaccttctgcttaaagccccccatggaagagttaccagcgcatagctggaaatgtaaggcttgccgggtgtgtagggcgtgcggggccggcagtgctgaactgaacccaaactctgaatggttcgagaactactccctgtgccaccgctgccacaaagctcagggtggacagacaattaggtcagtcgctgagcaacataccccggtgtgctccagattttcccctccagagcctggggatacccccactgacgagccggacgccttgtatgtcgcctgccaggggcagcctaaggggggccatgttacatctatgcagccaaaggaacctggccctctgcagtgcgaggctaagcccttagggaaagccggagtgcagcttgaaccacaactggaggcacccttgaacgaggaaatgcccctgctccccccccccgaggagtcaccactcagtccccccccagaagaatcccccactagtccacccccagaagcatcaagactgtcccccccaccagaggagttacccgcgagtcccctgcctgaggctctacatcttagtagacccctcgaagaatcccccctgtccccgccaccagaagagagtcctctgtctccaccccccgagtcatctccctttagcccacttgaggagagtcctttatctccccctgaggaatccccgccttcaccagccctggaaaccccgctgagtcccccacccgaggcctcgcccctgtccccccctttcgaagagtccccgctgagcccaccccccgaagaactccctacctccccccctccagaagcgtctagactgagtccaccacccgaggagagccctatgtctcccccaccagaggagagtcctatgagccctcctccagaggccagccgcctgttccctcccttcgaggaatcacccctgtcacctccacccgaggaatcccctctttcgcctccacctgaggcgtcaagattaagccctcctccagaagacagccccatgtcccccccccctgaagagagtcccatgagcccaccccccgaggtctcacggttgagtccccttccggttgtgtcgagactgtcaccccctcctgaagaatcccctctgagccctccgcctgaggagagtccgacttcgccccctcccgaagcttcccggctgagtcccccacctgaggatagcccgacctctccccccccagaggattcccctgcctctcccccaccggaggattcgctgatgtctctgcccctcgaggagagcccgctgctgccactgcccgaagaaccccagctgtgccccagatctgagggtccacacctgagccctaggcccgaagagcctcatcttagccccagacctgaggagccacacctgtcaccacaagcagaagaacctcacttaagtccacagccagaagagccatgtctctgtgctgttcctgaagagccccatctgagcccacaggctgaaggtccacatctgagtccccagcccgaggagctgcatctgtcaccccagaccgaggagcctcatctgtcccctgttccagaggagccatgcttgtccccccagcccgaagagtctcaccttagccctcagtccgaggaaccttgcttgtcaccaaggcccgaagaatcacacctatcaccagaacttgaaaagccgcctctgagtccacgccccgagaagcctccagaagaacccggtcaatgtccagccccggaagagttgcccttatttcccccccccggagagcctagcttatcacctctgctaggagagccggcgctgagcgaacccggagagcccccgctaagccctctccccgaagagctgcccctgagcccgtctggagagccctcgctctctcctcagctgatgccccccgacccactccccccaccgttgagccctattattaccgcagcagctcccccagcactaagccctttaggtgagcttgaatatccctttggcgcaaagggggacagcgatccagagtccccactggcagcccctatactagagacccccatcagcccaccccccgaggccaactgtactgacccagaaccggtgccccccatgatcctgcctccttcaccgggctcccctgtggggccggcatccccaatcctgatggaaccattacctcctcagtgctcccccctgctgcaacacagcttagtccctcagaatagcccaccatcacagtgcagcccccctgccctgcctttgtcagtcccctcaccacttagtcctatcggcaaggtggtgggcgtttcagacgaagccgaactccacgaaatggagactgaaaaagtgagcgagcctgaatgccccgccttagagccaagtgccacttccccattgccttctccgatgggtgatctaagttgccctgctccgtcccctgcccccgctcttgacgatttctccggccttggggaggacacggctcccttggacggaatcgatgccccaggaagccagcctgagccaggccaaacccctggttctttggcaagcgagttgaaggggagtcctgtgttattggatccagaggagctggctcctgtgactcctatggaggtctatcctgagtgtaaacagaccgcaggccaaggttctccctgcgaggaacaggaggagccgagggccccagtggccccaacaccaccaactcttataaaaagtgatatcgtgaacgagatttctaatctcagtcagggcgatgcttccgccagttttcctggcagcgagccgctgctcgggagccccgatccggaaggaggcggcagtttgtccatggaactgggcgttagtaccgacgtgtcgccagccagggacgagggctctctccgcctatgcactgattctctaccagagactgacgacagcctcctgtgcgatgcgggaactgcgatcagtggaggcaaagccgaaggggagaaaggacgtaggcggtccagtccggcccggtcacgcatcaagcaggggaggtctagtagttttccgggacgcagaagaccgcggggaggcgcacatggaggacgtggacgtggaagagcaagacttaagagcaccgcatcaagtatcgagactctggtggtggcagacattgacagctcccccagcaaggaagaggaggaggaggatgacgatacgatgcagaatacagtagtgctgtttagcaacaccgacaaattcgtgcttatgcaggatatgtgtgttgtgtgcggatcattcggacgcggcgccgaagggcatctgctcgcctgttcacaatgttcacagtgctatcatccatattgtgttaacagtaaaatcacaaaagttatgctgctcaaagggtggcgttgcgtcgagtgcatcgtgtgtgaggtgtgcggccaggcgagcgatccttccagactcctgctttgcgatgattgcgatatttcctatcacacttattgtctggaccccccgttactgaccgtgcctaagggaggctggaagtgcaagtggtgcgtgtcctgcatgcagtgtggcgctgccagcccaggctttcactgcgagtggcaaaatagctatacccattgcggaccttgcgcttcactggtaacatgcccaatctgccacgctccgtacgtcgaggaagatctgctgatccaatgcaggcactgtgagcgctggatgcatgccggctgtgaatccctgttcaccgaggatgacgtggagcaagcagcagacgagggctttgactgtgtgtcctgccagccatacgtagttaaacccgtggcacccgtggctccacctgagctcgtaccgatgaaagtgaaagagcctgagccccagtattttcgcttcgagggggtttggctgacggagaccggcatggccttgctgagaaatctcactatgtcgcccttgcacaagcggagacagaggagaggaagattgggtctgccgggcgaagcgggcctggagggaagtgagccctcagacgctctgggccctgatgataagaaggatggcgacctcgataccgatgagctcctaaaaggcgaagggggagtcgagcatatggaatgcgagatcaaattggaaggccccgtttccccagatgtggaacctggaaaagaagaaactgaagaaagcaaaaaacggaagcgaaagccgtacaggcctggcatcgggggattcatggtccgacagcgtaagagtcataccagaacaaaaaaaggtccggctgcccaggctgaggtactcagtggcgacgggcagccagatgaagtgattcccgcagatctgccagcagaaggggcagtggagcagagcctcgccgagggggatgaaaagaagaagcagcagcggaggggcagaaagaagagtaagcttgaggacatgtttcccgcatatctacaagaggcattctttggtaaagaactacttgacctctcgcgcaaagcgctgttcgcggttggagtcggcagaccctctttcgggctgggtacacccaaggcaaaaggtgacggcgggagtgaacggaaggaactgcccaccagccagaagggagatgacggccctgatatcgctgacgaggagtcgcgggggctggaaggcaaagccgacactcccgggcccgaggacgggggagtgaaggcctcccccgttcccagcgaccccgagaagcccggcacacccggcgagggaatgctctcgtctgatcttgaccgcataagtacagaggaacttccaaagatggaaagtaaggatttgcagcagttattcaaggatgtgctcggctcagagcgggagcagcacctcggctgtggcacccctgggctggaaggctctcgaactccactgcagagaccctttctgcagggtggtcttccgctgggaaatctcccttcctcttcacctatggacagttacccaggcctgtgccagagccctttcctcgatagccgggagcgtgggggtttttttagtcctgagccgggtgagccggattctccttggacggggtccgggggcacgacacctagcacccctactacaccaaccacagagggggagggagatggcctgtcttataatcagcgttctttgcagcggtgggaaaaggacgaggaactgggacaactgtccaccattagccctgtcctgtatgccaatattaatttccctaacctgaaacaggactacccggactggtctagccgctgcaagcagatcatgaagctgtggcggaaggtcccggccgccgataaagccccctatctacaaaaagcaaaagataatcgcgctgcccaccgaataaataaggtgcaaaaacaggccgagtctcaaatcaacaaacagactaaggtaggcgacatagctcgtaagaccgatcgccccgctctgcacttacgaatcccaccccaaccaggagccctcggaagccctccgcccgccgctgctccaaccatctttatcgggtcacccacgactcccgcaggcctttccaccagtgcggacgggtttcttaagccgccagctggcagcgttccagggcccgactctcctggagagctctttctgaaactccccccacaggtgccagcccaggtccctagccaggatcctttcggactggcaccagcataccctctcgagccgcgctttccaacggcccctccgacatatcctccatacccctcaccgacaggggctcccgcccaaccacctatgctgggagcaagctctagaccaggagccggccagcccggagaatttcataccacaccacccggcactcctaggcaccagcctagcacccctgacccctttttaaagccgagatgtccatctcttgacaacttagctgtgcccgagagccctggggtcggggggggaaaggcctccgagccactcctgtcacctcctccttttggtgagtccaggaaagccctagaggttaagaaagaggaactgggagcatccagtccgagctatgggccccccaacctgggctttgttgactctccctcaagtggtacacatttaggcgggctagaactcaagaccccggacgtctttaaagccccacttacgcctagggccagtcaagtggagccacagagcccaggcctcgggctgcggccacaagaaccgccgcccgcccaggccttggctccttctcctccttcccaccccgacatctttaggccggggtcatacacagacccctatgctcagccgccactgacaccacgaccacagcccccccccccagagagctgttgtgccctgccccctaggagtcttccctctgatcccttttcccgggtgccagcctcccctcagagccaatcatcatcacagtcccctcttacaccaaggcccctgagtgcggaggccttctgtccttcaccggttacacccaggttccaatcgcctgacccttattctaggcctccctcccggccccaaagtagagacccattcgcccctctacataaacctccacgtccacagccaccagaggtggcgtttaaggccgggtctctcgctcacaccagcctgggggccggtggatttccagccgccctacctgcaggtcccgcaggggagctccacgcgaaagtgccctctggccagccacccaactttgtgaggtctcccgggaccggggcgttcgtgggaacaccatctcctatgcggtttactttcccacaggccgtcggagagccatccctgaaacctcctgtgccccaacccggcctgccaccaccacacggtattaactctcactttggtccggggcccaccctggggaaaccacagagcacaaactacacggtggcgaccggcaatttccaccctagtggcagccctcttggcccaagtagcggctccacgggggagtcatacggactctctccactgcggccaccatccgtccttcctcctcctgctcccgacggcagtctgccgtatctctctcatggcgctagccagaggagtggaattacatcccccgttgagaaacgggaggatccagggactgggatgggctctagcttggccacagcagaacttccaggaacacaggatccaggcatgtctggcctatcccagaccgagctggagaagcagcgccaacgtcagcgccttagggagctcttgataaggcagcaaatccagcggaacaccctgagacaggaaaaagaaaccgcagcagccgccgccggtgctgtgggaccgcccggatcatggggggcagagccttcgagcccggcttttgagcagctttcgagaggccaaacgccctttgctggcacccaagacaagagttcgctggtgggcctccccccttctaagctgtcgggaccaattttagggcctgggtctttcccaagcgatgacagactctctagaccaccaccaccagcaacaccctcctccatggacgtgaattcaagacagctggtcgggggaagtcaggcattttaccaaagagccccctacccagggagcctgcccctacagcagcagcaacagcaactttggcagcagcagcaggcgacggctgccactagtatgcggttcgccatgtccgctcggtttcctagtacacccgggccagagctaggacgccaggctctgggctctcccctggctggaatctctacccgcctgcccggcccgggcgagcctgtccccgggcccgctggtcctgcccagtttattgagctgcggcataatgtccagaagggcttgggaccaggtggaactccattccctggacagggaccaccacagagaccacggttttacccggtctccgaggatcctcaccgactggctcctgaagggctgagaggactcgccgtcagtggcttgcctccccagaagccctctgcacctccggctcccgaactcaacaacagcctccatcccacgccccacactaagggcccgactctccccacaggccttgagctggttaaccggcctccgagctccacagagctgggacgacctaatccacttgccctcgaagcagggaagctgccctgcgaggatccagaactggatgacgactttgacgctcacaaggcactggaagatgacgaggaactcgctcatctggggttaggagtagatgtggccaagggagacgatgaactgggaacactggagaaccttgagaccaacgatccccatctggatgatctgctgaacggagacgagtttgacctgctcgcctataccgatcccgagttagacacaggagacaaaaaggatatcttcaacgagcacctcagacttgtagaatctgccaacgagaaagcagagcgcgaggccctgctgagaggagtggaaccgggacccttggggcccgaagaacgacctcctcccgctgcagatgcttcagagcctaggctggcttctgtactccccgaagtgaaacctaaggttgaggagggcgggcgtcaccccagtccctgccagtttacaatcgccacacctaaagtggagccagctccagctgccaactcgctggggctgggtcttaaaccgggccagtcaatgatggggagtcgtgatacacgtatgggcactggtccattttcgtctagtgggcacacggccgaaaaggcctcatttggcgccacaggaggccctcccgctcacctacttaccccctcaccactatccgggcccgggggttcatcccttctcgagaagttcgaattagagtcaggggcccttacacttccgggcggcccagccgcttcaggcgacgaactcgacaagatggaaagttctctggtggcaagcgagctccctcttctcatcgaagacctactcgaacacgagaaaaaggagctgcaaaaaaaacagcagctgagtgcccagctacagcctgctcagcagcagcagcaacagcaacagcaacacagcctgctctccgccccaggacccgcgcaggccatgagcctcccccacgagggcagcagcccatctttagccggctctcaacagcagttgtccttgggcttggctggagccagacagcccggtctgccccaacccctgatgcctacacagcccccagcccatgcattgcaacagcggctggcacctagcatggccatggtttccaaccaggggcacatgctgagcggccaacacggcggacaggccggcctggtccctcagcagtcctctcaaccagtccttagccaaaaacccatggggactatgccaccaagcatgtgtatgaagccacagcaacttgcaatgcaacagcagctagccaatagcttttttccggacaccgatcttgacaaatttgcagccgaagacatcattgacccaattgctaaagccaagatggtggccctcaaggggatcaagaaggtgatggcacagggaagcattggcgtcgcacccggcatgaatagacaacaagtgtcattattggcacagaggctgagcggaggaccttcttcggaccttcagaatcacgttgcagccggcagtggtcaggaacgcagtgcgggcgaccccagccagcccaggcctaatccacctacattcgcccagggcgtcataaatgaagccgatcagagacagtatgaggagtggctgttccacacgcagcagttgctgcagatgcagctgaaggtcctggaggaacagatcggcgtccaccgaaagtcaagaaaagcactgtgcgctaagcagagaaccgcgaagaaagccggccgcgaattccccgaagccgatgccgagaaactgaagttagtgaccgagcagcaaagcaagatccaaaaacagcttgaccaagtccgcaaacaacaaaaggaacatacaaacttgatggccgagtatcggaataagcagcaacagcagcagcagcagcaacagcagcagcaacaacagcacagtgcggttctggcgctaagcccctcgcaatcaccacgtctgctgaccaaactaccagggcagctgctccccggtcacggcctgcaacccccccagggccctcccggaggtcaagcaggcggattgcgtcttacccctggagggatggcattgcctggccagcctggaggtccattcttgaacacagctctcgcccagcagcagcaacagcagcactcgggtggagccggcagtctggccggacctagtggcggcttctttcctggaaatttggccttgaggtcactgggaccagactcccgtttactccaagaacgtcagttgcagctccagcagcagaggatgcagcttgcgcagaagctccagcagcaacagcaacagcagcagcaacaacaacatctcctcggccaggtcgcaatccagcagcagcaacagcagggtcccggcgtgcagactaaccaagcgctgggcccgaagccacaagggttgatgcctccctccagccatcaaggactgctggttcagcagctttccccacaaccgccacagggaccgcaaggtatgctgggcccagcgcaggtagctgttctccagcagcagcaccctggcgccttggggccacaggggccgcataggcaagtgctcatgacccagagccgggtattgtcttcgcctcagcttgctcaacagggccagggcttgatgggtcaccgcctggttaccgcccaacagcagcaacagcagcagcagcatcagcaacagggaagcatggctggcttgtctcacctgcagcaaagtctgatgtcgcatagcggccaaccaaagctctccgcccagcctatggggtccttgcaacaattgcaacagcaacaacagcttcagcagcagcagcaactgcaacagcagcaacagcagcagttgcagcaacagcagcaattacagcagcagcagctccaacagcaacagcagcaacagcagcttcagcaacagcagcagcagcagcttcaacaacaacagcagcagctgcagcagcagcagcagcaacaacagcagcagtttcaacagcaacaacagcaacagcagatgggcctgttgaaccagtcccgcacgctcttgtccccacagcagcagcagcagcagcaagtggctctaggccccggcatgccagccaagccattacagcacttctccagccctggagcgctcggaccaactctgctcctgacgggcaaagagcaaaatactgtggacccagccgtgtctagcgaagcaaccgagggccctagcactcaccaggggggccctctggcaatagggaccacgcctgaatctatggcaacagagcctggcgaagttaagcctagcctctctggagactcccagctattacttgtgcagccccagccccagccccagccaagttcccttcagcttcaaccgcccctccgcctacccgggcaacagcaacagcaagtttccctgctgcacaccgccggtggggggtcacatgggcaactgggctcaggatcctcatcagaggcttcttccgtccctcacctgctggctcagccctctgtatccctgggggatcagccaggaagcatgacgcaaaatctgttagggccacagcaaccaatgctggagcgcccgatgcagaataatactggtccccagccccccaagccggggccggtcctgcagagcggtcaggggctacccggagtggggataatgcccactgtcggccaactgcgcgcccagctccagggcgtcctcgcaaaaaaccctcagctcaggcacttaagtccacaacagcagcagcaactccaagctttgttgatgcagcgccagctgcagcaatctcaggccgtgaggcagactcccccataccaggagcctggtacacagacgagcccgctgcaggggctgcttgggtgtcagcctcagctcggcggctttcccggtccacaaacaggcccacttcaggaattgggagccggcccacgcccacagggccccccaaggctccccgccccccctggggcactcagtaccggacccgtgctagggccagtccatcccacccctcctcccagcagccctcaagaacctaagcgtccctcccagctcccctcaccctcgagccagctgcctaccgaggcccagcttccacccacccatcccgggactcccaagccccaaggccctaccctggaacctccccccggtagagtcagcccagccgccgcacagctagcagacactctgttctccaaggggctgggtccgtgggaccctcccgacaacctggcggaaactcagaagcccgagcagtcttctctggtacccggtcacctggatcaggtgaatggtcaggttgtgccggaagcgtctcagttatctatcaagcaggaacctcgtgaggagccatgtgccctgggggcccagagtgttaagcgcgaagccaacggggagccaattggagcccccggcacttctaaccacctcctcctcgccggcccaagaagtgaggccggacatctgctcctacagaaactgctccgggccaagaacgtgcagctctctaccggacgcggatctgagggactgagggcggaaatcaacggccatattgattcgaaattggctggcctggaacaaaagctccagggtaccccatccaacaaagaagacgccgctgcccgcaaacccttgactcctaagcctaaaagggtacagaaagctagtgacagactggtaagctcacggaaaaagctcaggaaagaggacggagtacgggcatctgaagccctccttaagcaacttaaacaagaactctctttgctgcctctgactgaacctgccatcacagcaaatttcagcctcttcgccccttttggatcagggtgcccagtgaacggccagtcgcagctccgcggagcctttggatctggggccctccccactggccctgactactacagccagctcctgaccaagaataatctttcaaacccgccgactccaccaagttctctgccccctacccctccacccagcgtacagcagaagatggtcaatggggtgaccccctcagaggaactaggcgaacatccaaaagacgcagcaagtgcgagggactccgagagggccctgcgagatacctccgaggttaagagtttagacctgttagctgcactgccaactcccccacataaccaaacagaggatgtgagaatggaatctgacgaggactctgactcccctgattctatcgtaccagcaagcagtcctgagtctatccttggcgaagaggctcccagattccctcatctgggaagcggtaggtgggagcaagaggatcgcgcactgtcacccgtcattcctctcattccacgggcttcaataccggtgttccccgatactaaaccttacggcgctcttggactggaagtccctggtaaactccccgtgaccacatgggagaagggcaaggggtccgaagtctcagtgatgctgaccgtgagcgctgctgccgcaaagaacttaaacggagtcatggtggccgttgccgagctgttaagcatgaagatccccaatagttacgaggtgttgttcccggaatcccctgcgcgggcagggactgagcctaaaaagggagaggctgaagggccaggggggaaggagaagggacttgagggcaaaagccctgatacgggccccgattggctgaagcagtttgatgccgtcctacccggctatactctgaagtcccagttggacatcctatcgctcttgaagcaggagtctccagcacctgagcccccaacacagcatagctatacgtacaatgtgtctaacctggacgtgagacagctcagtgcccctccccctgaggagccctcccccccacccagcccacttgcaccctcccccgcctcacctcctaccgaacccctcgttgagctccctacagagccacttgccgagccccccgtcccttcacccctcccactcgcgagctcacccgaaagcgctagacctaaaccccgagcacggcctcccgaggagggcgaggacagtcgcccacctcggctcaaaaagtggaaaggtgtaagatggaagcggcttagattgctcttaacaatccagaaaggatcgggtcggcaggaagatgagcgggaggtcgctgaatttatggagcagctcggcaccgccctgcgacctgacaaggtcccaagagatatgaggagatgttgcttctgccatgaagaaggcgatggagcaacagatggtcctgcccgcttacttaaccttgatcttgacctatgggtgcaccttaactgtgctttatggtccaccgaggtctatgaaacgcaggggggggcactgatgaacgtggaagtagccctccacagggggttattaactaagtgctccctatgtcagagaaccggtgccacgagttcgtgtaatcgtatgcgctgtccaaacgtgtaccacttcgcctgcgctataagagctaaatgcatgttttttaaagataaaaccatgctctgccctatgcacaaaatcaagggaccatgtgaacaggaactaagcagttttgcggtgtttcgacgggtctatattgaacgcgatgaagtcaagcagatcgctagcataatccagcgcggggagcggctgcacatgtttcgggtgggtggactcgtttttcacgcgatcggtcagctcctgccccatcagatggcggatttccactcggccaccgccctgtaccctgtgggttacgaggcaacacgcatctattggtccttgagaactaacaatagaagatgctgttacagatgttcgatcggggaaaataacgggaggcccgagttcgtcatcaaagtgatcgagcagggactggaagatctcgtgttcactgacgcctcgcctcaggccgtatggaacagaattatcgaacctgtggccgccatgcggaaggaagccgatatgctgcgtttgtttcctgagtacctgaagggagaggagctcttcggtctgacggtgcacgccgttctgcggattgcagagagcctgccgggtgtagagagctgtcagaactacctgttccgttatgggcgccatccgttaatggaactgcctctgatgatcaatcctaccgggtgcgcacggagcgagcccaagatattgacccattacaaaagacctcacacgttgaactcaactagcatgtccaaagcttatcagtctacctttaccggagagaccaacacaccctactccaaacaatttgtccatagtaagagcagtcaatatcggagactgagaaccgaatggaagaacaacgtctacttagcacggagtcgcattcaaggcctgggcttgtacgcagccaaagacctggagaagcacactatggtgatcgaatatatcggtactattattcgcaacgaggtagctaaccgacgcgagaaaatctatgaggaacaaaaccgggggatctacatgtttcggataaataatgagcacgtgatcgacgcaaccttgacaggtggaccagcaagatatatcaaccactcttgcgccccaaattgcgtagctgaagttgtaacgttcgataaggaagataagatcatcattatctccagtaggcgcattcctaaaggagaagagctcacatatgactaccaatttgactttgaggacgatcagcataagatcccctgccattgtggcgcctggaactgccggaagtggatgaactag

SEQ ID NO: 282491 - DNA, 16614 bp, Artificial Sequence
  derived and/or modified sequence
atggattcccagaaactagctggcgaagacaaggattccgagcctgctgcagatggtcctgcggcatccgaagatccatctgccacggagtctgacctgccaaatccacacgtaggtgaagtcagcgtgctcagtagtgggagcccccgactgcaggaaaccccacaagattgttctggcggacctgttcgaaggtgcgcactctgtaactgcggggaaccatcccttcacggccagcgcgaattacgccgattcgagctcccattcgactggcccaggtgtcctgtcgtgtcacctggcggatcaccaggccctaacgaggcagttctgccttctgaggatctgagtcagatagggttccccgagggcttaacacccgctcaccttggtgaaccaggtggatcatgctgggcacaccattggtgcgccgcttggtccgcaggggtctggggacaggagggacctgaactgtgtggggtggacaaagccatattcagcggaatttcccagcggtgcagccattgtacccgtttgggggcatctattccttgtcgcagtccaggatgtcctaggctgtaccatttcccctgtgccacggcatcaggatccttcctgtctatgaaaactctccagctgttgtgcccagagcattccgaaggtgccgcatacctggaagaggcccgatgcgctgtttgtgagggccctggggagttgtgcgacctatttttttgcactagctgtgggcaccactaccacggagcctgccttgatacagctttaaccgcgaggaaaagggccggttggcagtgtccagaatgcaaagtgtgccaggcctgtcggaaaccgggaaatgactccaagatgcttgtgtgcgaaacctgcgataagggatatcatactttttgcctaaaaccgccaatggaggaactgccagctcattcctggaagtgcaaagcatgcagggtctgcagagcatgtggggctggcagtgcagaattaaaccccaactcagagtggtttgagaattattctctgtgtcaccgttgccacaaggcccaaggtggacagactatcaggagcgttgctgagcaacatactccggtttgctcccgattttcgcctcctgaaccgggagacactccaacggacgaaccagatgccctttatgtggcgtgccaggggcagccgaagggaggacacgtaacatcaatgcagccaaaagaacccggaccattacaatgcgaagcgaagccgctcggaaaggccggagttcagctagagccacaattggaggcacccctgaacgaggagatgccattgctgccaccaccagaagagtctcctctcagtcctccgcctgaagagtcgcctaccagtccacctcccgaggctagtcgcctgtctccgccacctgaagagttgccagcctctccacttcctgaagcactgcatctcagcagacctctggaagagagccctctgtcccccccaccggaggagagtcccctgagtcctccgcctgagtccagcccttttagccccctagaggagtcccccctgagcccacctgaggagagcccaccctcgcctgcgctcgagaccccactgtccccaccgcctgaggccagccccctgtctccaccatttgaggagagcccgctgtctccacctccggaggagttgccgacttcacctccaccagaagctagtcgcctttctccaccacccgaggaatcaccgatgtccccccctccagaggagtcgccaatgtctccaccgccagaagcgtcaaggctattcccccctttcgaagagagcccactgtctcccccacccgaggagtctcccctgagtccgccaccagaggcctctagactttcgcccccaccagaggattctccaatgagtccacctcctgaagagagccccatgtcaccgccaccggaggtgagtcgactcagtcccctgccggtcgtgagtaggttatcaccgccaccagaagagtccccccttagtccccctccagaggagtctcccacttcccccccaccggaggcctcacgacttagccctccccctgaggacagtcccacaagtccaccacctgaagacagtccagcctcacctccgccagaagactctctaatgagtttaccacttgaggaatcaccattgctacccctccctgaggagccccagctctgccccaggtcagaaggcccacacctaagcccacgaccagaagaaccacatctatctccaagaccagaagaaccgcatttgtctccccaggctgaagagcctcatctgagcccacagcctgaagaaccttgcctttgcgccgtacctgaagaaccacatcttagcccccaagctgagggccctcacctgagtccccagccagaggagctgcacctatcacctcagactgaggagccccacctctctcccgtgccggaggaaccctgtctgtccccacaacctgaggagagtcatctcagtccccagtccgaagaaccttgtctgtcccctcggcctgaagagtcacacctgagtcctgaactggaaaaaccacccctgagcccaagaccagaaaagcccccagaagagcccggtcaatgccccgcacccgaggaactgccactctttccacctccaggagaaccttcgctgagtccacttctgggcgagccagcgctgtccgaaccgggtgagccaccactctcacctcttcctgaagagctccctctttccccttctggcgagccaagtctctccccccaactcatgcctcctgacccgctgccacctcccttgagccccattattacagcggctgcccctccagctctgtcccccctgggagaattggaataccctttcggtgcaaaaggagattcagatccggagtcccctttagctgcacctatcctcgagacacccatctccccaccacctgaagccaactgtaccgatcccgagcccgtcccgccaatgatcctacccccaagccccggaagtcccgttggtccagctagccccattctgatggagcctctgccgccacagtgcagtccactgcttcagcacagcttggtgcctcagaactcacctccaagccagtgttcccctccagcactccccctgagtgtccctagcccgctgtcaccaataggaaaagtcgtgggcgtgtccgatgaggccgagttgcacgaaatggagaccgagaaggtgtctgagcccgagtgtccggcactggagccaagcgccacgagtccccttcctagccccatgggtgacttatcctgccccgctccgtcccctgccccagccctggacgacttctccggcttgggagaggataccgcgcctttagacggcatcgacgctcccggtagccagcccgaacccggtcagacacccggatcactggcttcagaattgaagggcagccccgttttgttagatccagaggagctggcccctgtgacccctatggaagtgtatccggaatgtaaacagacagcaggtcaggggtccccttgcgaagaacaggaagagcctagggcacccgtggcccctactccacccactctgattaaatcagacattgtgaacgagatctcaaacttatcgcagggagacgctagcgcctcctttccaggcagtgagccactcctggggagccccgatccagaggggggtggttcactatccatggagctgggcgtctctacggacgtgtctcccgcacgcgacgagggctcactcaggctgtgcacagactcgctccccgagaccgatgattccctcctgtgcgatgctggcaccgccattagcggaggcaaagccgagggggagaaaggcaggagaaggtcttccccggctaggtctagaataaaacaaggtaggtcctcaagcttccctggcagaagaaggcctagggggggagcgcatgggggtagaggcagaggcagggcccgtcttaaatctaccgctagctccatcgaaacactagtggtggccgacatcgatagctccccctctaaggaggaagaggaggaggatgacgacactatgcaaaatactgttgtgctgttcagcaacacggacaagttcgttttgatgcaggacatgtgcgtggtttgcggaagtttcgggcgaggggcagaaggacatctattggcgtgctcccaatgttcacagtgttatcatccgtactgtgtcaacagtaaaattaccaaggtaatgttactcaaaggttggcgctgcgtggagtgcatcgtgtgtgaagtgtgcggccaggcctctgacccgtcaagactcctgctgtgcgacgattgtgacatttcctaccatacctattgcttagacccaccacttcttacggtcccaaagggaggttggaagtgtaaatggtgcgtgtcttgtatgcaatgtggcgcagctagtcccggtttccattgcgagtggcagaactcgtacactcactgtggaccatgtgcttcactcgttacttgtcctatttgtcacgcaccttacgtcgaagaggacttgctgatccagtgcaggcactgcgagagatggatgcatgccggatgcgaaagcctgtttactgaggatgacgtggaacaagcagccgatgaggggttcgattgtgtcagttgccagccctatgttgttaagcccgttgctccagtcgcccctccagaactcgtacccatgaaagtgaaggagcctgagcctcagtatttcagatttgagggtgtgtggcttaccgagactgggatggcccttctccgcaacctgactatgtccccgctgcacaagaggcgccaacggaggggaagacttgggttgcctggggaggccggactggagggtagtgaacctagcgacgccctcgggcctgatgacaaaaaagatggcgaccttgacactgacgaactgttgaaaggtgaaggaggagtggaacacatggagtgcgagatcaagctggagggtcctgtttcccccgatgtcgagccaggaaaagaggagaccgaagaatctaagaagaggaaaagaaagccttatagacccggtatcgggggattcatggtgcgacagaggaaatctcatacacgaaccaaaaagggccctgcggctcaagctgaggttctgagtggggacggccagcccgacgaagtgattccagccgacctgcccgctgagggcgctgtcgagcaatcactggccgaaggagacgaaaagaagaagcagcaaagaagaggcaggaagaagtctaagcttgaagacatgttcccggcataccttcaggaagctttctttggaaaagaactactcgacctgagtcgaaaagcattgttcgccgtgggcgttgggaggcctagtttcggcttaggcaccccgaaggcaaaaggtgatgggggttctgagaggaaggagttacccacatctcagaaaggcgacgatggtccagacatcgccgatgaggagagcagggggttagaggggaaggcggacacacctggtcctgaggatggtggcgtcaaggcctctccggtaccgtcagaccccgagaagcctggaacacccggagagggaatgttgtcgtctgacctggaccggatttctactgaggaacttcctaaaatggaatctaaggaccttcagcagctttttaaagacgtgttgggcagcgaaagagaacagcacctgggctgtggtaccccgggacttgaggggtccaggactcccctgcagcggccattcctccaggggggattacccctaggaaacctgccaagttcctcccccatggactcataccccggtctgtgtcagtctccctttttggatagtcgcgaaagagggggtttcttctccccagaacccggagaaccggatagcccctggactggatccggcggaacaacgccgagcacgccaaccacccctacaaccgaaggggagggggacggcttatcctataatcagagaagtcttcagagatgggagaaagatgaagagttgggtcaattgtcaaccatttctcctgtgctatatgcaaacatcaactttccaaacctgaaacaagattatcccgattggagctcccgctgtaaacaaatcatgaagttgtggaggaaggtgccggctgcagacaaggccccatatctgcaaaaagccaaagataacagagcggctcataggatcaataaagtacagaaacaggctgaaagtcagatcaataagcagacgaaggttggcgatatcgctagaaaaaccgatcggcctgccctgcaccttagaataccccctcagccaggcgcattaggctcgcctcccccagcagccgctcctacaatctttatcggctctcctaccacaccagcaggactctctacatccgcggatggttttctgaaaccacccgcagggagcgttcccggaccggactctccaggagagttgttccttaagctgcccccacaggtcccagcccaggtaccttcccaggatccctttgggttggcacctgcatatcccctcgagcctcggtttcccaccgccccacctacttacccaccctatccctctcccacaggcgcacccgctcaacctcctatgctgggagcaagcagtagacccggtgctggacagccaggcgagttccacacaacacccccaggcacccctaggcatcagccctccacacccgatcccttccttaaaccgaggtgtccctctctggataacctcgccgttcccgaatcgccaggagtcggaggagggaaagcatccgaacccctgctgagcccgccaccttttggagagtcgcgcaaggctctcgaagtgaaaaaggaagagcttggagcgtcttcaccctcgtatggcccacctaacttgggcttcgtagacagtccatcttccgggactcacctggggggtctagagctcaaaacccctgacgtcttcaaagctcctcttacaccacgggcttctcaggtggaacctcaaagccccggtctgggcttgagaccacaggaaccacccccagcacaggccctcgccccatcgccaccctctcatcccgatatcttccgccctgggagttataccgacccctatgcacagccacccctgacccccagaccacagccacctccaccagaatcgtgctgcgctcttccccctagatccttgccttccgaccctttttcaagggttccagctagcccccagagccagagtagcagtcagtcacccctgactcccagacctctctcagccgaggccttttgtccttcccccgtgacccctaggtttcaatccccggacccgtattccagacccccttcgcgtccacagtcccgcgatcccttcgcccctctgcacaagcctccgagacctcagccccctgaagtggcatttaaggccggttccttggcgcatacgtccttgggtgctgggggattcccagccgctctcccagctggacctgccggagagctccacgctaaggtgccttctggacaaccccctaactttgtcaggagtcccggaactggggcttttgttggaactccatctccgatgaggtttacatttcctcaggctgttggcgagccctcccttaagccccctgtaccccagccaggtcttccacccccacatgggattaatagccatttcggaccgggaccaacccttggaaagccccagagtacgaattacactgtggccactgggaattttcacccaagcggttccccccttggaccgagcagcggatccactggcgagagctatggactgtcaccactgcgaccgccaagtgttttacctccccctgctcctgacggcagtctgccatatctcagccatggagcctcccagcgttccggaatcaccagccctgtggagaaaagggaagaccctgggacgggaatgggatcctctttggctaccgccgagctgccaggcacccaggatcctggaatgagcggactcagtcaaaccgaactggaaaaacagcgtcagagacagcggttgcgggaactgcttattcggcagcagatacagcgtaatacgcttcggcaagaaaaagaaactgcggctgcggcagcaggagctgtagggcctccaggcagctggggggcagagccgagctctcccgctttcgagcagctgagcagaggacagacacctttcgccggtacacaagataagtccagtctggttggcctgcccccaagcaaattatcaggtccaattctgggaccgggatcattcccctcggatgatagactgagcaggccaccccctcccgctacaccaagcagcatggatgtaaattcccgtcaactggtcggcggttctcaggcgttttatcaacgggctccctaccccggttcgttgccattacagcagcagcaacaacagctctggcaacagcagcaggccactgccgctacctctatgcgctttgcaatgagcgctcgcttcccaagcacccctgggcctgaactaggtagacaggcccttggatctcccctcgctggcatctcaacccgcttgcccggacccggagagccggtgcctgggcctgcaggccctgcccaatttatcgagttgcgccataatgtccagaagggtctgggcccaggtgggacaccattccccggtcagggtcccccacagaggccccgtttttacccggtgagtgaagaccctcaccgcctggcccctgaaggcctccgaggcctggcggttagcggtttgccgcctcaaaagccgtcagcccctccggcacccgagctgaacaatagcttgcacccaacaccacacaccaaagggccaacccttccaacaggcctggaattggtgaacagacccccttctagcacagaattgggcaggcctaaccccctagcccttgaagcaggtaagttaccttgcgaggatcctgagctcgatgacgacttcgatgcccataaggcgttggaggatgatgaggagctggcacatctgggcttaggtgtggacgtggctaaaggagatgacgaattgggcaccctggaaaatctcgaaacaaacgatccccacctggacgatctgctgaatggcgatgagttcgatctgctggcctatacggaccccgagctcgacacaggcgataagaaggatatcttcaatgagcatctgcggctggtggagagtgccaacgaaaaagccgagcgcgaggctctactgaggggtgtggagccgggtccactcgggccagaagagcgcccaccaccagccgctgatgctagcgagcccagattagcatctgtcctcccggaagtgaaacccaaagttgaggaggggggtaggcatcctagcccttgtcagttcaccatcgcaacaccaaaagtggaaccagcccctgcagccaactcactggggctgggactgaaacccggtcagagtatgatgggctcacgggatactcgcatgggcaccggcccattctcgagttctggtcatactgcagagaaggcttccttcggtgccacgggaggcccacctgcccacttgttgactcccagcccattgtcgggtccaggtgggtcttctttgctagagaagtttgagctggagtctggggctttgacactccccggtggtccggcagccagcggagacgagctggacaagatggagtccagcctggttgccagtgagctcccgctgcttattgaggacctgctggaacatgaaaagaaagaactccagaagaagcagcaactcagtgcccagctccaaccagcccaacaacagcagcagcagcaacagcagcattccctgctgtccgcccctggccctgcacaggctatgtcactcccgcacgagggttcatcacctagcctggcaggaagccagcaacagctttccctgggtctggccggagccagacagcccggactacctcagcccttgatgccgacacagccgccagcacacgccctgcaacagcgtctcgccccaagcatggccatggtgagcaatcagggacatatgctctctggccaacatggcggtcaggccggactggttccccagcagtcttcacagcccgtgttgtctcagaaacctatgggcaccatgccccctagcatgtgtatgaaaccacagcagttagccatgcagcagcaactggctaattctttcttccctgatacggacctcgacaagtttgctgcggaagatatcatcgatcctatcgcaaaggccaaaatggtcgcactaaaaggcataaagaaggtaatggcccaggggagcatcggggtggcacctggtatgaatcgacagcaggtcagtttattagcgcagcggctgagcggtggaccgtcttcagacctccagaaccacgttgccgctgggagtggccaagagaggtctgccggtgatccttctcagcccaggcctaacccaccgaccttcgcccaaggcgtgatcaacgaggccgatcagaggcagtacgaggaatggttattccacacccagcagctactgcagatgcagttgaaagtgctcgaggaacagattggcgtacaccgaaagagtcgaaaagcgctttgcgctaagcagcgcactgcaaagaaagcagggagagagtttcccgaggccgatgctgaaaaactaaaattagtgaccgaacagcagtctaagattcagaaacagctggaccaagtccggaagcagcaaaaggaacatacaaatctgatggccgagtacaggaacaagcagcagcagcagcagcagcaacagcagcagcagcagcagcagcattcggccgtactggcacttagccccagccagagccccaggttgctcactaaacttcccggtcaacttctgcccggacacggcctgcagcctccacagggccctcccggagggcaggcgggtgggctaagactaactcccggagggatggctctcccgggtcagccaggaggcccattcctaaataccgcactggcccagcagcaacagcagcagcacagcggcggagccggtagtctggcgggaccctcggggggattctttcccggaaatctcgctctgcggtcactggggcctgactctcgcctactgcaggaaaggcagttgcagctccagcagcagcgaatgcagctggctcagaaactgcagcagcaacagcaacagcagcagcagcaacagcacctactgggtcaagtcgccatccagcagcagcagcaacaaggacccggagtacagaccaaccaggctctcggaccaaagccacaaggcctcatgccaccgagttcacatcagggtctgctcgtgcagcagctttcaccccagccgcctcaagggcctcaaggcatgctcgggcctgcccaggtcgcagtgctccagcaacagcaccccggtgctcttggaccccagggtccccaccggcaggtgttgatgactcagtcacgtgtgttgtcatctccccaattggcccagcaggggcagggactgatgggccaccgactggtgacagctcagcagcagcaacagcagcagcagcatcaacagcaggggtctatggctggcttaagtcatctgcaacagtctctgatgtctcatagtgggcagcccaagctcagcgcccagccaatgggttctctgcagcagttacaacagcagcagcaattacagcagcagcagcagctgcagcagcaacaacaacaacaactacagcagcaacagcagcttcagcaacagcagctccaacagcagcagcagcaacaacagctgcagcaacagcagcagcagcagttacagcagcagcagcagcagctccagcaacagcagcaacagcaacagcagcagttccagcagcaacaacaacagcagcaaatgggactacttaaccagtccaggaccctgttatctccccagcaacagcagcagcagcaggtggcacttggcccagggatgccagctaaaccgctgcaacacttttcttcccccggagccctaggacctactctcttgcttactggcaaagagcagaacactgtggatcctgccgtgagctctgaagccacagagggcccatccactcatcaggggggacccttggctattggcaccactcctgagagcatggcaaccgagcccggtgaggtcaagccttcattatccggtgactcccagctgttactagtccagccacagccacaaccgcaaccatccagtctacagctccaaccgcctctccgccttcccggacaacagcagcagcaagtcagcttactccatactgccggaggtgggtctcatgggcagctgggatccgggagttctagtgaagctagctccgttcctcatctgttagcgcagccctcagtgagtctgggggaccagccgggtagcatgacccagaatttactgggacctcaacagcccatgttggaaagaccaatgcagaacaacacgggccctcagcccccaaagccagggccagttctccaaagcgggcagggcctcccaggagtcggtataatgcctaccgtgggacagctgagagctcaactgcagggcgtgctggcaaagaacccacagctgcggcacttatctcctcaacagcagcagcagcttcaggccctgctgatgcagcgccagcttcagcagagtcaggccgtgcgccagacacccccataccaggagcctgggacccagacaagtccactacagggcctgttaggatgtcagccacaacttggcggttttcctggacctcagaccggtccactccaggagcttggcgctgggcctcgaccccagggccctcctaggcttcctgccccacctggagccctgagcactggaccggtgctcggacctgtccaccctacacctccaccctcaagtccccaagaacctaagcggccaagtcaactcccttctccaagctcgcagctgcctaccgaagcccagctgcccccaacccacccagggactccaaagccacagggcccaacactggagcccccaccaggcagggtgtctccagcggctgctcagctcgctgacacacttttttcaaaaggtttaggcccatgggacccccctgacaaccttgctgaaacccaaaagcctgagcagtcaagtctcgtacctggacacctcgaccaggttaatggccaggtggtccctgaggcttctcagttgtcaattaagcaggaacctagagaggaaccatgcgctctgggcgctcaatctgtgaaaagagaagcaaatggcgagcccattggcgctcccggtaccagcaaccacttgctactggctggccctaggtccgaagccggtcatctgctcctgcaaaagctccttcgtgccaaaaacgtgcagctgtcaaccggccgaggttccgagggcctcagagcagagataaatggacacatagactccaaactcgctggcttagagcagaagctgcagggaacgcctagtaacaaggaggacgctgccgcacggaagcctttgactcccaagccaaaacgggtgcagaaagcctcggacaggttagtctcgtcacgcaagaaactgagaaaggaagatggggttcgggctagtgaagcactcctgaagcagttgaagcaggagctcagtttactgccactgaccgaacctgctatcaccgctaacttttcgctcttcgcaccctttggatctggttgtccagtgaacggccagagccaactccgcggtgcctttggctctggggcactgcccacgggacccgattattattcacagttgcttactaagaataacttgtctaaccccccaacacccccaagcagcttgcctccaacaccgccacctagcgtgcaacagaaaatggtgaacggagttacccccagtgaagaactcggagaacaccccaaggacgcggcatccgcaagagattctgaaagggctctgagggacacatccgaggtgaagagtctggacttgctggcggctctgcctacccctccgcataaccagactgaggatgtgaggatggagagcgatgaagatagcgactcacccgattcaatcgtgcctgcctcttcacccgaatccatcctgggcgaagaagcccctcggtttccacatctggggtccgggcgatgggagcaggaagatcgcgctttgtctcccgtgatacctctaatcccaagagcctctattcctgtgttccctgacactaagccttatggagccttgggtctggaggttcctggaaaactgccagtaaccacatgggagaaagggaaggggtctgaggtgtcagtgatgctgaccgtctctgctgccgctgccaagaatctgaacggggtaatggttgctgtagccgagctgctgagtatgaaaatacctaactcgtacgaagttctttttccagagtcgccggcaagagctgggacagagccaaagaagggcgaagctgaaggaccgggagggaaggagaagggactggaaggtaaatcacccgatacagggccagactggctcaaacagtttgacgccgtgttgccgggttacaccttgaaaagtcaactcgatatccttagtctcctgaagcaggaaagtcctgccccagaacctcccacccaacacagctacacttacaatgtgtctaatctggacgtgcgtcagttatctgcgcctcctccagaggaaccttcgcccccaccctcccctctggctcccagtcctgctagcccaccaacggagcctttagttgagctaccaaccgaaccgctcgcggaacctcctgtgccttcccccctacctttagcgtctagccccgaatcagcacggcctaaaccgagggcgcgtccaccagaagagggagaggactcacgccctccaagacttaaaaaatggaaaggcgtccgctggaaacggttacgtctcctgctgactattcagaaagggtctggcagacaggaggatgagagggaggtggctgaatttatggagcagctggggacagccctgcggccagacaaagtccctcgagatatgagacggtgttgcttttgccacgaagagggcgatggggctacagacggccctgccaggctattgaacttggacctagacctatgggtccatctcaattgtgctctgtggtctacagaagtttatgagacccagggcggagccttgatgaacgttgaggtggcacttcaccgtggcctgcttacaaaatgctcactctgccagcgaacaggagctacctcttcatgcaaccgcatgaggtgccctaatgtgtaccatttcgcttgtgcgatccgggctaagtgtatgttttttaaggacaaaacgatgttgtgccccatgcacaagatcaaaggaccatgcgagcaggagttaagcagttttgccgtgtttcgtagagtctatattgaaagagacgaagttaagcagatcgcttctatcatccaaagaggcgagcgactccacatgtttagggtcggcggactggtgttccacgccatcggtcagctgctgcctcaccaaatggccgacttccattctgctaccgccctttaccctgtgggatacgaagccacaaggatctattggtcactccggaccaacaatcggagatgttgctaccggtgctcgatcggtgagaacaacggtcgccctgagtttgtgattaaggtgattgagcaaggtctcgaggacctcgtatttacagacgcctctccacaggctgtgtggaaccggataatcgagcccgtcgccgctatgcggaaagaagcagatatgttgcggctgtttccagagtatctgaagggtgaggaactgttcgggttaactgtgcacgctgtcctaagaatagcggagtccctccccggagtcgagtcctgtcagaattacttatttcggtatggccgtcatcccttgatggaattgccattgatgattaatcccaccggttgtgccagatctgagcccaagattctgacccactataagcgtccccacaccctaaatagtacctccatgagcaaagcctaccagagcacctttaccggtgagactaacaccccctacagcaagcagttcgtgcacagcaaaagcagtcagtaccggagactgagaacagagtggaagaacaacgtgtacctggccagatcgaggatccagggccttggactctacgccgctaaggatctggagaagcatacaatggtgatcgagtacataggcaccataatcagaaatgaggtagccaataggcgcgagaagatatatgaagagcagaatcgaggcatctacatgttccggattaataacgagcacgtgattgacgctaccctgaccggcggacccgctaggtatatcaatcattcctgcgccccaaattgcgtggccgaagtggtgacctttgacaaagaagacaagatcattattatttcctcaagaagaattccgaaaggcgaggagttgacgtatgactatcagttcgacttcgaggatgatcagcataagatcccatgtcactgtggtgcatggaactgccgcaagtggatgaattac

SEQ ID NO: 282492 - DNA, 16614 bp, Artificial Sequence
  derived and/or modified sequence
atggacagccagaagctggccggcgaggacaaggacagcgagcccgccgccgacggccccgccgccagcgaggaccccagcgccaccgagagcgacctgcccaacccccacgtgggcgaggtgagcgtgctgagcagcggcagccccagactgcaggagaccccccaggactgcagcggcggccccgtgagaagatgcgccctgtgcaactgcggcgagcccagcctgcacggccagagagagctgagaagattcgagctgcccttcgactggcccagatgccccgtggtgagccccggcggcagccccggccccaacgaggccgtgctgcccagcgaggacctgagccagatcggcttccccgagggcctgacccccgcccacctgggcgagcccggcggcagctgctgggcccaccactggtgcgccgcctggagcgccggcgtgtggggccaggagggccccgagctgtgcggcgtggacaaggccatcttcagcggcatcagccagagatgcagccactgcaccagactgggcgccagcatcccctgcagaagccccggctgccccagactgtaccacttcccctgcgccaccgccagcggcagcttcctgagcatgaagaccctgcagctgctgtgccccgagcacagcgagggcgccgcctacctggaggaggccagatgcgccgtgtgcgagggccccggcgagctgtgcgacctgttcttctgcaccagctgcggccaccactaccacggcgcctgcctggacaccgccctgaccgccagaaagagagccggctggcagtgccccgagtgcaaggtgtgccaggcctgcagaaagcccggcaacgacagcaagatgctggtgtgcgagacctgcgacaagggctaccacaccttctgcctgaagccccccatggaggagctgcccgcccacagctggaagtgcaaggcctgcagagtgtgcagagcctgcggcgccggcagcgccgagctgaaccccaacagcgagtggttcgagaactacagcctgtgccacagatgccacaaggcccagggcggccagaccatcagaagcgtggccgagcagcacacccccgtgtgcagcagattcagcccccccgagcccggcgacacccccaccgacgagcccgacgccctgtacgtggcctgccagggccagcccaagggcggccacgtgaccagcatgcagcccaaggagcccggccccctgcagtgcgaggccaagcccctgggcaaggccggcgtgcagctggagccccagctggaggcccccctgaacgaggagatgcccctgctgcccccccccgaggagagccccctgagccccccccccgaggagagccccaccagccccccccccgaggccagcagactgagccccccccccgaggagctgcccgccagccccctgcccgaggccctgcacctgagcagacccctggaggagagccccctgagccccccccccgaggagagccccctgagccccccccccgagagcagccccttcagccccctggaggagagccccctgagcccccccgaggagagcccccccagccccgccctggagacccccctgagccccccccccgaggccagccccctgagcccccccttcgaggagagccccctgagccccccccccgaggagctgcccaccagccccccccccgaggccagcagactgagccccccccccgaggagagccccatgagccccccccccgaggagagccccatgagccccccccccgaggccagcagactgttcccccccttcgaggagagccccctgagccccccccccgaggagagccccctgagccccccccccgaggccagcagactgagccccccccccgaggacagccccatgagccccccccccgaggagagccccatgagccccccccccgaggtgagcagactgagccccctgcccgtggtgagcagactgagccccccccccgaggagagccccctgagccccccccccgaggagagccccaccagccccccccccgaggccagcagactgagccccccccccgaggacagccccaccagccccccccccgaggacagccccgccagccccccccccgaggacagcctgatgagcctgcccctggaggagagccccctgctgcccctgcccgaggagccccagctgtgccccagaagcgagggcccccacctgagccccagacccgaggagccccacctgagccccagacccgaggagccccacctgagcccccaggccgaggagccccacctgagcccccagcccgaggagccctgcctgtgcgccgtgcccgaggagccccacctgagcccccaggccgagggcccccacctgagcccccagcccgaggagctgcacctgagcccccagaccgaggagccccacctgagccccgtgcccgaggagccctgcctgagcccccagcccgaggagagccacctgagcccccagagcgaggagccctgcctgagccccagacccgaggagagccacctgagccccgagctggagaagccccccctgagccccagacccgagaagccccccgaggagcccggccagtgccccgcccccgaggagctgcccctgttccccccccccggcgagcccagcctgagccccctgctgggcgagcccgccctgagcgagcccggcgagccccccctgagccccctgcccgaggagctgcccctgagccccagcggcgagcccagcctgagcccccagctgatgccccccgaccccctgcccccccccctgagccccatcatcaccgccgccgccccccccgccctgagccccctgggcgagctggagtaccccttcggcgccaagggcgacagcgaccccgagagccccctggccgcccccatcctggagacccccatcagccccccccccgaggccaactgcaccgaccccgagcccgtgccccccatgatcctgccccccagccccggcagccccgtgggccccgccagccccatcctgatggagcccctgcccccccagtgcagccccctgctgcagcacagcctggtgccccagaacagcccccccagccagtgcagcccccccgccctgcccctgagcgtgcccagccccctgagccccatcggcaaggtggtgggcgtgagcgacgaggccgagctgcacgagatggagaccgagaaggtgagcgagcccgagtgccccgccctggagcccagcgccaccagccccctgcccagccccatgggcgacctgagctgccccgcccccagccccgcccccgccctggacgacttcagcggcctgggcgaggacaccgcccccctggacggcatcgacgcccccggcagccagcccgagcccggccagacccccggcagcctggccagcgagctgaagggcagccccgtgctgctggaccccgaggagctggcccccgtgacccccatggaggtgtaccccgagtgcaagcagaccgccggccagggcagcccctgcgaggagcaggaggagcccagagcccccgtggcccccaccccccccaccctgatcaagagcgacatcgtgaacgagatcagcaacctgagccagggcgacgccagcgccagcttccccggcagcgagcccctgctgggcagccccgaccccgagggcggcggcagcctgagcatggagctgggcgtgagcaccgacgtgagccccgccagagacgagggcagcctgagactgtgcaccgacagcctgcccgagaccgacgacagcctgctgtgcgacgccggcaccgccatcagcggcggcaaggccgagggcgagaagggcagaagaagaagcagccccgccagaagcagaatcaagcagggcagaagcagcagcttccccggcagaagaagacccagaggcggcgcccacggcggcagaggcagaggcagagccagactgaagagcaccgccagcagcatcgagaccctggtggtggccgacatcgacagcagccccagcaaggaggaggaggaggaggacgacgacaccatgcagaacaccgtggtgctgttcagcaacaccgacaagttcgtgctgatgcaggacatgtgcgtggtgtgcggcagcttcggcagaggcgccgagggccacctgctggcctgcagccagtgcagccagtgctaccacccctactgcgtgaacagcaagatcaccaaggtgatgctgctgaagggctggagatgcgtggagtgcatcgtgtgcgaggtgtgcggccaggccagcgaccccagcagactgctgctgtgcgacgactgcgacatcagctaccacacctactgcctggacccccccctgctgaccgtgcccaagggcggctggaagtgcaagtggtgcgtgagctgcatgcagtgcggcgccgccagccccggcttccactgcgagtggcagaacagctacacccactgcggcccctgcgccagcctggtgacctgccccatctgccacgccccctacgtggaggaggacctgctgatccagtgcagacactgcgagagatggatgcacgccggctgcgagagcctgttcaccgaggacgacgtggagcaggccgccgacgagggcttcgactgcgtgagctgccagccctacgtggtgaagcccgtggcccccgtggccccccccgagctggtgcccatgaaggtgaaggagcccgagccccagtacttcagattcgagggcgtgtggctgaccgagaccggcatggccctgctgagaaacctgaccatgagccccctgcacaagagaagacagagaagaggcagactgggcctgcccggcgaggccggcctggagggcagcgagcccagcgacgccctgggccccgacgacaagaaggacggcgacctggacaccgacgagctgctgaagggcgagggcggcgtggagcacatggagtgcgagatcaagctggagggccccgtgagccccgacgtggagcccggcaaggaggagaccgaggagagcaagaagagaaagagaaagccctacagacccggcatcggcggcttcatggtgagacagagaaagagccacaccagaaccaagaagggccccgccgcccaggccgaggtgctgagcggcgacggccagcccgacgaggtgatccccgccgacctgcccgccgagggcgccgtggagcagagcctggccgagggcgacgagaagaagaagcagcagagaagaggcagaaagaagagcaagctggaggacatgttccccgcctacctgcaggaggccttcttcggcaaggagctgctggacctgagcagaaaggccctgttcgccgtgggcgtgggcagacccagcttcggcctgggcacccccaaggccaagggcgacggcggcagcgagagaaaggagctgcccaccagccagaagggcgacgacggccccgacatcgccgacgaggagagcagaggcctggagggcaaggccgacacccccggccccgaggacggcggcgtgaaggccagccccgtgcccagcgaccccgagaagcccggcacccccggcgagggcatgctgagcagcgacctggacagaatcagcaccgaggagctgcccaagatggagagcaaggacctgcagcagctgttcaaggacgtgctgggcagcgagagagagcagcacctgggctgcggcacccccggcctggagggcagcagaacccccctgcagagacccttcctgcagggcggcctgcccctgggcaacctgcccagcagcagccccatggacagctaccccggcctgtgccagagccccttcctggacagcagagagagaggcggcttcttcagccccgagcccggcgagcccgacagcccctggaccggcagcggcggcaccacccccagcacccccaccacccccaccaccgagggcgagggcgacggcctgagctacaaccagagaagcctgcagagatgggagaaggacgaggagctgggccagctgagcaccatcagccccgtgctgtacgccaacatcaacttccccaacctgaagcaggactaccccgactggagcagcagatgcaagcagatcatgaagctgtggagaaaggtgcccgccgccgacaaggccccctacctgcagaaggccaaggacaacagagccgcccacagaatcaacaaggtgcagaagcaggccgagagccagatcaacaagcagaccaaggtgggcgacatcgccagaaagaccgacagacccgccctgcacctgagaatccccccccagcccggcgccctgggcagccccccccccgccgccgcccccaccatcttcatcggcagccccaccacccccgccggcctgagcaccagcgccgacggcttcctgaagccccccgccggcagcgtgcccggccccgacagccccggcgagctgttcctgaagctgcccccccaggtgcccgcccaggtgcccagccaggaccccttcggcctggcccccgcctaccccctggagcccagattccccaccgccccccccacctaccccccctaccccagccccaccggcgcccccgcccagccccccatgctgggcgccagcagcagacccggcgccggccagcccggcgagttccacaccaccccccccggcacccccagacaccagcccagcacccccgaccccttcctgaagcccagatgccccagcctggacaacctggccgtgcccgagagccccggcgtgggcggcggcaaggccagcgagcccctgctgagccccccccccttcggcgagagcagaaaggccctggaggtgaagaaggaggagctgggcgccagcagccccagctacggcccccccaacctgggcttcgtggacagccccagcagcggcacccacctgggcggcctggagctgaagacccccgacgtgttcaaggcccccctgacccccagagccagccaggtggagccccagagccccggcctgggcctgagaccccaggagcccccccccgcccaggccctggcccccagcccccccagccaccccgacatcttcagacccggcagctacaccgacccctacgcccagccccccctgacccccagaccccagccccccccccccgagagctgctgcgccctgccccccagaagcctgcccagcgaccccttcagcagagtgcccgccagcccccagagccagagcagcagccagagccccctgacccccagacccctgagcgccgaggccttctgccccagccccgtgacccccagattccagagccccgacccctacagcagaccccccagcagaccccagagcagagaccccttcgcccccctgcacaagccccccagaccccagccccccgaggtggccttcaaggccggcagcctggcccacaccagcctgggcgccggcggcttccccgccgccctgcccgccggccccgccggcgagctgcacgccaaggtgcccagcggccagccccccaacttcgtgagaagccccggcaccggcgccttcgtgggcacccccagccccatgagattcaccttcccccaggccgtgggcgagcccagcctgaagccccccgtgccccagcccggcctgccccccccccacggcatcaacagccacttcggccccggccccaccctgggcaagccccagagcaccaactacaccgtggccaccggcaacttccaccccagcggcagccccctgggccccagcagcggcagcaccggcgagagctacggcctgagccccctgagaccccccagcgtgctgcccccccccgcccccgacggcagcctgccctacctgagccacggcgccagccagagaagcggcatcaccagccccgtggagaagagagaggaccccggcaccggcatgggcagcagcctggccaccgccgagctgcccggcacccaggaccccggcatgagcggcctgagccagaccgagctggagaagcagagacagagacagagactgagagagctgctgatcagacagcagatccagagaaacaccctgagacaggagaaggagaccgccgccgccgccgccggcgccgtgggcccccccggcagctggggcgccgagcccagcagccccgccttcgagcagctgagcagaggccagacccccttcgccggcacccaggacaagagcagcctggtgggcctgccccccagcaagctgagcggccccatcctgggccccggcagcttccccagcgacgacagactgagcagaccccccccccccgccacccccagcagcatggacgtgaacagcagacagctggtgggcggcagccaggccttctaccagagagccccctaccccggcagcctgcccctgcagcagcagcagcagcagctgtggcagcagcagcaggccaccgccgccaccagcatgagattcgccatgagcgccagattccccagcacccccggccccgagctgggcagacaggccctgggcagccccctggccggcatcagcaccagactgcccggccccggcgagcccgtgcccggccccgccggccccgcccagttcatcgagctgagacacaacgtgcagaagggcctgggccccggcggcacccccttccccggccagggccccccccagagacccagattctaccccgtgagcgaggacccccacagactggcccccgagggcctgagaggcctggccgtgagcggcctgcccccccagaagcccagcgccccccccgcccccgagctgaacaacagcctgcaccccaccccccacaccaagggccccaccctgcccaccggcctggagctggtgaacagaccccccagcagcaccgagctgggcagacccaaccccctggccctggaggccggcaagctgccctgcgaggaccccgagctggacgacgacttcgacgcccacaaggccctggaggacgacgaggagctggcccacctgggcctgggcgtggacgtggccaagggcgacgacgagctgggcaccctggagaacctggagaccaacgacccccacctggacgacctgctgaacggcgacgagttcgacctgctggcctacaccgaccccgagctggacaccggcgacaagaaggacatcttcaacgagcacctgagactggtggagagcgccaacgagaaggccgagagagaggccctgctgagaggcgtggagcccggccccctgggccccgaggagagacccccccccgccgccgacgccagcgagcccagactggccagcgtgctgcccgaggtgaagcccaaggtggaggagggcggcagacaccccagcccctgccagttcaccatcgccacccccaaggtggagcccgcccccgccgccaacagcctgggcctgggcctgaagcccggccagagcatgatgggcagcagagacaccagaatgggcaccggccccttcagcagcagcggccacaccgccgagaaggccagcttcggcgccaccggcggcccccccgcccacctgctgacccccagccccctgagcggccccggcggcagcagcctgctggagaagttcgagctggagagcggcgccctgaccctgcccggcggccccgccgccagcggcgacgagctggacaagatggagagcagcctggtggccagcgagctgcccctgctgatcgaggacctgctggagcacgagaagaaggagctgcagaagaagcagcagctgagcgcccagctgcagcccgcccagcagcagcagcagcagcagcagcagcacagcctgctgagcgcccccggccccgcccaggccatgagcctgccccacgagggcagcagccccagcctggccggcagccagcagcagctgagcctgggcctggccggcgccagacagcccggcctgccccagcccctgatgcccacccagccccccgcccacgccctgcagcagagactggcccccagcatggccatggtgagcaaccagggccacatgctgagcggccagcacggcggccaggccggcctggtgccccagcagagcagccagcccgtgctgagccagaagcccatgggcaccatgccccccagcatgtgcatgaagccccagcagctggccatgcagcagcagctggccaacagcttcttccccgacaccgacctggacaagttcgccgccgaggacatcatcgaccccatcgccaaggccaagatggtggccctgaagggcatcaagaaggtgatggcccagggcagcatcggcgtggcccccggcatgaacagacagcaggtgagcctgctggcccagagactgagcggcggccccagcagcgacctgcagaaccacgtggccgccggcagcggccaggagagaagcgccggcgaccccagccagcccagacccaacccccccaccttcgcccagggcgtgatcaacgaggccgaccagagacagtacgaggagtggctgttccacacccagcagctgctgcagatgcagctgaaggtgctggaggagcagatcggcgtgcacagaaagagcagaaaggccctgtgcgccaagcagagaaccgccaagaaggccggcagagagttccccgaggccgacgccgagaagctgaagctggtgaccgagcagcagagcaagatccagaagcagctggaccaggtgagaaagcagcagaaggagcacaccaacctgatggccgagtacagaaacaagcagcagcagcagcagcagcagcagcagcagcagcagcagcagcacagcgccgtgctggccctgagccccagccagagccccagactgctgaccaagctgcccggccagctgctgcccggccacggcctgcagcccccccagggcccccccggcggccaggccggcggcctgagactgacccccggcggcatggccctgcccggccagcccggcggccccttcctgaacaccgccctggcccagcagcagcagcagcagcacagcggcggcgccggcagcctggccggccccagcggcggcttcttccccggcaacctggccctgagaagcctgggccccgacagcagactgctgcaggagagacagctgcagctgcagcagcagagaatgcagctggcccagaagctgcagcagcagcagcagcagcagcagcagcagcagcacctgctgggccaggtggccatccagcagcagcagcagcagggccccggcgtgcagaccaaccaggccctgggccccaagccccagggcctgatgccccccagcagccaccagggcctgctggtgcagcagctgagcccccagcccccccagggcccccagggcatgctgggccccgcccaggtggccgtgctgcagcagcagcaccccggcgccctgggcccccagggcccccacagacaggtgctgatgacccagagcagagtgctgagcagcccccagctggcccagcagggccagggcctgatgggccacagactggtgaccgcccagcagcagcagcagcagcagcagcaccagcagcagggcagcatggccggcctgagccacctgcagcagagcctgatgagccacagcggccagcccaagctgagcgcccagcccatgggcagcctgcagcagctgcagcagcagcagcagctgcagcagcagcagcagctgcagcagcagcagcagcagcagctgcagcagcagcagcagctgcagcagcagcagctgcagcagcagcagcagcagcagcagctgcagcagcagcagcagcagcagctgcagcagcagcagcagcagctgcagcagcagcagcagcagcagcagcagcagttccagcagcagcagcagcagcagcagatgggcctgctgaaccagagcagaaccctgctgagcccccagcagcagcagcagcagcaggtggccctgggccccggcatgcccgccaagcccctgcagcacttcagcagccccggcgccctgggccccaccctgctgctgaccggcaaggagcagaacaccgtggaccccgccgtgagcagcgaggccaccgagggccccagcacccaccagggcggccccctggccatcggcaccacccccgagagcatggccaccgagcccggcgaggtgaagcccagcctgagcggcgacagccagctgctgctggtgcagccccagccccagccccagcccagcagcctgcagctgcagccccccctgagactgcccggccagcagcagcagcaggtgagcctgctgcacaccgccggcggcggcagccacggccagctgggcagcggcagcagcagcgaggccagcagcgtgccccacctgctggcccagcccagcgtgagcctgggcgaccagcccggcagcatgacccagaacctgctgggcccccagcagcccatgctggagagacccatgcagaacaacaccggcccccagccccccaagcccggccccgtgctgcagagcggccagggcctgcccggcgtgggcatcatgcccaccgtgggccagctgagagcccagctgcagggcgtgctggccaagaacccccagctgagacacctgagcccccagcagcagcagcagctgcaggccctgctgatgcagagacagctgcagcagagccaggccgtgagacagacccccccctaccaggagcccggcacccagaccagccccctgcagggcctgctgggctgccagccccagctgggcggcttccccggcccccagaccggccccctgcaggagctgggcgccggccccagaccccagggcccccccagactgcccgccccccccggcgccctgagcaccggccccgtgctgggccccgtgcaccccacccccccccccagcagcccccaggagcccaagagacccagccagctgcccagccccagcagccagctgcccaccgaggcccagctgccccccacccaccccggcacccccaagccccagggccccaccctggagcccccccccggcagagtgagccccgccgccgcccagctggccgacaccctgttcagcaagggcctgggcccctgggacccccccgacaacctggccgagacccagaagcccgagcagagcagcctggtgcccggccacctggaccaggtgaacggccaggtggtgcccgaggccagccagctgagcatcaagcaggagcccagagaggagccctgcgccctgggcgcccagagcgtgaagagagaggccaacggcgagcccatcggcgcccccggcaccagcaaccacctgctgctggccggccccagaagcgaggccggccacctgctgctgcagaagctgctgagagccaagaacgtgcagctgagcaccggcagaggcagcgagggcctgagagccgagatcaacggccacatcgacagcaagctggccggcctggagcagaagctgcagggcacccccagcaacaaggaggacgccgccgccagaaagcccctgacccccaagcccaagagagtgcagaaggccagcgacagactggtgagcagcagaaagaagctgagaaaggaggacggcgtgagagccagcgaggccctgctgaagcagctgaagcaggagctgagcctgctgcccctgaccgagcccgccatcaccgccaacttcagcctgttcgcccccttcggcagcggctgccccgtgaacggccagagccagctgagaggcgccttcggcagcggcgccctgcccaccggccccgactactacagccagctgctgaccaagaacaacctgagcaacccccccaccccccccagcagcctgccccccacccccccccccagcgtgcagcagaagatggtgaacggcgtgacccccagcgaggagctgggcgagcaccccaaggacgccgccagcgccagagacagcgagagagccctgagagacaccagcgaggtgaagagcctggacctgctggccgccctgcccacccccccccacaaccagaccgaggacgtgagaatggagagcgacgaggacagcgacagccccgacagcatcgtgcccgccagcagccccgagagcatcctgggcgaggaggcccccagattcccccacctgggcagcggcagatgggagcaggaggacagagccctgagccccgtgatccccctgatccccagagccagcatccccgtgttccccgacaccaagccctacggcgccctgggcctggaggtgcccggcaagctgcccgtgaccacctgggagaagggcaagggcagcgaggtgagcgtgatgctgaccgtgagcgccgccgccgccaagaacctgaacggcgtgatggtggccgtggccgagctgctgagcatgaagatccccaacagctacgaggtgctgttccccgagagccccgccagagccggcaccgagcccaagaagggcgaggccgagggccccggcggcaaggagaagggcctggagggcaagagccccgacaccggccccgactggctgaagcagttcgacgccgtgctgcccggctacaccctgaagagccagctggacatcctgagcctgctgaagcaggagagccccgcccccgagccccccacccagcacagctacacctacaacgtgagcaacctggacgtgagacagctgagcgcccccccccccgaggagcccagccccccccccagccccctggcccccagccccgccagcccccccaccgagcccctggtggagctgcccaccgagcccctggccgagccccccgtgcccagccccctgcccctggccagcagccccgagagcgccagacccaagcccagagccagaccccccgaggagggcgaggacagcagaccccccagactgaagaagtggaagggcgtgagatggaagagactgagactgctgctgaccatccagaagggcagcggcagacaggaggacgagagagaggtggccgagttcatggagcagctgggcaccgccctgagacccgacaaggtgcccagagacatgagaagatgctgcttctgccacgaggagggcgacggcgccaccgacggccccgccagactgctgaacctggacctggacctgtgggtgcacctgaactgcgccctgtggagcaccgaggtgtacgagacccagggcggcgccctgatgaacgtggaggtggccctgcacagaggcctgctgaccaagtgcagcctgtgccagagaaccggcgccaccagcagctgcaacagaatgagatgccccaacgtgtaccacttcgcctgcgccatcagagccaagtgcatgttcttcaaggacaagaccatgctgtgccccatgcacaagatcaagggcccctgcgagcaggagctgagcagcttcgccgtgttcagaagagtgtacatcgagagagacgaggtgaagcagatcgccagcatcatccagagaggcgagagactgcacatgttcagagtgggcggcctggtgttccacgccatcggccagctgctgccccaccagatggccgacttccacagcgccaccgccctgtaccccgtgggctacgaggccaccagaatctactggagcctgagaaccaacaacagaagatgctgctacagatgcagcatcggcgagaacaacggcagacccgagttcgtgatcaaggtgatcgagcagggcctggaggacctggtgttcaccgacgccagcccccaggccgtgtggaacagaatcatcgagcccgtggccgccatgagaaaggaggccgacatgctgagactgttccccgagtacctgaagggcgaggagctgttcggcctgaccgtgcacgccgtgctgagaatcgccgagagcctgcccggcgtggagagctgccagaactacctgttcagatacggcagacaccccctgatggagctgcccctgatgatcaaccccaccggctgcgccagaagcgagcccaagatcctgacccactacaagagaccccacaccctgaacagcaccagcatgagcaaggcctaccagagcaccttcaccggcgagaccaacaccccctacagcaagcagttcgtgcacagcaagagcagccagtacagaagactgagaaccgagtggaagaacaacgtgtacctggccagaagcagaatccagggcctgggcctgtacgccgccaaggacctggagaagcacaccatggtgatcgagtacatcggcaccatcatcagaaacgaggtggccaacagaagagagaagatctacgaggagcagaacagaggcatctacatgttcagaatcaacaacgagcacgtgatcgacgccaccctgaccggcggccccgccagatacatcaaccacagctgcgcccccaactgcgtggccgaggtggtgaccttcgacaaggaggacaagatcatcatcatcagcagcagaagaatccccaagggcgaggagctgacctacgactaccagttcgacttcgaggacgaccagcacaagatcccctgccactgcggcgcctggaactgcagaaagtggatgaactag

SEQ ID NO: 282493 - protein, 326 aa, Artificial Sequence
  derived and/or modified sequence
MEFLSEKFALKSPPSKNSDFYMGAGGPLEHVMETLDNESFYSKASAGKCVQAFGPLPRAEHHVRLERTSPCQDSSVNYGITKVEGQPLHTELNRAMDNCNSLRMSPVKGMQEKGELDELGDKCDSNVSSSKKRRHRTTFTSLQLEELEKVFQKTHYPDVYVREQLALRTELTEARVQVWFQNRRAKWRKRERYGQIQQAKSHFAATYDISVLPRTDSYPQIQNNLWAGNASGGSVVTSCMLPRDTSSCMTPYSHSPRTDSSYTGFSNHQNQFSHVPLNNFFTDSLLTGATNGHAFETKPEFERRSSSIAVLRMKAKEHTANISWAM

SEQ ID NO: 282494 - DNA, 1320 bp, Artificial Sequence
  derived and/or modified sequence
gattatggagtttctgagcgagaagtttgccctcaagagccctccgagtaaaaacagtgacttttacatgggcgcaggaggtcctctggagcacgttatggagacgctggacaatgagtccttttacagcaaagcgtctgcaggcaaatgcgtgcaggccttcggacccctgccccgcgccgagcatcacgtgcgcttggagaggacctcgccctgtcaggacagcagcgtgaactatgggatcactaaagtagaaggacagccccttcacaccgaactgaatagagctatggacaactgtaacagtctccgaatgtctcccgtgaaagggatgcaagagaagggagagctggatgaacttggggataaatgtgatagcaatgtatccagcagtaagaaacggaggcaccgaaccaccttcaccagtttgcagctagaggagctggagaaagtctttcagaaaactcattacccggatgtgtatgtcagagaacagcttgctctgaggacagagctcactgaggccagggtccaggtttggtttcaaaatcgaagggccaaatggagaaaaagggaacgttatggccaaatacaacaagcgaaaagccattttgctgccacctatgatatatcagttttgccaaggactgacagctacccacagattcagaacaatttgtgggcaggaaatgcaagtggtggttctgtggttacttcatgcatgttaccacgtgacacttcctcctgtatgacaccttattctcactcgcctcggacagattccagttacacggggttttcaaaccaccagaaccagttcagccacgtgcccctcaacaattttttcactgactctcttcttactggggcaaccaatggacatgcatttgaaacaaagccagagtttgaaaggaggtcttccagtatcgcagttcttcgaatgaaagccaaggagcacaccgccaatatttcatgggccatgtaacatacagtactcttttatttttcttttaatagcaaagttaaacattcttatttctcatatttaaaggataccacaataagctgctgtgtgtggaattgctaaaggtcaagatattcagtgagaccagcttaaatgaatagttgttatttaacattaaaatctaagaatgaacctctgaaaagactaaataggtttaccatgtgccagtctccacaaaccctgttttagtagtaaggttttctttttctattgtacaagtcaatgaaatatgatcacgcaacttattaaagaataaatgtgttaaacaaaaaaaaaaaaaaaaaaaaaaaaaaaaa

SEQ ID NO: 282495 - DNA, 981 bp, Artificial Sequence
  derived and/or modified sequence
atggagtttcttagcgaaaaatttgccctgaaaagcccccccagtaaaaatagcgacttttacatgggggccggcggacccttggaacacgtcatggaaaccctggataatgaaagcttttattccaaggctagcgcaggaaagtgcgtgcaggcatttggtcctcttcccagggctgagcaccatgtgcgactggagcggaccagtccatgccaagatagctctgtgaattacgggattactaaggtggaaggacagcccctccacactgagctgaatagggcgatggataactgcaactcactgcgcatgagtcccgtgaaaggcatgcaggaaaagggagaactggatgaactcggggacaaatgtgatagcaatgtatcatcttccaaaaaacgtcgccatagaaccacctttactagccttcaactggaggagcttgagaaggtgttccagaagacgcattaccctgatgtgtatgtaagggaacagttggccctgcgcacagaactgactgaggcacgcgtccaggtgtggttccagaaccgacgcgccaaatggcggaagcgcgagaggtatgggcagatccaacaagctaaaagtcacttcgctgctacttacgacattagcgtcctcccgagaaccgattcctaccctcagattcagaataacctttgggccggcaacgcgagcggtggctccgtagtgacttcctgcatgctgccacgagatacctcaagctgtatgacaccctactcccactctcccagaacagatagctcttacacaggtttttccaaccatcagaatcagttctctcacgttcccctcaacaacttttttacggattccctgctgactggcgccaccaatgggcatgccttcgaaaccaagcccgaattcgagagaagatcttccagtatcgcggtgctgcgaatgaaagctaaggagcataccgccaatatcagctgggctatgtag

SEQ ID NO: 282496 - DNA, 981 bp, Artificial Sequence
  derived and/or modified sequence
atggagttcctgtctgagaagtttgccctgaagagcccccccagcaagaacagcgacttctacatgggcgctgggggccccctggagcacgtgatggagaccctggacaatgaaagcttctacagcaaggccagcgctggaaaatgtgtgcaggccttcggccccctgcccagggctgagcaccacgtgcggctggagaggaccagcccctgccaggacagctctgtgaactacggcatcaccaaggtggagggccagcccctgcacacagagctgaacagagccatggacaactgcaacagcctgaggatgagccctgtgaagggcatgcaggagaagggggagctggatgagctgggggacaagtgtgacagcaatgtgagcagcagcaagaagagaagacacaggaccaccttcaccagcctgcagctggaggagctggagaaggtgttccagaagacccactacccagatgtgtatgtgcgggagcagctggccctgaggacagagctgacagaggcccgggtgcaggtgtggttccagaacagaagagccaagtggaggaagcgggagagatatggccagatccagcaggccaagagccactttgctgccacctatgacatctctgtgctgcccaggacagacagctacccccagatccagaacaacctgtgggccggaaatgccagcggcggctctgtggtgaccagctgcatgctgccccgggacaccagcagctgcatgaccccctacagccacagccccaggacagacagcagctacacaggcttcagcaaccaccagaaccagttcagccacgtgcccctgaacaacttcttcacagacagcctgctgactggagccaccaatggacatgcctttgagaccaagccagagtttgaaagaagaagcagcagcattgctgtgctgaggatgaaggccaaggagcacacagccaacatctcctgggccatgtag

SEQ ID NO: 282497 - DNA, 1445 bp, Artificial Sequence
  derived and/or modified sequence
gtattaaagggaccggagcggggcagttcccgacgccgcagcgctcgctttcccttccctcctctctggccctccctcctcccacccactggctccctcccccagcgctctccagtttctgtgccccaggagctacgcgacagtcttccaggattatggagtttctgagcgagaagtttgccctcaagagccctccgagtaaaaacagtgacttttacatgggcgcaggaggtcctctggagcacgttatggagacgctggacaatgagtccttttacagcaaagcgtctgcaggcaaatgcgtgcaggccttcggacccctgccccgcgccgagcatcacgtgcgcttggagaggacctcgccctgtcaggacagcagcgtgaactatgggatcactaaagtagaaggacagccccttcacaccgaactgaatagagctatggacaactgtaacagtctccgaatgtctcccgtgaaagggatgcaagagaagggagagctggatgaacttggggataaatgtgatagcaatgtatccagcagtaagaaacggaggcaccgaaccaccttcaccagtttgcagctagaggagctggagaaagtctttcagaaaactcattacccggatgtgtatgtcagagaacagcttgctctgaggacagagctcactgaggccagggtccaggtttggtttcaaaatcgaagggccaaatggagaaaaagggaacgttatggccaaatacaacaagcgaaaagccattttgctgccacctatgatatatcagttttgccaaggactgacagctacccacagattcagaacaatttgtgggcaggaaatgcaagtggtggttctgtggttacttcatgcatgttaccacgtgacacttcctcctgtatgacaccttattctcactcgcctcggacagattccagttacacggggttttcaaaccaccagaaccagttcagccacgtgcccctcaacaattttttcactgactctcttcttactggggcaaccaatggacatgcatttgaaacaaagccagagtttgaaaggaggtcttccagtatcgcagttcttcgaatgaaagccaaggagcacaccgccaatatttcatgggccatgtaacatacagtactcttttatttttcttttaatagcaaagttaaacattcttatttctcatatttaaaggataccacaataagctgctgtgtgtggaattgctaaaggtcaagatattcagtgagaccagcttaaatgaatagttgttatttaacattaaaatctaagaatgaacctctgaaaagactaaataggtttaccatgtgccagtctccacaaaccctgttttagtagtaaggttttctttttctattgtacaagtcaatgaaatatgatcacgcaacttattaaagaataaatgtgttaaacaaa

SEQ ID NO: 282498 - DNA, 981 bp, Artificial Sequence
  derived and/or modified sequence
atggagttcctgagcgagaagttcgccctgaagagcccccccagcaaaaatagtgacttttacatgggagccgggggccctttagaacacgtgatggagacactggacaatgaatccttttacagcaaggcaagtgccggaaagtgcgtgcaggccttcggccctttgcctagggccgaacatcacgtgcgacttgagcgtacatccccatgtcaggactcgagtgtgaattatgggatcactaaggtggagggccaacctcttcacaccgaacttaatcgagccatggataactgtaattcgctgcgaatgtctcctgtgaaagggatgcaggagaaaggtgagcttgatgagcttggagacaagtgcgattctaatgtgtctagttccaaaaaacgcaggcacagaactacgttcacttcacttcaacttgaagagctggagaaagtgttccagaagacacactacccagacgtatatgtgcgggagcaattggctttacggactgaacttaccgaggctcgggttcaggtgtggttccaaaaccggcgggccaagtggcgcaagagggagcgatatggacagattcagcaagcaaaatctcactttgcagctacctatgatatttccgtcttgcccaggaccgacagctatcctcagattcagaacaatttgtgggctggaaatgcctctggcggctcagtagtgacatcctgtatgcttccacgggacacctcgtcctgtatgaccccatattcacatagtcccaggaccgactcgtcctataccggcttttctaaccaccagaatcagtttagtcacgttccactgaataatttctttacggattcacttttgactggagccaccaatggccatgcttttgaaacaaaacccgaattcgagcgcaggtcctcgagcatagcagtgctgaggatgaaagctaaggagcataccgcaaatattagttgggcaatgtag

SEQ ID NO: 282499 - DNA, 981 bp, Artificial Sequence
  derived and/or modified sequence
atggaattcctgtccgagaaattcgcactgaaatcgccaccaagtaaaaattctgatttttatatgggggctggaggccctctcgagcacgtgatggagacactggacaatgaatccttttattcaaaggcctctgcaggtaagtgtgttcaggccttcggtccccttccgagggccgaacaccatgtgcgtctggaacgcacctccccgtgccaggatagcagtgtgaattacggtatcaccaaagtggaaggccagccccttcacaccgagctcaatagagccatggataactgcaatagcttaaggatgagtccggtcaaggggatgcaggagaaaggagaactggacgagctgggggataagtgcgacagtaatgtaagctccagtaaaaagcggcgtcaccgcaccacgtttacaagtctccagctggaagagttggagaaagtttttcagaagacccactacccggatgtgtacgtgcgcgagcagctcgccttgagaacagagttgacagaagcgagggtgcaggtttggttccagaatcggagggctaagtggcggaaacgggaacgctacggccagatccagcaggccaaaagccactttgccgctacctatgatatttcagtgcttccgaggacagactcatacccacaaatacagaacaacctgtgggctggtaacgcaagcggcggatcagtggtcacttcttgcatgttgccgagggatacttcatcctgcatgaccccttactcacatagtccaaggaccgattcatcttacactggcttttctaatcaccaaaaccagttttcgcacgtgccactgaacaacttctttaccgattcactgctgacaggagcaactaacggccacgccttcgagacaaagcctgagttcgagcggaggtcttcttcgatcgcggtgctgcgtatgaaggcgaaggagcatactgccaatatttcttgggctatgtag

SEQ ID NO: 282500 - DNA, 981 bp, Artificial Sequence
  derived and/or modified sequence
atggagttcctgagcgagaagttcgccctgaagagcccccccagcaagaacagcgacttctacatgggcgccggcggccccctggagcacgtgatggagaccctggacaacgagagcttctacagcaaggccagcgccggcaagtgcgtgcaggccttcggccccctgcccagagccgagcaccacgtgagactggagagaaccagcccctgccaggacagcagcgtgaactacggcatcaccaaggtggagggccagcccctgcacaccgagctgaacagagccatggacaactgcaacagcctgagaatgagccccgtgaagggcatgcaggagaagggcgagctggacgagctgggcgacaagtgcgacagcaacgtgagcagcagcaagaagagaagacacagaaccaccttcaccagcctgcagctggaggagctggagaaggtgttccagaagacccactaccccgacgtgtacgtgagagagcagctggccctgagaaccgagctgaccgaggccagagtgcaggtgtggttccagaacagaagagccaagtggagaaagagagagagatacggccagatccagcaggccaagagccacttcgccgccacctacgacatcagcgtgctgcccagaaccgacagctacccccagatccagaacaacctgtgggccggcaacgccagcggcggcagcgtggtgaccagctgcatgctgcccagagacaccagcagctgcatgaccccctacagccacagccccagaaccgacagcagctacaccggcttcagcaaccaccagaaccagttcagccacgtgcccctgaacaacttcttcaccgacagcctgctgaccggcgccaccaacggccacgccttcgagaccaagcccgagttcgagagaagaagcagcagcatcgccgtgctgagaatgaaggccaaggagcacaccgccaacatcagctgggccatgtag

SEQ ID NO: 282501 - DNA, 882 bp, Artificial Sequence
  derived and/or modified sequence
ctcattaatatactgtatagagctgtgatctctgaccctgagcagaaccttgccattgaacagaaggagagcgatcacatcctgccagacagcaaaatgacacccttacgattccgaaaacggacgcttcacgagacaaaaattaggactcactctactctaaccgagaatgtgcttagtcacaaactgcaatttgacggtcggattgtaagccggaccaacgttttgccttttatccagaaaagtatttatagccaccagtgcgggcgaagaaaagggaagcagtacaggctcggcgatttttatgtgggggcaactctcacttttttgtcatcagaccatttgagtctgccagagagcattaaagagaataccctccttaagctgcggatcacaaacatagaccagatcgccctggattctctcaagacagcatccatggaacaagaagacgacatcattattcaggagaccaacgataggctggtattcaaggctatacaggatgttctcaaggaaaaacttcacaagcgaggagtccggattctgactggtctgggcaagtatttccaacagttggataaggaaggtaatgggctgttagacaaggctgacttcaagcaggccctcaaggtctttcacctggaggtctccgaaaaagattttgagtccgcatggctaattttgaacgataatggcaacggaaaagttgactatggtgagttcaagcgggggatcatcggtgagatgaatgaataccggaaatcctatgtgcggaaggcttttatgaagctggacttcaataaaagcggcagtgtgccgatcatcaatatacgaaaatgttattgtgccaagaagcactcccaggtcatctctgggtag

SEQ ID NO: 282502 - DNA, 882 bp, Artificial Sequence
  derived and/or modified sequence
ctcatcaacatcctgtaccgggccgtcatcagtgaccctgagcagaacctggccatcgagcagaaggagagtgaccacatcctgcctgacagcaagatgacccccctgcgcttcaggaagaggaccctgcacgagaccaagatccgcacccacagcaccctgacagaaaatgtgctgagccacaagctgcagtttgatggaagaattgtgtccaggaccaacgtgctgcccttcatccagaagagcatctacagccaccagtgtggccgcaggaagggcaagcagtaccgcctgggggacttctacgtgggcgccaccctgaccttcctgagcagtgaccacctgagcctgcctgagagcatcaaggagaacaccctgctgaagctgcgcatcaccaacatcgaccagatcgccctggacagcctgaagacagcctccatggagcaggaggatgacatcatcatccaggagaccaatgaccggctggtgttcaaggccatccaggatgtgctgaaggagaagctgcacaagaggggcgtgcgcatcctgaccggcctgggcaagtacttccagcagctggacaaggagggcaatggcctgctggacaaggctgacttcaagcaggccctgaaggtgttccacctggaggtgtctgagaaggactttgagagcgcctggctgatcctgaatgacaatggaaatggcaaggtggactatggagagttcaagaggggcatcattggagagatgaatgagtacaggaagagctatgtgaggaaggccttcatgaagctggacttcaacaagagcggctctgtgcccatcatcaacatcaggaagtgctactgtgccaagaagcacagccaggtgatcagcggctag

SEQ ID NO: 282503 - DNA, 882 bp, Artificial Sequence
  derived and/or modified sequence
ctgatcaacatcctgtaccgggccgtgatcagcgaccccgagcagaatctggcaatagagcaaaaggaatccgaccatatcctgccggattcaaagatgacaccgctccggttcaggaagagaacgttgcatgagacaaagatacgcacccactcaactttaacagagaacgtcttgagccacaaactacagttcgacgggcgcattgtcagccgcacaaatgtcctacctttcatccagaagtccatttattctcatcagtgcgggcgccgcaaaggtaaacagtataggctcggggatttttatgtcggagctactcttaccttcttaagctcggaccaccttagcctgcccgaatcaatcaaagaaaacacacttttaaaattgagaattaccaacatcgatcagatcgcacttgatagcttgaagacagcttcaatggaacaggaggacgacatcattatccaagaaaccaatgacagattggtcttcaaggccattcaggatgtacttaaggagaagttacataaaagaggcgtgcgaatactgaccggcttgggaaaatatttccaacaattggataaagaggggaatgggcttctcgacaaggctgacttcaagcaagccttaaaggtcttccatctcgaggtgagcgagaaggacttcgagagtgcttggcttatcctcaatgacaacggtaatggcaaggttgactacggcgagttcaagcgtggaattattggcgagatgaatgaatatcgaaagtcatacgtgcgcaaggcgttcatgaagctagactttaacaagtctggcagcgttcctattatcaacattaggaagtgctactgcgctaaaaagcatagtcaggttatcagcgggtag

SEQ ID NO: 282504 - DNA, 882 bp, Artificial Sequence
  derived and/or modified sequence
ctgattaacattctttaccgggctgtgattagcgaccccgagcaaaacctcgctatagagcaaaaggagagcgaccatatcctacccgactccaaaatgacacccctaagattcagaaaaaggacactgcacgaaactaagattaggacccacagtaccttgacggagaatgtgctgagccataagctccagtttgatgggaggatcgtatcccgcacaaatgtactgccatttatacagaagagtatctacagccaccagtgtggaaggagaaaagggaaacagtaccgactcggggatttctacgtgggagcaacgttgacgttcctatcctctgaccacctgtccctgcctgagtctataaaggaaaatacactcctgaaactgcgcattaccaatattgaccagatcgctctggactctctgaagacggcatccatggagcaagaggacgatatcataattcaggagacaaacgatagattagtgttcaaggccattcaagatgtactcaaggaaaaactgcacaagcggggtgtaaggatactaactggtctggggaagtatttccagcagctcgacaaagagggcaatggccttcttgacaaggccgatttcaaacaagcccttaaagtcttccatcttgaagtgtctgagaaggattttgagtcggcctggttaatcctgaatgataacggcaacggaaaggtagactacggtgaattcaaacggggaatcataggcgagatgaacgagtataggaaatcttacgtaagaaaggcattcatgaagctcgatttcaacaaatccggtagcgtacccatcatcaatatcaggaaatgctactgcgcgaagaaacacagccaggtgataagcggttag

SEQ ID NO: 282505 - DNA, 1145 bp, Artificial Sequence
  derived and/or modified sequence
cttataaatatcctgtatagggctgtcatcagtgatccagagcaaaatttagccattgagcaaaaagaaagtgatcatatccttccagattcaaagatgacacctcttcgatttagaaaaagaacactacatgaaacaaagataagaactcattctacattaactgaaaatgtgctttctcataaattacagtttgatggtaggatcgtatcacgaacaaatgtgcttccttttattcaaaaaagcatttatagtcatcagtgtggacgaagaaaaggaaaacaataccgacttggtgatttttatgttggtgcaaccttgacatttttgagttctgatcatctcagccttccagaaagcatcaaagaaaacacattacttaaactccgaatcacaaatattgatcaaatagctttggattctctcaaaactgcttctatggaacaggaggatgatataatcattcaagaaaccaatgataggctggtcttcaaagcaattcaagatgtgctaaaagaaaaactacataaaagaggtgttcgtattttgactggattgggaaaatattttcaacagttggacaaggaaggaaatggacttttagataaggcagattttaagcaagctctaaaagtgtttcacttagaagtgtctgaaaaggattttgagtctgcatggctaattctgaatgacaatggcaatggcaaggttgattatggagaattcaaacgtggtattattggtgaaatgaatgaatacaggaaatcatatgttcgaaaggcctttatgaaactggatttcaacaaaagtggcagtgtgcctattataaacataagaaaatgttactgtgcaaagaagcattctcaagtaatttcaggttgaccagcaaggacaaacatgaaaatgcttaaaaaaaagaaagcgcttaaaacaaagaaatagaaggtaatgggcatatataaaataagccaagcaagagaagagcaaagacaatctgcagggtggacatggatgtattcgtttctgatcatgagaagaggctcttgtcatacatatcgttccatttttattttaaagttctataaacttctgaggtaaactgatttcttggatgtacttaataaagaataaatgtttcatattgg

SEQ ID NO: 282506 - DNA, 882 bp, Artificial Sequence
  derived and/or modified sequence
ctgatcaacatcctgtacagagccgtgatcagcgaccccgagcagaacctggccatcgagcagaaggagagcgaccacatcctgcccgacagcaagatgacccccctgagattcagaaagagaaccctgcacgagaccaagatcagaacccacagcaccctgaccgagaacgtgctgagccacaagctgcagttcgacggcagaatcgtgagcagaaccaacgtgctgcccttcatccagaagagcatctacagccaccagtgcggcagaagaaagggcaagcagtacagactgggcgacttctacgtgggcgccaccctgaccttcctgagcagcgaccacctgagcctgcccgagagcatcaaggagaacaccctgctgaagctgagaatcaccaacatcgaccagatcgccctggacagcctgaagaccgccagcatggagcaggaggacgacatcatcatccaggagaccaacgacagactggtgttcaaggccatccaggacgtgctgaaggagaagctgcacaagagaggcgtgagaatcctgaccggcctgggcaagtacttccagcagctggacaaggagggcaacggcctgctggacaaggccgacttcaagcaggccctgaaggtgttccacctggaggtgagcgagaaggacttcgagagcgcctggctgatcctgaacgacaacggcaacggcaaggtggactacggcgagttcaagagaggcatcatcggcgagatgaacgagtacagaaagagctacgtgagaaaggccttcatgaagctggacttcaacaagagcggcagcgtgcccatcatcaacatcagaaagtgctactgcgccaagaagcacagccaggtgatcagcggctag

SEQ ID NO: 282507 - protein, 121 aa, Artificial Sequence
  derived and/or modified sequence
MEARDKQVLRSLRLELGAEVLVEGLVLQYLYQEGILTENHIQEINAQTTGLRKTMLLLDILPSRGPKAFDTFLDSLQEFPWVREKLKKAREEAMTDLPAEMRKLRPKDSVTCLASQLTWRF

SEQ ID NO: 282508 - DNA, 366 bp, Artificial Sequence
  derived and/or modified sequence
atggaggcgcgcgacaagcaggtgcttcggtccctgcgtctggagcttggagcagaggtgctggtcgaaggccttgtcctgcagtacctctaccaggaggggatcctgactgaaaaccacatccaggagattaatgcacaaaccacgggcctgaggaaaactatgctgctgctggacattctccctagtcgaggtcccaaggcttttgacactttcctcgattctctccaggaattcccatgggtaagggaaaaattaaaaaaagctagggaagaagctatgactgatctgcccgccgagatgcgtaagcttcggccaaaggactccgtcacatgcctggcttcccaattgacctggaggttctag

SEQ ID NO: 282509 - DNA, 312 bp, Artificial Sequence
  derived and/or modified sequence
atggaagcccgggataagcaggtgctccgttcactgcgcttggagcttggcgcagaagttcttgtagaaggtttagtcctgcaatatctttatcaggagggaatcttgaccgagaaccatatccaggagataaatgcccagaccacaggactgaggaagactatgctgttgttggatattctgccctcaagaggaccaaaagcgttcgacactttcttggactcactgcaggagtttccctgggtgagggaaaagttaaagaaggctcgagaagaggccatgacagacctgcccgctggttgttggccctag

SEQ ID NO: 282510 - DNA, 366 bp, Artificial Sequence
  derived and/or modified sequence
atggaggcccgggacaagcaggtgctgcggagcctgcggctggagctgggcgctgaggtgctggtggagggcctggtgctgcagtacctgtaccaggagggcatcctgacagagaaccacatccaggagatcaatgcccagaccaccggcctgaggaagaccatgctgctgctggacatcctgcccagccggggccccaaggcctttgacaccttcctggacagcctgcaggagttcccctgggtgcgggagaagctgaagaaggcccgggaggaggccatgacagacctgcctgctgagatgaggaagctgcggcccaaggacagcgtgacctgcctggccagccagctgacctggaggttctag

SEQ ID NO: 282511 - DNA, 312 bp, Artificial Sequence
  derived and/or modified sequence
atggaggcccgggacaagcaggtgctgcggagcctgcggctggagctgggcgctgaggtgctggtggagggcctggtgctgcagtacctgtaccaggagggcatcctgacagagaaccacatccaggagatcaatgcccagaccaccggcctgaggaagaccatgctgctgctggacatcctgcccagccggggccccaaggcctttgacaccttcctggacagcctgcaggagttcccctgggtgcgggagaagctgaagaaggcccgggaggaggccatgacagacctgcctgctggctgctggccctag

SEQ ID NO: 282512 - DNA, 366 bp, Artificial Sequence
  derived and/or modified sequence
atggaggcccgggacaagcaggtgctgcggagcctgcggctggagctaggcgctgaggtcctggtggagggcctggtgctgcagtacctatatcaggagggtattctgacggaaaaccatatacaggaaattaacgcccagactaccggcttacggaaaactatgctcttgctcgatatcctgccttccaggggcccaaaggccttcgacacatttcttgactcgctacaggagtttccttgggtccgcgagaagctcaagaaagcccgagaggaggcgatgaccgacttacccgccgagatgagaaaactgcggccaaaagatagcgtaacctgcctggccagccaattgacatggcgattttag

SEQ ID NO: 282513 - DNA, 312 bp, Artificial Sequence
  derived and/or modified sequence
atggaggcccgggacaagcaggtgctgcggagcctgcggctggagctcggagccgaggttctggtcgaggggttggtacttcagtatctgtaccaggagggcatccttaccgagaatcatatccaggaaataaacgcccagacaaccggtctccggaagacgatgttgttgctggacatcctcccttcaaggggcccgaaggctttcgatactttcttagattccctgcaagagttcccttgggtacgtgagaagcttaagaaagccagggaggaggctatgactgacctcccagctggttgctggccgtag

SEQ ID NO: 282514 - DNA, 366 bp, Artificial Sequence
  derived and/or modified sequence
atggaggcccgagacaagcaggtactaaggagcctccgcctcgaactgggggctgaggtcctggtagaggggctggttcttcaatatctgtaccaggagggaattctcaccgagaatcacatccaggagatcaatgcacagaccaccggcctgcggaagactatgttgttgctagatatactgccatcccgcggacctaaggctttcgacaccttccttgattcactccaagaattcccctgggtgcgcgagaaattgaagaaggcacgcgaagaggctatgaccgatcttcccgcagagatgcgcaaattaaggccaaaggattctgttacatgtttagcgagccagctgacctggcgcttttag

SEQ ID NO: 282515 - DNA, 312 bp, Artificial Sequence
  derived and/or modified sequence
atggaggccagagacaaacaagttctacgctccctgcgtcttgagctcggagccgaggtactcgtcgaaggacttgtgctgcagtacctataccaggaaggaattctgaccgagaaccatatccaggagatcaatgcccagaccactgggctccgaaaaacaatgctgctgctcgacatccttccttccagggggccaaaggcctttgatactttcctggactccctgcaggagttcccttgggtccgtgagaaactgaaaaaggccagagaggaagccatgaccgatcttcctgccggatgttggccttag

SEQ ID NO: 282516 - DNA, 366 bp, Artificial Sequence
  derived and/or modified sequence
atggaggccagagacaaacaagtactccgctcacttcgcctggagctgggtgcagaggtattggtggagggactggttcttcagtacctctaccaggaaggaatcttgacggaaaaccatattcaagaaatcaatgctcaaaccacaggcctccggaaaacaatgctcctgctggatatcctaccttccaggggccctaaagcatttgatacattcctagattccctacaggagtttccctgggtcagggagaagctgaagaaggcaagggaagaggccatgaccgacctgcctgcagagatgaggaaactgaggccaaaggattctgttacttgcctggcttcacagctcacctggagattctga

SEQ ID NO: 282517 - DNA, 1293 bp, Artificial Sequence
  derived and/or modified sequence
ggggcaggttccctaacagtcaggattccggttgcagtttttctcccccgccccaaagatacgtggttgcagacggagaaatggaggccagagacaaacaagtactccgctcacttcgcctggagctgggtgcagaggtattggtggagggactggttcttcagtacctctaccaggaaggaatcttgacggaaaaccatattcaagaaatcaatgctcaaaccacaggcctccggaaaacaatgctcctgctggatatcctaccttccaggggccctaaagcatttgatacattcctagattccctacaggagtttccctgggtcagggagaagctgaagaaggcaagggaagaggccatgaccgacctgcctgcagggtgttggccatgatccttatgatggggaggaagggaatcaccaattttctaccccatcccactgagcaacttagagatgacctaaggcctcgttacctgtgtggagtaactgggaattggaagagatgaggaaactgaggccaaaggattctgttacttgcctggcttcacagctcacctggagattctgaactggcatcttcctctctctgccatcaccccagaccctaccctctttcctctacaccagtggttctcaatcaagggcgattttgccttccaggggacatttgacaatgtctggaggcgtttttggttgtcacaattctgtgtatgtgtgtgggtgggcggggggcaggggattatgttggcatctagtgagtagataacagagatgctgctaaacctacaatgctcagatggcccctaacaaagaagtatgttgtccaaaatgtcaatggtgcagagggtgagaagccctggtctatacagagctcagcagtccagagcaattgcaacctctgggagttgccaagagctcctctgcccagcaacaggcttggcctctctcctgtggctgccacaagagttaaagccactgtctggaatgccctttggcagtggccaagtgtcccctgcagaactgactgcgggacatgcggtgcatcagccggagctgatgtgttttgtaatttatagtcacagggcgcctgtcttcatttagcagtaggcctgctggcagcttccctgccagggaggaagcaagttccacagaggcccacagcccccgccagctgccggcccgtggtatttggggacggctgttgctcagagacacctgggaataggccggggccgagatggcgctgagcactcggtctccccttcagacccatccatcagcagcggtccct

SEQ ID NO: 282518 - DNA, 366 bp, Artificial Sequence
  derived and/or modified sequence
atggaggccagagacaagcaggtgctgagaagcctgagactggagctgggcgccgaggtgctggtggagggcctggtgctgcagtacctgtaccaggagggcatcctgaccgagaaccacatccaggagatcaacgcccagaccaccggcctgagaaagaccatgctgctgctggacatcctgcccagcagaggccccaaggccttcgacaccttcctggacagcctgcaggagttcccctgggtgagagagaagctgaagaaggccagagaggaggccatgaccgacctgcccgccgagatgagaaagctgagacccaaggacagcgtgacctgcctggccagccagctgacctggagattctag

SEQ ID NO: 282519 - DNA, 312 bp, Artificial Sequence
  derived and/or modified sequence
atggaggccagagacaagcaggtgctgagaagcctgagactggagctgggcgccgaggtgctggtggagggcctggtgctgcagtacctgtaccaggagggcatcctgaccgagaaccacatccaggagatcaacgcccagaccaccggcctgagaaagaccatgctgctgctggacatcctgcccagcagaggccccaaggccttcgacaccttcctggacagcctgcaggagttcccctgggtgagagagaagctgaagaaggccagagaggaggccatgaccgacctgcccgccggctgctggccctag

SEQ ID NO: 282520 - protein, 1028 aa, Artificial Sequence
  derived and/or modified sequence
MGNLESAEGVPGEPPSVPLLLPPGKMPMPEPCELEERFALVLSSMNLPPDKARLLRQYDNEKKWDLICDQERFQVKNPPHTYIQKLQSFLDPSVTRKKFRRRVQESTKVLRELEISLRTNHIGWVREFLNDENKGLDVLVDYLSFAQCSVMFDFEGLESGDDGAFDKLRSWSRSIEDLQPPSALSAPFTNSLARSARQSVLRYSTLPGRRALKNSRLVSQKDDVHVCILCLRAIMNYQYGFNLVMSHPHAVNEIALSLNNKNPRTKALVLELLAAVCLVRGGHEIILAAFDNFKEVCKELHRFEKLMEYFRNEDSNIDFMVACMQFINIVVHSVEDMNFRVHLQYEFTKLGLEEFLQKSRHTESEKLQVQIQAYLDNVFDVGGLLEDAETKNVALEKVEELEEHVSHLTEKLLDLENENMMRVAELEKQLLQREKELESIKETYENTSHQVHTLRRLIKEKEEAFQRRCHLEPNVRGLESVDSEALARVGPAELSEGMPPSDLDLLAPAPPPEEVLPLPPPPAPPLPPPPPPLPDKCPPAPPLPGAAPSVVLTVGLSAIRIKKPIKTKFRLPVFNWTALKPNQISGTVFSELDDEKILEDLDLDKFEELFKTKAQGPALDLICSKNKTAQKAASKVTLLEANRAKNLAITLRKAGRSAEEICRAIHTFDLQTLPVDFVECLMRFLPTEAEVKLLRQYERERQPLEELAAEDRFMLLFSKVERLTQRMAGMAFLGNFQDNLQMLTPQLNAIIAASASVKSSQKLKQMLEIILALGNYMNSSKRGAVYGFKLQSLDLLLDTKSTDRKMTLLHFIALTVKEKYPDLANFWHELHFVEKAAAVSLENVLLDVKELGRGMELIRRECSIHDNSVLRNFLSTNEGKLDKLQRDAKTAEEAYNAVVRYFGESPKTTPPSVFFPVFVRFIRSYKEAEQENEARKKQEEVMREKQLAQEAKKLDAKTPSQRNKWQQQELIAELRRRQAKEHRPVYEGKDGTIEDIITVLKSVPFTARTAKRGSRFFCDAAHHDESNC

SEQ ID NO: 282521 - protein, 1027 aa, Artificial Sequence
  derived and/or modified sequence
MGNLESAEGVPGEPPSVPLLLPPGKMPMPEPCELEERFALVLSSMNLPPDKARLLRQYDNEKKWDLICDQERFQVKNPPHTYIQKLQSFLDPSVTRKKFRRRVQESTKVLRELEISLRTNHIGWVREFLNDENKGLDVLVDYLSFAQCSVMFDFEGLESGDDGAFDKLRSWSRSIEDLQPPSALSAPFTNSLARSARQSVLRYSTLPGRRALKNSRLVSQKDDVHVCILCLRAIMNYQYGFNLVMSHPHAVNEIALSLNNKNPRTKALVLELLAAVCLVRGGHEIILAAFDNFKEVCKELHRFEKLMEYFRNEDSNIDFMVACMQFINIVVHSVEDMNFRVHLQYEFTKLGLEEFLQKSRHTESEKLQVQIQAYLDNVFDVGGLLEDAETKNVALEKVEELEEHVSHLTEKLLDLENENMMRVAELEKQLLQREKELESIKETYENTSHQVHTLRRLIKEKEEAFQRRCHLEPNVRGLESVDSEALARVGPAELSEGMPPSDLDLLAPAPPPEEVLPLPPPPAPPLPPPPPPLPDKCPPAPPLPGAAPSVVLTVGLSAIRIKKPIKTKFRLPVFNWTALKPNQISGTVFSELDDEKILEDLDLDKFEELFKTKAQGPALDLICSKNKTAQKAASKVTLLEANRAKNLAITLRKAGRSAEEICRAIHTFDLQTLPVDFVECLMRFLPTEAEVKLLRQYERERQPLEELAAEDRFMLLFSKVERLTQRMAGMAFLGNFQDNLQMLTPQLNAIIAASASVKSSQKLKQMLEIILALGNYMNSSKRGAVYGFKLQSLDLLLDTKSTDRKMTLLHFIALTVKEKYPDLANFWHELHFVEKAAAVSLENVLLDVKELGRGMELIRRECSIHDNSVLRNFLSTNEGKLDKLQRDAKTAEAYNAVVRYFGESPKTTPPSVFFPVFVRFIRSYKEAEQENEARKKQEEVMREKQLAQEAKKLDAKTPSQRNKWQQQELIAELRRRQAKEHRPVYEGKDGTIEDIITVLKSVPFTARTAKRGSRFFCDAAHHDESNC

SEQ ID NO: 282522 - DNA, 3087 bp, Artificial Sequence
  derived and/or modified sequence
atgggcaacctggagagcgccgagggcgtgcccggcgagccccccagcgtgcccctgctgctgccccccggcaagatgcccatgcccgagccctgcgagctggaggagagattcgccctggtgctgagcagcatgaacctgccccccgacaaggccagactgctgagacagtacgacaacgagaagaagtgggacctgatctgcgaccaggagagattccaggtgaagaaccccccccacacctacatccagaagctgcagagcttcctggaccccagcgtgaccagaaagaagttcagaagaagagtgcaggagagcaccaaggtgctgagagagctggagatcagcctgagaaccaaccacatcggctgggtgagagagttcctgaacgacgagaacaagggcctggacgtgctggtggactacctgagcttcgcccagtgcagcgtgatgttcgacttcgagggcctggagagcggcgacgacggcgccttcgacaagctgagaagctggagcagaagcatcgaggacctgcagccccccagcgccctgagcgcccccttcaccaacagcctggccagaagcgccagacagagcgtgctgagatacagcaccctgcccggcagaagagccctgaagaacagcagactggtgagccagaaggacgacgtgcacgtgtgcatcctgtgcctgagagccatcatgaactaccagtacggcttcaacctggtgatgagccacccccacgccgtgaacgagatcgccctgagcctgaacaacaagaaccccagaaccaaggccctggtgctggagctgctggccgccgtgtgcctggtgagaggcggccacgagatcatcctggccgccttcgacaacttcaaggaggtgtgcaaggagctgcacagattcgagaagctgatggagtacttcagaaacgaggacagcaacatcgacttcatggtggcctgcatgcagttcatcaacatcgtggtgcacagcgtggaggacatgaacttcagagtgcacctgcagtacgagttcaccaagctgggcctggaggagttcctgcagaagagcagacacaccgagagcgagaagctgcaggtgcagatccaggcctacctggacaacgtgttcgacgtgggcggcctgctggaggacgccgagaccaagaacgtggccctggagaaggtggaggagctggaggagcacgtgagccacctgaccgagaagctgctggacctggagaacgagaacatgatgagagtggccgagctggagaagcagctgctgcagagagagaaggagctggagagcatcaaggagacctacgagaacaccagccaccaggtgcacaccctgagaagactgatcaaggagaaggaggaggccttccagagaagatgccacctggagcccaacgtgagaggcctggagagcgtggacagcgaggccctggccagagtgggccccgccgagctgagcgagggcatgccccccagcgacctggacctgctggcccccgcccccccccccgaggaggtgctgcccctgccccccccccccgccccccccctgccccccccccccccccccctgcccgacaagtgcccccccgccccccccctgcccggcgccgcccccagcgtggtgctgaccgtgggcctgagcgccatcagaatcaagaagcccatcaagaccaagttcagactgcccgtgttcaactggaccgccctgaagcccaaccagatcagcggcaccgtgttcagcgagctggacgacgagaagatcctggaggacctggacctggacaagttcgaggagctgttcaagaccaaggcccagggccccgccctggacctgatctgcagcaagaacaagaccgcccagaaggccgccagcaaggtgaccctgctggaggccaacagagccaagaacctggccatcaccctgagaaaggccggcagaagcgccgaggagatctgcagagccatccacaccttcgacctgcagaccctgcccgtggacttcgtggagtgcctgatgagattcctgcccaccgaggccgaggtgaagctgctgagacagtacgagagagagagacagcccctggaggagctggccgccgaggacagattcatgctgctgttcagcaaggtggagagactgacccagagaatggccggcatggccttcctgggcaacttccaggacaacctgcagatgctgaccccccagctgaacgccatcatcgccgccagcgccagcgtgaagagcagccagaagctgaagcagatgctggagatcatcctggccctgggcaactacatgaacagcagcaagagaggcgccgtgtacggcttcaagctgcagagcctggacctgctgctggacaccaagagcaccgacagaaagatgaccctgctgcacttcatcgccctgaccgtgaaggagaagtaccccgacctggccaacttctggcacgagctgcacttcgtggagaaggccgccgccgtgagcctggagaacgtgctgctggacgtgaaggagctgggcagaggcatggagctgatcagaagagagtgcagcatccacgacaacagcgtgctgagaaacttcctgagcaccaacgagggcaagctggacaagctgcagagagacgccaagaccgccgaggaggcctacaacgccgtggtgagatacttcggcgagagccccaagaccaccccccccagcgtgttcttccccgtgttcgtgagattcatcagaagctacaaggaggccgagcaggagaacgaggccagaaagaagcaggaggaggtgatgagagagaagcagctggcccaggaggccaagaagctggacgccaagacccccagccagagaaacaagtggcagcagcaggagctgatcgccgagctgagaagaagacaggccaaggagcacagacccgtgtacgagggcaaggacggcaccatcgaggacatcatcaccgtgctgaagagcgtgcccttcaccgccagaaccgccaagagaggcagcagattcttctgcgacgccgcccaccacgacgagagcaactgctag

SEQ ID NO: 282523 - DNA, 3084 bp, Artificial Sequence
  derived and/or modified sequence
atgggcaacctggagagcgccgagggcgtgcccggcgagccccccagcgtgcccctgctgctgccccccggcaagatgcccatgcccgagccctgcgagctggaggagagattcgccctggtgctgagcagcatgaacctgccccccgacaaggccagactgctgagacagtacgacaacgagaagaagtgggacctgatctgcgaccaggagagattccaggtgaagaaccccccccacacctacatccagaagctgcagagcttcctggaccccagcgtgaccagaaagaagttcagaagaagagtgcaggagagcaccaaggtgctgagagagctggagatcagcctgagaaccaaccacatcggctgggtgagagagttcctgaacgacgagaacaagggcctggacgtgctggtggactacctgagcttcgcccagtgcagcgtgatgttcgacttcgagggcctggagagcggcgacgacggcgccttcgacaagctgagaagctggagcagaagcatcgaggacctgcagccccccagcgccctgagcgcccccttcaccaacagcctggccagaagcgccagacagagcgtgctgagatacagcaccctgcccggcagaagagccctgaagaacagcagactggtgagccagaaggacgacgtgcacgtgtgcatcctgtgcctgagagccatcatgaactaccagtacggcttcaacctggtgatgagccacccccacgccgtgaacgagatcgccctgagcctgaacaacaagaaccccagaaccaaggccctggtgctggagctgctggccgccgtgtgcctggtgagaggcggccacgagatcatcctggccgccttcgacaacttcaaggaggtgtgcaaggagctgcacagattcgagaagctgatggagtacttcagaaacgaggacagcaacatcgacttcatggtggcctgcatgcagttcatcaacatcgtggtgcacagcgtggaggacatgaacttcagagtgcacctgcagtacgagttcaccaagctgggcctggaggagttcctgcagaagagcagacacaccgagagcgagaagctgcaggtgcagatccaggcctacctggacaacgtgttcgacgtgggcggcctgctggaggacgccgagaccaagaacgtggccctggagaaggtggaggagctggaggagcacgtgagccacctgaccgagaagctgctggacctggagaacgagaacatgatgagagtggccgagctggagaagcagctgctgcagagagagaaggagctggagagcatcaaggagacctacgagaacaccagccaccaggtgcacaccctgagaagactgatcaaggagaaggaggaggccttccagagaagatgccacctggagcccaacgtgagaggcctggagagcgtggacagcgaggccctggccagagtgggccccgccgagctgagcgagggcatgccccccagcgacctggacctgctggcccccgcccccccccccgaggaggtgctgcccctgccccccccccccgccccccccctgccccccccccccccccccctgcccgacaagtgcccccccgccccccccctgcccggcgccgcccccagcgtggtgctgaccgtgggcctgagcgccatcagaatcaagaagcccatcaagaccaagttcagactgcccgtgttcaactggaccgccctgaagcccaaccagatcagcggcaccgtgttcagcgagctggacgacgagaagatcctggaggacctggacctggacaagttcgaggagctgttcaagaccaaggcccagggccccgccctggacctgatctgcagcaagaacaagaccgcccagaaggccgccagcaaggtgaccctgctggaggccaacagagccaagaacctggccatcaccctgagaaaggccggcagaagcgccgaggagatctgcagagccatccacaccttcgacctgcagaccctgcccgtggacttcgtggagtgcctgatgagattcctgcccaccgaggccgaggtgaagctgctgagacagtacgagagagagagacagcccctggaggagctggccgccgaggacagattcatgctgctgttcagcaaggtggagagactgacccagagaatggccggcatggccttcctgggcaacttccaggacaacctgcagatgctgaccccccagctgaacgccatcatcgccgccagcgccagcgtgaagagcagccagaagctgaagcagatgctggagatcatcctggccctgggcaactacatgaacagcagcaagagaggcgccgtgtacggcttcaagctgcagagcctggacctgctgctggacaccaagagcaccgacagaaagatgaccctgctgcacttcatcgccctgaccgtgaaggagaagtaccccgacctggccaacttctggcacgagctgcacttcgtggagaaggccgccgccgtgagcctggagaacgtgctgctggacgtgaaggagctgggcagaggcatggagctgatcagaagagagtgcagcatccacgacaacagcgtgctgagaaacttcctgagcaccaacgagggcaagctggacaagctgcagagagacgccaagaccgccgaggcctacaacgccgtggtgagatacttcggcgagagccccaagaccaccccccccagcgtgttcttccccgtgttcgtgagattcatcagaagctacaaggaggccgagcaggagaacgaggccagaaagaagcaggaggaggtgatgagagagaagcagctggcccaggaggccaagaagctggacgccaagacccccagccagagaaacaagtggcagcagcaggagctgatcgccgagctgagaagaagacaggccaaggagcacagacccgtgtacgagggcaaggacggcaccatcgaggacatcatcaccgtgctgaagagcgtgcccttcaccgccagaaccgccaagagaggcagcagattcttctgcgacgccgcccaccacgacgagagcaactgctag

SEQ ID NO: 282524 - DNA, 3087 bp, Artificial Sequence
  derived and/or modified sequence
atggggaaccttgaatccgccgagggggttcccggcgaaccaccctcagttccactgctcctcccacccgggaagatgcctatgcctgaaccatgcgagttggaggaacgtttcgccctggtgctgagttctatgaatctgcccccggataaggcccggttgctgcggcagtatgataacgaaaaaaaatgggacctgatatgcgatcaggaacggttccaggtcaagaaccctccgcacacatatattcagaagttgcaaagtttcctggatccatccgtcactaggaagaaatttcggcggagggtgcaggagtccaccaaagtgctgagggaattagagatttccctccgcaccaatcacataggttgggtgcgggagtttctcaacgatgagaataaggggcttgacgtcctggttgattacttgtcctttgcacagtgttccgtgatgttcgattttgaaggcctcgagagcggcgacgacggggcctttgacaaactgcgcagttggtcccggagcatcgaagacctgcaacctccctctgcgctcagtgccccctttactaactccctggcaaggtctgccaggcagtcagtgcttcggtatagcactctccccgggcgcagggccttgaagaattcccgcctcgtgtcccagaaggatgacgtgcacgtctgcatcctttgtcttagggctattatgaattaccagtacggctttaaccttgtaatgtctcatcctcacgctgttaatgaaatagccctctcactcaacaataagaacccaaggacaaaggcccttgtgctggagctgctagctgccgtgtgcctggtccgcggtgggcacgagataattctggcggcgttcgacaacttcaaggaagtgtgcaaggaactgcatcggtttgagaaattgatggaatatttccgtaatgaggacagtaacatcgacttcatggtggcgtgtatgcaattcataaacattgtggttcactctgtagaagacatgaactttcgggtccacctgcagtacgaattcaccaagttaggtctggaagagttcctccaaaaatccagacatactgagtccgaaaagctgcaggtccagattcaggcctacttggacaacgtgttcgacgttggagggttgttggaagacgccgagactaaaaacgtcgcccttgagaaggtggaagagttagaagaacacgtgagccacctgactgaaaaattgctggatctcgagaatgagaacatgatgcgtgtcgcagagctcgagaagcagctgctccagcgcgaaaaggagctggaatcaataaaggagacgtacgagaacactagccaccaggttcacaccctgcggcggctgattaaagagaaggaagaagcatttcagagacggtgtcacctagagccgaacgtccgaggactcgagtccgtggactctgaagccttggccagggttgggccagccgaattgagcgagggcatgcctccgagcgacttggatcttctggcccccgcaccgcctcccgaggaagtccttccactgcctccgccaccagcaccccctctaccccccccacccccacccctgcctgacaagtgcccacctgcaccacccctgccaggcgcggcaccctccgtcgtgctcacagtggggttgtccgcgattaggattaagaaacctatcaagacaaagttccgccttcctgtattcaactggaccgctctgaaacccaaccagataagcggaaccgtgttcagcgaattagatgacgagaaaatcttggaggacctcgacctggataagtttgaggagctgtttaagacaaaagcccaaggcccggccctggatcttatttgttcgaagaacaagaccgctcaaaaagctgcctcaaaagtaacgctgctggaagctaaccgggccaagaacctggccattaccctgcgcaaggcagggcgatctgccgaggaaatttgtcgggctattcatactttcgacctccagaccttaccagtggacttcgtagagtgcctcatgaggtttctgccaacagaggctgaggtcaagctcctaaggcaatacgaaagagagaggcagcctctggaggaactggctgccgaggatagattcatgttactgtttagtaaagtcgaacggcttacacagcggatggccgggatggcgtttctaggcaattttcaggacaacctgcaaatgctcaccccccaactgaatgcaataattgcggcctcggcttcggtgaaatcttcacagaagctgaagcagatgctggagatcatcttggccctgggtaattatatgaactctagcaaacggggagccgtctacgggttcaagctgcagtcactagatctcctgctggacaccaaaagtaccgacagaaaaatgaccctgctccatttcattgcccttaccgtgaaggagaagtaccccgacctcgctaatttttggcacgagctccacttcgtcgagaaggcagccgcagtttcattggaaaatgttcttctagatgtaaaggagctaggacggggaatggagctcatcagacgggagtgttctattcacgacaattcagtgctgagaaactttttgtccacgaatgaagggaaactggacaagctgcagcgggatgccaaaaccgccgaagaggcttataatgctgtagtgcggtacttcggggaatctcctaaaaccacaccgccctcggttttctttcctgtgtttgtgcggtttatccgcagttacaaggaggcagagcaggagaatgaagcaagaaagaaacaggaagaggtgatgcgagaaaaacagctggcacaggaggctaagaaactagatgccaagacaccttcccaacgtaacaagtggcagcagcaggagctcatagcggaacttcgcaggagacaggctaaggaacatagacctgtttacgagggtaaggacggaacaatcgaggacattattactgtactgaagagtgtgccctttacagcgagaacagcaaagcgcggctctagatttttctgcgacgcagcacatcacgatgaaagcaattgctag

SEQ ID NO: 282525 - DNA, 3084 bp, Artificial Sequence
  derived and/or modified sequence
atgggaaatctggaatctgcggagggtgtccctggcgagcccccctccgtgccactccttcttccgcccgggaaaatgcccatgcccgaaccttgtgaactggaagaacggttcgcgctcgtgttgagttcgatgaatctgcctccagataaggcacgactactgaggcagtatgataacgaaaagaagtgggacctaatctgcgaccaggagcgcttccaagtgaagaaccctccgcacacttatattcagaaactgcaaagtttcctagacccttccgtgacaagaaagaagttcagacgtcgcgtgcaggaaagcaccaaggtcctcagagaactggagatatcactcagaactaatcatattgggtgggttagagagttcctcaatgatgagaacaagggcctagacgtgctggtcgactatttgtcctttgcacaatgctcagttatgtttgattttgaagggctggagagcggggacgacggagctttcgataagcttcgcagctggtcccgtagtatcgaagatctccagccccctagcgctctgagtgccccctttacaaacagtttagctagaagtgcaaggcagagcgttctcaggtacagcacactgccaggtcgcagagctcttaaaaactctcgactggttagtcagaaggatgatgtgcatgtctgtatcctatgcctgagagccattatgaattaccagtatgggtttaacctagtgatgtcccatcctcacgctgttaacgaaatcgctctgagcttgaacaataaaaatccacgcaccaaagccttggtactagagctccttgctgcagtttgtctcgtgagaggaggccacgaaatcatcttagcagcttttgacaatttcaaagaggtgtgcaaagaacttcacaggtttgagaaactgatggagtattttcgaaatgaagatagcaacatcgacttcatggtggcctgcatgcaattcatcaatatcgtcgtccactcggtcgaagacatgaatttcagagtgcatctgcaatatgagttcactaagctggggctagaggagttcctgcagaagtccaggcataccgaaagcgaaaaactgcaggtgcagatacaagcctacttagataacgtgttcgacgtgggcgggctgctggaggatgctgagaccaaaaatgtcgctttggagaaagtggaggaactggaggagcatgtgtcccacctgacagagaaactgctggatctcgaaaatgagaatatgatgcgggtggccgagcttgaaaagcagttactgcagcgcgagaaagaacttgaatcaatcaaagaaacatatgaaaacacgagccaccaggtgcacaccttgcgccggctaataaaggaaaaggaagaggcattccagcgacggtgtcacttagagcctaacgttagaggactggagtcagtcgattccgaagctctcgcccgcgtgggtcccgcggaactgagcgagggcatgcctcccagcgacttagatctgctggcaccagctccccccccagaagaggtgctgcctttacctccaccacccgcccctcctttgcctccacccccaccccccctacccgataaatgtcctcctgccccacctttgcccggcgccgccccctccgttgtgctcacagtgggcctgagcgccatccgaattaagaaacctatcaagaccaagtttaggctgccggtttttaactggactgcccttaaacccaaccagatttctggcaccgtatttagcgaattggacgatgaaaaaattcttgaagacttggacctggacaagttcgaagagctctttaagacaaaagcccagggaccagcgttggacctgatctgcagcaagaacaagacagcgcaaaaggctgctagtaaggtaaccctgctcgaagcaaatcgtgcaaaaaatctcgctatcactttacggaaggctggacgctcagcggaagagatatgtcgcgcaattcacacttttgatctacagacccttccagtggactttgtggagtgcctgatgcgttttctacccactgaggccgaagtaaagctcctaaggcagtacgaaagagaacgccaacccctcgaagagctcgccgctgaagaccgcttcatgctcctgtttagcaaggtggaacgcctgactcaaaggatggccgggatggcatttcttggcaacttccaggataatctgcaaatgctgaccccccaactgaatgcaatcatcgcagcttctgcttccgtgaagagttcccagaaactgaagcagatgttggaaattattctcgccctgggaaactatatgaattcctccaaacgcggggctgtctatggatttaaactgcagtccctggacctgttgttggacacgaagagcacggacaggaagatgactttgcttcacttcattgcactgactgtcaaagagaaatatccagacttagccaacttttggcatgagctgcatttcgtcgagaaagctgctgccgtaagcctcgagaatgttttactagatgtcaaagaactggggcgtggaatggaactcattaggcgggagtgcagcatacacgataattcagttcttcggaatttccttagtaccaacgaaggcaagttagacaagctgcagcgcgatgccaagaccgcagaggcttataatgccgtcgttagatactttggggaaagccccaagacgactcctccatcagttttcttccccgtgtttgttaggttcattagaagctacaaagaggctgagcaggagaacgaagcacggaaaaagcaggaggaagtgatgcgcgaaaaacagctggcccaagaggccaaaaaattggacgccaagacaccctcccaaagaaacaagtggcagcaacaagagctgattgccgaactccgccggagacaggctaaggagcaccgacccgtttatgagggtaaggatggaactatcgaggacatcattaccgttctgaagagcgtgccctttacagcccgcactgcaaaacggggaagtcgattcttttgtgatgcggctcaccatgatgagagtaactgctag

SEQ ID NO: 282526 - DNA, 3321 bp, Artificial Sequence
  derived and/or modified sequence
gagccggccgcctccgtccgccttgcttcggtgcggctgtccgctacgctgcctccgccctcgccgcgcgcccccgccagcgggactccagggaacccccggcgccctcgacggggccgaggagtcgggactcggggagccggcgctgagggaggagcctggtcggagccgcggagccgaaagctccggagcgtggaggtggggggccgaggcccctgagggggccccgccgcgatgggcaacctggagagcgccgagggggtcccgggagagcccccctctgtcccgttgttgctgccgcccggcaagatgccgatgcctgagccctgtgagctggaggaaaggttcgccctggtgctgagctccatgaacctgcctccagacaaggcccggctcctgcggcagtatgacaatgagaagaaatgggatctgatctgtgaccaggaacgattccaggtgaagaatcctccccacacttacattcagaaactccagagcttcttggaccccagtgtaactcggaagaagttcaggaggagggtgcaggagtcaaccaaagtactaagggagctggagatctctcttcgcaccaaccacattgggtgggtgcgggaatttctgaatgatgaaaacaaaggcctggatgtactggtggattacctgtcctttgcccagtgttctgtcatgtttgactttgagggtctggaaagtggtgacgatggtgcatttgacaaactccggtcctggagcaggtcaatcgaggacctgcagccacccagcgccctgtcggcccccttcaccaacagcctcgctcgctctgcgcgccagtctgtgctccggtatagcactctccctgggcgcagggccctgaagaactcccgcctagtgagccagaaggatgacgtccacgtctgtatcctttgtctcagagccatcatgaactatcagtacggattcaacctggtcatgtcccacccccatgctgtcaatgagattgcacttagcctcaataacaagaatccaaggaccaaagcccttgtcttagagcttctggcagctgtgtgtttggtgcgaggaggtcacgaaatcatccttgctgcctttgacaatttcaaagaggtatgcaaggagctgcaccgctttgagaagctgatggagtatttccggaatgaggacagcaatattgacttcatggtggcctgcatgcagttcatcaacatcgtggtgcactcggtggaggacatgaacttccgggtccacctgcagtatgagtttaccaagctggggctagaggagttcctgcagaagtcaaggcacacagagagcgagaagctgcaggtgcagattcaggcatatctggacaacgtgtttgatgtcgggggtttgttggaggatgctgagaccaagaatgtagccctggagaaggtggaggagttggaggagcatgtgtcccatctcacagagaagcttctggacctagagaatgaaaacatgatgcgggtggcagaactagagaagcagctgctacagcgggagaaggaactagagagcatcaaggagacatatgagaacacaagccaccaggtgcacaccctgcggaggctcattaaagagaaggaggaggcctttcagcgtcgatgtcatttggagccaaatgtccggggcctggagtctgtggacagtgaggccctggccagagtaggccctgcagagctgagtgagggcatgccaccctccgacctggaccttctggctccagccccaccccctgaggaggtcctgcctcttcctccaccaccagctccgcccttgccccctccacctcccccattaccagacaagtgtcccccagccccacctctccctggtgctgcaccctctgtggtgttgacagtgggcctgtcagccattcgaattaagaaacctatcaagaccaagttccggctgcctgtcttcaactggacagcactgaaacccaaccagatcagtggcactgtcttcagcgaacttgatgatgagaagatcttggaggacctggatcttgataagtttgaagaattattcaagacaaaagcgcagggccctgcccttgacctcatctgctccaaaaacaagacagcgcaaaaagctgccagcaaggtgactctgttggaagccaatcgtgccaagaacctggccatcaccctacgcaaggctggccgctcggctgaggagatctgcagggccattcatacgtttgacttgcagacactacctgtggacttcgtggagtgcctgatgcgcttcctgcccacagaggctgaggtaaagctgctgcggcaatatgagcgggagcggcagcccctggaggagttggcagctgaggaccgcttcatgctgctcttcagcaaggtggaacggttgacccagcgaatggctggcatggccttcctggggaacttccaggataacctgcagatgctcacaccgcaactcaatgccatcattgcggcgtccgcttccgtcaagtcttcacagaagctgaagcagatgttggagatcatacttgcactggggaactacatgaacagcagcaagcggggagctgtgtatggcttcaagctccagagcctggatctgctgctggataccaagtccactgaccggaagatgacactgcttcatttcatcgccttgacagtgaaggagaaatacccagacctggctaacttctggcatgagctgcactttgttgagaaggctgcagcagtgtccctggagaacgtgctgctggacgtgaaggagctgggccggggcatggagctgattcggcgtgagtgcagcatccatgacaacagcgtcctccggaacttcctcagtaccaatgaaggcaaactagacaagctccagcgggacgccaagacggctgaggaggcctacaatgcagttgtgcgctactttggcgagagtcccaagactacacctccttctgtattcttcccagtatttgtccgattcattcgttcttacaaggaagcagaacaagagaatgaagcccgcaagaagcaggaggaggtaatgcgggagaagcagctggctcaggaagccaagaaactggatgccaagaccccatcccagcggaacaagtggcaacagcaggagttaatagcagagttgaggcggcgccaggccaaggaacaccggcctgtttatgaggggaaggatggtaccatcgaggacatcatcacagtgctgaagagtgtccctttcacggcccgtactgccaagcggggctcacgcttcttctgtgatgcagcccaccatgatgagtcaaactgttag

SEQ ID NO: 282527 - DNA, 4118 bp, Artificial Sequence
  derived and/or modified sequence
ggaggtggggggccgaggcccctgagggggccccgccgcgatgggcaacctggagagcgccgagggggtcccgggagagcccccctctgtcccgttgttgctgccgcccggcaagatgccgatgcctgagccctgtgagctggaggaaaggttcgccctggtgctgagctccatgaacctgcctccagacaaggcccggctcctgcggcagtatgacaatgagaagaaatgggatctgatctgtgaccaggaacgattccaggtgaagaatcctccccacacttacattcagaaactccagagcttcttggaccccagtgtaactcggaagaagttcaggaggagggtgcaggagtcaaccaaagtactaagggagctggagatctctcttcgcaccaaccacattgggtgggtgcgggaatttctgaatgatgaaaacaaaggcctggatgtactggtggattacctgtcctttgcccagtgttctgtcatgtttgactttgagggtctggaaagtggtgacgatggtgcatttgacaaactccggtcctggagcaggtcaatcgaggacctgcagccacccagcgccctgtcggcccccttcaccaacagcctcgctcgctctgcgcgccagtctgtgctccggtatagcactctccctgggcgcagggccctgaagaactcccgcctagtgagccagaaggatgacgtccacgtctgtatcctttgtctcagagccatcatgaactatcagtacggattcaacctggtcatgtcccacccccatgctgtcaatgagattgcacttagcctcaataacaagaatccaaggaccaaagcccttgtcttagagcttctggcagctgtgtgtttggtgcgaggaggtcacgaaatcatccttgctgcctttgacaatttcaaagaggtatgcaaggagctgcaccgctttgagaagctgatggagtatttccggaatgaggacagcaatattgacttcatggtggcctgcatgcagttcatcaacatcgtggtgcactcggtggaggacatgaacttccgggtccacctgcagtatgagtttaccaagctggggctagaggagttcctgcagaagtcaaggcacacagagagcgagaagctgcaggtgcagattcaggcatatctggacaacgtgtttgatgtcgggggtttgttggaggatgctgagaccaagaatgtagccctggagaaggtggaggagttggaggagcatgtgtcccatctcacagagaagcttctggacctagagaatgaaaacatgatgcgggtggcagaactagagaagcagctgctacagcgggagaaggaactagagagcatcaaggagacatatgagaacacaagccaccaggtgcacaccctgcggaggctcattaaagagaaggaggaggcctttcagcgtcgatgtcatttggagccaaatgtccggggcctggagtctgtggacagtgaggccctggccagagtaggccctgcagagctgagtgagggcatgccaccctccgacctggaccttctggctccagccccaccccctgaggaggtcctgcctcttcctccaccaccagctccgcccttgccccctccacctcccccattaccagacaagtgtcccccagccccacctctccctggtgctgcaccctctgtggtgttgacagtgggcctgtcagccattcgaattaagaaacctatcaagaccaagttccggctgcctgtcttcaactggacagcactgaaacccaaccagatcagtggcactgtcttcagcgaacttgatgatgagaagatcttggaggacctggatcttgataagtttgaagaattattcaagacaaaagcgcagggccctgcccttgacctcatctgctccaaaaacaagacagcgcaaaaagctgccagcaaggtgactctgttggaagccaatcgtgccaagaacctggccatcaccctacgcaaggctggccgctcggctgaggagatctgcagggccattcatacgtttgacttgcagacactacctgtggacttcgtggagtgcctgatgcgcttcctgcccacagaggctgaggtaaagctgctgcggcaatatgagcgggagcggcagcccctggaggagttggcagctgaggaccgcttcatgctgctcttcagcaaggtggaacggttgacccagcgaatggctggcatggccttcctggggaacttccaggataacctgcagatgctcacaccgcaactcaatgccatcattgcggcgtccgcttccgtcaagtcttcacagaagctgaagcagatgttggagatcatacttgcactggggaactacatgaacagcagcaagcggggagctgtgtatggcttcaagctccagagcctggatctgctgctggataccaagtccactgaccggaagatgacactgcttcatttcatcgccttgacagtgaaggagaaatacccagacctggctaacttctggcatgagctgcactttgttgagaaggctgcagcagtgtccctggagaacgtgctgctggacgtgaaggagctgggccggggcatggagctgattcggcgtgagtgcagcatccatgacaacagcgtcctccggaacttcctcagtaccaatgaaggcaaactagacaagctccagcgggacgccaagacggctgaggcctacaatgcagttgtgcgctactttggcgagagtcccaagactacacctccttctgtattcttcccagtatttgtccgattcattcgttcttacaaggaagcagaacaagagaatgaagcccgcaagaagcaggaggaggtaatgcgggagaagcagctggctcaggaagccaagaaactggatgccaagaccccatcccagcggaacaagtggcaacagcaggagttaatagcagagttgaggcggcgccaggccaaggaacaccggcctgtttatgaggggaaggatggtaccatcgaggacatcatcacagtgctgaagagtgtccctttcacggcccgtactgccaagcggggctcacgcttcttctgtgatgcagcccaccatgatgagtcaaactgttagcccccaaggttggggcccgacaggcctccactgccagcctatggttgttcgccaccaagccaggagtgctgcaccgcccagtggtccccctcgggctccaggcccccactgagaccctctcggaggcagaagcacttcacccctcagagtcctacaagtccaaccagtggacctggaattggccaagggctcaggagagggctgtgttgctctctcaaccatgtccgccccagctcttgaggctggatctttctacttgtgccactatgggcactaggtctgtaggtccctggtgcttccagtactgcactttgcccccaaggtctttgacttcatttcctgaagggtcaccaagggtcagctcagggctaggaaaaaccatttccagccttagcctaaacagggcacatagatctctcccactagagcccagagggatgagaggagagagcaactgttctttctttttttttcccttcctttttgcaggcccatggtcagctctggtctagatgtatctaggcttagggagccctgggaccctgccagtctcagttcatctcttaccaggagcaaggccctctgaagcatgggccgtgccagctgtgccctagtgataagggtaagaggagagatgtcaggctcactgcccttatttctctgcccatttcattctaggctcacactgtccttgtcaaggtgggcagaagagcagaggtcttctctgcaccaaccactctctgcagatggctggagaaagggtgtgccaactcttcaccttctttcctcagctacggtttttttttttttttttttttttttggcaggggacaaggagcatggtggtcttggctatttgcttaccttcccgtttctcctctgcccctggaagggaatgtgggggcccacttttttgtacatgtaccacctccctttcctcttactgtacataaacctcagactctccccctctcaacaaaggcttgatgcacca

SEQ ID NO: 282528 - DNA, 3087 bp, Artificial Sequence
  derived and/or modified sequence
atgggcaacctggagagcgctgagggcgtgcctggagagccccccagcgtgcccctgctgctgcccccaggcaagatgcccatgcctgagccctgtgagctggaggagagatttgccctggtgctgagctccatgaacctgcccccagacaaggcccggctgctgcggcagtatgacaatgagaagaagtgggacctgatctgtgaccaggagcgcttccaggtgaagaaccccccccacacctacatccagaagctgcagagcttcctggaccccagcgtgaccaggaagaagttcagaagaagagtgcaggagagcaccaaggtgctgcgggagctggagatcagcctgcggaccaaccacatcggctgggtgcgggagttcctgaatgatgagaacaagggcctggatgtgctggtggactacctgagctttgcccagtgcagcgtgatgtttgattttgagggcctggagagcggagatgatggagcctttgacaagctgcgctcctggagccgcagcattgaggacctgcagccccccagcgccctgagcgcccccttcaccaacagcctggcccggagcgcccggcagagcgtgctgcgctacagcaccctgcctggaagaagagccctgaagaacagccggctggtgtcccagaaggatgatgtgcacgtgtgcatcctgtgcctgcgggccatcatgaactaccagtatggcttcaacctggtgatgagccacccccatgctgtgaatgagatcgccctgagcctgaacaacaagaaccccaggaccaaggccctggtgctggagctgctggccgctgtgtgcctggtgcggggcggccacgagatcatcctggccgcctttgacaacttcaaggaggtgtgcaaggagctgcacagatttgagaagctgatggagtacttcagaaatgaagacagcaacatcgacttcatggtggcctgcatgcagttcatcaacatcgtggtgcacagcgtggaggacatgaacttccgggtgcacctgcagtatgagttcaccaagctgggcctggaggagttcctgcagaagagccgccacacagagagcgagaagctgcaggtgcagatccaggcctacctggacaacgtgtttgatgtgggcggcctgctggaggatgctgagaccaagaatgtggccctggagaaggtggaggagctggaggagcacgtgagccacctgacagagaagctgctggacctggagaatgaaaacatgatgagggtggccgagctggagaagcagctgctgcagcgggagaaggagctggagagcatcaaggagacctatgagaacaccagccaccaggtgcacaccctgcggcggctcatcaaggagaaggaggaggccttccagaggcgctgccacctggagcccaacgtgcggggcctggagagcgtggacagcgaggccctggcccgggtgggccctgctgagctgtctgagggcatgcccccaagtgacctggacctgctggccccagcccctcctcctgaggaggtgctgcccctgcccccacctccagccccacccctgcccccacctcctccacccctgcctgacaagtgccccccagccccacccctgcccggggccgcccccagcgtggtgctgactgtgggcctgagcgccatccgcatcaagaagcccatcaagaccaagttccggctgcccgtcttcaactggacagccctgaagcccaaccagatctctggaacagtgttcagcgagctggatgatgagaagatcctggaggacctggacctggacaagtttgaggagctgttcaagaccaaggcccagggccctgccctggacctgatctgcagcaagaacaagacagcccagaaggccgccagcaaggtgaccctgctggaggccaacagagccaagaacctggccatcaccctgaggaaggccggccgctctgctgaggagatctgccgggccatccacacctttgacctgcagaccctgcctgtggactttgtggagtgcctgatgaggttcctgcccacagaagctgaggtgaagctgctgcggcagtatgagcgggagcggcagcccctggaggagctggccgctgaggaccgcttcatgctgctcttcagcaaggtggagcggctgacccagaggatggccggcatggccttcctgggcaacttccaggacaacctgcagatgctgaccccccagctgaatgccatcatcgccgccagcgcctctgtgaagagcagccagaagctgaagcagatgctggagatcatcctggccctgggcaactacatgaacagcagcaagagaggagctgtgtatggcttcaagctgcagagcctggacctgctgctggacaccaagagcacagacaggaagatgaccctgctgcacttcatcgccctgactgtgaaggagaagtacccagacctggccaacttctggcatgagctgcactttgtggagaaggctgctgctgtgtccctggagaatgtgctgctggatgtgaaggagctgggccggggcatggagctgatcagaagagaatgttccatccatgacaacagcgtgctgaggaacttcctgagcaccaatgaaggcaagctggacaagctgcagagagatgccaagacagctgaggaggcctacaatgctgtggtgcgctactttggagagagccccaagaccaccccacccagcgtcttcttccctgtgtttgtgcgcttcatccgcagctacaaggaggccgagcaggagaatgaggccaggaagaagcaggaggaggtgatgagggagaagcagctggcccaggaggccaagaagctggatgccaagacccccagccagaggaacaagtggcagcagcaggagctgattgctgagctgcggcggcggcaggccaaggagcacaggcctgtgtatgagggcaaggatggcaccatcgaggacatcatcaccgtgctgaagtctgtgcccttcaccgccaggacagccaagaggggcagccgcttcttctgtgatgctgcccaccatgatgagagcaactgctag

SEQ ID NO: 282529 - DNA, 3084 bp, Artificial Sequence
  derived and/or modified sequence
atgggcaacctggagagcgctgagggcgtgcctggagagccccccagcgtgcccctgctgctgcccccaggcaagatgcccatgcctgagccctgtgagctggaggagagatttgccctggtgctgagctccatgaacctgcccccagacaaggcccggctgctgcggcagtatgacaatgagaagaagtgggacctgatctgtgaccaggagcgcttccaggtgaagaaccccccccacacctacatccagaagctgcagagcttcctggaccccagcgtgaccaggaagaagttcagaagaagagtgcaggagagcaccaaggtgctgcgggagctggagatcagcctgcggaccaaccacatcggctgggtgcgggagttcctgaatgatgagaacaagggcctggatgtgctggtggactacctgagctttgcccagtgcagcgtgatgtttgattttgagggcctggagagcggagatgatggagcctttgacaagctgcgctcctggagccgcagcattgaggacctgcagccccccagcgccctgagcgcccccttcaccaacagcctggcccggagcgcccggcagagcgtgctgcgctacagcaccctgcctggaagaagagccctgaagaacagccggctggtgtcccagaaggatgatgtgcacgtgtgcatcctgtgcctgcgggccatcatgaactaccagtatggcttcaacctggtgatgagccacccccatgctgtgaatgagatcgccctgagcctgaacaacaagaaccccaggaccaaggccctggtgctggagctgctggccgctgtgtgcctggtgcggggcggccacgagatcatcctggccgcctttgacaacttcaaggaggtgtgcaaggagctgcacagatttgagaagctgatggagtacttcagaaatgaagacagcaacatcgacttcatggtggcctgcatgcagttcatcaacatcgtggtgcacagcgtggaggacatgaacttccgggtgcacctgcagtatgagttcaccaagctgggcctggaggagttcctgcagaagagccgccacacagagagcgagaagctgcaggtgcagatccaggcctacctggacaacgtgtttgatgtgggcggcctgctggaggatgctgagaccaagaatgtggccctggagaaggtggaggagctggaggagcacgtgagccacctgacagagaagctgctggacctggagaatgaaaacatgatgagggtggccgagctggagaagcagctgctgcagcgggagaaggagctggagagcatcaaggagacctatgagaacaccagccaccaggtgcacaccctgcggcggctcatcaaggagaaggaggaggccttccagaggcgctgccacctggagcccaacgtgcggggcctggagagcgtggacagcgaggccctggcccgggtgggccctgctgagctgtctgagggcatgcccccaagtgacctggacctgctggccccagcccctcctcctgaggaggtgctgcccctgcccccacctccagccccacccctgcccccacctcctccacccctgcctgacaagtgccccccagccccacccctgcccggggccgcccccagcgtggtgctgactgtgggcctgagcgccatccgcatcaagaagcccatcaagaccaagttccggctgcccgtcttcaactggacagccctgaagcccaaccagatctctggaacagtgttcagcgagctggatgatgagaagatcctggaggacctggacctggacaagtttgaggagctgttcaagaccaaggcccagggccctgccctggacctgatctgcagcaagaacaagacagcccagaaggccgccagcaaggtgaccctgctggaggccaacagagccaagaacctggccatcaccctgaggaaggccggccgctctgctgaggagatctgccgggccatccacacctttgacctgcagaccctgcctgtggactttgtggagtgcctgatgaggttcctgcccacagaagctgaggtgaagctgctgcggcagtatgagcgggagcggcagcccctggaggagctggccgctgaggaccgcttcatgctgctcttcagcaaggtggagcggctgacccagaggatggccggcatggccttcctgggcaacttccaggacaacctgcagatgctgaccccccagctgaatgccatcatcgccgccagcgcctctgtgaagagcagccagaagctgaagcagatgctggagatcatcctggccctgggcaactacatgaacagcagcaagagaggagctgtgtatggcttcaagctgcagagcctggacctgctgctggacaccaagagcacagacaggaagatgaccctgctgcacttcatcgccctgactgtgaaggagaagtacccagacctggccaacttctggcatgagctgcactttgtggagaaggctgctgctgtgtccctggagaatgtgctgctggatgtgaaggagctgggccggggcatggagctgatcagaagagaatgttccatccatgacaacagcgtgctgaggaacttcctgagcaccaatgaaggcaagctggacaagctgcagagagatgccaagacagctgaggcctacaatgctgtggtgcgctactttggagagagccccaagaccaccccaccttctgtgttcttccctgtgtttgtgcgcttcatccgcagctacaaggaggccgagcaggagaatgaggccaggaagaagcaggaggaggtgatgagggagaagcagctggcccaggaggccaagaagctggatgccaagacccccagccagaggaacaagtggcagcagcaggagctgattgctgagctgcggcggcggcaggccaaggagcacaggcctgtgtatgagggcaaggatggcaccatcgaggacatcatcaccgtgctgaagtctgtgcccttcaccgccaggacagccaagaggggcagccgcttcttctgtgatgctgcccaccatgatgagagcaactgctag

SEQ ID NO: 282530 - DNA, 3087 bp, Artificial Sequence
  derived and/or modified sequence
atgggcaacctggagagcgccgagggcgtgcccggcgagccccccagtgtgccgttactactacctcccggcaagatgccaatgcctgaaccctgtgagctggaagagaggttcgctttggttttgtctagtatgaacctccctcccgacaaggcgagacttctaaggcagtacgacaacgagaagaaatgggatctcatttgcgaccaggaacggttccaggtgaagaacccgccgcatacatatatccagaaactccagtcttttctggaccccagcgttaccagaaagaagtttaggcgacgcgttcaagagtctacaaaagtcctgcgggagctggaaattagcctgagaaccaatcatatagggtgggtgagggagtttctcaacgacgagaacaaaggactagacgtgctggttgattacttgtccttcgcacaatgttctgtgatgttcgatttcgaagggctggaaagtggcgacgacggggcattcgataagctgaggagttggtctagatctatcgaggacttacaaccccctagcgctctgtccgcgccattcaccaatagcttggcccggtctgcgcgacagagcgtgttacgctattctacactgcccggacggcgtgcacttaaaaatagtaggctcgtgtctcagaaggatgacgtacacgtatgcatcctatgcttacgcgcgatcatgaattatcaatatggctttaatctggttatgtctcacccgcacgctgtaaacgagattgccctgtccctcaacaataaaaatccgagaacaaaggcgctggtgctggagctgctggctgccgtgtgtcttgtgagggggggacacgaaataatactggcggcctttgataacttcaaagaggtgtgcaaagaactacatcgctttgaaaaacttatggagtacttccgcaatgaggattcaaatatcgattttatggtggcctgcatgcaatttattaatatcgtggtacattccgtggaggacatgaactttagggtccacctacagtatgagttcactaagttaggactggaggagttcctgcaaaagtcgcgccacacggaatcagagaagctgcaggtgcagatacaagcttaccttgataatgtgtttgatgttggcggtctcctcgaagatgcggagacaaagaatgttgccttagaaaaagtggaagagttggaggagcatgtctctcatctcaccgaaaagctgcttgatctcgagaatgaaaacatgatgagggtggctgagctcgaaaaacagctgcttcaacgggagaaagaactcgaatccataaaagaaacttacgagaacacgtcccaccaggtgcacacacttagacggctgatcaaggagaaagaggaagctttccagcggaggtgtcatcttgagccgaatgtccgcgggttggaatctgtggatagtgaagcgctcgctcgtgttggccccgcagagctctctgagggtatgcccccctctgatctagacctgctcgcgcctgctccgcccccagaggaagtgctcccgctgcccccacccccggctccaccgctgccgcctcccccacctcccctgcccgacaaatgccctcctgcccctcctctcccaggtgcagccccctctgtggtcctgacggttggtcttagcgccatcaggataaaaaaacccatcaagaccaaattccggctcccagtgttcaactggaccgcactcaagcctaaccagatctctgggaccgttttctcagaactggacgatgaaaagattttggaagatcttgacctcgataagttcgaagaactctttaagacaaaagcgcagggccccgctctggatctcatctgctctaaaaacaagacggcacagaaagcagctagcaaggttactctgctggaggccaatagagcgaagaatctcgccattactctgcgcaaggcggggagatccgccgaagagatctgtagggcaatacacacatttgatctccagacactaccagtagactttgtggagtgtctgatgcgcttcttgcccaccgaagctgaggtgaagttgttacgccagtacgagagagagcggcagcctttggaagaactggctgccgaagatcgctttatgcttttgttcagcaaggtggagcgcctcacacaaagaatggctgggatggcctttctgggaaactttcaggataatctgcagatgctcacgccccagctcaacgctattattgctgcctctgcctcggtgaagagttcgcaaaaattgaaacagatgctggagataatcctggctctgggcaattacatgaacagttccaagcgtggcgccgtgtacggattcaaattgcagtcccttgatcttctactggataccaagtccacggaccgaaagatgactctgctgcactttattgctctcacagttaaggagaagtaccccgacctggcaaacttttggcatgaacttcatttcgtggaaaaggccgccgcggtgtccctggaaaatgtgctcctcgacgttaaggagttgggtcgcggcatggagctgattcgcagggagtgctcgatccacgataatagcgtgttgagaaacttcttgagtaccaacgaggggaagctggataagctgcaaagagacgcaaagaccgctgaggaagcttacaatgccgtggtgcgatacttcggcgaatcccctaaaactacacccccatccgtgttcttccctgtgttcgtgcgctttattagatcgtataaagaagcagagcaggagaacgaggccaggaagaaacaggaagaggttatgcgggagaagcagctggcgcaggaagctaagaaattggatgcaaagactccaagtcagaggaacaagtggcagcagcaggaactaattgccgagcttcggcggcgacaggccaaggagcaccgaccagtctacgagggaaaggacggcaccatcgaagatatcatcacagtgcttaagagcgttcccttcaccgccagaacagccaaaagaggctcgagatttttctgcgacgctgctcaccatgatgagtcaaactgttag

SEQ ID NO: 282531 - DNA, 3084 bp, Artificial Sequence
  derived and/or modified sequence
atgggcaacctggagagcgccgagggcgtgcccggcgagcccccctcggttccgcttctgctgcccccaggcaaaatgcctatgcctgagccctgcgaactcgaagaacggtttgccctcgtgctgagcagcatgaacttacctcctgacaaggctcggctgctgcgccagtacgataacgagaaaaagtgggatctgatttgcgatcaggagagattccaagtcaagaatcctcctcacacctacatacagaaacttcagtcatttctcgatccatctgttacgcgtaaaaaatttaggcggcgcgttcaagagagcaccaaggtgctgcgggaactggaaatttcacttcgaactaaccatattgggtgggtgcgggaattcttgaacgacgaaaataaggggctcgacgtgcttgtcgactacctgagctttgcgcaatgttctgtcatgttcgatttcgagggtttagaaagtggcgatgatggcgcctttgataagctccgatcctggtcccggtctatcgaagacctgcagcctccctccgccctgagtgcaccttttactaactctttagcacggagtgccaggcagagtgtgctccggtattctactctcccgggtagaagggcactgaagaactcaaggttggtcagccagaaggacgatgtgcacgtctgcattctctgcctaagagccatcatgaattaccagtatggattcaatctggtcatgtcccacccgcacgctgtgaacgagatcgcgttatcgctgaacaataaaaatcctcggaccaaggcattggtgctggagctgctggccgcggtgtgtctagtacgtggcggccacgaaatcattttggcagctttcgataacttcaaggaggtatgtaaggagttacacaggtttgagaagctcatggaatattttcggaacgaggattcgaatatcgactttatggtagcttgtatgcagtttatcaacatcgtcgtgcacagtgtagaggacatgaacttccgagtgcacttacagtatgagttcactaagttgggcctggaagagttcctccagaaaagcagacatacagagtccgaaaagctgcaagtgcaaatccaagcatacttggacaatgtgtttgatgtcggtgggctgctggaagacgcagagacgaagaacgtagccctcgagaaggtggaggagctggaggaacatgttagtcacctgacggagaagctccttgacctggaaaacgagaacatgatgcgggtagcagaactggagaaacagctcctgcaaagggagaaggagttggagtcaatcaaagaaacctacgagaacaccagtcaccaggtgcacacattacgacgcctgattaaagagaaggaagaggccttccagagacggtgccacctcgaaccaaatgtcagaggcctggagtccgtcgattcagaggctttagctagggtgggtccagccgaactctcggaaggcatgcccccgtcagatctggatttgctcgcccctgccccccctcctgaggaggtgttgccgcttccaccgcctcccgcccctccgttgcctccgccgcctcccccactgcccgataaatgccctcccgcccctcctcttcccggagccgccccaagcgtcgtgctcactgttggtctgtccgccatcaggattaaaaagccgatcaagaccaaatttagactgcctgtgttcaattggactgcactgaaacctaaccagattagcgggactgtcttttctgagctggatgacgagaagattttagaggaccttgatctggataaatttgaggagctgtttaaaactaaggcgcaaggccccgctctggatttgatctgtagcaagaacaaaacagcacagaaagctgcgagcaaagtgactcttctagaagcaaatcgcgccaagaatttggccatcactctccggaaagcggggagatccgccgaggaaatttgtagagcaatccacaccttcgatcttcagaccttgcccgttgattttgtggagtgccttatgcggtttttgcccactgaggcggaagtcaagttgctgcgtcaatatgagagggagaggcaacccctcgaggagctggccgctgaggatcgctttatgctgctgttcagcaaagtcgagcgcctgacacagcgtatggctgggatggcattcctggggaacttccaagacaaccttcagatgctgacacctcagctaaatgctattatagccgcttccgctagtgtcaaatcctcccaaaagctcaaacagatgttagagattatactcgcactgggtaattacatgaacagctctaagaggggcgcggtgtatggatttaaactgcagtcccttgacctcctcttagataccaagtcgaccgatagaaagatgaccctgctacacttcattgcactcacagttaaggagaagtatccggatctcgctaacttctggcacgagctccattttgttgagaaggctgcggctgtgagtctcgaaaacgtgctgctggacgtgaaggagttgggaagaggtatggaactgattcggagagagtgctcgatccacgacaattctgtcctcaggaacttcctgtccacaaatgagggcaagctagacaaactgcaacgcgacgctaagaccgctgaggcatacaacgctgtggtacgctatttcggagaatcacccaagaccaccccaccgtccgttttcttcccagtctttgtcagatttataaggtcatacaaggaagccgaacaggagaatgaggcgaggaaaaagcaggaggaagtcatgagagaaaagcagctcgcacaggaggctaagaagttggacgctaagaccccttcacagcggaacaagtggcagcagcaggaactgattgccgagttgaggcgccgccaggccaaggagcatagacccgtctacgaaggcaaggatgggacaatcgaggatattatcaccgtgttgaagtctgtgccattcacagcaaggacagccaagcggggaagcaggttcttctgcgatgccgctcaccacgatgagtccaattgctag

SEQ ID NO: 282532 - DNA, 3087 bp, Artificial Sequence
  derived and/or modified sequence
atgggaaacttggagtctgccgaaggtgtgccaggcgagcccccttccgtgccactgcttctcccacccggtaaaatgcctatgcccgaaccgtgcgaactcgaagagcgatttgccctagtactgtcatctatgaatctacctccggataaggccaggcttcttcggcagtacgataacgagaaaaaatgggaccttatatgcgatcaggaaaggtttcaagtgaaaaatccgcctcatacatacattcagaagctccaaagtttccttgaccccagcgttacccggaagaaatttagaagacgcgtacaggaatcaacaaaagtgttacgagaactggaaatctctcttcggactaaccatattgggtgggtgcgtgaattcttgaacgatgagaataagggattggacgttttagtggattacctctccttcgcccaatgctccgtgatgttcgattttgagggactggaatccggcgacgacggcgcttttgacaagctgaggtcttggagcagaagtattgaagacctgcagccaccttcagccctctcagcacctttcaccaactccctcgcacggtctgccaggcagagcgtactgagatatagcacacttccgggtcgacgggctcttaaaaatagcagattagtgtctcaaaaggatgacgtacacgtttgtattctgtgccttagagccatcatgaattatcagtacggctttaacctggtgatgtcacatcctcacgcggttaacgagattgctctgagtctgaataacaagaatcccaggaccaaggctttagtcctcgaattgctcgctgccgtctgtctggttagaggaggacatgaaatcatcctcgccgctttcgataactttaaggaggtctgtaaggagctccataggtttgagaaactcatggaatatttccgaaatgaggatagtaacattgactttatggtcgcgtgcatgcagtttataaacatcgtggtccactctgttgaggacatgaactttagggtgcaccttcagtatgagttcacaaagttagggttggaagagttcctgcagaaatcgcgccacaccgagagtgagaagctacaagtccagatccaggcctacttggataatgtgttcgacgttgggggactgttagaggatgcagaaaccaaaaacgtggccctcgagaaagtagaggaacttgaggagcatgtgagccatcttacagagaaactactggaccttgaaaacgaaaatatgatgagagtagccgagctggagaaacagctgctgcaacgggaaaaagaactcgagtctatcaaagagacctacgagaatacttcgcaccaagtgcatactctacgtcggctcattaaagaaaaagaagaagcatttcagaggagatgccacctggaacccaatgtgcgcggtctggagtcagttgacagtgaggcccttgcaagagtaggccctgcagaactttctgagggcatgcctccaagtgacttggacttgcttgccccagctcctcccccagaagaggtcctccccctgcctccccctcccgcaccaccccttccaccgccaccacctcccctgccagataaatgccctcctgcaccgcctcttcccggagccgctcccagcgtggtgctgaccgtgggtttgtcagctatcaggatcaagaaaccaatcaagactaaattccgcctgcccgtctttaactggactgccctgaagcctaaccagatctccggaactgtattcagtgagctcgatgacgagaagattctggaggatctggacctcgacaagttcgaagaattattcaagaccaaggctcaaggacctgctttggatctgatctgtagtaaaaataagacagctcagaaggctgcaagcaaggtaactttactcgaagcgaatcgcgctaaaaatctggcaatcaccctgcgaaaggccggtcgttccgctgaagaaatttgccgggctatccacaccttcgatttgcagactctgcctgtggacttcgtggaatgtctaatgcgatttctcccgactgaggctgaggtgaagttactgcggcagtatgaacgtgagcgacaacctctagaggagcttgccgctgaagaccgattcatgcttctgttttccaaagtggaacgactcacccagcgcatggctggaatggcttttcttggtaacttccaggacaacttacagatgcttaccccacaattaaacgcgataatcgcggcatcagcaagcgttaaaagcagtcagaaattaaagcaaatgttggagatcatcctcgccctaggaaattacatgaattcttcgaagcggggagcagtgtacggcttcaaactgcagtccctggatcttctgctggatacgaagagcactgatcggaagatgactctcctgcatttcatcgcactgacagtgaaggagaagtaccctgatctggctaacttttggcacgagctgcatttcgtagagaaggcagcagccgtgtcactggaaaatgtgctactggacgtgaaagagctgggcagaggtatggaacttattcggcgagaatgttccatccacgacaactccgtactgagaaatttcctgtccactaacgagggcaagctcgataagcttcagcgagacgctaaaaccgcggaggaagcctacaacgccgtggtaaggtattttggagagtcccctaaaactaccccccctagcgttttcttccccgtcttcgttaggttcattcgctcatacaaagaagccgagcaggaaaacgaggctcggaaaaagcaggaagaggtcatgcgcgagaaacagctcgcccaagaggctaaaaaattagatgctaaaacacctagtcagaggaataaatggcagcagcaggaactgatcgcagaactgcggaggcggcaagcaaaagaacaccgtcccgtttatgaaggtaaggacggaactatcgaggacattatcacagtgctcaaaagtgttccctttaccgcgcgtaccgccaagcgagggagcagattcttttgcgacgccgctcatcacgacgaatccaattgttag

SEQ ID NO: 282533 - DNA, 3084 bp, Artificial Sequence
  derived and/or modified sequence
atgggcaacctggaatctgccgaaggtgttcccggtgaacctccaagcgtccccttgctgttacctcccggaaagatgcctatgcccgagccgtgtgagctggaggagaggtttgccctggttctgtccagcatgaacctgccccctgataaggcgaggctgttgagacaatatgataacgaaaaaaaatgggaccttatctgcgaccaggagagatttcaggtcaagaacccacctcacacctatatacagaaactacagagctttctcgacccaagtgtaacaaggaagaagttcagacgtcgcgtacaggagtccaccaaagtgctacgagagctagagatttctctgaggacaaatcacatcggctgggtgcgggaattcttaaatgatgagaataagggacttgacgtgttggtcgactatctttctttcgcacagtgttctgtgatgtttgattttgaaggcctagaatctggagatgatggggcatttgataagctgcggtcttggagtaggagtatcgaagatctccagccacccagcgcgctgagtgctcccttcactaactcactggctaggagtgcgagacagtcagttctgaggtactcaacattgccgggaagacgagctctgaagaatagccggttagtctcccagaaggacgacgtgcacgtttgcatactgtgcttaagggccattatgaattaccagtatgggtttaaccttgtaatgtcacatccacatgccgttaacgagattgctctctccctcaacaacaaaaaccctcggaccaaggccctagtactagagctgcttgctgctgtttgcctggtccgcggtggccatgagataattttggccgcattcgataactttaaagaggtttgcaaagaattgcacagatttgagaaactaatggaatatttccggaacgaggacagtaacatcgattttatggtcgcgtgcatgcagttcattaacatagttgtccattccgtcgaagatatgaacttccgcgtccacctgcagtacgagtttaccaaattgggacttgaggagttcctgcagaaatccagacacactgagtcggaaaaacttcaagtgcagatacaggcttacctggacaacgtcttcgacgttggcggactactcgaagacgccgagacgaaaaacgtggccctcgaaaaggtagaagaacttgaagaacacgtttctcatctgacagaaaagctgctagacctagaaaacgagaatatgatgcgtgtggccgaactggaaaagcagcttttgcaacgcgaaaaggagttggaaagcatcaaggaaacgtatgagaacactagtcaccaggtacacactctgagacgactcatcaaggaaaaggaagaggcattccagcgaaggtgccaccttgaacctaacgtgcgcggactggaatcggtggacagcgaggccttggccagagtgggccctgccgagctgagcgagggcatgccgccaagcgatctggatctgctagcacccgctccccctcccgaagaagtgttaccactcccccctcctcccgcacccccattaccccctcctccaccaccgctgccggacaaatgtccacctgcacctcctctcccaggagccgcacccagcgttgtgctaaccgtaggactcagcgcgattagaatcaagaaacccattaagactaagtttcggttgcccgtgttcaactggacggctttaaaaccaaaccagatatctggtacagtcttttcggaactggatgatgaaaagattcttgaggacctcgatttagataagtttgaggaactgtttaagacaaaagcgcagggaccagctctggatctgatctgctctaagaataagactgcccagaaagcagcctctaaagtaacactcttggaagccaaccgggcaaagaacctggctataacattacgaaaagccggaagatcagccgaagagatctgtcgcgctatccacaccttcgacttgcagacccttccagttgattttgtcgaatgtcttatgcggttcctccccactgaggcggaagtaaagctcctgcgccagtatgagcgagagcggcagccactggaggagcttgcagctgaagaccgctttatgcttctgttcagcaaggtggaaaggctcactcagcgtatggcagggatggctttcttggggaatttccaggacaacctgcaaatgcttacacctcagctcaacgcaatcatcgccgcatcagcctcagtcaagtcatcccagaagcttaaacaaatgctcgagattattctcgctcttgggaattacatgaactctagcaagcgcggagctgtgtacggatttaagttgcaaagtctggatctcctgttggatacaaaaagcaccgaccggaaaatgacgctgctgcactttatcgctctcacagtgaaagaaaagtatccggatctggcaaacttctggcacgaattacatttcgtggagaaggcggcagcggtgagcctagaaaatgtgttgctagatgtaaaggagctggggagaggcatggagttgattcgacgggagtgtagcatccacgataactccgtgctgaggaatttcctcagcaccaatgagggaaagcttgacaagctccagagagacgccaagacagcagaggcatacaacgccgtggtacggtactttggcgagtcccctaaaactacacccccatcagtgttcttccccgtcttcgtgagattcatccggagctacaaagaagccgagcaggaaaacgaagcccgtaagaaacaagaggaggtgatgcgtgagaagcagctcgcccaggaagccaagaagcttgatgctaagacacccagtcagagaaataagtggcagcagcaggagctcatcgccgaattgagaagaaggcaggccaaagagcaccggccagtgtacgaagggaaagatgggactatcgaagatattatcaccgtgctgaaaagcgtcccattcaccgctcgtaccgctaaacgcggaagccggtttttttgtgacgctgcacaccatgatgaatcaaattgttag

SEQ ID NO: 282534 - protein, 478 aa, Artificial Sequence
  derived and/or modified sequence
MPPMPSAPPVHPPPDGGWGWIVVGAAFISIGFSYAFPKAVTVFFKEIQQIFHTTYSEIAWISSIMLAVMYAGGPVSSVLVNKYGSRPVVIAGGLLCCLGMVLASFSSSVVQLYLTMGFITGLGLAFNLQPALTIIGKYFYRKRPMANGLAMAGSPVFLSSLAPFNQYLFNTFGWKGSFLILGSLLLNACVAGSLMRPLGPNQTTSKSKNKTGKTEDDSSPKKIKTKKSTWEKVNKYLDFSLFKHRGFLIYLSGNVIMFLGFFAPIIFLAPYAKDQGIDEYSAAFLLSVMAFVDMFARPSVGLIANSKYIRPRIQYFFSFAIMFNGVCHLLCPLAQDYTSLVLYAVFFGLGFGSVSSVLFETLMDLVGAPRFSSAVGLVTIVECGPVLLGPPLAGKLVDLTGEYKYMYMSCGAIVVAASVWLLIGNAINYRLLAKERKEENARQKTRESEPLSKSKHSEDVNVKVSNAQSVTSERETNI

SEQ ID NO: 282535 - DNA, 1437 bp, Artificial Sequence
  derived and/or modified sequence
atgccccccatgcctagcgcaccccctgtccaccctcctcccgacggcggatggggctggattgtggtcggagccgcctttataagtatcggcttttcatatgcattccccaaggcagtgacagtcttcttcaaggaaatccagcaaatcttccacacaacctattcggaaatcgcttggatttctagtattatgctcgctgtaatgtacgccggaggacctgtgtcatcagtgctcgtgaataaatacggatccaggcccgtagtaattgccggcggactgctgtgttgcctgggcatggtgctggcgagctttagcagcagtgtcgtacagttgtacttgacaatgggtttcatcaccgggcttggactggcattcaatctgcaaccagctctgaccatcatcgggaagtacttttatcggaagcggcctatggctaatggcctggcaatggcgggatcaccagtgttcctgagtagcttggctcctttcaatcagtacttgttcaacacttttggatggaaggggtcgtttttaatcttggggtcccttctgcttaacgcatgtgtagccggaagcctgatgaggccgttgggcccaaatcagaccaccagtaagtcaaagaacaagactgggaaaacagaagacgactcaagtccaaaaaagattaaaacaaagaagtctacttgggagaaagttaacaagtacctggacttttcactgttcaagcaccgcggcttcctcatatatctgtccgggaacgtcatcatgtttctgggcttcttcgctccaattatcttccttgcaccttatgctaaggatcaggggatagatgaatacagtgcagcttttctgctatccgttatggcttttgtggacatgttcgctaggccatcagttggcttaattgccaactcgaagtacatccgaccgcgcatccagtatttttttagctttgcgatcatgtttaatggggtgtgccatcttttgtgtcctcttgcccaggactacacctcgctcgttctctatgcggttttcttcggccttggatttggatccgtgtccagtgtactctttgagaccctaatggatctggtgggcgccccccgcttctcctcagccgtgggcttggttaccattgtggagtgtgggcccgtactcctcggcccgccgttggccggtaaactcgtggaccttaccggggagtacaagtacatgtacatgtcgtgtggagctattgtggtcgctgctagcgtatggctccttatcggaaacgcgatcaactaccgactgctggcaaaggaacgcaaggaagaaaacgcccgacagaagacacgagaaagcgagcctctaagtaagagcaagcactctgaggacgtaaatgtaaaggtgtcaaacgctcaaagtgtcacgtccgaacgagagacgaatatctag

SEQ ID NO: 282536 - DNA, 1437 bp, Artificial Sequence
  derived and/or modified sequence
atgccgccaatgccatctgcccctccagtgcaccctcccccggatggcgggtgggggtggattgttgtgggggccgcctttataagcattggcttttcctacgcgttccccaaggctgttactgtgttctttaaagagattcagcagatttttcacaccacatactccgagatcgcctggattagcagcatcatgctggcagtgatgtacgctggcggcccagtttctagcgtgctcgtgaataagtacggatcacgacctgttgtgatcgccggagggctgctgtgttgcctagggatggtgttagcttcctttagcagttccgttgtgcaactatacctgaccatggggtttataacaggcctgggtctggcgttcaaccttcagccagcactgaccatcattggtaaatatttttatcggaagcggcccatggccaacgggctggcaatggccgggagtcctgtttttctgagctccctggccccattcaatcagtacctttttaatacatttggatggaagggatcatttctcatcctggggtccctgttactaaacgcttgcgtggccggatcgctcatgagaccattaggtcccaaccaaaccaccagcaagagcaaaaataaaaccggtaagaccgaggatgactcttcccccaaaaagataaagacgaagaagtccacctgggagaaagttaataagtacctcgatttctctctgtttaaacaccgcggatttctcatctatctgagtggcaacgtcattatgttcctgggcttttttgcccctatcatttttctggcgccctatgccaaagaccagggaatcgacgaatatagtgctgccttccttttatctgtgatggcattcgtggacatgtttgcacggccaagcgtcggcttgattgctaactcaaaatacatccgccccaggatccagtactttttctcctttgcaattatgttcaatggagtgtgccatctcctctgtcctttggcccaggattatacatcgctcgtgctgtacgctgtattcttcggtctcggcttcggtagcgtgtccagtgtactgtttgagacactgatggacctagtgggagctcccaggttcagcagcgccgtagggctggtcactatcgtggagtgcggaccagttctactgggccccccactggccgggaaactcgtggatctgaccggagagtataaatatatgtacatgagctgtggtgcaatcgtggtggccgcctctgtttggctgcttatcggtaacgccattaactatcggctgctcgcaaaagagcgtaaggaagagaatgcaaggcagaaaacaagggaaagtgagcctctgagcaagtctaagcacagcgaagacgttaacgtgaaggtttctaatgcccaaagtgtaacatctgaaagggagactaatatttag

SEQ ID NO: 282537 - DNA, 1437 bp, Artificial Sequence
  derived and/or modified sequence
atgcctccaatgccttccgcaccgcccgtgcatcctcctcctgacgggggttggggatggatagtggtgggcgcagcgtttatttctattggtttttcttacgcctttcccaaagcggttacagtattttttaaggaaattcagcagattttccatacaacatactcagagattgcatggatttcatccattatgctggcggttatgtacgccggaggtcccgtgagctcagtgttagttaataaatatggctcgcgtcccgttgtgattgcaggtggcctcttatgctgtctggggatggtattggcctcattttcttctagtgttgtccaattgtaccttacaatgggcttcatcaccggcctcggactggctttcaacctccaacctgctctgactatcatcggtaagtatttttataggaagaggcccatggcgaacggcttagcaatggccggcagccccgtgttcttatcctctctagccccctttaatcagtatctatttaatacttttgggtggaagggttcttttttgatcctgggctccctcctgcttaacgcttgtgttgctggcagcctgatgaggcctctcggacccaaccagacaacatcaaaaagcaaaaacaagacggggaagacagaagacgattcctcgccaaagaaaataaaaacaaagaagagtacatgggaaaaagtgaacaagtacctcgatttcagcttgtttaaacatcggggttttctcatttatctttccggcaatgtgattatgttccttgggtttttcgcccctattattttcttagctccatacgcgaaagaccaaggaatcgacgaatattctgccgcttttctgctgtcagtcatggcctttgtggatatgttcgctcgccctagtgtcggactgatcgctaattccaaatacatccggccccgcatacagtacttcttcagcttcgcaatcatgttcaatggggtgtgccacttgctgtgtccattggcccaggactacaccagtctggtgctctatgcggtgttttttggcctgggtttcgggtccgtctcatcagtgctctttgaaactcttatggatctggtcggagcccctcgattcagcagcgcggtgggcctggtgactattgtggaatgtggacccgtgctgttgggccccccgctcgctgggaagctggttgacctgactggtgaatataaatacatgtacatgtcctgcggtgccattgtggtggctgcctccgtctggttgttaatcgggaacgccataaattaccgcctcctcgcaaaggagcggaaggaagaaaatgcccgacagaaaactcgggaatccgaacccttgtcaaaaagcaaacactctgaggacgtgaatgtcaaggtgtctaacgcacagtctgtgactagcgagcgggagactaatatctag

SEQ ID NO: 282538 - DNA, 1437 bp, Artificial Sequence
  derived and/or modified sequence
atgcccccgatgcccagcgctccacccgtccacccaccacccgacggagggtggggctggatcgtggtcggtgctgctttcatcagtattggcttctcctatgcattccccaaagctgtcacggtattttttaaggaaatccagcagatcttccacactacatacagtgagatcgcttggatcagtagcatcatgctcgcggtcatgtatgctggcggtcctgtgtcctcagtgctcgtcaataaatatggctcccgcccggtcgtgatcgccggaggcttattatgctgcctcggcatggtgctggcatctttctcatctagcgttgtacagctgtaccttactatggggttcatcacgggcctaggtctagcattcaatctccagccggctctaacaatcatcggaaaatacttctataggaagcgccccatggccaacggcctcgctatggcggggtccccagtgttcctgtccagccttgcaccttttaaccagtatctgtttaatacatttggctggaagggatcctttttgattctgggatcacttctgctgaacgcgtgcgtagccgggtcgctaatgcggcctctcggccctaaccagaccacctctaagtctaagaataaaaccggcaagacggaggatgacagctcaccaaagaagattaagactaaaaagtctacctgggaaaaagttaacaagtacttagacttttctctattcaagcatagaggttttttgatctacctcagcggcaacgtgatcatgtttctcggatttttcgcccccataatcttcctggcaccatacgctaaagaccagggcatagacgagtattcggccgccttcctgctgtcagttatggcctttgttgacatgtttgcccggccatcagttggactaatagccaattccaagtacatcaggccaaggatccagtactttttttcttttgctatcatgtttaatggcgtgtgtcacctcctctgccccttagctcaggattatacgagcttggtgctctatgctgtattcttcgggctaggctttggatcggtttcctccgtgctttttgagaccttaatggatctcgtaggggcaccccggttttccagcgcggtaggacttgtgaccatcgtggagtgcggaccagtcctgctcggtccaccactcgcaggaaagctagtggatctcacaggagaatataagtacatgtatatgtcctgcggggccatcgtggtggctgcatctgtctggctgttgatcggcaatgccattaattacagattgctggcaaaggaacgaaaggaggaaaatgctaggcagaagacacgcgagagcgagccgctttccaagtcgaagcacagtgaggacgtgaatgtgaaagtgagcaacgcgcagtcggtgacaagcgaacgcgaaaccaatatatag

SEQ ID NO: 282539 - DNA, 1437 bp, Artificial Sequence
  derived and/or modified sequence
atgccacccatgcccagcgcccctcctgtgcaccccccaccagatggcggctggggctggatcgtggtgggcgccgccttcatcagcatcggcttctcctatgccttccccaaggctgtgacagtgttcttcaaggagatccagcagatcttccacaccacctacagcgagatcgcctggatcagcagcatcatgctggccgtgatgtatgccggcggccctgtgtcctctgtgctggtgaacaagtatggcagcaggcctgtggtgattgctgggggcctgctgtgctgcctgggcatggtgctggccagcttcagcagctctgtggtgcagctgtacctgaccatgggcttcatcaccggcctgggcctggccttcaacctgcagcctgccctgaccatcatcggcaagtacttctacaggaagaggcccatggccaacggcctggccatggccggcagccctgtgttcctgagcagcctggcccccttcaaccagtacctgttcaacaccttcggctggaagggcagcttcctgatcctgggcagcctgctgctgaatgcctgtgtggccggcagcctgatgaggcccctgggccccaaccagaccaccagcaagagcaagaacaagacaggcaagacagaagatgacagcagccccaagaagatcaagaccaagaagagcacctgggagaaggtgaacaagtacctggacttcagcctcttcaagcaccggggcttcctgatctacctgtctggaaatgtcatcatgttcctgggcttctttgcccccatcatcttcctggccccctatgccaaggaccagggcattgatgagtacagcgctgccttcctgctgtctgtgatggcctttgtggacatgtttgcccggcccagcgtgggcctgattgccaacagcaagtacatccggccccgcatccagtacttcttctcctttgccatcatgttcaacggggtgtgccacctgctgtgccccctggcccaggactacaccagcctggtgctgtatgctgtgttcttcggcctgggctttggatctgtgtcctctgtgctgtttgagaccctgatggacctggtgggcgccccccgcttcagcagcgctgtgggcctggtgaccatcgtggagtgtggccctgtgctgctgggcccccccctggccggcaagctggtggacctgaccggggagtacaagtacatgtacatgagctgtggggccatcgtggtggccgcctctgtgtggctgctgattggaaatgccatcaactaccgcctgctggccaaggagaggaaggaggagaatgcccggcagaagacccgggagagcgagcccctgagcaagagcaagcacagtgaagatgtgaatgtgaaggtgtccaatgcccagagcgtgaccagcgagcgggagaccaacatctag

SEQ ID NO: 282540 - DNA, 1437 bp, Artificial Sequence
  derived and/or modified sequence
atgccccccatgcccagcgccccccccgtgcaccccccccccgacggcggatggggttggattgttgtgggcgccgccttcatttctatcggttttagctacgccttccccaaagcggtcactgtcttcttcaaagaaatacaacagatctttcatactacatactctgaaattgcctggatctcatcaattatgctcgccgtgatgtacgcaggcggcccagtgtcgagcgtgctcgtgaataaatacggaagcagacctgtagtgatcgccggcgggcttctgtgttgtctgggcatggtccttgcttccttttcaagtagtgtggtccagctttacctgactatgggcttcattactggcctgggactcgcattcaacttgcagcctgccttgaccattatcggcaaatatttctacaggaagcgacctatggctaatggacttgctatggcggggtcaccagtgtttttgagctccctcgccccttttaaccagtatctgttcaacacattcggttggaagggatcgtttcttattctcggatctttactgctcaatgcatgcgtagcggggtctctgatgaggcccctcggccctaaccagacgacatcaaaatcaaagaacaaaaccggcaagaccgaagatgactcaagccctaaaaagatcaagactaaaaagagcacctgggagaaagtgaacaagtatctggactttagccttttcaagcatcgcgggttcttgatttacttgtcaggcaatgtgatcatgttcttaggtttctttgccccgatcattttcctggccccatacgccaaggaccagggtatcgacgaatattccgctgctttccttctgtcggtcatggcttttgtggacatgtttgctaggccctcagttggccttattgcaaacagcaaatatatccggcccaggatccagtatttcttttccttcgcaatcatgttcaatggagtctgtcacctgctgtgtcctttggctcaggactatacaagccttgttctctacgctgtcttcttcgggctcggctttggcagcgttagctccgtgctgtttgagactctcatggatctcgttggtgccccgcggtttagctctgctgtgggcttagtgacaattgttgagtgcggccccgtgctcctggggccacccctggccgggaaattagttgatttgactggcgagtataagtatatgtacatgagctgcggcgccattgttgtggctgcgtcggtgtggttgctcatcggtaacgcaatcaattaccgcctgctcgcaaaggagaggaaagaggaaaatgcaaggcagaaaacacgggagtcagaacccctgagcaaatccaaacatagcgaggatgtaaacgtgaaggtgtcaaatgcccagtccgtcacgtccgaaagagagactaatatctag

SEQ ID NO: 282541 - DNA, 1437 bp, Artificial Sequence
  derived and/or modified sequence
atgccccccatgcccagcgccccccccgtgcaccccccccccgacggtggctgggggtggatagtcgtgggcgcagctttcattagcattggcttttcctatgccttccccaaggccgtgaccgttttttttaaggagatccagcaaatatttcacactacttatagcgaaattgcatggatttctagcatcatgctcgccgttatgtatgcgggcggccccgtctcatctgtgctcgttaataaatacggatctcgaccagtggttatcgcgggtggacttttatgctgcctgggaatggtcctggcttccttcagctcctccgtggtgcagttgtacctcactatggggtttataaccggcctgggcttggccttcaatctgcagcctgctctgactattatcggtaaatacttttatcggaaaagacccatggccaatggcctcgccatggctgggagtccagtttttctttcgtcactggccccttttaaccagtacctctttaacactttcggttggaagggttcatttctgatccttggatccctgctgctgaacgcctgcgttgctggtagcctaatgaggcccctgggtcctaatcaaaccacttcaaaatccaaaaataagaccggtaaaactgaggacgactctagtccaaaaaagattaagactaagaaatccacctgggagaaggtgaataaatacctcgactttagcctttttaagcacagaggatttctgatttatctgagcggaaacgtgattatgtttctgggcttcttcgcaccaatcattttcctagccccttacgcgaaagaccaggggatcgacgagtactccgctgctttccttttgtccgtgatggccttcgtggacatgttcgccaggccatcagtgggcctgattgcgaatagcaaatatattcggccccggattcaatacttcttctccttcgccattatgttcaatggggtgtgccacttgctctgtccactggcccaggactacacctccctggtgttatacgccgtgtttttcggcctcggattcgggagcgtctcaagcgtgttgtttgaaaccctcatggatctggtgggagctccacgcttcagctcagcggtgggtttagttactatagtggagtgcggccccgttctgcttggaccacccctcgcgggaaagctcgtagatctcactggggagtacaagtacatgtacatgtcttgcggagctattgtcgtggccgctagtgtgtggttgctgatcgggaacgccatcaattatcgcctgttagcaaaagaacgaaaggaagagaacgcaaggcagaagacgcgagaaagcgaaccactgagcaaaagtaagcacagcgaagacgtgaacgtgaaagtgtcgaatgcccaaagcgtgacctcagaacgtgagaccaacatctag

SEQ ID NO: 282542 - DNA, 1437 bp, Artificial Sequence
  derived and/or modified sequence
atgccccccatgcccagcgccccccccgtgcaccccccccccgacggtggctggggatggattgtcgttggcgccgcattcataagcatcggatttagctatgctttcccaaaagccgtgacggtctttttcaaagagatccagcaaatcttccatacaacatactccgagatcgcatggatctctagtatcatgctggctgtcatgtacgccggggggcccgtgtcttcagtgctcgtgaataagtacggaagcaggccggttgttatcgccggtggactgctctgttgtctcggaatggtattagccagcttttcttcttcagtcgtccagctgtacctaacaatgggattcatcactggactcggcctggcattcaatctgcaaccggccctgactataattggcaagtacttttatcgcaagcgaccaatggcgaacgggcttgccatggctgggtctccagttttcctgtcctctttggctccgttcaaccagtatttatttaacacattcggttggaaaggcagttttctcatcttaggaagcttactcctgaacgcttgtgtagcgggcagcctcatgcggcctttaggccctaatcagaccactagcaaatcaaaaaacaaaaccgggaaaaccgaggatgactcatcccctaagaaaattaaaaccaagaagtcaacttgggagaaagtgaataagtatctggattttagtctttttaaacatcgggggttccttatctatctgtccggaaatgtgatcatgttcctcgggttctttgctccaattatctttctcgccccatacgctaaggaccagggcatagatgagtattctgctgccttcctgttgtccgtcatggcgtttgtggatatgttcgcgcgacccagtgtgggactcatcgctaattctaaatatatcaggccgcggatacaatacttctttagcttcgccatcatgtttaatggtgtgtgccacctgctctgtccattggctcaggattatacgtcgctggtcctctatgctgtgtttttcggcctgggctttggcagcgtctcctccgttctctttgaaactcttatggatctggtcggcgcaccacgattctcttccgctgtcgggctggtgactatcgtggagtgtgggcccgttttgttaggccccccactggccgggaaactggttgatctaactggggaatacaagtatatgtacatgagctgtggagccattgtggtcgccgcctccgtctggctgctgattggtaacgccattaattaccgcttactggccaaagagcgcaaagaggaaaatgcacgtcaaaaaacccgcgagtcagagccactcagcaaatccaagcactcggaggacgtgaacgtgaaagtcagtaatgcacagtccgtcacatccgaacgggaaacgaatatttag

SEQ ID NO: 282543 - DNA, 1437 bp, Artificial Sequence
  derived and/or modified sequence
atgccccccatgcccagcgccccccccgtgcaccccccccccgacggaggttggggctggattgtggtgggtgcagccttcatcagtatcggtttttcctatgcctttcccaaggccgtgacagtgtttttcaaagaaattcagcaaatattccacacaacgtatagcgagatcgcctggatcagctctataatgctggccgtcatgtatgcagggggacctgtgtcttccgtacttgtgaataagtatgggagccgccctgtggtgattgcagggggcctattgtgttgcttgggcatggtgctcgcttcttttagcagtagcgtggtccagctttatctgaccatgggcttcattacaggcctcggtcttgcattcaatctgcagcccgctctgacaattattggcaagtacttctatcggaaaagacctatggccaacggactcgcaatggcaggttctcccgtgtttctcagtagtctggcaccgttcaaccagtacctcttcaacaccttcggttggaaaggaagcttcctgattctgggtagcttgcttctcaatgcatgcgttgccggaagcctcatgagacctctcggccctaatcaaacaactagcaaaagcaaaaacaagacgggcaaaaccgaggacgactcttctcctaagaagatcaaaaccaagaagtcaacgtgggagaaggtgaataagtatctggatttttctctgttcaagcatcgtggatttctgatttacctttccggtaatgttattatgtttttagggttttttgcgcctatcatcttcttagccccatacgctaaggaccagggcatcgatgagtattcagcggcatttcttctgtccgtgatggctttcgttgacatgttcgcccgtccctccgtcggtctgatagcaaactccaaatacatacgccctagaatccagtattttttttcattcgctattatgtttaacggagtctgtcatcttttatgtccactagcacaggactacacatctctggtgctgtacgcagtgtttttcggcctggggttcggaagcgtatcatcagtactcttcgaaacattaatggacctggtgggtgcccctaggttctcttcagcggtggggctggtgaccatagtggagtgcgggcccgtcctattaggacctccactagcaggcaaactggtggacctaaccggcgagtataagtacatgtatatgagttgtggagctatcgtggtggcagcctcggtatggctgcttattgggaatgcaatcaattataggcttctggccaaagagcggaaagaggaaaacgcacgccagaagacgcgggaatccgaaccactgtcaaagtccaagcatagcgaggatgtaaatgtgaaggtgtctaacgctcaaagcgtcacttcggaaagggaaacaaacatttag

SEQ ID NO: 282544 - DNA, 1437 bp, Artificial Sequence
  derived and/or modified sequence
atgccgcctatgccctctgctccccctgtgcaccctccgcctgatggtggatggggttggattgtcgttggcgctgccttcatctccatcggcttctcatatgcttttcccaaggcagtgaccgttttcttcaaggaaatccagcagatcttccacacaacttattctgagatcgcgtggatctcttcaattatgctcgccgttatgtacgccggtgggccagtgtcaagtgtactggtcaacaagtatggctcgcggcctgttgttatcgccggaggcctgctgtgctgcttaggtatggtcctagcctcttttagcagctctgtcgtgcagctgtatctcacaatgggcttcattacagggcttggcttggcctttaatctccagccagccttaaccatcatcggaaagtacttttaccgcaaacgtcccatggcaaacggccttgctatggccggaagcccagtgttcttgtcatcgctggccccttttaatcagtacctttttaatacttttggatggaaagggagctttcttatcctcggctccctcctgctcaatgcttgcgtagcaggaagtctcatgaggcctctcggtcctaatcagaccacctccaagtccaagaataaaactggtaagaccgaggatgatagttccccaaagaagataaagactaagaaaagtacctgggaaaaggtgaacaagtacctggatttttccttattcaaacatagggggttcctaatctacctttccggaaacgtaattatgtttctcggctttttcgccccaatcatattcctcgcgccatatgctaaggatcagggcatcgatgagtactcagcggctttcctgctgagtgtcatggctttcgtcgacatgttcgccagaccgagtgtcgggctaattgctaacagtaaatacataaggcctcggatccagtacttcttttcctttgcaattatgttcaacggcgtgtgtcacctgctttgtcccctggcacaggattatacttctctggtcctgtatgctgtcttcttcggtcttggttttgggtccgtttcctccgtgctcttcgaaacactgatggatctggttggcgcacctcggttctcaagcgcagttgggctcgtgacgatcgtcgagtgcggccctgtattactcggccctcccctcgcgggaaagctggtcgacttgacaggcgagtataaatatatgtatatgagctgtggggctatcgtagtggccgcaagtgtctggctgttaatcggaaacgccatcaattacagactgctcgcaaaggagagaaaggaggaaaacgctcggcagaagacaagagagagcgagcctctgagcaaatccaagcatagcgaggacgtaaacgtcaaggtgtcaaatgcccagagcgtgacttctgagagggaaacgaacatttag

SEQ ID NO: 282545 - DNA, 1437 bp, Artificial Sequence
  derived and/or modified sequence
atgcctcccatgccaagcgccccacccgttcatcctcctcccgatggcggatggggttggattgtggttggcgctgcctttattagcataggcttttcgtatgcctttccaaaagcagtgactgtttttttcaaggagatacagcagatcttccacacgacctacagtgaaatcgcctggatcagcagtataatgctggcagtgatgtacgcagggggtcctgtgagctccgtgttagtcaacaagtacggatctaggcctgtggtaatcgccggagggttgctgtgctgtctgggaatggtattggctagcttcagctcctcggtggtgcagctctatctgaccatgggctttataaccggactaggactcgctttcaatctccagcccgctctgaccatcattggcaaatatttctaccggaaaaggccgatggccaatggcctggcaatggccggtagtccagtttttctgagcagtctggcccctttcaatcagtatctgtttaatacattcggatggaagggctctttcctcattcttgggtctctccttctgaatgcatgcgtcgccggatccctcatgagacctctggggcctaatcaaaccacttccaagagcaagaacaagacgggcaagacagaggatgattcctctccaaaaaagatcaagacaaaaaaatccacttgggagaaggtgaataagtaccttgatttctccctcttcaaacatcgagggttcctgatttatctgagtggcaatgtgatcatgtttctcggctttttcgcacccataatatttctcgccccttacgcaaaggaccaggggattgacgaatattcggccgcattcctgttatcagtgatggcatttgtggacatgttcgcccgaccctcggttggcctgatagccaactccaaatatatcaggccacggatacagtatttcttcagtttcgctataatgttcaacggtgtgtgtcacctgctttgtcctctggcacaggattacaccagtcttgtcctctacgccgtcttcttcggactcggctttggctccgtctcaagcgttttgttcgagactcttatggacctcgtgggggcacctcgtttcagctctgcagtgggcttggtcactatcgtcgagtgtgggcctgttttactggggccacctctagcgggaaagctggtcgatcttaccggggaatacaaatatatgtacatgagctgtggcgcaattgtggtggccgcatccgtgtggctcttgatcgggaatgccataaactatagactattagctaaagaaagaaaggaggagaacgccaggcaaaagacccgcgagtctgaaccccttagtaagagtaaacactcagaggatgttaacgtcaaagtgtccaacgcacagtctgttacctcagaacgcgagactaacatttag

SEQ ID NO: 282546 - DNA, 1437 bp, Artificial Sequence
  derived and/or modified sequence
atgcctcccatgccgtcagcacctcccgtccacccaccaccagacggcggttgggggtggatagttgtgggcgcagcattcatctccattgggttctcctacgccttccctaaggctgtgaccgttttcttcaaggagatacagcagatctttcacacaacgtattcagaaatcgcgtggatctctagtatcatgctggcagtgatgtatgctggtgggcctgtcagttcagttctggtcaacaagtacggaagcaggcctgtggtcatcgcgggtggtcttctttgttgcctgggcatggtgctggcatcattcagttcctccgtcgtacaactgtacttgactatggggtttatcaccggattgggtctggcattcaacctgcagccagctctgacaattattggaaagtatttctaccgtaagagacctatggcaaacgggctggcaatggcaggttctccagtattccttagtagcctggcccctttcaatcagtacttgttcaatacattcgggtggaaaggaagctttctgatcctcggcagcctgctcctgaatgcttgcgtggcagggtcactgatgcgacctttagggcctaaccaaacgaccagcaagtccaagaataagacagggaagacggaagatgattcgtccccaaaaaaaattaagaccaagaagtccacctgggaaaaagttaataagtaccttgatttttcccttttcaaacaccgtggattcctcatctatctgagtggtaacgtgattatgtttctaggattcttcgctcccattattttcctggcaccatatgcgaaggaccaggggatagatgagtattccgctgcttttttacttagcgtgatggccttcgtggacatgttcgctagaccatccgtgggcttaatcgccaacagcaagtatatcagaccacggatccagtactttttctcattcgcaataatgttcaacggagtctgtcatctgctgtgccccctcgcccaggattatacctctctggtgctctatgccgtgttcttcggtctcggctttggctccgtgtcctctgttttgtttgagaccctcatggatctcgtgggagccccacgcttctcatctgctgttgggctcgtgactattgtagagtgcggtcccgttctgctcggtcctcctctggcaggaaaactagtggacctcaccggagagtataagtacatgtacatgagctgcggagcaattgtcgtggccgcttcagtttggctcttgataggaaacgccatcaactatcgcttgctagccaaggagcgcaaggaagaaaatgctaggcaaaagacaagagaatccgaaccactttctaagagtaagcactcagaggatgttaatgttaaggtgtctaacgctcagagcgttactagcgagcgggagactaacatttag

SEQ ID NO: 282547 - DNA, 1437 bp, Artificial Sequence
  derived and/or modified sequence
atgcctcctatgccctccgcccctcctgtccatcccccacccgacggcggttggggatggattgtggttggcgcagctttcattagtatcggcttttcatatgctttcccaaaggctgtgaccgtgttctttaaagagatccagcaaatctttcatactacatacagcgagattgcttggatatctagcatcatgctggctgtcatgtatgcaggtggtcccgttagctccgtcttggttaacaaatatggatccaggccagtggttatcgccggtggccttctctgctgtttggggatggtgttggcgtccttttccagcagcgtcgtgcagctttacttgaccatgggattcattaccggattagggctggcctttaatctgcagcctgcactgactatcattggcaagtatttttacaggaagagaccaatggccaatggtctcgctatggctggctctccggtattcctgtcgtctctggccccttttaaccaatacttgttcaatacatttggatggaaggggagctttctcatactcggaagcctgctcctgaacgcttgcgtggccggttctctgatgcgacccctggggccaaaccagaccacaagcaaatctaagaacaaaaccgggaaaaccgaggatgactcgtcccctaagaaaattaagactaagaaaagcacttgggaaaaggtgaacaaatatctggatttctcactgttcaagcatagaggatttctgatttacctgtcgggaaatgtgatcatgtttctgggtttttttgctccaatcatctttctcgcgccatatgccaaagaccaggggatcgacgagtattctgccgctttcctgctgtccgtcatggcctttgtggatatgttcgctcgtccttcggtaggattgatcgccaacagtaagtacatcaggccaagaattcagtattttttcagtttcgccatcatgttcaacggcgtctgtcacttgctgtgcccgctagcccaggactacacttcgctagtcctgtacgctgtgtttttcgggctgggcttcggctctgtgagctccgtcctcttcgagaccctcatggatctagtgggagcccctcgattttccagcgccgtaggcctggtgacaattgtggaatgtggccctgtccttttgggccctccgttggccggtaaacttgtggacctcaccggtgagtataaatatatgtacatgtcctgtggagccatcgtggtggcagccagtgtgtggttacttatcggcaatgccattaattacagattactcgcgaaggagcgcaaagaagaaaacgctcggcagaaaacacgtgaaagcgaaccactcagtaaatctaaacacagcgaagacgtcaacgtgaaggtcagcaatgctcagtccgtgacctccgaaagagagacaaacatttag

SEQ ID NO: 282548 - DNA, 4536 bp, Artificial Sequence
  derived and/or modified sequence
gtatgttcaggattctaaaaagagcaatggttcacaaggaaacttctgcctcaggtggggagaggagtccatagatcagggaaacttatgtcttggtgaaatggaagaccatgtttctaaacacctgtcgccaggttacttgaatttccactagaggagcagaaatgccaccaatgccaagtgccccacctgtgcatccacctccagatggaggatggggttggattgtggttggagcagcttttatctccattggattttcctatgcattccccaaagctgtcaccgtattcttcaaagaaattcagcaaatattccacactacctacagtgaaatagcatggatttcatccattatgctggctgttatgtacgcaggaggtcctgtaagtagtgttttggtgaataaatacggcagccggccggtggtgatagcaggaggcttattatgctgtcttggaatggtgttggcctcctttagtagcagcgtggtacagctgtacctcactatgggattcattacaggtttaggtttagccttcaacctgcaacccgccttaaccataattggcaaatacttctataggaagcgacccatggcaaatggattggccatggcaggaagtcctgttttcttaagttcattggctcctttcaatcagtacctttttaatacttttggctggaaaggaagcttcctgattttgggaagtctacttttgaatgcctgtgtggctggttccctcatgagaccccttggacccaatcaaaccacttctaagtctaaaaataagactggcaaaacagaagatgattcaagcccaaagaaaatcaaaacgaagaaatcaacttgggaaaaagttaataagtatttagatttctccctttttaagcatagaggatttctgatatatctgtctggaaatgtcattatgttcctaggtttttttgcccccattatattcttggctccatatgctaaagaccaaggaattgatgagtactcggcagcttttctgctatctgttatggctttcgttgatatgtttgctaggccttctgtaggattaattgcaaactccaaatatattcgacctcgaattcagtacttcttcagttttgcaatcatgttcaatggagtgtgtcacctcttgtgcccactggcacaggactacacaagcctggtattatatgctgtattttttggccttggatttgggagtgttagcagtgttctctttgaaactctcatggacctcgtgggtgcaccaagattttccagtgccgtcggacttgtcacaattgtggagtgtggcccagttcttcttggccctcctcttgcaggtaaattggtggatttaactggagaatataaatacatgtacatgtcctgtggggctattgtggtagcagcaagcgtgtggctgctcattggcaatgctatcaactatagattgcttgcaaaggaaaggaaggaggaaaatgcaaggcagaagaccagagaatctgaacccttgagcaaatctaaacattcggaagatgttaacgtcaaagtttcaaatgcacagagtgtaacctcagaaagagaaactaacatttaacaagaatcacatctctgatttcagtgtttatgactttatctaggagtttgtttttcattttgtttttttaaagtattagaaaaggttttagctgaaatgaggagtcacaattaaggatggaggtgatattttcctcaatggcaaattttaaattagtttttaaaaacttacttatttgggtagttaaattttgagattatgcatagaaagaatccatgctataggtttatttccatacctgactctgggtgtggtggttaaaatactaattttaaagtcttccagtgactttcggtcttggttatatggagaattctgaatcccaaacccctggtttaagtaggtagaaggaggatgcctaatcctacaaagtgaccctttatacatttcattttttatttgatattaaagtatgagatagagttgagagacaattaattatcccctcttacacacaaacacacatactcccacatacttacccacatgtacacagagtatctggagaataaaacccaaattcaaaaaaaaaaatgataatttatttttaaggtaaaaataatccatgaagataaaagaaacatatgtctgcgtgctactttacaatgttggttttaaagataagcacatgggtaaaaatgagggtgatccttattcaaaaataacatctgactactataaaaatatttgcatatataagtttgacaaagaaaagaaaatcaatgttaaaccattaaatctgagcactgttagacttgattaatccatgcacatgattttttttgagtagggagcattagtacctggtgctagagaatagaaccctcaaataatttttagaattcttacctaatatgtaaaagtctgcatgactcttaacaatgagtcacatccattgattttacagggattttagttcgtaatccagaaagtaataatcagggattttattttaatcaggcatcaatccagattcactgttatactgaaatatcaaagtaaaatcctagttggcaggattgtaagtagaccgaattctaatttttcccaacacatagtggtaattggaggttactgttatgaatactccatctgactacgactaagagagtgaggggtggttttaatgaaccctctaagctctctcagttccttcccttccacaaaatgcaagagcaaaagcaaactacaaacaggccttgtgctcaaccactggaaatgcctcctgggataagaatggcagcacttgaaaattctgccctctactgatgagacttcctgctgcctttggacataactaagccaggaaactttaaaagccttctagaaatagaggcactgtatgacttgcaatcgtaggtatagtttataacctgatagcaaaaaacttgaaatattgcagcccagtttaattcagcactttcccattttcataactatgtgaaaacatctgggaatttgaatcactcctgaatacagaggcatattctttttaaactataaataccattttgagtgagaaagtacttttaaacaagaaagaaattgtacattatgactaaagttataaatacaatatttatatctataaatctgaagtttaacatgattaatttaaaaagtatttagtgcttgacaaagtagtgtcactcttaagatgtcaaagggaattagccattttttttattgtaataaaggcaggtgctatttttttctggtgagattgcacctggataccaggcttttgtaatagttaacattaaacatttgattcataaagttaattcactgcttaagcatgtggctcatatttaggaagctatataaaattcagtttttcatttaacatttgctcttttgcatatgaagagatatttgtatttttcaaatgttaagtaaaacaagatgtgccaatatcataggtaaataaattagggaaaatgtgggactttatggctgtttttaatttagtttcacccgatcttgattcttgaattagctatgtttatatttttagttcttttttattcaactcagatttgtcaagaaatgtaacctctaaattgtgtagtacctctccaatcataaattttcaaaaaaaaattctactttccaaaaagtgtcttgaattctctgaaaaggcacattaaactaatatgaacatcagataccagggggaaataaatggcaaagtaataatcatgaggttttaggtcaaagactacattatatatattttttattaccttctagtagagacatcctcctgggtgcatttcagtggccttctccagggaggaggtttatttacttactgatgagtttctcgtcacgtcaaaaccagttcacatttgtctggctgctctttggttgtcttcattcgttatttatttctaacactgtattaaattgttagaaaagaaagtaaaacttgcacattcaaagcacatgatttgtacagtcacacctggcagtagcactgcacagttacaaatatgcacacacgttaactgctatgcataaatattgacagttaaaccagaacacaattgaaacagtgacataaatacctacaggattcagaattgttccagggtaatataaattattctacttgttcactctccccaccctcttgaacttgttagaagatttgctgctttagcagaatctttccaagattgagaaaagtgtatcaacctaggattttcattactatatagtcacataaatggaggaggagatatatttggcttctgcctctgcaacaattagtatgaacatatttctttctctagggaataataggttttaaacatttgagatatcatgaagcaaagtcagggtataccactacaatccccactaatctctattcccacattatgaaattgtacagaagaaagggtgtcattaaatcaaggtatccagataa

SEQ ID NO: 282549 - DNA, 1878 bp, Artificial Sequence
  derived and/or modified sequence
aaaaagagcaatggttcacaaggaaacttctgcctcaggtggggagaggagtccatagatcagggaaacttatgtcttggtgaaatggaagaccatgtttctaaacacctgtcgccaggttacttgaatttccactagaggagcagaaatgccaccaatgccaagtgccccacctgtgcatccacctccagatggaggatggggttggattgtggttggagcagcttttatctccattggattttcctatgcattccccaaagctgtcaccgtattcttcaaagaaattcagcaaatattccacactacctacagtgaaatagcatggatttcatccattatgctggctgttatgtacgcaggaggtagaatatttgaaagctttttgatcttcacatccttgaggattcagtgcagctttactcaatcaggatcatgcctagctgccgtacataatgactcctctgatgaatctgggaaaaggagatggaaaatcttctggaaaggatttgctattctagataacatcacgatcattcactgttatgggaggaggtcaaaataccaacattaacagaagtttggaagaagtttatttcaatcctcatgggtgactttaagaggctcaggacttcagtgaagtcctgtaagtagtgttttggtgaataaatacggcagccggccggtggtgatagcaggaggcttattatgctgtcttggaatggtgttggcctcctttagtagcagcgtggtacagctgtacctcactatgggattcattacaggtttaggtttagccttcaacctgcaacccgccttaaccataattggcaaatacttctataggaagcgacccatggcaaatggattggccatggcaggaagtcctgttttcttaagttcattggctcctttcaatcagtacctttttaatacttttggctggaaaggaagcttcctgattttgggaagtctacttttgaatgcctgtgtggctggttccctcatgagaccccttggacccaatcaaaccacttctaagtctaaaaataagactggcaaaacagaagatgattcaagcccaaagaaaatcaaaacgaagaaatcaacttgggaaaaagttaataagtatttagatttctccctttttaagcatagaggatttctgatatatctgtctggaaatgtcattatgttcctaggtttttttgcccccattatattcttggctccatatgctaaagaccaaggaattgatgagtactcggcagcttttctgctatctgttatggctttcgttgatatgtttgctaggccttctgtaggattaattgcaaactccaaatatattcgacctcgaattcagtacttcttcagttttgcaatcatgttcaatggagtgtgtcacctcttgtgcccactggcacaggactacacaagcctggtattatatgctgtattttttggccttggatttgggagtgttagcagtgttctctttgaaactctcatggacctcgtgggtgcaccaagattttccagtgccgtcggacttgtcacaattgtggagtgtggcccagttcttcttggccctcctcttgcaggtaaattggtggatttaactggagaatataaatacatgtacatgtcctgtggggctattgtggtagcagcaagcgtgtggctgctcattggcaatgctatcaactatagattgcttgcaaaggaaaggaaggaggaaaatgcaaggcagaagaccagagaatctgaacccttgagcaaatctaaacattcggaagatgttaacgtcaaagtttcaaatgcacagagtgtaacctcagaaagagaaactaacatttaacaagaatcacatctctg

SEQ ID NO: 282550 - DNA, 1969 bp, Artificial Sequence
  derived and/or modified sequence
attccattcacccgttgacagcgaggcgaatcggctgcggtttgctgggaacggagggctgcagcgcccaccctgcgccagagaccagataaagagtcaatcttaagatgtgatactttcctgtgaaacctgaaacaaggtgatctggggaaccaaagactctgggactcttggtgccaacagagttactctgttacttgaatttccactagaggagcagaaatgccaccaatgccaagtgccccacctgtgcatccacctccagatggaggatggggttggattgtggttggagcagcttttatctccattggattttcctatgcattccccaaagctgtcaccgtattcttcaaagaaattcagcaaatattccacactacctacagtgaaatagcatggatttcatccattatgctggctgttatgtacgcaggaggtcctgtaagtagtgttttggtgaataaatacggcagccggccggtggtgatagcaggaggcttattatgctgtcttggaatggtgttggcctcctttagtagcagcgtggtacagctgtacctcactatgggattcattacaggtttaggtttagccttcaacctgcaacccgccttaaccataattggcaaatacttctataggaagcgacccatggcaaatggattggccatggcaggaagtcctgttttcttaagttcattggctcctttcaatcagtacctttttaatacttttggctggaaaggaagcttcctgattttgggaagtctacttttgaatgcctgtgtggctggttccctcatgagaccccttggacccaatcaaaccacttctaagtctaaaaataagactggcaaaacagaagatgattcaagcccaaagaaaatcaaaacgaagaaatcaacttgggaaaaagttaataagtatttagatttctccctttttaagcatagaggatttctgatatatctgtctggaaatgtcattatgttcctaggtttttttgcccccattatattcttggctccatatgctaaagaccaaggaattgatgagtactcggcagcttttctgctatctgttatggctttcgttgatatgtttgctaggccttctgtaggattaattgcaaactccaaatatattcgacctcgaattcagtacttcttcagttttgcaatcatgttcaatggagtgtgtcacctcttgtgcccactggcacaggactacacaagcctggtattatatgctgtattttttggccttggatttgggagtgttagcagtgttctctttgaaactctcatggacctcgtgggtgcaccaagattttccagtgccgtcggacttgtcacaattgtggagtgtggcccagttcttcttggccctcctcttgcaggtaaattggtggatttaactggagaatataaatacatgtacatgtcctgtggggctattgtggtagcagcaagcgtgtggctgctcattggcaatgctatcaactatagattgcttgcaaaggaaaggaaggaggaaaatgcaaggcagaagaccagagaatctgaacccttgagcaaatctaaacattcggaagatgttaacgtcaaagtttcaaatgcacagagtgtaacctcagaaagagaaactaacatttaacaagaatcacatctctgatttcagtgtttatgactttatctaggagtttgtttttcattttgtttttttaaagtattagaaaaggttttagctgaaatgaggagtcacaattaaggatggaggtgatattttcctcaatggcaaattttaaattagtttttaaaaacttacttatttgggtagttaaattttgagattatgcatagaaagaatccatgctataggtttatttccatacctgactctgggtgtggtggttaaaatactaattttaaagtcttccagtgactttcggtcttggttatatgga

SEQ ID NO: 282551 - DNA, 1815 bp, Artificial Sequence
  derived and/or modified sequence
agcggatgctgcatcgcggcgcccttctccacccccttttctcctctacttccgcgaaaaggattgcagactgccttggaaagggcggtcgtgcccagtgccactttcccggagtcaatcttaagatgtgatactttcctgtgaaacctgaaacaaggtgatctggggaaccaaagactctgggactcttggtgccaacagagttactctataatccaaaatctactctacatcttttcctttgtattgccttcaaatatcactcttcaaagtttagtgactaggcttaaagattccacatataatccaaagaaatctgttcaagtggacatctatcaacacgttacttgaatttccactagaggagcagaaatgccaccaatgccaagtgccccacctgtgcatccacctccagatggaggatggggttggattgtggttggagcagcttttatctccattggattttcctatgcattccccaaagctgtcaccgtattcttcaaagaaattcagcaaatattccacactacctacagtgaaatagcatggatttcatccattatgctggctgttatgtacgcaggaggtcctgtaagtagtgttttggtgaataaatacggcagccggccggtggtgatagcaggaggcttattatgctgtcttggaatggtgttggcctcctttagtagcagcgtggtacagctgtacctcactatgggattcattacaggtttaggtttagccttcaacctgcaacccgccttaaccataattggcaaatacttctataggaagcgacccatggcaaatggattggccatggcaggaagtcctgttttcttaagttcattggctcctttcaatcagtacctttttaatacttttggctggaaaggaagcttcctgattttgggaagtctacttttgaatgcctgtgtggctggttccctcatgagaccccttggacccaatcaaaccacttctaagtctaaaaataagactggcaaaacagaagatgattcaagcccaaagaaaatcaaaacgaagaaatcaacttgggaaaaagttaataagtatttagatttctccctttttaagcatagaggatttctgatatatctgtctggaaatgtcattatgttcctaggtttttttgcccccattatattcttggctccatatgctaaagaccaaggaattgatgagtactcggcagcttttctgctatctgttatggctttcgttgatatgtttgctaggccttctgtaggattaattgcaaactccaaatatattcgacctcgaattcagtacttcttcagttttgcaatcatgttcaatggagtgtgtcacctcttgtgcccactggcacaggactacacaagcctggtattatatgctgtattttttggccttggatttgggagtgttagcagtgttctctttgaaactctcatggacctcgtgggtgcaccaagattttccagtgccgtcggacttgtcacaattgtggagtgtggcccagttcttcttggccctcctcttgcaggtaaattggtggatttaactggagaatataaatacatgtacatgtcctgtggggctattgtggtagcagcaagcgtgtggctgctcattggcaatgctatcaactatagattgcttgcaaaggaaaggaaggaggaaaatgcaaggcagaagaccagagaatctgaacccttgagcaaatctaaacattcggaagatgttaacgtcaaagtttcaaatgcacagagtgtaacctcagaaagagaaactaacatttaacaagaa

SEQ ID NO: 282552 - DNA, 2250 bp, Artificial Sequence
  derived and/or modified sequence
tccccttcccgccaccgcctccttctccgctggctgtggcgggcgaggacacgtcaggggccataaataaataaataattccattcacccgttgacagcgaggcgaatcggctgcggtttgctgggaacggagggctgcagcgcccaccctgcgccagagaccagataaagagtcaatcttaagatgtgatactttcctgtgaaacctgaaacaaggtgatctggggaaccaaagactctgggactcttggtgccaacagagttactctaggagcagaaatgccaccaatgccaagtgccccacctgtgcatccacctccagatggaggatggggttggattgtggttggagcagcttttatctccattggattttcctatgcattccccaaagctgtcaccgtattcttcaaagaaattcagcaaatattccacactacctacagtgaaatagcatggatttcatccattatgctggctgttatgtacgcaggaggtcctgtaagtagtgttttggtgaataaatacggcagccggccggtggtgatagcaggaggcttattatgctgtcttggaatggtgttggcctcctttagtagcagcgtggtacagctgtacctcactatgggattcattacaggtttaggtttagccttcaacctgcaacccgccttaaccataattggcaaatacttctataggaagcgacccatggcaaatggattggccatggcaggaagtcctgttttcttaagttcattggctcctttcaatcagtacctttttaatacttttggctggaaaggaagcttcctgattttgggaagtctacttttgaatgcctgtgtggctggttccctcatgagaccccttggacccaatcaaaccacttctaagtctaaaaataagactggcaaaacagaagatgattcaagcccaaagaaaatcaaaacgaagaaatcaacttgggaaaaagttaataagtatttagatttctccctttttaagcatagaggatttctgatatatctgtctggaaatgtcattatgttcctaggtttttttgcccccattatattcttggctccatatgctaaagaccaaggaattgatgagtactcggcagcttttctgctatctgttatggctttcgttgatatgtttgctaggccttctgtaggattaattgcaaactccaaatatattcgacctcgaattcagtacttcttcagttttgcaatcatgttcaatggagtgtgtcacctcttgtgcccactggcacaggactacacaagcctggtattatatgctgtattttttggccttggatttgggagtgttagcagtgttctctttgaaactctcatggacctcgtgggtgcaccaagattttccagtgccgtcggacttgtcacaattgtggagtgtggcccagttcttcttggccctcctcttgcaggtaaattggtggatttaactggagaatataaatacatgtacatgtcctgtggggctattgtggtagcagcaagcgtgtggctgctcattggcaatgctatcaactatagattgcttgcaaaggaaaggaaggaggaaaatgcaaggcagaagaccagagaatctgaacccttgagcaaatctaaacattcggaagatgttaacgtcaaagtttcaaatgcacagagtgtaacctcagaaagagaaactaacatttaacaagaatcacatctctgatttcagtgtttatgactttatctaggagtttgtttttcattttgtttttttaaagtattagaaaaggttttagctgaaatgaggagtcacaattaaggatggaggtgatattttcctcaatggcaaattttaaattagtttttaaaaacttacttatttgggtagttaaattttgagattatgcatagaaagaatccatgctataggtttatttccatacctgactctgggtgtggtggttaaaatactaattttaaagtcttccagtgactttcggtcttggttatatggagaattctgaatcccaaacccctggtttaagtaggtagaaggaggatgcctaatcctacaaagtgaccctttatacatttcattttttatttgatattaaagtatgagatagagttgagagacaattaattatcccctcttacacacaaacacacatactcccacatacttacccacatgtacacagagtatctggagaataaaacccaaattcaaaaaaaaaaa

SEQ ID NO: 282553 - DNA, 1437 bp, Artificial Sequence
  derived and/or modified sequence
atgccccccatgcccagcgccccccccgtgcaccccccccccgacggcggctggggctggatcgtggtgggcgccgccttcatcagcatcggcttcagctacgccttccccaaggccgtgaccgtgttcttcaaggagatccagcagatcttccacaccacctacagcgagatcgcctggatcagcagcatcatgctggccgtgatgtacgccggcggccccgtgagcagcgtgctggtgaacaagtacggcagcagacccgtggtgatcgccggcggcctgctgtgctgcctgggcatggtgctggccagcttcagcagcagcgtggtgcagctgtacctgaccatgggcttcatcaccggcctgggcctggccttcaacctgcagcccgccctgaccatcatcggcaagtacttctacagaaagagacccatggccaacggcctggccatggccggcagccccgtgttcctgagcagcctggcccccttcaaccagtacctgttcaacaccttcggctggaagggcagcttcctgatcctgggcagcctgctgctgaacgcctgcgtggccggcagcctgatgagacccctgggccccaaccagaccaccagcaagagcaagaacaagaccggcaagaccgaggacgacagcagccccaagaagatcaagaccaagaagagcacctgggagaaggtgaacaagtacctggacttcagcctgttcaagcacagaggcttcctgatctacctgagcggcaacgtgatcatgttcctgggcttcttcgcccccatcatcttcctggccccctacgccaaggaccagggcatcgacgagtacagcgccgccttcctgctgagcgtgatggccttcgtggacatgttcgccagacccagcgtgggcctgatcgccaacagcaagtacatcagacccagaatccagtacttcttcagcttcgccatcatgttcaacggcgtgtgccacctgctgtgccccctggcccaggactacaccagcctggtgctgtacgccgtgttcttcggcctgggcttcggcagcgtgagcagcgtgctgttcgagaccctgatggacctggtgggcgcccccagattcagcagcgccgtgggcctggtgaccatcgtggagtgcggccccgtgctgctgggcccccccctggccggcaagctggtggacctgaccggcgagtacaagtacatgtacatgagctgcggcgccatcgtggtggccgccagcgtgtggctgctgatcggcaacgccatcaactacagactgctggccaaggagagaaaggaggagaacgccagacagaagaccagagagagcgagcccctgagcaagagcaagcacagcgaggacgtgaacgtgaaggtgagcaacgcccagagcgtgaccagcgagagagagaccaacatctag

SEQ ID NO: 282554 - DNA, 4267 bp, Artificial Sequence
  derived and/or modified sequence
ggagaggaggaacggagctgggacgggctgcaggagggaatggccgcaggccggcaggaggaggggcgcgaccacccggccgccggccgatggcggatgaggctatgggggctgagacgcagtagcggccctgcacttctggaggatgctcgaggcccggccccccaggacgcagggcagtgacgctgccggtgccgctgcggggcgggggctgcgggcgctgcttctctccctgaccgcagccgctgggatttggggctccatgggggagagatctgcttaccagcgcctggctgggggcgaggagggaccgcagaggctgggaggcggcagaatgcagccagaggagggcacaggctggctgctggagctgctgtccgaggtgcagctgcaacagtacttcctgcggctccgagatgacctcaacgtcacccgcctgtcccactttgagtacgtcaagaatgaggacctggagaagatcggcatgggtcggcctggccagcggcggctgtgggaggctgtgaagaggaggaaggccttgtgcaaacgcaagtcgtggatgagtaaggtgttcagtggaaagcgactggaggctgagttcccacctcatcactctcagagcaccttccggaagacctcgcccgcccctgggggcccagcaggggaggggcccctgcagagcctcacctgcctcattggggagaaggacctgcgcctcctggagaagctgggtgatggttcctttggcgtggtgcgcaggggcgagtgggacgcgccctcagggaagacggtgagtgtggctgtgaagtgcctgaagcccgatgtcctgagccagccagaagccatggacgacttcatccgggaggtcaatgccatgcactcgctcgaccaccgaaacctcatccgcctctacggggtggtgctcacgccgcccatgaagatggtgacagagctggcacctctgggatcgttgttggaccggctacgtaagcaccagggccacttcctcctggggactctgagccgctacgctgtgcaggtggctgagggcatgggctacctggagtccaagcgctttattcaccgtgacctggctgcccgcaatctgctgttggctacccgcgacctggtcaagatcggggactttgggctgatgcgagcactacctcagaatgacgaccattacgtcatgcaggaacatcgcaaggtgcccttcgcctggtgtgcccccgagagcctgaagacacgcaccttctcccatgccagcgacacctggatgttcggggtgacactgtgggaaatgttcacctacggccaggagccctggatcggcctcaacggcagtcagatcctgcataagatcgacaaggagggggagcggctgccccggcccgaggactgtccccaggacatctacaacgtcatggtccagtgctgggctcacaagccagaggacagacccacgtttgtggccctgcgggacttcctgctggaggcccagcccacagacatgcgggcccttcaggactttgaggaaccggacaagctgcacatccagatgaatgatgtcatcaccgtcatcgagggaagggccgagaactactggtggcgtggccagaacacacggacgctgtgtgtggggcccttccctcgcaacgtggtgacctccgtggccggcctgtcggcccaggacatcagccagcccctgcagaacagcttcatccacacagggcatggcgacagtgacccccgccactgctggggcttcccggacaggattgacgaactgtatctgggaaaccccatggacccccccgacctcctgagcgtggaactgagcacctcccggcccccccagcatctaggaggggtgaaaaaaccaacctatgaccctgtgagcgaggaccaagaccccttgtccagcgacttcaagaggctgggcctgcggaagccaggcctgccccgagggctgtggctggcgaagccctcggcgcgggtgccgggcaccaaggccagccgaggcagcggggctgaggtcacgctcatcgacttcggtgaggagcccgtggtcccggccctacggccctgcgcgccctccctggcgcagctggccatggacgcctgctccctgctggacgagaccccgcctcagagccccacgcgggcactgccccggcccctgcaccccacgcctgtggtggactgggacgcacgcccgctgccccccccgcccgcctatgacgacgtggcccaggatgaggatgactttgagatctgctccatcaacagcaccctcgtgggcgcgggggtccctgccgggcccagccagggccagaccaactacgcctttgtgcctgagcaggcgcggccgccccctcccctggaggacaacctgttcctcccgccccagggtgggggcaagccgcccagctccgcacagaccgcagagatcttccaggcgctacagcaggagtgcatgaggcaactgcaggctccggccggctccccggccccctctcccagcccggggggtgacgacaagccccaggtgcctcctcgggtacccatcccccctcggcccacgcgcccacacgtccagctgtctccagcccccccgggcgaggaggagaccagccagtggcctggacctgcttcccctccccgggtgcctccgcgggagcccctgtcccctcaaggctcgaggacacccagccccctggtaccacctggcagctccccgctgccaccccggctctcaagctcacctgggaagaccatgcccaccacccagagctttgcctcagaccccaagtacgccaccccccaggtgatccaggcccctggcccgcgggctggtccctgcatcctgcccatcgtccgggatggcaagaaggtcagcagcacccactattacttgctgcccgagcgaccatcctacctggagcgctaccagcgcttcctgcgtgaggcccagagccccgaggagcctacccccctgcctgtgcctctgctgctgcccccacccagcaccccagcccccgccgcccccacggccaccgtgcggccgatgccccaggctgccttggaccccaaggccaacttctccaccaacaacagcaacccaggggcccggccaccacccccgagggccactgctcggctgccacagaggggctgccctggcgatgggccagaggcgggccggccagcagacaagatccagatggccatggtgcatggggtgaccacagaggagtgccaggcggccctgcagtgccacggctggagcgtgcagagggctgcccagtatctgaaggtggagcagctcttcgggctgggtctgcggcccagaggggagtgccacaaagtgctggagatgttcgactggaacctggagcaggccggctgccaccttctgggctcctggggccctgcccaccacaagcgctgagatgcgtctggagagccagagggcctgcctgaaggaatcacctgagcctgtccgtccaccaggagtggggagatgcccccatccagtcctggaggacccgctgctcctgctgctcccggggatggagcaaggccaaggctgcgggaggctgggagccctgccctgcccatccctcctgcaccagcgctgtccctgcacactttggttcagtcccggtgcccctgccaagatgtggaaggggccgggtgaagacaggcttgagggctgccccagcaggctctgggtatgacctgcctctggccctggtcctgggcggggcctgtgggtggagtagtacccccaggccctgccctgggtgacagactgggaggaaaccaggctggacctgggcaggcgggatgtgttggccacagggagaggcggaccggcacccggtgggacctcctaggactgggccttcttccagggggcccctggcagcagctggggtgtcgggcagaatgtgacttgtggccttaccatggacttgaatgggacttggctggcctcaggatcttgtgcctggaaatagcctgaggtggctcaggaagcggagaaagggtgccagaccattctctggcggggaccagggcccaaggccccagggctggaaggagaccaaggggcagccgccctggagggacatcagtgcttcctcttccacccaattcccccacgcggttccatgttttcccaccagcctgttggcgaagttgctgctccggcattcagtacctgcttcttccagagaaataaagttagtttctattttatgtt

SEQ ID NO: 282555 - DNA, 522 bp, Artificial Sequence
  derived and/or modified sequence
atgactttctccaagctcctcatttgtcttgactttctcgatgtgctggagcgcatgggtgtagctctgctttttatctggaaacaggtggaattgctcttagggataagcttgtacagcttcttgaccggtatctcagatgcccccgtgacaggaatggtcaggatgccctttccggggccgggggagaggatggggggatcccaaacgtgcccctgcgaggcagctcttcccggcgaacagaggggcgctccggcactttccagatgggaccacggacttggagggccaaaaccccttcctcatccatattgtctcgcggatacatggggacggcaagtggcaccaggtagctgttttctagaggtctgtcccggcgctgcctgtgatctggccttgagtttcccctcttgcccaaagcgctgccaccagtccggcccccagcagctgggttgggctcaagagtcctgcgcgctggtactgctgtggctgatggtcatccacactctcgtgctgttttag

SEQ ID NO: 282556 - protein, 103 aa, Artificial Sequence
  derived and/or modified sequence
MDREERKTINQGQEDEMEIYGYNLSRWKLAIVSLGVICSGGFLLLLLYWMPEWRVKATCVRAAIKDCEVVLLRTTDEFKMWFCAKIRVLSLETYPVSSPKSMS

SEQ ID NO: 282557 - DNA, 312 bp, Artificial Sequence
  derived and/or modified sequence
atggacagagaggagagaaagaccatcaaccagggccaggaggacgagatggagatctacggctacaacctgagcagatggaagctggccatcgtgagcctgggcgtgatctgcagcggcggcttcctgctgctgctgctgtactggatgcccgagtggagagtgaaggccacctgcgtgagagccgccatcaaggactgcgaggtggtgctgctgagaaccaccgacgagttcaagatgtggttctgcgccaagatcagagtgctgagcctggagacctaccccgtgagcagccccaagagcatgagctag

SEQ ID NO: 282558 - DNA, 312 bp, Artificial Sequence
  derived and/or modified sequence
atggaccgcgaagagcggaaaacaattaatcagggtcaggaggacgaaatggagatctacggctacaacctatcgcgttggaagctcgccattgtgtcactcggggtcatctgttccggggggtttttgctgcttctactgtactggatgccggagtggagagtgaaagccacttgtgtccgcgctgcgatcaaggactgtgaggtggtgcttctccgaactactgatgagttcaagatgtggttctgtgctaaaatcagggtcctgtctcttgagacctaccctgtgtcaagcccaaaaagtatgagctag

SEQ ID NO: 282559 - DNA, 312 bp, Artificial Sequence
  derived and/or modified sequence
atggaccgggaggagaggaagaccatcaaccagggccaggaggatgagatggagatctacggctacaacctgagccgctggaagctggccatcgtgtccctgggcgtcatctgcagcggcggcttcctgctgctgctgctgtactggatgcctgagtggagggtgaaggccacctgtgtgcgggccgccatcaaggactgtgaggtggtgctgctgcggaccacagatgagttcaagatgtggttctgtgccaagatccgggtgctgagcctggagacctaccctgtgagcagccccaagtccatgtcctag

SEQ ID NO: 282560 - DNA, 312 bp, Artificial Sequence
  derived and/or modified sequence
atggaccgggaggagcggaagaccatcaaccagggccaggaggacgagatggaaatctatggctacaatctcagtcggtggaaactggctatcgtttcactcggcgtcatttgctccggcgggttcttgctgctacttctgtactggatgcccgagtggcgggttaaggcaacatgcgtgcgagctgcaattaaagactgcgaggtggtgctgctgaggaccacggacgaattcaagatgtggttttgcgccaaaatacgtgtacttagcctcgagacttatcctgtctcttctccaaagagtatgtcctag

SEQ ID NO: 282561 - DNA, 312 bp, Artificial Sequence
  derived and/or modified sequence
atggaccgtgaagaaagaaaaacgataaaccaaggacaagaagacgagatggagatctatggctataatttgtctcggtggaagctggccatcgtctccttaggagtgatatgttccgggggattcctgctcctgctgctgtactggatgccagagtggcgcgtaaaggccacctgcgtccgagccgctatcaaagactgcgaggttgtcttgctgcggaccaccgacgaattcaaaatgtggttctgtgctaagattcgcgtcctgagcttggaaacatatcctgtctctagccccaagtctatgtcatag
